United States Patent Application Publication US 2007/0083945 A1 - sequence listing, part 42

SEQ ID NO: 285147 - DNA, 391 bp, Glycine max
atcttcgtggggatggtgaatcttcttcagatggtggatggtacaatggtggagaggagggtattttaggtatttcaaaatgtctaaaaaattgagggatgtcaggggttaaaaaaaaggtgtaaatagtcatccctttttcgcttttcttttcctttccaccttttagtttatttttattcttaagtttcaatagtctaaatcaaacggacagatgctaaccatggcacataggagattcctcatgaccattttagaactcgtcactgttgatgatcaaagaagaaaaaagaagaactcgttatcgttgcttgcagatgttggcttacagttagtcaggattacttgttaggttagccgacaggtttgaatctttgaagttggaagtttg

SEQ ID NO: 285148 - DNA, 421 bp, Glycine max
  unsure (1)..(421): unsure at all n locations
tgtaattnttctcttaagagcaatcatagtagactctttcactctaaacatcttattaatatttttttctatttctctttctaaaacatatcatacatttattcttatcattagtccattaccattctcacttctgtctctttctctcactaattttcatctaaactctaaagtttaagtgaagatgtccagtgtccactaatcatttttaaattatcaatacaaaatgctagcaattacatttcctaggtggagagttgttctccattattcaataagaagttagtgctagatgtacatttttccatggactcgaaaactacaatacggattacgtgccttccgctgaaacgttctgggtgtaaacaaatgtcaagttccgttgtaaacaaatgtcaagttcattaatggttggttaaag

SEQ ID NO: 285149 - DNA, 393 bp, Glycine max
  unsure (1)..(393): unsure at all n locations
atgcgcgtatagaatggagttccatgagaaggaggtcttaaggggcatttcatcgaacaggcgatgggcgtcggaggaggagccggttttgacgtagaggttgaggaggttgtttgtgaggaagccgccgcggtagcaaaggccgtgtttgatgattcgagcgtgaatgcatcttccgatgaatgggtctcgtgatttgattgcagattggagaaggtacacgcatgcatcggaatgggagggacggtttgnggttggtgttagcatcaacacaagcacggcgcagtgtctgttcactctgttgtaatctcgtactcgtagttaacagaattgcataactaanacgtttcgcttctattcttagcccggtaccgaggagaggctggatcgaca

SEQ ID NO: 285150 - DNA, 420 bp, Glycine max
  unsure (1)..(420): unsure at all n locations
ggcatgatcaaactagcggcatgaatcccttttttacaaatctctcttttatttacccttaaacttaaattaaatctaaaatgaccgatgcaggattgattaaggagaaaaagtattctcaaaccttgaccctaggctgataattaaaataagaagtattaggcagttaattggtagttgagagttcttaattaaaatagaaattatgagaaaaatggtacatgtgaaatcataattcaagaaacttttattcatacatatctcttctttaatcaagtttctagcattgttgtcgggggactggtagtgaagttctcggataatttaatttgtgtaaatgaaataaaaagttgttcatatttatttttttattctatnntattttttattctatttttattagtttaaattctgaatttt

SEQ ID NO: 285151 - DNA, 317 bp, Glycine max
tgcttagtttgttatctgattgaaagccaaacaaagattggagctggggaaggtttcctctttgagaaaaaacgagtttcaaagtatgatcttgctaattgccttggacaatgacatataaacttagctttttatgagatggctactttatttcatgtgcttgtcggctattctacaattaataatatatagtggggcggtattttgtaagacatatatatactatatcaagtaaactttgtacgtaacatgaccacttccgatattatatagattaggtaatttgatgagatgtatgataagaggaataaatatat

SEQ ID NO: 285152 - DNA, 422 bp, Glycine max
tgtattcatagaacatttgatattagtattttgttattaaaaaatatttttggcccctaattatttccgataaaactatcaattctgcaacaaaatggctcatgtttgtaatgcaagaaaagtgatggataagatagaagaaaccgtgaatatttttggcattggaatagacattccacccatttcatctagataaagacaacgtggtctatcataactagttcccgtcaagaaaaaaagcacagcgccaaaaacgccaataaatccatgacatgggattctatttcacaacccagcttggtagagggtgtttcttcctccaccctataaaaataaaagagcgtcccttgtatattcccaaaaaaactaatgtaaaatgtaatttacatctaggattactctttacgaaatataataggatg

SEQ ID NO: 285153 - DNA, 286 bp, Glycine max
tatccggaagcataaaatgcatagcctggggtgcctaatgagtgagctaactcacattaattgcgatgagctcactgccctatttgcaataaacaaacctcgcaagacagctgcatttatgaatcgtgcaacgcgaaccccttgcaggcgcccggaccgtgcaaacaattctcatggttgacagcgtatcatcgaacatactgccatcatacgctgattatcacatatacacgacgtagaaccatgcgtataaaggcaccgataacggcctagataattaacgccg

SEQ ID NO: 285154 - DNA, 366 bp, Glycine max
  unsure (1)..(366): unsure at all n locations
ttgcttgnagaatggccagacatgatacatgtcagggtttggtttggttcaagggtaaaagggatgccccacattatttccatgacacaaatgcaaaaatgatgatttggaaactttatgcaaaactggtcatgcatgcacctatgcggacactcaagtgtcaaatttttatggtcatgtgatgctagggctcacgattcatttcctctattttagtcaacccaatgtttgcaaaatatgttcttttatccatttgtgcattcatccaagtccatttcgggcgtctgggaaaattttcacagcattcacccttcaagtgtatacacattctttcaaaaactagttatgatcagtgaatttttcttt

SEQ ID NO: 285155 - DNA, 412 bp, Glycine max
tggaggcattacctttatggatctaaattttagttgtttagtgatgataagagccttagatatttgtttgatcaaaaagagcttaacatgaggcagaggagatggttagagttccttaaggattacgattttgagcttagctatcacccaggtaaagccaatgtagtagttgatgccttaagtagaaaatcccttcaaatgtctgctttgatggttagagagttggatctcttacagcagtttagagacatgagtttggcatgtgagattacctctagtagcattaacttgggtatgttgagagtcaccagcgaactcttgagcgagatccgtgagggtcagaagtctgacccattcttgtcagctcagttagagtccatagttgcagggagaaagagtagtcttagagtgg

SEQ ID NO: 285156 - DNA, 395 bp, Glycine max
tgtctatgctttctttgccggaaaattgtcattttgtagacaaaaacccatatgaatcactggttcatacggatcaacaatccgtatgggttttttttattaaatttaattgggtttttttaatttttttttaaattataaaaatatgtttaaatattggctggtaattttttttaaaaaaaaataattattgctaatgccatacggatcagtggtttatacggattgtgaatccgtatgaaccatatggatcactaatccgtatggttttttttttgtttttttaatttaaaaaaatgcttaagttgatatttaaaactgtatttgcttttgtgccatacggatcattgatccgtatgatttttttataatattctttatgaaccatacggatc

SEQ ID NO: 285157 - DNA, 413 bp, Glycine max
tgagggagtggtgacttcccgttcccagtgttggtgcttacttgcctgccctactttgacatgtacaaatgattgtttgaggcattggatgtcattctacccttgaccctttttagtgtgctctactggagcactagaatgcggccccttcccagctcctcccaaatagttgggcgatggtaagggcgtttaaaattttgtgtcctttcttcaacatcaggcctagcgtgtcaatcttattcttttttcaaacgaagtttcctggaaagactagatgagtctccttgaacagcatgttcaagaagctgtttgagtttgattcaaacattgttcgtcgttttaaggaccactttattaaggtcctagctactagattcatggctaatggcatgccactgatgcttaacagggat

SEQ ID NO: 285158 - DNA, 364 bp, Glycine max
  unsure (1)..(364): unsure at all n locations
ttcttgaaggtaaactanatgccttggttaacctggtaacccatctggcctcgaatcaaaaatctacacctggcgccagactctgaggtttatgctcctctgccgaccaccacacaaacctttgcccttctatgcgacaatctaaagcaattgaatagcctgaagcttatgctgcaaacatctacaatagaccttggcataccctaatttcgtccggggattataatttgatgatatacaaccattgattgaccgcttcgagatgactggcaaccctttgatgcacaatatgtgaagtcccgagacgtgtccaaaatcaaaaaggaagcatgcttacccgatccgtgaaaattccgtgatgtga

SEQ ID NO: 285159 - DNA, 423 bp, Glycine max
  unsure (1)..(423): unsure at all n locations
gacactacacaacactcaagcttcagaccatagcaactcagaatctacgtattctttatccctcattttaatggactttcacggtttgagaagtgaaaatgacaatgggcgtgaattatagcgaactctcacctcacacaagtctataccatcagttaacttgctcaaactggattaacgcctaaaattctgccgaatcaaaatttgactcttcaacacccaattttaccctaaaaatggctcttgccttcactttggtcattcgtttatctctcttacacagcccaaactttctcataagatctaaatgacatttgcagctaagatgaactccctttaacctccaaataccactaaagtcagatttggcctttcaactctcaaagcctcactctnttatcactcataacaccatattctcac

SEQ ID NO: 285160 - DNA, 386 bp, Glycine max
atcttaacggagtcttaactatctaatctataaaggcattggtaaataacttgatatgtaaagaagttttctaaaacaacaatctattatgaaaaccaaaaagcgaaaattagtaccttcaacttttgactgttgtcgtagaattgcctttgctcttccggttcatcaattattacattttttatctgtgatgttttgtgccaatcctgtccaacctccttctggtattttttgcataattcaggacaaccaacaatttctaatgtttcaagatttgtgaggtgatgcatgttttgaggaagtaaaagcagctttggacaaccttgaattggaagttgtttgagacaaatcagagttgacagccattcaggaatctcctcaagatt

SEQ ID NO: 285161 - DNA, 417 bp, Glycine max
tgcatgatttacatctccctctttctcaatctaattcttcttgatatcatcaaaatcttcatgatttacattctccccctttttgatgatgacaaccacctgtaggttaggagcaacaacaaagaaaatatctatttgcatatagtttactcccccttggttttacaatgattgcttatatgagacaattgaagatttcatatttttcatatataaaaagttgtctcataaaacaatagataatttttcttactattttatcttttatctttctctccccctttgtcaacatcaaaaacaaatcatgaatagaaaggagaaagatgttaccacttgttgcaatgtatgagaataagataaggcattaaaacaatcattcaatattaatcaagcaaaaacaagtacaataacacatca

SEQ ID NO: 285162 - DNA, 379 bp, Glycine max
tgctttaaataggctctaaaattgcgacatcgcgcttagtgccaccctcactcttagtgcgagtaagtggatttgggcttggcgccagtcgtgcgcaaagcctggcaagagacaaatgcctcgcttagcaaactgatctcgcgtttagcacgcggccttgatccttgtgctcttctagattcccttatcacgctaagcacgctgaagctgcgcttagtagtggatgcgcactgagcccaaatggtgagttgagcgcaactgctccctttagcacttcaagattttagcctcttttgacctgaaattgtgtaaattttatcattaaatcacttgggagatactctagagacaactataacaataaaacaagatttattta

SEQ ID NO: 285163 - DNA, 408 bp, Glycine max
  unsure (1)..(408): unsure at all n locations
tgtctcagcgtttatgcgagacggtgaccaacatgctagctatcatcgccaagtaccaagaagagttaggtctagccgcggcccacgagcataggattgcggacgaatatgcccaagtatacgcggaaaaagaggctagaggaagggtgatcgactctttacaccaagaggcaaccatgtggatggatcggtttgctcttaccttgaacgggagtcaagaacttccccgattgttagccaaggccaaggcgatggcagacacctactccgcccccgaagagattcatgggcttctcggctattgtcagcatatgatagacttaatggcccacataattagaaatcgttaggaaacttgtatggtctctaagaccttgactaaatacgacttcctttntgaaataaaat

SEQ ID NO: 285164 - DNA, 281 bp, Glycine max
tatcttctttgttagacctcgatcggtcatctttccaggccgaggtcgaccgtcatttttttcgatccatttcggtgaataatatttttttgccgagatgggctaatgatttcctgtccgaataaatgggaaaatgccagattcggtcgaaacgaaaagtcggttgagctcacacaaaaaaacctatccgacctacattataaattttttatgcatcaccaaaacaagaaaacttcctgtgccgtaaaaaaaaaaaaagaattcataagacagagcgcgtt

SEQ ID NO: 285165 - DNA, 398 bp, Glycine max
  unsure (1)..(398): unsure at all n locations
tcaccggatgacgccgatcgaacatttcctaatcgtcgtcatgcaaatttcgttcagggattgaattgaaaactcgttaggcgacatctgtcgtgaagtagcgaccgatatttttcagccgacattgcacaattctttttagaatagctcgctggtcgataatggtctttttacggcagagtaagttttcttgttttggtgttgcataaaaaagttacaatgtacttcggctaggtttttcgtgcgagttcaaccgacattttgtttcggccaggataacattagcccacctctgcaaaaaaaaaatatttgctaaccgtcttcatgcatatttcattcaacgattgaatagaanactcaatagccgacaacggtcgtgaaatagccccgactggtat

SEQ ID NO: 285166 - DNA, 368 bp, Glycine max
  unsure (1)..(368): unsure at all n locations
atgcttctatataagctgaacccatttatcaataaacacaagttgagttttattcagaaaattagagtttatctcttttatcttagtgagagtgattctcctaaattcttgagtgattcaagaacacccttgctgtatcaaaggactttcacaacctttgtgtgttgccctcgctggaaagagtgattctttccttcctttcatcttcacccttggtctttcaaaccacaattccagaaaatccacctctgcccagaattatctcgtggccataactcccattntacgcactcaaattaagtgattcttgagcctaaattgaatttcaaaacgagacctttcacctcgttttggaatcacctcatttg

SEQ ID NO: 285167 - DNA, 418 bp, Glycine max
tctcgatatattatgcacctgaatcagacttccgtttgaaaagttatgaccatttgaatttcttgagagcttccgttgggcaattttgagcgtctcgatatattatgcgcctgaattgaacttccgtgtgattagttatgaccatttgaatttctcaacagctttcgttgttcaatttcgagcgtctcggtatattatgcgtcagaatcggacttccgtgtgacaagttatgaccatttgaatttctcgagagcttccgttgttcaatttcaagcttctcgatatattatgcaccttaatcagacttccgtgtgaaaagttatgaccatttgaatttctccagagcttccgctgtttaatttcaagcttctcgatatattatgcacctgaatcagacttccgtgtgataagttatgac

SEQ ID NO: 285168 - DNA, 380 bp, Glycine max
  unsure (1)..(380): unsure at all n locations
atcttctctgctcatgctgggaacgcctctagttcaacacccgtgcagcctaaggcacccacccagagggaagctccccaagttccaactccgaacacggctcgaccggccggtaattccaacacgacaaggaacttccctccgaggccattgccggaattcaccccgctcccgatgacgtacgaagatcttctaccatccctcatcgccaatcatttggccgtggtaactcccggaagggtcctcgaaccccctttcccgaagtggtatgaccctaatgcaacttgcaagtaccatggaggtgccccggngcattccgtcgaaaaatgcttggcccttatatacaaggtccaacatctaatggatgccggatggctgac

SEQ ID NO: 285169 - DNA, 420 bp, Glycine max
tctggtgactgggaagcacgttattctgttgttttccatgatcggttccttcgccaagtatgtgtatatgtgtatatgtgtattatgttcattgttctttgttattgtttatattttgttttgtgcagaagaaaaaaagaaggaatggagacgagagtcgtcatcacagaaaagggcaggacggacgaaatcagtgtcctatctttgctttcctcttatctccgatgagaggtaagtaaagaggggcaactgtcataccctaattttgtccgtggattattacttgatgacatgcaataaatgaagtcccgagacgtctcagaaatcctaaatgaagcaggcttgtgttatccgtgaaattacgtaaggtggcggaaatcgaaaagaggtgtttttgtgcaatccgtgagtatttataac

SEQ ID NO: 285170 - DNA, 388 bp, Glycine max
tgcttgggtgatgttgcgcgtactgatgggtaccatgaggtgtttgttggggtttgacccatgcgggtgttgaagagacggcatgggcatctccttccttcctttttgcccctgttgccccgattcttttggcgttcacgtttgtggaggaaacgtaatcaaactttcctctcttcaatccaacctcgattctttccccggcaaacaccagatccgcaaagctggacggcatgtaacccactagcttctcatagtagaacactggcagagtgtctaccatcatggtgatcatctctctctcaaccatgggaggagctacttgtgccgccaaatccctccattgctgcgcatattctttaaaggtttcaccctctttcttaacatattc

SEQ ID NO: 285171 - DNA, 440 bp, Glycine max
  unsure (1)..(440): unsure at all n locations
tatagacaactcaagcttgctttgaaaacttccattcaccctaggccttacatagctacaatggtttagtgagaatggagagctaattgtagatagacaagttttgatatgcttctccattggaaaatatgttgatgagatactatttgatgtagtccctatggaggctagccatctcttacttggaaggctttggcagtatgatagggatgctgtccacaatggtgtcacaaacaaattttcatttgtacataaagggcaaaaggttacccttaaacctttgtctccaagtgaggtttgtgaggatcaaataanaatgagagtgaaaagagaacaagagagaaaagaagagaaaaataaaattgatgaaaagagagagaaacaagaaaggagagataagaaagaaaatagtggaggtaaaaaaaggagtgaaactgaaa

SEQ ID NO: 285172 - DNA, 393 bp, Glycine max
  unsure (1)..(393): unsure at all n locations
ttcttcaatcaatttcttcaaatgattttagtcaattcaattatctaataacctttgcacatataaatttcatgatgagaagtcacctacacgtaagaaaatataaagcttgtgaaataaaagtgtcaatatgtgtagtgtatacactggggcgtcgaaaatttaaagaaaagaatcaacaagattgaaaggctaatatatcctctataacaaaatcacaaccacacaatttttatgctccttataaagaatcctaacgcctaaggtacacactcaacacaagaacacatcaattttacaacaaattcgcatcgaaacaccaattggtccatcaaacacactanatccgtgattaaaacaaaacaacacatagttgaacttcataaaacattc

SEQ ID NO: 285173 - DNA, 419 bp, Glycine max
  unsure (1)..(419): unsure at all n locations
tcttgagaagttcttttggtaaatctcactagatgttttgttaaaatccactatctcattggagacatcgatattgaagtagtcaatgaatcttgaggcaagtacaacataaggaaatttgtagtccactaactgatgactttttaacatgatgtcttctatcaaaagtacccaattcatcttgatacctgattttagaccatagacagtctgcagatcatcgtccattacctaagcgtgattacttaacctctgantcanaatgtaggtaatgaggtaactaggagattcctcaagntccttgctgggtcaagaagcattcccctataggtctgcatcttgttgtacccatcagctgtttcatcgaacttgtggactccacccatgtccagaccgactacttccttccatacttcaat

SEQ ID NO: 285174 - DNA, 401 bp, Glycine max
  unsure (1)..(401): unsure at all n locations
tgcattctttatctcatagtaaattaagcataatgaatttatgcataattccattgaagtgctggtagctaagatggaaaacatggcagtccccaaaaagattctaaagattcaaattgctcaatgtagttcctctttgagggaccatgaggtgaacatagagaagcttgacacaactcttagaggaagtgtccaaatttgtaccgcacagtccttctcatctaggtaaattggaaaagataaggaccttgattaaaggtgaacatcaaaagaaaaggtaaaatccaccagtaaaacttaaaccaccttcctcactgctcatgtttgactntcttggacatgactatattgttgataccattttggactaaaactaanactaagagaaaacatagagaatg

SEQ ID NO: 285175 - DNA, 411 bp, Glycine max
  unsure (1)..(411): unsure at all n locations
tgtccttggttgtgtttcgatagaagtggatgtgcggcttgcttatgacacacatgccattatcaggaaggtatttgattatatgcttcattgaccactgataatgttaatatttcattgctttgcatctagaaagtgagattgtgatgttgaatacatttgtagtttcaatgtattttatccttggagaaatatatataataaagcatgccaaatagagcatctatcttgagtaaagtaaccaagaaacatactcattgcaaaatttatttgtttttgttggcatcttaatgaaatttcaccaattaatgcatgttaaaaataataggtactataagttgctaattcattatgtccaccangcttttggttgctaattcatttatgtgttgttgcaaacttactcaaaag

SEQ ID NO: 285176 - DNA, 479 bp, Glycine max
  unsure (1)..(479): unsure at all n locations
tacccgaacgcgantanntacgcacaaaacaaaccannnannnnnngcccatcgttggctcacatcangcaaagagaccgagccggaccggaacttaacgcagctgatttctgcttcttaccatctcancatgagactcatatatgttggctcacctgatacacaatggcaatcaacccatacacaaacacgcactgggagtgagctaccacatgtcgtgctaaaagacggactagcgacatcacatgcaaagtactatactgatttatagcatatctcaacgtagttcaatacacgtcactccaccactttatcatttagaatggatatgtcaattatcactcacattacacatgaatcatacactcgagtgatacatatatcactcaccgattcacttatacagtcacaggcatatgataatatatcgaactaatctatatgcatggtacatgtcaggaaacacactaacacgttgg

SEQ ID NO: 285177 - DNA, 238 bp, Glycine max
gggacaaccatccatggagggtagtgatactcgctaacagaaacgtgtcgctcggcatcagagtccagcacaaggcataacagccgacgacatctgggccaaggacgcagaacaaaaccaacgggaggggcaaacacgccactacaagaaaaatgctggaccctgcccacctacgcggacacatggcaagaaaatccgcaccccggggcacccgcccaagcccgtcccgactctgacg

SEQ ID NO: 285178 - DNA, 383 bp, Glycine max
  unsure (1)..(383): unsure at all n locations
ttgcttgcacaacaaataactaaatatgtttttggtacaaaataaagtaactaactaactaacttccactaatatatacagttactactccgaatgaaggtatgaaccttgattaggctcatctaatctacctaatttaactaattacacaaagccatgcccaaattcgcagcccaattattcaagtgtagttttgacttccaagcccaattcgacaaaattgaagctttccagggactactcacattgagcatttggagttttgtagtattctataggccctacacaaggcagataggtcaagtaagcataaaaatccaaaaataagccacaattatcaattaagctcaatcatcttcctaagacgaanactaagctaaagt

SEQ ID NO: 285179 - DNA, 418 bp, Glycine max
  unsure (1)..(418): unsure at all n locations
ntcataccctgtgttaggaagattcgataaattttactcagatagggaagctcagatgatagaaggagaagattctaaatctgatgaagatttaatcaaggcaaaggatgccactaagtaggtgaagtttgatagttgcacaaataaaatcattagtgatcataagcagtttgaagcacctaatgagactgatcaagatcttcaaattcaccctcaacatcagaatttagcaccagttgaggggactaattggacaagtcaaaactatccaaagcagcccaaaacaacaacacccaaaaggcataaagacaaatcaaagctcctgaaagatatggctttgatatactgtctcatgcactacaagtagcaaaagaaattgattcattcgaaccaaccacttatcagaaagtaatttctt

SEQ ID NO: 285180 - DNA, 378 bp, Glycine max
tttctttggggctaaaaagctatataacagcaccaaggttctagttcagctctctctcctctctctcttctatttttcgctcttagcttgagtctctcttctctttctcttttattatcgttccttacaattccatttccgacgttgagtcttatcaatacaatttcgatctctattagattaatggcaggctaagtccgcaacgttgatctctctggaggatcaagcacagctctctttgaggttctattatcactggtacattctgttcagtttttcctcttcactaatcactctgaatttgtggctattaatctatgcatgcttagtgcccgattaattgtctctgcgcataattcacgtacgttcatgcttaat

SEQ ID NO: 285181 - DNA, 418 bp, Glycine max
  unsure (1)..(418): unsure at all n locations
tagactctgtttcatgaagaagaggatcatctatttgagggaagagtcgcaagtttgagaataggatttaagaaactctcacgtgaaagagaggagaaatataaagaaaatacgcgaatgttctgaaagattcttctatcaagaagagaatttcaatttctcactttctagaaggaaattgaaattccacatttttagttgtttaaaattatgttttaaaattccaaaatttaaattcttcataacacaccatccccacaatggaatttagattatagaaagtgaaattctctgatcaataactgtccacaattaaaattctttatccaaaggtactctaaggcttactttacaccttcctatgtatgttgaactcactaggcttgtttaccacactnttagaagttcaatattcact

SEQ ID NO: 285182 - DNA, 359 bp, Glycine max
ttcttctttgttagacctcgatcggtcatctttccaggccgaggtcgaccgtcatttttttcgatccatttcggtgaataatatttttttgccgagatgggctaatgttttcctggccgaataaatgggaaaatgccagtttcggccgaaacgaaaagtcggttgagctcgcacaaaataacctagccgacctacattttaaattttttatgcaacaccaaaacaagataacttcctgtgccgtacaaaaaaaaaaaacattacatgacatcgagcgttttgaaaaacaaaattgcgcaacgtcggctgtaaatatcagtcggggctttttcacgaccgatgtcggctattgagttttc

SEQ ID NO: 285183 - DNA, 418 bp, Glycine max
  unsure (1)..(418): unsure at all n locations
agcaatgncccttgatatattngagggactcatgttcactatgattgacaaattccttgggataaaggtagtgttgccatgttttcaaagcccgtactaaggcatacaactccttatcataagttgaatagttaagggtaggaccacttaacttttcactaaaataagcaattggatggccttcttgcatcaacacagccccaatcccaacatttgaagcatcacactcaatttcaaaagatttttgaaagttnggcaacgcaagtatggaggcattagatagcttttgnnnaagaacattgaaagcttcttcttgtttctctccccatttgaaaccagcatttttcttgagcacttcattgagaggtgctaccaatgtgctaaaatccttcacaaatcgtctataaaaacttgctaa

SEQ ID NO: 285184 - DNA, 236 bp, Glycine max
gatctaccaccggcagcggaatatcagcatactatcatggccaagattatcagcactatgatttctagcgcgagaactcggacatattactaggaaatgtgaacgatttagtattgcttttatttgcacaaaatgagtgaacaaataggaagtgtgcacaatgactatatggggcgtatataattgatctaatcacgtatcctcgcttatgaaaggatgagatattaccatgaatg

SEQ ID NO: 285185 - DNA, 328 bp, Glycine max
  unsure (1)..(328): unsure at all n locations
cacacatacaaacgcaagctttgagtgatcgattacactagtgaggcaatttatttccagggatatgccctgaaggaaggagaggatgttactctttaatacgttgttgactcttgcatattggtggtaggaaatccccattaaaggacctcatctgtgcggacctattcgccctacatgaanagcctataaaagcactgctatgaaaagcttttgcatatactattccaaacaatcttattaaatccttaacaagcctcgagacgctgtgaactgcatcctcggattggtgccaagaactatacaaaagaagctggttttcaaaaca

SEQ ID NO: 285186 - DNA, 376 bp, Glycine max
tgctttgaaggtgcgtagcccaccatcttttcatagtagagtatcgataatgtgtctaccatcacgatcatcgtctccctttccatcattgggggtaccacctgggccgccagatccctccaccttttgggcgtgttctttgaaagatccgtccccctttttgcaaatgttctgtagttgcatcctatccggaaccatatcaaaattgtactgatactgcctaacaaaggcaaccattatgtccttccaagaatggactcgggaagattccaagttagtgtaccaggtaacagctaccccagtaagactctcttggaaggaatgtatcagcaattcctcatcttttgcgtattccaccatcttctgactatacatc

SEQ ID NO: 285187 - DNA, 402 bp, Glycine max
tcagaaaactatagaagataatgctacggcggtcgtttccaatacaactagggaagcggaaccggttctacagcccgcaataaacttgggccgagacagaaacatgatggttttcggtcggaggtatagtcctcaagcctacccttatggtttgcctccggacttcaccccccctaccgctccagacgatttgagccaagcccctacctttgaggggcaactccctcctcatgccgactatcctctgcaagaagatgatgaaggagatgcccatctaggccctctacttcccctcaaggatccggccccccatgaattgcctcaaccaaacatagtccgccacgtcccgtctccacccgcacccgttaacgagttatttccctcggcaacctacccgtctta

SEQ ID NO: 285188 - DNA, 444 bp, Glycine max
  unsure (1)..(444): unsure at all n locations
agataataattgattatacgataaattatgtaaatnaaannannaaaaaagaganattaaccttgattcaggcttgaaacatagggaaggagngganngggatnttaagtttttgatgtatgatgttatattttagaggagtagatattgatgtattgtggngatatatatataaaaattgtatgaagataangttataaaaaagtatattagtaatgaagaggagaaatagagaaaaggagaagtggtagatagaatatatgatgagtgaagaagagaaggaaagtaaaagaaagagagtataatgaaggaataaaaaatgttgaggtaagatgtaatatggaaggtagaagggaggatgaaaaaaaatagtgaagtaagaaaaaagaaaggaggtagttagaaaaaaggataaagagtgaaaaatgtagaaaagataggaag

SEQ ID NO: 285189 - DNA, 312 bp, Glycine max
  unsure (1)..(312): unsure at all n locations
ctatcaaatattaagtgagcccactgtcattggcaaatgaaactaaacataaatcgcacaccaaaattttcagcacaaggtaattatattgatagatgtggcacattacatgtaaaatatctattaagcatgaaaatggtgcccaacaatagaaaatcttccnttnnnccctcnncctcatatgggattaggtgatggagtggtncngaggccttaaaccatggtaaacaggcttgaggtggaccatcttagataaagaaataaacctgtgcgaaaacaacatacccatgtgaataaaacaacctataattg

SEQ ID NO: 285190 - DNA, 374 bp, Glycine max
ttcttgactaggcggattgtttttagccttaatttcgctttagttattagtcaattcaattaagaatgagaaatcccaaagagaaaacgtccgattgatttttcgctttactttactcaaaggtattttttttattattatattattattttacctctttttttatttccaacgtgcttacggcacgaccgaacggtcggaattcattttaaccaaaattaacggatgatacaatttaaatgatcggtggaaatttattttatttttagattaggcgagaaatgacttaaataaatggcttaagcacatcaaaagggggtataaaaagcaaatgaaaacgagaataaaaatacatgtgtcgcaacctacccttc

SEQ ID NO: 285191 - DNA, 419 bp, Glycine max
tatcataatcgattgcactgttgttttttagacaatgattgatttattcatgagtctgtgttttaattgattaccatgtgatatattcgattacttctatttctataagtatttcagaagtgatcaagaacactttaatggactacattgaggatctaatcgattacattgtgcttgagaggtttccagtttttgggatgaacactttaatcgattgataagataatataattaactacttcattgaaataatcgattacattgtatatttaatcgattataggcagttataattgttttctctataaatagtcaccttgtgttctcacttctaagtacaagttcattaagtgtgaaattatatgagctgaaataattgaaagaatagaagaagagtgcttagaaacagtgactcaaaa

SEQ ID NO: 285192 - DNA, 366 bp, Glycine max
tgctttatataggttctgaaatggcgatgttatgcttagcgccaccctcgcgctttgcgtgagtaagtgggtttgggcttagcgccagtcttgcactgagcctggctaatgacacctgctgcgcttaacacattgatctcgcgcttagcacgcggccttgatgctgatgctttgccagattctccttcgcgctaagcatgctaaagctacgcttagcggtggatgtgcgcttagcccaactgctgagcttagtccaacgaccacttttgcacttcaaaacttagcctctttttcacctgaaaatgcacatatttcatcattaaatccaatggaaatgttctggagacatctttaaccataaaagaa

SEQ ID NO: 285193 - DNA, 421 bp, Glycine max
tgaagaatttttggcttttacatgcccgactcccttgtgtgacatttgtattggttgttatcttggttgttgcatattagtacatttgatatctatattgcatcatgcatcatcatggttagtgagaagaaaagtttctaagttagaaaagttacttcaaaggaaaaaattatttgttttaatcaattacagagttgtcgtaatcgaatacaagaagctatctaaagcttaaagagttgagtctcgtatcgatttaatcgattacagtagtctcataatcgattacactattgtttgagtcaatgactgatttattcaagagtctttggtttaatcgattaccaagtggattaatcgattacttctttctcgtttggttatgaagatctttttcttggaagtgagttgtatcttttgagtt

SEQ ID NO: 285194 - DNA, 370 bp, Glycine max
  unsure (1)..(370): unsure at all n locations
atcttgaatgcatgtaacccgccatcttctcatagtaggacaccgttaatgtgtctactatcatcattatcaactccctctccatgggggcactacttgagctgccatatccttccacctttgggcataccctatgaaagattcgtgctcccttttacacaagttctgtagttgtgtcctatccggagccatatcagaattgtactgatactgcctaatgaaggaaaccattaggtctttccaagaatggacttgggaaggctccagattagtgtaccaagtgacagcttccctagtaaggctttcctggaaaaaatgcatcaacaacttttcatcttttgtgtatgccttcattntcctccagtacagc

SEQ ID NO: 285195 - DNA, 417 bp, Glycine max
  unsure (1)..(417): unsure at all n locations
ntataagcgctggtcggagggacgaaggtcaagtggtcgtgatatactttgatggtgttccgggtacattggatttggtacgaccatgccctcctgatttccagctgggaaattggcgagtggaagaacgtcccggcatttacgcgacgagcataatgtaaacctttacggttttaaaagctctatagttgggcctaggctttagagtttttcttttgttaaggctttgtgtcttttgtttttgaatttataatacaaggatctttcttcatctgtgcctacgtgtctacccattcttatccatttgcatgtttacttctttatttctgaaacggcagatccgatgacgagtcccccgaaggtactaatacctgggacccgcctatcaacttcgagcaagaaacgaatcanacggaa

SEQ ID NO: 285196 - DNA, 377 bp, Glycine max
ttctttctagtgaacccaaaaatggtgaaatctttggagtctatgaaatcatagcgagctggtttaaaggtgttgatcaaacccctcacttgctcaccaagacatcggatttggtgtgtgctaccttaaactataggtggccaattctacatctgaagctagatgatgtatgagtgtctaatgttgatgattatagatggcaattaccaagggtgtcaatggctgagaaatgcttattaatgttgaaacttgaaagacaatttcacctttgatatatgaagtgatgagtcacaagtgaacatagatcttgtcaaatgcagcttctaggaactataggttggtttggttatatattagtccaccaaatcttataatgt

SEQ ID NO: 285197 - DNA, 419 bp, Glycine max
  unsure (1)..(419): unsure at all n locations
tgaactccttatcctaaacttctgcaaaaagcttttaatgttgccagagcttccttcaagcatgctacgattggatgcaagcaattgcacttcattggaaacttccaaattcaatccatctaagccgtgcagtctcttcgcatcacctacaaaatgacatttactaagaaaattggaggccttcttgaagtttgtaccctagttttccccacactctcaagattgtctgtgtataacaatcatctatttttgctgctcattcaacattacattatgtgtgtattgttacaacatacaggaactccgtcttccaaagcaagatntgacatggagtgaaatgccatcatggtctgtccctccaaaatatgtagtcccacctgagatgcaccaacatgaagctgaatgctgcttgtttagac

SEQ ID NO: 285198 - DNA, 392 bp, Glycine max
atcttatcaccaaaacacgtattattagctaagtgctaatcaagagcgtttatacatcaaatcaacagcgtttagggtcagtttcttttagaataaaaaatttaaaaaaataagtgatttacatctagcatgtaaatcaattagtggcagaattattctaatttaattattaattgtaaatttaagtcttttatatatatagttgtattaaataattaaaagataaatttttatcatctcacacgtgatcatattcaatttaaataggattgtgtctagttgcatgtaatatatatatttttttagtgtctgattattctgaaattttgcaacaaacacataaaaatctttttttaacatataaaaaccttaattattttttacaataaatg

SEQ ID NO: 285199 - DNA, 363 bp, Glycine max
  unsure (1)..(363): unsure at all n locations
ttgctttgatggtgtcgagaagaaatcacatgtttgtcatcatcaaaaagggggagaatgtgaatgtatgtatacatgattttgatgatgtcaaagaagaatctaacaaggctgcttcaaatgataagcatttgcttcaagaataattcaagattgcttcaacaaacaaagccttgtttcaagattcactaaagaccaagccttgccttaaaacaaagtgctttcaagacatgcaaggctctggtaatcgattaccaggaagtgtaatcgattactagaagacagggttgagaaatagctggtgaaaaatgttttgaatntgaattttcaacatgtaatcgattaccatatgtctgtaatcga

SEQ ID NO: 285200 - DNA, 416 bp, Glycine max
tgtccactactatcttgaacttagtgttggatgttttcacacaaagacacctacccttagcccaatctagaaaaccctattctagcatgcctttagaaattcatgcatacactaacaacatgtaaaacacacaatgttaacaacttacttttaccatgaatgcttcaaaaaatgaagtttagaaggtgtgagtcgcacaaacttattcttagaactttttcttttctcttaaaagtgagaacataaggtcattatttatagagaaaatagttataaccgctgtaatcgattatatcaaagaagtaatcgattagattatcattttaatcgattaatgtgttcttcccaacattggaaagctttcaagaacaatataattgattagattattcatgtaatcgattgaagtgttcttg

SEQ ID NO: 285201 - DNA, 380 bp, Glycine max
  unsure (1)..(380): unsure at all n locations
ttcttcctgatgatcattcatgtactttcttgacctgcaccggagaagagcaaaaaatatgataaaagagagagaaaaacagaaagaaaaaaactagaatatatgcttggaggaattactttaaaaaataattaaatgtaggtttaaatattcttaaaaatatgagctttttttagcttttgtaaaaaaaattaattaaaatatttaaaaataaaaatgaaaacaggtgcattaattccaatttattattatttatcattattaaaaaaagttagatattttaaaatagctcagtgtaaataattctaaaaataattaatattttttaaaattntaaatgaacaaacaaataaaagaaattcttaaataatatacaaatg

SEQ ID NO: 285202 - DNA, 413 bp, Glycine max
  unsure (1)..(413): unsure at all n locations
nttcctattgttctgagcaatggaccaaaactgattaattcatttgctactgttcctaatgggtgttccattccttacccttgcctgaaagttcgttttgtcaagggagagggagagactttcctgaatgactacactgaggattttcatactgttgacccattttcttctgtgcattccattgaaagatatctatggccaaaggtcagtgcaaaaggcacagagcatgctagatcgtcatctgtccaagtagtgtcgcaacctgaaagtccttctccccttcaatcaccatcaaatgcaagttcagtcccagttgaaattcccgtaattttaaggacttctgacatgatgacagatctccctgaaacacaggtgatatttgtatccataatntattgattgcagaactatct

SEQ ID NO: 285203 - DNA, 391 bp, Glycine max
ttcttctaagattaaaaataatatattcattattcaatattttcaaaaaattataaaaacaaaattattaatctaaaaaagaaaaattaaaaaaatattttgaaaacaaaataatttaaaattactaagagaaagagcaactaagattttgacagaaaaaatgaatgcaaaaataacacaattaaaattaaaaaataataaccattaatgtcttacatttttatgcataaacatatatattacttttaatttaaaaataaaaatattttagtcatttgtgtgaaattaaattacttacaacaaataaatttaattcaattttttaatagtaaaactctttatatatatatatatatatatatatatatatatatatatatatatatatata

SEQ ID NO: 285204 - DNA, 416 bp, Glycine max
  unsure (1)..(416): unsure at all n locations
ntatgcttaagtacgtatggcaaaacttcattactgttgttcaagacatacaagcgagcttgtaacaaatgttctacacttggagtgatcacatgcagtcctcttaaacccttaccacccactctgtcatcatgccgagactcaggaaggccaataggtttagccttctctaagtattctgaacaaaattcaatggcttcttctgcaatgtacctctcaacaatagatgcttctggacgatatagattctttttatacccttttaagattttcatgtatcgttcaaccaggtacatccaccatagataaacaggaccacaacatttgatttctctgaccagatgcacaatcaagtgaatcatgatgtcaaagaaagcagggggaaaatacatctccgactggcacagtataattgc

SEQ ID NO: 285205 - DNA, 383 bp, Glycine max
  unsure (1)..(383): unsure at all n locations
ttcttgagggggagtgttaaagntgttgtttaataatgttttatatttctagcttgttgtagaagctcatagaagctgtcctgtaatctgtctccataggctaggctgtagtcttcatcatgaactattttttgtactatctgttaattctctctctctctctctctcacacacacacatatatacatctctcagcaaactaaggctgaggatcctttttgtgtgcatattttcatactcaaacatttctagtgtaactacagcacaaaactttattccattgtttggtgagaggggtccagttaaagggaaagaacccgtacttatatcttctgatcattctactaataattatatctgctgatcattctactaataatact

SEQ ID NO: 285206 - DNA, 407 bp, Glycine max
  unsure (1)..(407): unsure at all n locations
ntaaacaagggttagaaatggcatttctcattatataaatataaataccagtttaatttcattaaatacaataaatatgcgtttaaatttagctaaacatattcacaagattgataaccaaaatcaccaactctctatacaggacattctagtggtgatgacctaaaaaaaaattagaaaacactcagatccaaccttgcattacaaaaataacatggtctctttacacatcaaaccttctcaagaacacaaggtttgcttcctcagcatttccctcaacctactcaaagatattcatcctagttgagtcaagtcatttttataagcagtcacactcagcttcctctatgtacaattctctgaatggagtntaagcaacaacagtgattctagaattctggcaatcc

SEQ ID NO: 285207 - DNA, 384 bp, Glycine max
  unsure (1)..(384): unsure at all n locations
atctttgagccaattcaaacgacaataactttttactcggatgtctgattgagtcccgtgatataacgagacgctcgaaattgaatgttgaagctctgagcgaattcaaacgacaataactttttactcggatgtctgattgaggcccgtaatatatcgagacgctcgaaattgaatgttgaagctctgagccaattcaaacgacaataactttttactcggatgtctgattgactctcgtcacatatcgagacgctcgaaattgaatgttgaagctctgagcgaattcaaacgacaataactttntactcggatgtctgattgaggcccgtaatatatcgagacgctcgaaattgaatgttgaagctctgagccaattcaaac

SEQ ID NO: 285208 - DNA, 385 bp, Glycine max
taaacattcaacttcgagcgtctcgatatattactgtagtctcaatcaaacatccgagaaaaaagttattgtcgtttgaattggctcagagcttcaacattcaatttcgagcgtctcgatatatgacaggactcaatcagacatccgagtaaaaagttattgtcgtttgaattagctcagagcttcaacattcaatttcgagcgtctcgatatatcacgggactatatcatacatccgagtaaaaagttattgtcgtttgaattggctcagagcttaaacattcaactgcgagcgtctcgatatatgacgagtctcaatcagacatccgagaaaaaagttattgtcgtatgaattggctcagaggttccacattcaatttcgagc

SEQ ID NO: 285209 - DNA, 354 bp, Glycine max
  unsure (1)..(354): unsure at all n locations
ttgctntgaacaatatatttgtccttcatttaactgtctttgggcttggcggccacactcaacaaagtattttcgacacctactgtacgttgatttgaccaacgttgatatgggaatgatgcgacaatccttcaaaaccttattgatacattctgagaggttggttgtcatgtggccataccgacgtccttctctatcataagccatcgtccatttttcttttgaaatgcgatcaatccatgttgctatggctggactcagttcacgaaatatttctagattttgatcaaaaatgtgcttgcaaggagtataggctgcatcaaattagttatgaataagaattctaagtatata

SEQ ID NO: 285210 - DNA, 409 bp, Glycine max
tctaatgttgctttcgtagagattttacagaagttgtcaatcccaaacatgttgtcatcaattagtcttgcttcaaacaatttccaataagcaaaaaagttcaaaatctcataaatgaaaatatctatagatttggaataagactttccaaaatgaactgaaaatcaaaacaacttacgagcacaagcacacactatagagcttatacgctcttgaaaatcaaattacttttagtctgcaaaagattaacacacagtgactatagattaatttcttggttgaaatatagataattccttatagagtagttcaaaatcttgcttggctatagattaattcattgagaatgaattgtgtggttcagtaatggaatttgtgcatcaacatttacagatcatggttagaacta

SEQ ID NO: 285211 - DNA, 379 bp, Glycine max
tttcatgcattctataactcggatgtccgattcaggcgcataatatatcgagacacttgatattgaataacagaagctctcgagaaattcgaatggtcataacttttcacacggatgtccgattcgggcgcataatatgtcgagacgctcgaaattgaacaacggaagctctcgagaaattctaatggtcataacttttcactcggaggaccgattcaggcgcataatatatcgagacgctcgaaattgaacaacggaagctcccgagatattcaaatggtcataacttttaactcagaggtccgattcaggcgcataatatatcgagacgctcgaaattgatcatcgaaagctctctagaaattcatatgcgcataac

SEQ ID NO: 285212 - DNA, 352 bp, Glycine max
gcttgtgcaaatgcaaacggtattatctttttactttgatgttcgatcgagtcacgttatacatcgaaacgctcgcaattgaaaacagaagctctgtgcaaattcaaacgacaatacattttaactcggatgtccgattgagtcccgtaatatatcaagacactcgaaattgagaataaaagctctgaacaaattccaacgacaataactttttactcggatgtccgattgagtccagtaatatatctagacactcgaaattgagaatagaacagctgagcaaatttaaacgacaatgacctttttactcggatgtccgatggagccccgagcgtctcgatatattatgcgc

SEQ ID NO: 285213 - DNA, 385 bp, Glycine max
  unsure (1)..(385): unsure at all n locations
tgcttgatgaaccctgtcattttataggtttattaattatgataagatggtcacaaacacacaattaactaataatcagaatgatcaattccaatatagaagtgaaagcgatagaaaaataaaataactgaataacattgaagaactttattaaaaagaggaacgagagtacatggatatagttacctcactattcgagttctacggngtttaatcaaccatggtcataaaataactaaacaacatacaatattgccttagaaataaaagagatcggaaatccttatagatttggaccccaatttttctccgtgcaattctcctctcaaaagctcttgtattttgtaaaatgtataatgaatttcaaatccatgaaatacaaact

SEQ ID NO: 285214 - DNA, 415 bp, Glycine max
  unsure (1)..(415): unsure at all n locations
tgngggctgctgttctcgtagttcccgtgagcttgggggtttttgaagtgagggggaagagtttcgggtgaagaaaacgttccccctccacccctttatatttttcgtacaggggttgctcgcccaggcgagctaacctgtacttttttttaggggtgcattaaccacgtctcccctctcttatgggttagcgttttgcctaacttgagcctacttaagttagaattaggtgtcgattacttatttaaaacaaacaatagtaaaagaaactgcgaacgcaaaggatactgggctgccttgcagcgacgttctctgcttgtttagcgccgggaaggggtggcactaggtcggtcgcgatcctatccttcattcgcttccatccctaagtacctgcaagtaaaagccaaatgatatg

SEQ ID NO: 285215 - DNA, 398 bp, Glycine max
aggctgctgtctttttgacacgctgggttctacaggcgattcatcaaagatttctcataagtcgccaaaccactcaacaatctgttgaacaaggatgttgcattttgtgtttaatgaagaatgtgtggaagcatttaatgatctcaagatcaaactagtagctgttccagtgcttatagcatttaatgatctcatgatagtgaggcttgttttgaagaagacacgttggagcatgagatggaattaacagcctcagccatggtattacagtctcctttggaagaagaatccaacaatgtgatagaatgcctagtcagtgaaaatgaaggagaagagctagcttgtattgaagagctggatggtccagaagataagtctgctggtcatgtgatgtttga

SEQ ID NO: 285216 - DNA, 423 bp, Glycine max
  unsure (1)..(423): unsure at all n locations
ntgccgatttaattttcaccggtgaaaggatcattgtggttctgagaagaggaaaatttgattatcctgctttgataaataggaagcttagggaaaatggagagaataaggaggagggaagaacccatgttgtgactgtcgttcctacatggccaaatttcccaccagctcaacaatatcaatactcagccaatatcatcccttctcattacccaccaccctataagccaagaacacccaattatccacaaaggccacccctaaatcagccacaaaacccgcctgctgcacatccaataccaaacaccacccttaacacgaaccaaaacaccaactagggaaagaattttccagaaaagaagcctgtagaattcaccccaattctgatgtcgtatgctaacttacttccatatctactcaata

SEQ ID NO: 285217 - DNA, 388 bp, Glycine max
ttcttctgcttattagtgcacagctccttcaagaatttagcatatcttggaatttgctttattgcatccagcagaggtatgtttacctctacttttctaaatgtttccaatatctccttatttgcctcttccatttttttgatggaaattgctcttggagggaatggaacagggatatgctgcttctgtaaatcagaattaccagtggaagattcacctgcatagaaattgttaggtaacttactctttacatgtttgtcatcagctttttctggagtagagtaaagttgggcaggttcatttgcggatgaagaagatgttgctggttgaggtccttgacacaactctcctgatctcaatgtaatggcactcacatttttaggattct

SEQ ID NO: 285218 - DNA, 446 bp, Glycine max
gagctcattgggtggctatccccacaaagcttacctattttaatttatctcgactcatgctcttcacctaggctctatatttatagagctgtggcacttctctcactcctctgtccgagagctgtcgaagattcttcctcatatgataaacctttcaacgttgagagagccgaatctaaccacttggcgtatgaaactcgtagcccattcatgataaccacgcgatgatgccattacggatgcccctaagttctttatctttcctcaacggacttctccacgccttgtggactctttgtacaaccttgagactttgcgcaccgaaatctctcacaaggaaaggcgagaggctctcttctgttggcactcccctcatggggtaccctaactgtcttatggcaagtgcgggattatagttaataaaaccgctcgtcccatcaacggaa

SEQ ID NO: 285219 - DNA, 393 bp, Glycine max
ttcatgctttggctgctgagcgaggcgacacgctatgcctgtcttgtgcactaaccgagttgtctcaatcttcatctttttcttaaaaataacagtaaagtaaaggaattataatcaatcttagtcaaaatttcctattaattgaacctatattttacaactatcatcgatttttcagaaactgatgttaacatgagttggctaacatcaggctttacaaaaattaatcttaaccaactcatggtaacattgaattttggaaaatttaacgttgtattgtcttatttataatattttttacgctttttccagttcactcatctccctcatgcttcgtctccctcacgcttctggcaacctcgaaccctctgtcactctcacactcactctcgc

SEQ ID NO: 285220 - DNA, 410 bp, Glycine max
tgactggactttaactcaagatgaaaaaaatgttttttttttaccttgttgatcattctatccagcatatacttttcactttttatcaattagtaggccattttgattcctgtctacaatttgcattttattctttagtgttgactcttgactcattgtttttattctaattgttgattctccattatacttctgctcttttagaaattctcatagatacattaattaaaaaaaaaagccaatgcattaccgaaaaaaattaaaaataaggctcaaaaaaaagtcaatacattacccaacaaaaaattactatagattacatcaaaggctatactacgaccggtattgtataaccgtcttactatgtgcacgtactacgccggatatttacaaccgtcgaaaaatccatt

SEQ ID NO: 285221 - DNA, 390 bp, Glycine max
agcttgatttgctggctcgattaactagtaattgactaactaataggaagaacgttagtgtatcgaatcttatcttatccagagtttatgctagctggattttagtgtattcaaattcgatttcatcacatcttatcgttgtcttgatctgtagtcgattttatttcggtaatgggtttggacttgaagtagatttgtgagttttggggccgaggacctatataacagcgccgaagttttgggttagggagttttttgtgggagaggagaatgaatgtaggattttagaatatcagctattattactgctcatgcacactgttgcacgagagaagaacgcattttctaccgatcatctctaatgcatgcagtagttaagagtatgctctt

SEQ ID NO: 285222 - DNA, 418 bp, Glycine max
ttgagaaaggtgatgtgaacaagcggttactggttatatccttcaagaagaccccaattctgagttcatttctttgctttggttgctttccattgtcgaagctcttcaaagcgcgtttgaggattccccaattgaaggtagaccacacaactgaacgtgtgttcaagaacctcgttgcttttgagcagtttcactatccagacaagccttacttttgcaactatgtttctttcattgactctctgatacacactcagcttgatgtggagttgctggttgagaaggaagtgattgggcatgaacttgggagtgataaggaagtggcaactcttgttaatgggttatgcaaacatgttgtcacaaactcaacttggtaccatcacattataaataagctcaacgaccattacatgaacga

SEQ ID NO: 285223 - DNA, 393 bp, Glycine max
  unsure (1)..(393): unsure at all n locations
ggtttgcattcttcaacatcttttttggtgtgatggtgaaagtcgggtaaactttgttattcggtgatgtattggcatttgatgccacttataagaagaataagtatcatctacctgttgtgggtttttctggtgttaatcacaacaatcaaaccatagtttatgacacaatccttgtaacaaatgcaaccgaagagacgtatgtttggttattagaacaatttgtgcaagccatgaatagtaagaaactatcaacaacgattactgatggtgatattgcaatgagaaatgcataagaaagatacttttcaaaacatgcctangttatgtgcttggcacttgatacgtaatgcanaagccaatgtaaacaatcctgcattnttgccaatgttt

SEQ ID NO: 285224 - DNA, 412 bp, Glycine max
ctgcggaattggtcttcgccagcgaaacgatctatgtgggttcgaaaagaggcaaaattaatcatcctacttggacgactgacaaaaactggggcaaatgaagagggtgagaataaaggagaaacccatgctgcaactgccattcctatacggccaagtttcccaccaatccaacaacgtcattacccagccaataacaacccttctccttacctaccacccagttatccacaaaggccatccctaaatcaaccataaaacccactttccacacaaccaatgacgaacaccacctttagcatataccaaaacaccaacaagggaaggaattttgcagcaaaaagcctatagaattcaccccaattctggagtgctatgctaacttgttcccttatctacttgataatgcaat

SEQ ID NO: 285225 - DNA, 387 bp, Glycine max
tgcttggttcgaggtacttacccgttgaagatcgaagaacgatgaagaacggatgaagaacgtcgaagaacggttgaaacttttgcgaaattcctcacggaaaacgttacggaaacgtttcggaagcgcctcggcttagattttcttcgcggaaataatttttccaagcaaattcgaaagagagagaagtgcctaaggggctgaaccccttccttcttcacttcctcccctatttatagcaaaataggggaggtggttgccgcccagctcgcccaggcgagccaggttgcttcctccagaagcaacagccttctggaggaatattctggagggcccaagtgggcctgggtgctatttgcacccccatttttactaagtacacccccc

SEQ ID NO: 285226 - DNA, 412 bp, Glycine max
tgccacccagctcgcccaggcgagcaaggttgcttcctccagaagcaacagccttctggaggaatcttctggagggcccaagtgggcttggttgctatttgcacccccatttttactaaatacaccccctgtcttttttttttgtgattcttttttcgtaaagttacgaaaacttacgaatttcgtaacgatacttgttttctttcagtaatgttacgaaaccttgcgtattacataatcattcccttttttgacctacggaatgttacggaacctcactaattgtgcaacaatgcttccttttgatttccggtgtgtcacggaaccttacggattgtgcatcaatattttcttttgatttccagcacgtcatggaatttcacaaattgcctaatgatgggtgccaagcacc

SEQ ID NO: 285227 - DNA, 225 bp, Glycine max
  unsure (1)..(225): unsure at all n locations
atgccacatataagaacattcaacatttgcaacaaaagaagaaatgcttgatattntatcaataganagaggcataagacttaacttanacaaaccatcacanatgtagtctttaccaacaaaaacactatgtctagtaataacaactctatntgactcanaaacaaccttgtacccatgtnggactaacanagaagtacctattanattttcctcctaatatat

SEQ ID NO: 285228 - DNA, 412 bp, Glycine max
  unsure (1)..(412): unsure at all n locations
tggtgcatatgattatatgctctcactttttgttgcttgntataaacttgaattgtcatgaaccaactctgtcaaaagattaagctgttaggctgttaggtgaagacacacatggttttatgttatatatctaacaatagtaatctattaatatagcttacaggttcattatgcatacaattttaggtccaagtcaacgcatatattttcatgaacgaaattaggacctgcatattcattattagattcatatataaatttttgtccgtacttccatagtgtccattgacacattttcagcatatgattctcttttctatctctttctccacaacaatgagcccaaggagcagagttttcttatgagcatcaatcaagaacgtacaattatttatattacatgatagacaaa

SEQ ID NO: 285229 - DNA, 248 bp, Glycine max
tgtcatgcatttctatgatttacatatacgaatctccatccaagcattttgacaagccacttgtaactcccatcaatactgatattgcaacatgcttaattatatgcagtagcttattctgatcattgcgtgtagtgtgattatctcttccatgcaggtacatgattcctatttgtagtgaaagagaaatgatgggcagcagaacctaactgaggagagtatataataacttttatttgtctttatct

SEQ ID NO: 285230 - DNA, 119 bp, Glycine max
tgacggtggccatgattaatggttaaattattttattcgaacgcctctccgatttgtgttaaagatgagataacagcatatgaccccactaatagaacatattgcccgtatggtcatat

SEQ ID NO: 285231 - DNA, 381 bp, Glycine max
  unsure (1)..(381): unsure at all n locations
ttcttatccaaacatatcctttattaaagttatttcttcttattctcgtaggaccatgaatggaggcaagctataactgctgctggatctggatgcgttgcagctttatcacgtgagagatatcttgtgagcaatgatcttcttatagagttccatcaggtatttgacttcaaagaactcctattttgttttcgcttatcgttcttttggtatataacactgtagattgagtgtacacatcacattaccaatttactgtatctttattatatgtcttaattcttgtacatttccacagaagcagatgcaactttagcaagattngcttgtaaaacttatatctataaatttataaaacttaataaatttagtgcatctaat

SEQ ID NO: 285232 - DNA, 396 bp, Glycine max
atgcgtgtctagtgattctagagagagaattgtctctgttccatatagttttgagagattttgctgtgtgaagatctgcagagaccagagcttgaagaggaagctgttctgagagcttgagatgagtttgtgagtggttgtaagatcctagagataaaggagacatcctcaccacttgtatttttgcaatctttcatcttgttcttttctttgatgaaaaggagacttcttggctatggaaagctaaaatcctctgttggatcttccctgtaggtacttgatgtaaatatctttctatctatttaatgatgttttgtgtgttctctgagctatcagcttttcattctagtatgcatttaccttgatcacatagatacatgctatgttagggtcatt

SEQ ID NO: 285233 - DNA, 379 bp, Glycine max
  unsure (1)..(379): unsure at all n locations
tgcttcttatccaaggctcatcttggtggtgaagctccttcttccatggcttattccctagtggatggagcctcctctcacctcttctcctttgtcttctgctgcatctccatggtggaaaatcaccattaaaggacctcattgaagctcaaagattcagcctccatagaagccccacaagcaagcttccatcaacaggattagtaagtctggacttgtcaccagtcatgtgcctagtgcagccattatccaagtaccatagtgagtctcttgctnttaggcacacctacaagacaaaatcaattagagagaggtggtacccaattgagattaggtccaatagggttaatttccacaattaattctccgggaatccaaa

SEQ ID NO: 285234 - DNA, 383 bp, Glycine max
  unsure (1)..(383): unsure at all n locations
tgtagaatggctagacataatacatggcagggtttggtttggttcaaggataaaagggatgccccacattatttccatgacacaaatgcaaaaatgatgatttggaaattttatgcaaaactggtcatgcatgcacctatgcggacactcaagtgtcaaatttttatggtcatgtgatgctagggctcaagattcatttcctctattttagtcaacccaatgtttccaaaatatgttcttttatccatttgtgcattcatccaagtccatttcgggcgtccgggaaaattttcacagcattcacccttcaggtgtacacacattntttcaaaaactagctatgatcagcgaatttttcttcaaagaaaagttggaagtcatct

SEQ ID NO: 285235 - DNA, 378 bp, Glycine max
tgctttaagcaaattcaaacaacaataactttttactgggatgtctgattgagtcccgtaatatatcgagacgctcaaaattgaatgttgaagctctgagccaattcaaacgacaataactttttactcggatgattgattgagtcccgtattatatcgagaccctcgaaattgaatgttgaagctctgagccaattcaaacgacaataactttttactcggatggcctattcaatgacgtattatattgggacgtttgaaattgaatgttgagcctctgagcaaatacaaacgacaataactctgatgcaatcctccctatgaagggaccaatcactagaaccatgagcaagaggctccaagaagattgggctagag

SEQ ID NO: 285236 - DNA, 405 bp, Glycine max
tcaacattcaatttcgagcgtcttcatatattatgggactcaatcagacatccgagtaaaaagttattgtcgtttgaatttgctcaaagcttcaacattcaaattcgagcgtctcgttatattataggactcagtcagacatccgagtaaaaagttattgacgtttgaatttgctcagagcttcaacattcaatttcgagcgtgtcgctatattacgggactatatcagacatccgagtaaaaagttattgtcggttgaatttgctcagagcttcaacattcaatttcgagcgtctccatatattacgggactcaatcacacatccgagtaaaaagttattggcgttagaattggctcaaagcttcaacattcaaattcgagccgctcgctatattatacgactc

SEQ ID NO: 285237 - DNA, 382 bp, Glycine max
  unsure (1)..(382): unsure at all n locations
ttcttgcaaaagttactagctaatttcttacgacagcgagaatatagagaaaaagagcatagtcaatttcaccagttctatgtgataaaactgaaagtcatctagaatattgaagtcctataacaattgacaaacaccattcaaaccttctctaactgtaaccttcatattatataattatttccccaattatgatgaactccacaccagcatggcctgcaataccaaaatgttttgctaaactcatcttcgatttgtagtagatattgttggttttgtggaggaaattataaaaaacagaggagagaagagagacaatacgtatacagagaaaatagaattattctattctaattcanattattctcagcagcgatacaat

SEQ ID NO: 285238 - DNA, 418 bp, Glycine max
tattcaaaatttgcatcagttccctttatgccacttctgaattcttgagatgagtaaatgacgactcaaatgaaaatcttgccaccgttcctgtgcttgtaggttgcagaatttctgatgatatattggcagtttgtgggtcgaaataaatggcagaagaaaggatcattctacaggccaacatttgcaaattcattttgcaacaagttgattgtgttttcctgagatgagtttgctgcatcttttctccgttctggtgagattattcctttgcttctttttcctttatttcttccttcattttgttcaattgccccagatttgcgcttcctagccaacggatttgatagttcttgatccttggtatatacccagcgatatccgaatttcttcacctcagcatgactctttccactct

SEQ ID NO: 285239 - DNA, 392 bp, Glycine max
  unsure (1)..(392): unsure at all n locations
ttcttgttgttcccgaacgataaagggcgtagaatctatctatgcgcgtttacctactcagggtgttgttcctgaattataaaggttgcagaatctgtctctgcacgtttacccactcaggttgttgttcctgaatgataaagggcgcataatctgtctctacgcatttacccactcagcttgctattcctgaatgataaagggcgcagaatttgtctctgcgcgtttacccactcagcttgtgtgtgcggataaccgcatgtcaagttactccagtgtcagtatgacagaaattgtctgcgcggaagatgacgtanatctccgcgtgtcaacaggcttgttggccgcgattgacaaagggtgcagaagacgacgttagtctctgcgtgcta

SEQ ID NO: 285240 - DNA, 420 bp, Glycine max
  unsure (1)..(420): unsure at all n locations
ntntggagtagaaacatgggaccaactcattttattttttaaaggaagtcgtatctagtcaaggtctgagagaccatacaagtttcctaacgatttctaattatgtgggccattaagtctatcatatgctgacaatagccgagaagcccatgaatctcttcgggggcggagtaggtgtctgccatcgccttggccttggctaacaatcggggaagttcttgactcccgttcaaggtaagagcaaaccgatccatccacatggttgcctcttggtgtaaagagtcgatcacccttcctctagcctctttttccgcatatacttgggcatactcatccgcgattctatgctcgtgggccgtggctagacccaactcttcttggtacttggcgatgatagctaacatgttggtctctgtctcg

SEQ ID NO: 285241 - DNA, 433 bp, Glycine max
  unsure (1)..(433): unsure at all n locations
gctttggctcgctatcttngcgatcagctcgtcccgggtcctctgagtcacctgcggctgcatcttctagttcctcagaatcttcttanatcccacggtanatcatggacagtatcttgtgaagtanaaacaaatttcgagaagatcgaacggtgaacgaaggctgngcagcattnttaccgatgcagctccatgtagttntctctagaagcttcattaagaggcttctagcagactccagacatcttctcanagatcccaacggtcagatcatggaaaggtgtttgtgaagtngcagatccaattcgagaggaccaacgggtaatgaatgctggcagcgttntaccgaggcagctcatgtagcttctctagaagctcattaagatgcttctctagaagctcctcgtggctctctgcacgcttctcananggc

SEQ ID NO: 285242 - DNA, 420 bp, Glycine max
  unsure (1)..(420): unsure at all n locations
tatctatatgtattgaacaacacatcaaaggtcattccatacatagatgctcacaaaaaacatgtcataaatactcatcgaaaaatgaacaagatgaggttgttgcaaaagcacaatagaagtttcatcaactggtttagacaaacaatcttcgcagatgacagtgcttcgaagacattcaaattgttagctattggtctaaatctgaatgttccaacttggaagggatatgatatcaatcattattctttctacacaaagtcacaagatggaaacagtagcacgcagaacagtggggttagtgttgacggtcattcaaatctgatggaaccttgcttgtggagcttctatggaggctggatctttgagcttcaatgaggtccttcaatggtgattntccaccatggagatgccgcggaa

SEQ ID NO: 285243 - DNA, 393 bp, Glycine max
ttctttatccccctcaccccaccccaccccatcttgtgtaagtcaattttgcaggattttttgtgtcatttaaggtcctgatgaaattttgaagaggatgcagactgctacatctttccaatgttccataatttgtagttaatccttccatacttcataccttatgcccatttttaagaccaatttatcttttgcatccaatatagcttcaattatttggagttctcttttgtggcttgactatatgttggtttttttggatgaggtgcaaagtgattttgcaacataatgcactttgtcttgataagatatattttcttgactgcaatattgcttgaattatctagccattaaacattatgctctgactctagtttttttaactcgatataa

SEQ ID NO: 285244 - DNA, 419 bp, Glycine max
  unsure (1)..(419): unsure at all n locations
tgcctaaggatagccagaggtgtcactacggaatgcattatatatgtgcagttgtgatgaaggcggcgtatggaagatgcatgaagacatttataactttttaagaaatgtttagacaacgtttatcattttattttatttgacaaattttattagacatgttttttatacaagtatcggacctgtatatcataggtcgtgaattaaaccacaaaccctatattagacacgtagtaaataagtagctaaatcttcactcttcacttaaatcaacatagtctagtttcaacaccatcaaatntttgtactgttgcattctactaatatatggagttggctactgctttgcctgaggatgacaatgtctagaccataacaaagctagaggcgataagggacaacagtctcttaaaaaagtc

SEQ ID NO: 285245 - DNA, 336 bp, Glycine max
tgcttgtttctgagacgagcttttgcagatagtcagatagaagactgatgatccaaactgaatcatgtggtagtgatgattacttgccagtccatatgaatctctaaggtcaatctaactaaccactatagttgagtgctgaagatcatgtgcgtatgcaaccgagggtatcatgtcattacatgtttgagagagtgaaggtatgctctaattcatctatccatcttacatgcaagctccgactaattccagcataagactacattttaatgatactagaatagacaagactagcatgttacatcatgtcatgaatattggagaacagacttgaaa

SEQ ID NO: 285246 - DNA, 379 bp, Glycine max
atacaatactcaagctttgaactaaaatagactctgtacattctaatactttctgttgtgttgattacaaaccatttcatgagacttgattatctcacaatgataaaatatatctccccctcaaccaggcttcctacttataggcaacacactataatgtttaacatcttggcgctaataactacagaatgtagcctaacttactaaaaaagggaaatgtgtgaatactcatgatgatcatttcaaagttctgaatctcatgcgtggaattttctattgggagaaagtaaatatcttatggtattgcaccatctcaatacatatggtacttaatttgtacagcctttcatgcactgttcagctgataaagtctatctct

SEQ ID NO: 285247 - DNA, 387 bp, Glycine max
ttcttgctttcttaaccactaagagtagaagctaaacataaggcttaaccgctccaaatagaagcaaaacaagcttagctgttagagatagggggaccaacatgaagacttaaccttaaagcttgaagaagtttttcttttacatgcctacctcacttgagtgacatttgtattgattgttgtattgtgtgttgcatcttaatctctattttttcatatgggcatcatgcatcatcatttaggagtaagaagaaaggttctaaagttagaaaatttcttcagtgtttaacactctatatcttaatttattatatgcatgattgtaatcgagtacacagttcagatgagacaatgattggctttttacgagtcattgctttaattgat

SEQ ID NO: 285248 - DNA, 364 bp, Glycine max
  unsure (1)..(364): unsure at all n locations
taaggctttagcgggtacaagatggccaatgttttttgttgcagctataaggagattccgtagaaaaaacctgtcagcatggcactcaaacatatccacattgagaacaatcagttgaaacagtggcattgtgcctttctctaataatctcaacaaaaaacgaaatcaagagacataaacactagcattgggcctttctctaataatctatttctataacgataaaacgcagaaaataggcataaacgacgaaaaaacacatgtacacatgcatataaaaaacaaatgttaaccttttaagagaacaaaaccttgttgccgtcatgagagtgacactgatataggttgngcaaaaggtttcaat

SEQ ID NO: 285249 - DNA, 369 bp, Glycine max
ttctttaacaaggctagtcacctatatgttttttatacttgaaagtaatatgacatagttaatgaagatctcggatagcaatattttgggcagtatacatcttaagtcaacccccaggttttgtataaacctgaaaacttagtgccgaggaatgtacgaggggtagtagggtttattctgcaaaaagagtttacctggcatctgaataaaaatttatgttgattgcagtatgctggattatgtcatttcttcgggtttttaattaaaatggtcactagtctcatttattttttgcttgcttatagaaatgagctctaattgattaatttcttagtttaagacattcttaaggaagacagtaatgttctt

SEQ ID NO: 285250 - DNA, 416 bp, Glycine max
tcttatccaaggcaattcttggtgttgaagctccttcttccttgtcttattccctagaggatggtgcctcccctctcctcttctcctttgccttccgccgcatctccatggtgtaaaatcaccattgaaggacctcattgaagctcaaagatccagcctccatggaagctccacaagcaagcttccatcaagtggtaatcaaagcacaagagcttcaagtaggtgctccttaaacctccattaattgtcttgctttaccttttcttgcattgttgttacttcatttttctccatgtatctcctcacatgtcttgtgataaatattgttaacatgattctttagagtttccaccgattaaacttgctataaaagctagatttgattgtctatggatcaaaattcttgctcttgttct

SEQ ID NO: 285251 - DNA, 392 bp, Glycine max
  unsure (1)..(392): unsure at all n locations
ttatgctttctttatgaagntttctggctttctaaaccttgaaaacttgtgctattcatcttttcattctcttatccctttgccaaaaagaattcgccaaggactaaccgcctgaattcttttgtgtatcccatctcccttgtcaaagaattcaaaacgacatagactgagaattcttttgattcttcccattccctaatacaaaagtgttcaaaggactaaccgcctgagaattcttttgcatccccattcacaaagtatcaaaggtttaacagcctgagatctttgtctcaacacattggagggtacatcctttgtggtacaagtagagggtacatctacttgggtgtgactgacaacaagagagggtacatctcttgtggatcaattct

SEQ ID NO: 285252 - DNA, 365 bp, Glycine max
tgacgaagtttctagccacagagtatgagattatatgtgtcaaccgctcacatccatcgacgggcaaagaggacaaattctgaaagcaagaaagtgggtgagtccatatcctatggatattgattgactacagcttcaaggactccaagttaggatactcaacctgtcaacattatcctgggtagattatcactcacaagtaactaaagaacgcctttcattacttctctaactaactcaagtaaaaaatgcccattaaaggcaaatgatccaattggcttgttgagaactggcaagtaaactctcctgttacatgaccaccatgtctaagagacaatttgtatctctctagacaatactattga

SEQ ID NO: 285253 - DNA, 378 bp, Glycine max
tttcttaattagcctcactttaaacaattataaggccaattattttgcccccaccctacactaattaggccaagagagcatcgctatacgccagcccaaagacactcctgccatttggttttactttttttaattttttttatcgatatgaataaaaaaaaattataacaattaatgcacgttcaaccagttagacgtactcctttaataaagttatatgtttaatcttattgtaatatataaattacaattaatccatattagaatatatctgaaacaacaatatcttaattcttatgttattatccagtctcacgttaataaaatttattaaatgttctatgaaagaaaatcaaaattacataattaccatacctc

SEQ ID NO: 285254 - DNA, 419 bp, Glycine max
  unsure (1)..(419): unsure at all n locations
tctcgaagcagtccagtctaattaaggcactagtttaatttactgtaatttaaaacgtgcaacccttttaacaaaataataaaaacaatggagatccctcagcagacaaaagaatgagtaaaattaattaataaccattaaccaggtgaagcttgtgatcgttattaattagaagatataacttgaaaaggatatcggagtcatcaaaatcatcgttcaaacagatgaagaaaggatattaagaatggaaaaccgaaaacactatttacccattaataatcgagagtagatatatctggctggcgtgctaataaaagctgcctcagctgcgaaacatgtgtattattgtgtgtatattttgagctacaaaaggtttaaacatgacgtanaaagtacattcccgtacggagtaaagattt

SEQ ID NO: 285255 - DNA, 223 bp, Glycine max
atcccttctcattatagaagctagctcgctttgtatcctctatctggcttaatgttgacatacacactttgttgtggatctctatatgagatcatagaccctctcatgcaagcttctttacaaacatctgacctagattccccttacttacaacaaagagaattgtctagtgggaagggaattacgtctaacggtgttataagatcgaacccatagacaacct

SEQ ID NO: 285256 - DNA, 344 bp, Glycine max
ccctcacggtttcttgttccaacgcctgggcagttgctttatgtgaatctcctagttcaggaccctcctttcagataataagagctgctgatttgaaccttcacttgactatttgcgctagcaccagttgctccctaaaggcctgcacctctttctaattcctcaggggcctcaacttcctcccttctatcggtcctgagaactcgggagccaattcaaacctttaacgtgggcttcttaccaccttcggtatccaccgatgtggcccattgtcactgcacctaatgtcatatccttcttttcaccacctaccatgccttgataccatatgaaatgtcggcccg

SEQ ID NO: 285257 - DNA, 370 bp, Glycine max
tgcttttgttcctttttataaaaagagaagttctgaaactcatcacgttttctaaaaaggccttgaggtggatccaagtgctctgatcattcattagcatattcatgatttggtggcatgctcaccattgtttctttctttagggaactcaccataactaaaaaagcgcaaaggcacccctataacacccgatccaaaagtaagatggataacgaagagggagtgcaagaacagatgaaggccgacatgtcggctttaaaagatcagatggcttccatcacggaagccatgctaaaaattcaaaaatcaatagaagacaatgctacgacagttgcttccaatacaactagggaagcggaactggtgctac

SEQ ID NO: 285258 - DNA, 399 bp, Glycine max
tgcatattcagcctgacgatggatcgagagttttgttatttagggtacaacataaaatacaagagcacgattgattagagaaatatatttctatgcatcagcttgtttgttagaaagacccaacatatctacctactgctatcattttatttaccttgcattttatagtttttagcatacaagtttagtttaaattttgtttgaaattatcacttatacatgttctctcaacaatgctttgattctaaacctaattcaggctaacattagttccttgtgttcgatacttggattcatccgttctaaacctaatccagtaaacccccattgaaatttcctcgagacataaatgcacaaaaggtaactgcagtggggattcatcattggggatcatacaac

SEQ ID NO: 285259 - DNA, 380 bp, Glycine max
tgcttctatataagctgaaccattttatcaataaacacaagttgagttttattcagaaaattagagtttatctcttttatcttagtgagagtgattctcctaaattcttgagtgattcaagaacaccttggctgtatcaaaggactttcacaacctttgtgtgttgccctcgctggaaagagtgattctttccttcctttcatcatcacccttgttctttcaaaccacaattccagaaaatccacctctgcccagaattatctcgtggccataactcccattttacgcactcaaattaagtgattcttgagcctaaattgaatttcagaacgagacctttcacctcgttttggaatcacctcatttggagccctgtagct

SEQ ID NO: 285260 - DNA, 315 bp, Glycine max
  unsure (1)..(315): unsure at all n locations
acttcttgtgtctctccccattatataccaacattttttttgagcacttcatagacaggtgctgcccatgtgctaaaatccttcacaaatcgactataaaaactcgctaagccatgagtcgcaacctacccttcggcggtagggcgatgcctgactctcgcgatgcgtgatccacaaaaggaatacgcgcggtgtccccactaatgattatttgaagaaaacgtcggaccaaccggaaaagaagcgatctaccaactnttaagtgaaaggctcgggagttgtatttacgcctggggaaagtattagcaccccaca

SEQ ID NO: 285261 - DNA, 391 bp, Glycine max
  unsure (1)..(391): unsure at all n locations
tgctttgaaatttgaaaaccctagcatgggataatctattaggcatcctaagagtttatgaattccatcttcagaactgagataatcaaccaaagaaagatttatttgcccttaagtctagagagacaagctccaaaagattagaaaagaatgcttctctaaatctcttaaagtgaagatagattattctgatgggtcaaacaatagttttggagattccacatatgatgaagtagctctcatgtctatgaggttcaagcaaatgatgaaaaaganagggaagttccaccattcctccaaaagaaaggacataagattcaagatgaaatacgaggaggatagcattgaaatcatctgctttgaatgttgaaaacctgggcatatgaaaact

SEQ ID NO: 285262 - DNA, 424 bp, Glycine max
  unsure (1)..(424): unsure at all n locations
tgcttgtggggcttctatggaggctggatctttgtgctttaattaggtcctttaatggtgattttccaccatggaaatgcagtggaaggcaaaagagaaaaggtgagaggaggcgccatccactagggaacaagccatggaagaaagagcttcaccaccaagatgagccttggataaaaagcttggagaggaagcttcaatggaggaaaagaaagagggatagaaagggagaggggggagcacgaaattgaagtaagaaaaaagggagagaagtttaactttgagttgtgtctcacaagactctcattcatcaaagttacaacaagtgttacacatgtttctatttatagactangtagcttccttgagaagctntcttgagaaaacttccttaagaagcttctttgagaaaacttccttgaga

SEQ ID NO: 285263 - DNA, 369 bp, Glycine max
  unsure (1)..(369): unsure at all n locations
tttctttgtttatatggaagccctgcaacaaactctagctctgaaaaattggaaataatattgtaggaaacatcaagtccttcaagtgacttcaaattctcaatcccatgcaaagtagttagagcattgctcctcaaaactagtttaacaatatgacaggaaacctgcaaggtccaacacaattgtatatgggtctccagagcaaatccctaaatgaaaggcatacaactaaaacaaaagatattaacttttctacaaataaattgctntcattgcatttaaggatcctgtcattcaactttcaatcctgaaatatcaattcattctccatgaatcgcagaagtcagcacagcaagcaaataaagacat

SEQ ID NO: 285264 - DNA, 418 bp, Glycine max
tcttcagatgaacttccaaccccactgctgaatgatgcttcgtgagacgaatcaagctctcttgatgaaggactggctacaaaggaagaatcatcaaactcaatgtgtgatccagtagcatcagatggaataagtgttccaagagctggcattaggtcaacaatgtactccctgaaattcatatcattatcaatcacaacttccagatacataataacaaggctttgcaactcctacttaagaaacttacaaaaagaatgagagaacattcagctataggcaatattaaatgattaattgaaaaaatgaacaaaatgctacaacaggaaagtctaaccaaaacaaaagatactagtaacgtaacacatcttcaagtcaggaacaatataatataacatagcttcaagtctgtacacag

SEQ ID NO: 285265 - DNA, 392 bp, Glycine max
ttcttgtctcagcgtctatgcgagacagaaaccaacatgttagctatcatcgccaagtaccaagaagagttgggtctagccacggcccacgagcatagaatcgcggatgagtatgcccaagtatatgcggaaaaagaggctagaggaagggtgatcgactctttacaccaagaggcaaccatgtggatggatcggtttgctcttaccttgaacgggagtcaagaacttccccgattgttagccaaggccaaggcgatggcagacacctactccgcccccgaagagattcatgggcttctcggctattgtcagcatatgatagacttaatggcccacataattagaaatcgttaagaaacttgtatggtctctcagaccttgactagatatga

SEQ ID NO: 285266 - DNA, 418 bp, Glycine max
tgcttgtggggcttctatggaggctggatctttgaacttcaatgaggtcctttaatggtgattttccaccatggagatgcagcggaagacaaaggagaagaggagagaggaggcgccatccactagggaataagccttggaagaaggagcttcaccaccaagatgagccttgcataagaagcttggaaggatgcttcaatggaggaaaagaaagagggagagaaagagagagggggagcacgaaattgaaggaataaaagaaggagagaagtggaactttgaagtatgtctcacaagactctcattcatcaaagttacaacaagtgttacacatgcttctatttatagactaggtagcttccttgagaagcttccttgagaagattcctaaagaagctagagcttagctacacacacc

SEQ ID NO: 285267 - DNA, 391 bp, Glycine max
ttctttatctagtaaaatgcaatcttccactttgcatttaaaccacctaaaccttagtgataaaaattcaatttccaatatcaatgcaccttatcttttatcttggaactctacaaaaccttacacttttatctttctataatttaaaattctcacttttcttttttactttttgtataaacttgtgggaatgaaattttagtagtgaatgaatatttgagaattggagaaactagaagttttggaggaagaggtctactgtataattgatcaattcttgttttttttttgcttgatacagaaaaaggaaattgaaaaataacaaaaaataattgaattctaacatatatgcactgattgaactaatcatctaaaattgtgctcgcagtag

SEQ ID NO: 285268 - DNA, 409 bp, Glycine max
  unsure (1)..(409): unsure at all n locations
ttgaacaatatacttggccttcatttaactgtctttgggcttggtggccacgctcaacaaagtactttcgacacctactgtacgttgatttcaccaatgctgttatgggaatgttgcgacaatcctttaaaaccttattgatacattctaagaggttcgttgtcatgtggccatatcgatgtccttctctatcgtaagccatcgtccatttttcctttgagatgcgatcaatccatgttgctatgtctggactcagttcacgaaatttttctaaattttgataaaaaatgtgcttgcatggagtgtaggctgcataaaattagttatgaataacaatnttaagtataaatgaaagtaaaataaacgtgaccatcaaatatgaaatcttacccaatttcttcaacatttc

SEQ ID NO: 285269 - DNA, 393 bp, Glycine max
ttcttgtgacgttaaaaaagcacttgctgggaggcaacccaacttttctttcccttctttatcttcatttttatttcttgcatgtagttaggacatctttcttgtgattgtgattgatttcagcttgtttagtaatgaacaaaaagggtttttaaattgtgtgtgaagagataagcagaaaatgacttagaaaaattttcagattgcttatccgctaagcacaaaccttgtgctaagcaccatctcttcatgcgctatgccgagcttgctcgcgctaagcgcaaagacccctgattgattggctgaatggttcagctaagcgcacatcattgtgctaagcccaacatcttcactataagttgcaccttaagcaatgggcttagagtggatgat

SEQ ID NO: 285270 - DNA, 425 bp, Glycine max
aaactcagcttcttatccaggctcatcttagtggtgaagctccttcttccatggcttattccctagtggatggcgcctcctctcacctcttctcctttgtcttccgctgcatctccatggtgtaaaatcaccattaaaggacctcattgaagctcaaagatccagcctccatagaagccccacaagcaagcttccatcaaaaccttttgctatttcaatttggaattcccttcctaaaatactagagatcttcttgatgttgtatcttgtattcttggattgttgtcttgaattaaacatgagaagcgcattttcataagacatcaaatcatcacgatcatatggcgtcatcaaaacatcaaatgtaaagtctttgcttctacaatctcaacgtctttgcttttacaagattgaatggtggatgc

SEQ ID NO: 285271 - DNA, 329 bp, Glycine max
  unsure (1)..(329): unsure at all n locations
ttcttattcttgntgagtactttgcagtcctgtattgctcctgcaaaataactcatgcctgcaacactggttttgttcctaccttgaacgagttgaaggcaatctgtctcaaaaataacatttataaaatagaactcgcctgccacttgaatcgcccacttgtagcataaagcttctgcagtccttggttcatatacaccaccgtaaccattatggtagcagctcccagaaccagtttttcatggtctctggccactactagccccattcccgtcccttgattgttatgggcagatgcatcaaagttaatctttatgcactgtagaggt

SEQ ID NO: 285272 - DNA, 411 bp, Glycine max
tgtagataacactgcggctgcagcattcatttcttttcttttccaacctccatcacccttgttgcccaaattcctttgatctctaagtacatcaaccaatacacgttccatttccaaattccatgtaaaataacttcttgtattctcattattttttcctaaaacttttcttttgtccgccattttttcattacatgactccattgaagataatgtcacttattcaacctgcacataacaaatagtagatatgacctactttattcatttgactagtccactgcacaatcatagaaaatatttcaagcaaatgttttatgcaatagcacagtacataaaagtctatcttcaataaaacagtacaatagtaactaagcacacatagtttgtcaccaatagcagattacattt

SEQ ID NO: 285273 - DNA, 382 bp, Glycine max
tgccaccaaacgcgtgatgggacattaacaattataaaaaaaagaagaatggtgagactgagcctaaaaccagccgggagccgagcgacgcagcagtttttattacatagcgaccggggtggagaggcaccaacccaggacaagaacgatcgcaacaacgaccgtaatatatcgggaagcacacaaccaactataggatcgcacgagaaccgcacaccatgggagagcgataacgggggaagaagaagaagggaagccacaagaaaggagaaacaagctggggagagccacgacgcggtcaggccggtgttcggcgatcgacaggagacggccaccgcaaaggagccacacatgccggagacagctcaaaaggacgcggccc

SEQ ID NO: 285274 - DNA, 465 bp, Glycine max
  unsure (1)..(465): unsure at all n locations
gccgtgccttgtactcgtttgcgncntccanaacacncgacccctggacatatacttggccttatagaactggctttttttttcgcggtcaacctcaacagagtgctatcgacacctattgtacaggggattctccaatgctcctatgggaatgctgctaccatgctttaaatacctattggtacatccatagacagttatctgcatgaggccatagtgatgtccttctctatcgcacgccatcgtccttgtttcctttgagagctcatcaatccatgtagctatagttggactcaggctacgaaaatacttctaaattctgataataaaaaggcctgcccggagcgtatgctgcatacaattacttttgattcaccattctaactctagacgaacagtatactaatcgtgaccctttcatatgaagtcttatcctatcttcttaacagtttttcttgactgccg

SEQ ID NO: 285275 - DNA, 386 bp, Glycine max
ttcttgcattcttctcccacaattttctataaatagggggagaagtgaagtagaaaacggttcatccccttacgcacttctctctctttcgaatttgcttacgaaaattgactccgtgaagaaaatccaagccgaggcgcttgcgtaacgtttccgtaacgttaccgtgagtgatttcgcgaaggttttcgaccgttcttcgacgttcttcattcgttcttcaccattcttcaggcttcaacgggtaagtacctcaaaccaagcttttctgttcattctatgtacccgtggtgagccacattaggtttcatgcatttgtatgctcgatgcatttactttatatacccgcttttgacatgctgaagccattctatttaagtcatttc

SEQ ID NO: 285276 - DNA, 400 bp, Glycine max
tgtagggttaaagtctcacggttgtcacgttctcgtgcaacaattgttagctgtggctatacgagacatcttgccaaacaaagtcaggttagcgatagctcgcctatgctttttcttccatgctatatgtagcaaagtcattgatccagtcaagtttgatgagttggaaaataaggccgcaattatactatgccagttggagatgtattttccccctgcttttttgacatcatgattcacttgattgtgcatctggtcagagaaatcaaatgatgtggtcctgtttatctacggtggatgtacccggttgagcgatacatgaagatcttaaaagggtatacaaagaatctatattgtccagaagcatctattgttgagaggtacattgcaaaagaagcca

SEQ ID NO: 285277 - DNA, 488 bp, Glycine max
  unsure (1)..(488): unsure at all n locations
cgtgcctttgatcgtcgacntttgatagcataggacncacataggacgaatgacatgctcgtaagcggagatgctcgagatgcgttctgcatgcacgctttctcgatgacgtggagtataatccaaaggtgattcatgctaccataaccaccttatgcctgtagaagaggcccttagactatatgtgacgcgactgaccttgaatggactctcacatgacaattgccttacagacatttaccactgcatcatatgctgatgactgtcatactaaaccgtgctattaataacctagaagatgctctgtacattcaaccttgcattaagaaatgcatgacgcgattacttccttaactgacccgcaagataaagcaaattttattccttgctcctaccggaccttaatggactcgtatgacgtctccatagtgagaggcctacgagcgacaagactaaaggaggtaatggcagttgatatgcgatcgtct

SEQ ID NO: 285278 - DNA, 478 bp, Glycine max
  unsure (1)..(478): unsure at all n locations
agccagctggcatgatgcgtcgattgacnccactggacanacangncacactatatgaaactccagctataacagggcctgcacaatttactttcataaaatctatcgacagcgcgtgaacgactttatgcaccttaaatgcaaatgcttttttggataactctgctaggccatgcacataggggcacgggcttgctgataaagaccattgttcaatgtcacgaatcatatcctaccagcgagctccagttattacatcacacggctgagatagggacccactcagagtgtctgtttattcaccatgccagatgcatgtggcgtaattactcttaatcccgatccacaatagatgctctactatgtagttccacttttagcgacttctcattatacgataaaagccaagacaataatctctttcgaccgtaacttaatcgattagatttgaggccaatcgcaacaactgcttgacgcc

SEQ ID NO: 285279 - DNA, 372 bp, Glycine max
ttcttatgttgctagcatatagcatatcatcaacatataacaccaagaatgagtatttactcccactaaacttgtggtatacacaatcatcaactgcatttgcctcaaaatcatatgaggtaatgacttgatgaaacttgtaataccattgatgggaagcttgtttcaaacaatagatgaatttatttagtttgcaaaccatagactttgagtcacctgatacaaagttttttggttgcatcatataaattgtgtcttcaatgtcaccatttagaaacgtagtcttaactacaatctaaaagttcctatagcctccatcgcaacctttttgccatcgccaacaaatatgaatctttcatcatcacttgacag

SEQ ID NO: 285280 - DNA, 405 bp, Glycine max
  unsure (1)..(405): unsure at all n locations
nttaaagcagcttttagatactgcttccctcatcagacctgtcaagccttcagccactagatcaaaaagaaggggtgccaaagggtccccttgtctcaaccctctttgaggtttgaattcagaagttgggctaccattaacaagaatagatatggaagctaaggtgagacaagcccttatccacctaatccatctctcatggaaccccattctcctcaacatatagaggagaaaatgccaagatacagaattataagccttctcaaagtccactttaaaaaccatgcaagacttcttggatcttcgagcctcctcaatcacctcattagccaccaaaactccatggagcaattgtctgccttttataaaagttgtctgcctttcatctataagataaggcatgac

SEQ ID NO: 285281 - DNA, 353 bp, Glycine max
agcttcctgcacaatgagtcaatgactaaattattaagagagttactcaagctaccataaccttatcatgcctgtgtcagtggcacttacactaatcaagcgtcaagtaccaaagaagcattagaaaggaaagttagtttacaataattatagccgcaagtaatactgagtactgacaaaaaaaaccatactaagaataaattagaaaaggcacggaacagtctaccttgcatcaggaattccatgacagattacttcattaactgacctgttagataaagcaaatttcattcttaacatataccacaacgatatgagaaaaatatgacattacagaaggaaagtacctacgt

SEQ ID NO: 285282 - DNA, 420 bp, Glycine max
  unsure (1)..(420): unsure at all n locations
nttgtaactccacctatatctggccttcacattaaccagacttaataccattgacaacagcatcaacaaatttttgcacctcgaatacaaaggcttctttgaatcactttgcaatgtatcatacataggggcatgtgcttgctgaaaagactcttgtccaaggtcacgaatcatatcctccaagcgatctccaatttctacatcaaacggtttagattgggacccactttgcatgtctgttaattcaccatgccatatccatgtggtgtaattcttcttaatcccatcacacaatagatgctctcgtatgtcgtccagtatttgtcgtcttccattcaaacaattaatgcaaggacaataatatttttcgtcctcattcgatcgacttctttcggaggcaaattgcaagaactgtttgat

SEQ ID NO: 285283 - DNA, 384 bp, Glycine max
  unsure (1)..(384): unsure at all n locations
tgcttgatcaagggtaactttgatgcatccattaaggaagggagaggtacaagctttggagttatcttcaaaaacaacaatggagaagtccttgcagcagctgcaaagatcctgccttattttccagcctcatattagggaggctatggcttttcgctaggccattgaaactgctcattcactacttctccccttaaccatctttgaaactgattgccggagattattccttgcttggaaagatagatcctcagctgattatagctacttcgatggaatcattcatgctatgcccatgtgctacactaggattcttcagaccttttaatagagctgtgaattctctagctagattagctntttttattaatgattntgtttgga

SEQ ID NO: 285284 - DNA, 421 bp, Glycine max
  unsure (1)..(421): unsure at all n locations
tatgctgcaaacatctacaacagacctcctcaacctcagcagcaaaatcagccacaacagaataattatgacctctccagcaacaggtacaatcccgggtggaggaatcatcccaaccttagatggctgaatccttcacaatagcagcaactttgaaagccaatagttgcttagtgttaaaaaaaatatagagtgcaacaattatttaataacactcggcgagtgcataaacaataaagctgaagtatagagtaactttgctttgcaaagaaaaaataatgaaaaattaaatgtatagtccaacaatttctgcaaagtttcacgttagagattntctcatttctttatgattnttttcatgtgttactttgagatagagattgccttttataaaattcagtaaatgattcattgtgggatt

SEQ ID NO: 285285 - DNA, 384 bp, Glycine max
ttctttgatgcaacatttggagaggttaatgaaacaacgagatgatgcgctccatgagaggttggatcaaatggagaatagagatcataatgaagaagaaaggaggagaagagggaatgatggtgttcctagacaaaaccgaattgatggtattaaactcaacattcctccatttaaaggaaagaatgatccggaggcctacttggagtgggagatgaaaatagagcatttttctcatgcaacaactatgaggaggaccaaaaggtgaagcgtgccgccatggagttttccgactatgctcttgtgtggtggaacaagctacaaaaggagagagcaagaaatgaagagctggttgatacatggacggagatgataaagatcatg

SEQ ID NO: 285286 - DNA, 385 bp, Glycine max
tcaacattcaatatcgagcgtttcgataaattactgggacacaatagaacatacgagtaaaaacttattgtcgtttgaatttgctcagagctttggtattcaatttcgagcgtctggatatattacgtgtctcaatcagacatccgagtaaaaagttattgttgtttgaagttgctcaaagcttcaacattcaatatcgagcgtctcaatatattacgggactcaatcagacattagagtaaaaatttattatcgtttgaacttgcttagagcttcgataatcaatttcgagcgtctcgatatattaccggactcagtcagtctaccgagtaaaaagttattgccgtttgaatttgctcagagcttcggtattcaatatcgagcg

SEQ ID NO: 285287 - DNA, 390 bp, Glycine max
ttcttattgtgtaaagttaaaatgcatgttaaccttttattctttgagcataaggcagcgatggtgtctcagctaacttgctagtgttttttttgctttggcttaatattatttgatcatgctctttagaacaatatgtttgtatccattgctcaatttcatcttaattgatatttctagtcactttcatggccacttgaaaatttattaccacaatttcaaatatctatgctgctcttggcttgtttttctttagagatatattgcaatattacaacatttcaaatgtcagtcagtgtttttgacagtgtactttgcatactgatgataatgttatgaacatggggcttttctggaaaagattagatcagacaatcctgcgataccatg

SEQ ID NO: 285288 - DNA, 357 bp, Glycine max
agaatactaagcttgtcggatctcaaagatgtgtcacagggcaccaatctttatcaaatcatataacaagctctgttgctataagagggtttctaaactgggtgcaacttagatagacaaatgaagatggctgtcaatggcatcaagaacaaaggtgacagacatagatgattatttaattattattatttatacaacattttattgcttcgacatatatatttttttttactcgacggagtgtttcatttacttattttttgtattccaccactatttaaacaacatgtgtctaatacctataaataacaactgttcgattgattcataacacacatatttggatttacaccacta

SEQ ID NO: 285289 - DNA, 377 bp, Glycine max
ttcttgtcctacaattgctagttttttcattgacagttgcccaatgggtatcatctgcattgatagcaaatctcacatccttggccaaacgaagatacatataccaatttaatataaatggagaataaattaccgttctactctgatctacaaatgctgctgattccctcacttggccattagtgatgcctggcatatatttgcgctgtttctgtactggcacagactctggagataaaggttccttgatgtcttccgcatagtgtttcaatgaatttggagagtttccctgttgacagagagcgatgataaattaacagctgacaatgaaagctatatagatccgatcaaaaagttagtctcatagataaaatcaa

SEQ ID NO: 285290 - DNA, 405 bp, Glycine max
tctttgttcctatggttcagtaaggccaacaatgttcagcgcccagggggccgccgaggaacaggtcctgtgcaacaaccccaacagccaatgccaatgatgcagcagcaggtctgctcttgcacagagtttccaatttttttgtttgtctctcacgttactcatctgcatgcatgcctgatggtgagatactttcttatttgtttgttagatgcttccaagggggcgtgtctatcgttaccctcctggccgcaacatgcaagatgtcccacttcaaggtgtagctggtggaatgatgtcagtcccttatgacatgggtggtctgccaatccgcgatgctgtgggacagccaatgcccattcaagctttggccacggctcttgcaaatgctccccctgaacagca

SEQ ID NO: 285291 - DNA, 200 bp, Glycine max
cttgtggctgagaagacgaagatgaagctgacggaagctgcacaccctgaagcattgatggcgtgctccaccgtccatccccgttcagacgccacgtgaagcggaacatggcccgcacgaacaagacataggagatgacgactgacgccacgaaggacatcactgacaagatcgactgccattctcaactaaccattaca

SEQ ID NO: 285292 - DNA, 416 bp, Glycine max
acactctagcgtgacacaacctattattcgtcgtcttacccttcctttataggctctataacggtcttaaagatgaatattcaatctcagcacttagtcttttctctcaaggaattttgggagctttttacaactatacacaaaatttacaaaaagcattttacaaaaagaattaatctatagctttttaaaaaaacctaggattcttttgtaagtttttgctttggatcttcaaagcttctaatatttatagctctcatctttaagcgttcattatctcacaatggatgaacttcttcacttaagcttgcgtctaatgcttatgatcgatggagcattcaatgcttacattaaatgcacgtccctcctcatgcaaccaaaccactttgagtggctttcttgtagagcactgcatt

SEQ ID NO: 285293 - DNA, 354 bp, Glycine max
tttcttctctttcaattgagctaaggaggttggaaagcaaatgcagcatatgggaactcatattcatttgggcctttgtgttggtcaatgtatgtgggtcttggtcttgcgatattcaagggacatttatgatagaaaatgcatgttcttcttgtagatgacagaatgagcacagaacatcttctaattgaattaactttcgatggtagcctattatgaaagagtctccacaagaggcaataaactttaggtaaggcacccaaattctagagcctactgaagaaaatggggtctgcagtaacaccaccgtccttgacttccataattgcaaaatatgctgaaccgaccattagt

SEQ ID NO: 285294 - DNA, 415 bp, Glycine max
tttgaagtttaaatgaaacttgtagaagaagcttatagcatgatccattggattattgtttatgatctaattaatgaccaaatttgacacattgaatgaccttgatcagctatgcgtagccgtgccatccaataccaaatgttatgtgcttcacttttaaaaattttactcaaaaaagttaaaataaagttttgccaaaaatggatattcttactttataccaaaactagtaaattttatcctatatgccttgattactatgctaatcttcctaggattagccataacttgagtaaacctctcatagagctaaattacgctgccactcattgcacaatgcaatcttgtcacggatggaattttcatttagacaattttcatatctctatcagttaagctaaacaaattatttata

SEQ ID NO: 285295 - DNA, 388 bp, Glycine max
  unsure (1)..(388): unsure at all n locations
agctttgtgctaatatgttctattgacactctttatttctgaacttcttctttcacggcaaagtacttcaattccatatgcttagcacccgtagagtacttgtcgttcttagaaaagaatattgctgcggagttatcacaatacattttcagcggcctagcaatactgtcgacaattccaagccctgaaataaagttctgcaaccaattagcctaaattgtagcctcaaaacatgctacaaattcagcttccatggtggatgcagcaacaactgattgttttgcactcttccatgatatttctcctccggctaagagaaatacaaagccaagagtggattntcttgtatccacacatccagcaaagtctgagtctgaatatccaatca

SEQ ID NO: 285296 - DNA, 420 bp, Glycine max
tgccattgtttccaaataccatcactaacatcatatgaaaacgtgtgttttacagctatgaaacactgacacagacacagacacgtggacatttgtaatgtccaaaatgtaggacacacacacacaaaattaaataaaataaaattacataaaattaaatatgagcgatatgcataaaagatctaaattgaaaatcaagatttatatatttatcatcacacacacacacacaaatatataattaaataaaataaaattacataaaattaaatatgagtgatatgcataaaagatccaaattcaaaatcaagatttatatatttattatcatctaaaaagaacttttcctatgataataagtcacaaaaaatactaagagacctcattatacaatttgtacgctttgtttctttacaaaca

SEQ ID NO: 285297 - DNA, 387 bp, Glycine max
ttcttgcagccattagaagagaagagaaagaacatgtgattagatgtatgactgaaaatgctagtcagtttgtcagattgattgtgaaggaatgcattgaccgtatcccagtgagcgtgtgatccttaaattttaagagaaatgactatcatttaatactgatttttgcaagaatctctgaagtatggactgaatgcatgaattaaggatgatgaaggccatgtttgattgtgatagccacttagccaaaaagctgaccacgtgcttgaatgatttatcccttgcacccagtttgagctgaatgaattactaattgactgaacctttagcctatacagtgttatctcctgctaccttgttttaggttgtaagagagcatcatccact

SEQ ID NO: 285298 - DNA, 414 bp, Glycine max
tgtagggttaaagtctcacgattgtcacgtgctcatgcaacaattgttagtcgtggctatacgagacatcttgccaaacaaagtcaggttaacgataactcgcctgtgctttttcttccatgctatatgtagcaaagtcattgatccagtaatgtttgatgagttggaaaatgaggccgcaattatactgtgccaattggagatgtattttccccctgctttctttgacatcatgattcacttgattgtgcatctggtcagagaaatcaaatgttgtggtcctgtttatctacggtggatgtacccggttgagcgatacatgaagatcttaaaagggtatacaaagaatctatatcatccagaagcatctattgttgagaggtacattgcagaagaagccattgaatttttgtc

SEQ ID NO: 285299 - DNA, 373 bp, Glycine max
ttcttgtataatgtatagttactgaataattattgtcatgacaaggaaatcttaaatatgcaattggtcacgcatacatatatatatatatatatatatatacacaatgtgtcaatgtgaagactacaccaccacattcttggtgcaaaaatagtatatacactgataaccaaggacccttttgtttcttacttttgcctttaattaagtgggcgtgccctcccaaatttaaaaagataaagttagcatatggtagcaaaatacccttacaaggcaaaaaagcagcacggaaacaaccatataaaagagaagcatgccgacggcaaaatcaacgtggacagaatcaagagagtgacacattattatgaagtca

SEQ ID NO: 285300 - DNA, 408 bp, Glycine max
tcaagaaaaagatggcctcttcaaattccttatttccggaagggaattctatcaatagacctccaatctttaatggagagggttaccactactggaaaacccgaatgcaaatttttatcgaggcaatagatctaaatatctgggaagccatagaaatagggccttatatacccaccacagtagaaagagtttcaatagatggtagttcatcaagtgaaagcataaccatagaaaaacctagagatagatggtctgaagaggatagaaaacgagtacaatacaacttaaaagccaaaaacataataacatctgccctaggaatggatgaatatttcagggtttcaaattgtaagagtgctaaggaaatgtgggacactcttcgattagcacatgaaggaactacagatg

SEQ ID NO: 285301 - DNA, 354 bp, Glycine max
ttgtatgcatttacaataggagccagtggcatagtccatgtacttctctaactctttcttgtacaaaacacaagcatggcctattgtgttgtaaaccttgtctgccccatataggttgatcttaccaaccctattctcctttggggttatgtactttctaatctcctcaatgatgaaaaaattgatcaaatgatcctccttcactggggagctcgtcccttcatcaaccttgggaacccgaatctgccttagagcaacattaccactatgaagagggctgactatttgatcctctagaaactccttgtccaacatggcgcctatgattgtctccattacttgaacttttgactc

SEQ ID NO: 285302 - DNA, 396 bp, Glycine max
tgccagaataatgggttggattcttatcattctgtgtaggttggtcatcttggtaagccttttgagtctcactagattctactcagcaggatttttcctccacaatgaagatatatgccaacacttctacaatctgagggatgtttctgatggttttgatgtcaaatcattctctgatagagttggagaagtgatagacatgttggaagctttgcaggccaagcttgagtcaaaagttcaagaaatggagaaaaacaaaggctccatgttggacaagaagtttctagaggatcaaatagttagccctcttctagtgctaatgttgctctaaggcagattcgggttcccaaggttgatgaaaggactaacttcacagtgaaggaggatcatttgatc

SEQ ID NO: 285303 - DNA, 364 bp, Glycine max
  unsure (1)..(364): unsure at all n locations
ttctttaatttttggacctttagatgcaatttcataagtcatgtgaatgcttaaagttgtttgaattgaattggcctatttgtttggttaaactaccaaggtgggtgcattgcgcatgaattgttgtagaatatctaattctttctttcaaaataatacacatggagtggtgatctttattagttgtatgtatggtaacacctacaattaataaagaccacacaaaaattggttgacttcttggttgctatacttgggataactaaaatagtattgttatgtatttcatgcaaaatattctttatgctaaattntacttgaatgtgcctttgtaggtatggcttcgaagaagctatctactaaa

SEQ ID NO: 285304 - DNA, 408 bp, Glycine max
  unsure (1)..(408): unsure at all n locations
ttgaaagtgtagttnttcatcttctcgctaagccattctactggcttagcgagcatccgctaagcgcaacactcatgggctaagcacgacgaagactctggaagaagataagttgtacaggtttgctaagcgcaccacttcatctcattaagcgcaccgcttcagttcatccgctaagagagaaaggcacgcgcttagccaaaattcactaatgtgcgctaagtggtccataattgcgctaagcgcacgagcacgaacaaggccacctatttaagcgtgaaatcagattttagaggtggagtttggactgggattcagagctttgcatgtctagagtttctagagagagaaaggtccaagctttagagagttttgagagtttttgatgtgtgaagatctgcagagacc

SEQ ID NO: 285305 - DNA, 368 bp, Glycine max
tattcttgtgagcattctctccatagatcatatcattcttcatttaggtgatcatgaaggtcagagagatggtatagctcaatttgtaagccttctagtaggctatacaacttatgaagatattctaatcagtcagatttatttttgtttacatattgactcattattaaagaggagctttgtggtctctattttaagagcttcaaacgcatcacacacttgagtggaaaactattaagaactatatactattactccatgttacccttgaatctgattatgatcactggagatgttgaagaaatatattcttgactctgataatgtttacacattatggatgaattaggaataagctcatgatatgt

SEQ ID NO: 285306 - DNA, 412 bp, Glycine max
tgctatgtgccccctaattgaggaacctaatagatatgatccaaaagtccacttctagtgataactccaaggggtggttttaagtaactctactggtttctaaagatatcatcctcttaagtaatacattgtggcaataagaactatcagcaacaatgcaccactaaaagaggaaaactctagataaggcttcactgtcatcaagcgagtcggagacccagcatgaccatagattgacctccactccttacgactcacatagacccgggtataaggcctaatatctcaatgtgcgtgcgaagtgtacgtgccatgtgtgtgtaaaacaaatatttctaactatcaatgtaatcgatagacaaacacacatcaaacacaacaacatagaaaaggttatatacaaatatggaca

SEQ ID NO: 285307 - DNA, 368 bp, Glycine max
ttcttatgagcttacataacttacacattcgttgatgggcacttaagatgagtacattcacacttactcacatacttatttttatagttactcttctaactttatatacttatttgaggacgttatgctttattgtacatgtatgcctttatgccgtccttataacgattattcttttttaggaatttatcataatcacatctatgacgtgtgtctgtttcagattttagtaaatacaacattaatttagtatatctattatattgattaaattcctgtttttcatgtgtgcacggaggatcattactaattatatatattgatttgaacggtcgaagtcttttattttataaattatctttcgtact

SEQ ID NO: 285308 - DNA, 359 bp, Glycine max
gaaagatgctgaatacatgacagtagttttaaaaaaaatgctaaaggttcatacaacaacttcaaagaagcaatgacgatttaaaaaatgaacctaacctttcaagttaaaaactacgatatactattgaagagtggaggcacaatcactaatcagcaatcaattataggctacccaataacaaattcaagcatgatggttaaggtggaacagaacaattaccctgcaactgagctgagcatacacgaagcaataacacaccaaccagttacggtagaggtagtaatcgcaacatagtcaaagaaatcacgagactcaaccgagacacacgtgtgccaacaagtatcgacaagaacaac

SEQ ID NO: 285309 - DNA, 374 bp, Glycine max
ttcttgaagattctgggagaatttcatctttattggctatagctccttgtgagagagctatacacttcacaattggtataccaggatagagatcattatctgaaatgtggttatttataagcaggccttttggtatcggcaaactgacaatgttgagtgagattgctcttactgcagttatttcaaagcatagtccaacttcatcaataaatgatcaacaaacacctagcacaccatcgtcactgagctttagctctttatctccaaacttaactccaataaaaatgaggagtttgagtgatatttataccatgtttaattattattctatggaacaatttaaccttgaataagcacgtaatgaaatgcttggc

SEQ ID NO: 285310 - DNA, 380 bp, Glycine max
  unsure (1)..(380): unsure at all n locations
cactatacacaactcaagcttcttgagagaacttanaataaaagtattaagtttaattgatcatatttataagcgactataattcatactatgaccctttatgcttccccctcccttttatcacatagtaacggtttgaaaacaagggttgattcaatgctggaacaaacaagtcatcttcaccatcacttacatagttgattgctaagtttttgttatgaagaaaaggaagatcccttatagcgtcgtccttgaacaaaccaacaaaaaaagtactaaggctgagcttctttatcaaggattactaggtaacacgcattccatggaaatataaaatactttgtcttcttatccatgtaatgtaaagcaatagtaagaat

SEQ ID NO: 285311 - DNA, 367 bp, Glycine max
  unsure (1)..(367): unsure at all n locations
agcttctcactgtcaaaggaacccctttgcattttttcacaatttcctttccgatctccattagatttggatattccttctcttgaccttccttaaatgcccatctcacaaacagcgatatacaattctctggagaaaggccctctaaaacataagagggaatagtgcccatcattgaagcaatggagttacttcgcgttgtcactatgattntgcttcccactgcaccaacttttattaaatttttcaagtcaatccattttgtataatcatcattccatatatcatccaagaccagtaaaaatttctgaagagaaagcttgtgtctaagacgagtttgaagctgctcaatatctaagctggtgat

SEQ ID NO: 285312 - DNA, 374 bp, Glycine max
tgactgttacttgatgaatgtatgtcagctacatattctttttcagccttatattgcagaacattatcatactgatcaacaaattgcttcagagttgttagccggcttacatatccatcaaaaaatgcatgcatgctttcattgtgtggaataatagacattccagcccagaactcacctcttacaaaggaaggagcccagcgatgtctctcacagaacaactctttcaaccatttattgtccttgaggtcaaaatcctccacaatcttctttcatttctgctcaaattcacttattggatgtgtgtcatatacaacattctgcaaatgatctcttaaggactcgtaataacatttccatggattagttgggga

SEQ ID NO: 285313 - DNA, 355 bp, Glycine max
tttcttatgcgcatattgccttactatcgttcacttgcgcaggacattctatcatctagaaaaaatgcacccatatgcagtcaaggtagcttggttacctagatgatatacatgtacttactatgaggatttgctatttacatgacacacgcctacttggctgaatgtacatacatacatactctaagcatttgggggtaccaaaaattgcacatgcgcgcatattgatatgtctaacacccatacatatacaaacttcacgaagaatgttgactacctacacaatgaggtgctacatttcatgcttttttttttaagatcttggctacctaaagcaccatgcaagatcatgcat

SEQ ID NO: 285314 - DNA, 384 bp, Glycine max
  unsure (1)..(384): unsure at all n locations
ntgccaaataaacaagttccctgtgttcgatacttggatcattccgttttagttttacatacttggcgacccggtgcgcttgccggtatatcacttcccttttgatataagtgtttgtaagtttaagaaaaaagaactgtgtggggaagcgaacaaagtatttttggtgccgttgccggggaatttatttcatttggaaagtttaggtcagtttgaaggcattattgattcattttttttctttgattcattgattatttttgtgaatatttagttactgcacaatttattgctctttggaattggttaactactattctgcttgttttgcatgcaaagaaggtctgctgcaagtgctttgatttccatagacttgaaaattaa

SEQ ID NO: 285315 - DNA, 362 bp, Glycine max
atcttgtagaatgggtagacatgatacatgtcagggtttggtttggttcaaggataaaagggatgccccacattatctccatgacacaaatgcaaaaatgatgatttggaaacttcatgcaaaactggtcatgcatgcacctatgcggacactcaagcgtcaaatttttatggtcatgtgatgctagggctcaggattcatttcctctattttagtcaacccaatatttccaaaatatgctcttttatcaatttatgcatttatcctagtccatttcgggcgtctggggaaatttcacagcattcacccttcaggtgtagacacatttttcaaaaattggttatgatcaatgaatttttttt

SEQ ID NO: 285316 - DNA, 351 bp, Glycine max
tactccgcacaatgagggccttttgggtatgaagtgtctattcctccttctaatgacgcatggacacttatctctgacccaactacaattcgtgcgaaaggtcggtcaaaatcaacaatgataaggaatgagatggattgggtcaaaccatctgagcaccgacaaaatgtattacatgtggagccgaagaccataacaggagtcgctgtccaatgcaatctaagcgcgggagttgttcaaaccattgatttatgtatgttagtcgactcactctgatttgtttaagttctcttcaatgtattgaacttgcggggttgaatcaattcgttagttataaacattacttattta

SEQ ID NO: 285317 - DNA, 362 bp, Glycine max
agcttgtagaattatggggtacccatcagatgtggtactaggtggcggtcgggcgatggtgcacaacaagttttccacatccacaatgcgcgcataaacccaccatcccctgttgcccacctccaactgagctcacgtactcccacgtagcccatatcctcgtttctctcaacaccgggtccccatcaatcctcccaagcttccacaacatccaagcaaaacaacattcacacagcacaagctatcacatcctatcataacaaagcaaaggctgaaaactctgccaaaacaccaaccaaaaatcacaagtttttcccactcaaagaccccaggaacaattccttcgatccaatttgttaacc

SEQ ID NO: 285318 - DNA, 404 bp, Glycine max
tataatatatcgagatgctcgaaattaatcatcggtagctcttgagaaaatcaattggtcataatttatcacacggatgtccgattcgggtgcataatatgtcgagacgctcgaaattgaacaacggaggctctcgagaaattcaaatggctataacctttcacacagatgttcgattcaggagcatcacatatagagacgtacgaacaacggatgcactcgagaaatacaaatggtcataacttttcacaccgagttcccattcacgctcatactatattgatacgtttgaaattaaacatcggaagctcaacgagaaattcaaatggtcataactcttcacacggatgtccgattatggagaatcacatatcaagatgctcaaaattgaccaacgaagctct

SEQ ID NO: 285319 - DNA, 366 bp, Glycine max
ttcttgtcaggtttcctaactcttttggtatgttgccagtgattccattcccttgcaaagatctaatacaagtataatatgcatcaatttactttcccgtcatcaaaatttgagttagttagaatgcaaaaataatttttagtattatggagttgaccaagattgtgtggattttttgtgatagaaatccttacagagctgtaagatattttaaaactcctattattggggtcaagtatcctgtgaatcccatatatgctagtgatctgcaatgaagcaatttatatattacacagcaagcaggaattcaagatttaaaaatgtgaaatataacactttctacaatgagtaatgacagccaacatc

SEQ ID NO: 285320 - DNA, 358 bp, Glycine max
  unsure (1)..(358): unsure at all n locations
tccacttctcaatgtgagagctctatattatttctctttttaacccatactgttcattattaacattgaactttttgtttttcttcaagataaaaaaaaatctcatgaaactttgctataatatactttgttgatgctttgtattccactattcatctggagaaaacattatatctatattacctggttaacttatgaatgtgaatcattttatttcatttcaggaaactaactttaaggaatggaggcaagtggtgacagaaattaaccgtntcacgaaagttgacaagggctttagtttcaggcccatgcgttattgtgccacatttgatactcatcgagcttctcttccttatgt

SEQ ID NO: 285321 - DNA, 366 bp, Glycine max
ttcaacaacaaaaatgcaaaaggttgttgtcaaaaagtaaccaaaacttattctattatcaacacttttcttcaatttatttttattatcctaaaaacaatgtatttttgtttaaaataaattagattcatgttgttaaatgcatgtttttgttgttttacatttttataatcactgcatacgctaaaattcttttataattaatctcggaatgatgctccactaaaagtcaaatttggtcctagaaaagactcttgtcatgtgcctttatatattttcctttttttccagttttatattattgagacatggtgagggtgaatattaaaacccaacaattgttaatcgaaattttcggttttgatt

SEQ ID NO: 285322 - DNA, 374 bp, Glycine max
  unsure (1)..(374): unsure at all n locations
ttgagctntgagcacccacgagtgtttcatcaccttattaccaagagtagtgtaggcggttctgtaggttcgagcgaggggtttccggtagtattgaaaacaatatgggacaatgtgggtgtcgagggagcgatttccggcagatttcacgcgggaggagaaagagaagagcgatttcaagcaggaggagaaagagaagagcgagtgcaaggttttcgagcgcgcacgttgtgaaatgtcaatgtttcaacttataaacataacaacatcggttttttaaggataaccgatgttaaatgaatatagttaacatcggttgtggcaaaaccaatgttaacatcagatatgttacatcgtgtttttataaaaaccaa

SEQ ID NO: 285323 - DNA, 369 bp, Glycine max
  unsure (1)..(369): unsure at all n locations
atcttgtgcattcaatatcctgatgagggtgttccatatgttctcaagactagactaatacatttgttgcccaagtttcatggtcttgcaggtgaagatcctcataagcatcttaaggagttccatattgtttgttccaccatgaagccccttgatgtccaggaagatcatatctttctaaaggcttttcctcattctctagagggagtgaaaaaagattggttgtactaccttgctcccagatccatctccaactgggatgaccttaagagagtgttcttggagaaattcttccttgcatctaagaccactgccatcaaaaaagacatttcangaaacttaatggagagagcttgtatgagtactggg

SEQ ID NO: 285324 - DNA, 351 bp, Glycine max
ttgaatggacaccacttcattttggtcttctttgtatacttcaccaaatgggttgaagtgggtgcgtacgccagtgtgactaggagtgtggtggttaggttaatcaagaaagagataatctgctggtatgggttacccaggaagattatcattgataatgccaccaatctgaataataaaatgatgaaagaaatgtgtgaggatttcatgatccaacatcacaattctactccttatgggcccaagatgaatagggtagttgaggctgctaacaagaacatcaagaaattagttagaagattaccgggtcatacaaggattgacacaagatgctcccttttgcactacatg

SEQ ID NO: 285325 - DNA, 327 bp, Glycine max
ttcttctcggtacatcacgggcctcaatcgtacacccatgtcaaaagttatggccctctgaattggaccatagcttccttgttaggtttcgagcgtctcgatatattgtgtctgaatcggacatccgagtgaaaagttatgacaattttaatttctcgagaacttccattattcaatgccgagcgtctctatatatcatgggcgccaatcatacactcatgtcaaaagtaatggccgtctgaatttctccagaacttccattattcaatctccagcgtctctgtatatattgctactgaatctgacattcgactgaaaagttatgac

SEQ ID NO: 285326 - DNA, 464 bp, Glycine max
cggtgcttgattgtgtcgttcgtcgacaccccgggctcatataatacgcctgcatctatcccgcacctctatacgacttgcgagtagtgtagtgtgaccaggttcagccccttgagctcttctctctctatacaaagctcttacgaatattgttgcacgtgaagaagatccacgccgaagcgctttcagaacgtttacgtgagtgaatgctcgaaggatctctaccgttcttcggagatctttattcgccctacatcgaccctcagtgctcaacgggttgaccacctcgaaccaagctgtaacacttcattgtatgtacccgcagtggtccacacttggtttcatgtatatttactctcgggtgcatttactgtttataccgccttttgacgagcttaagccgttttatttaagtcatttctcgcttaacctccaataaactaaatccccaccgattgtgtgaa

SEQ ID NO: 285327 - DNA, 353 bp, Glycine max
ttcttgctggcgaagacgtgctgatgccttctgattgagcttgaacttgggcctgagtcaacccctgaccctgggatcttcttctccttctcctctataaaagcacggaatactcgatatggcagatacacataccgattctgaaagcgggaacgatttgcgacaattatccgcccaattctctcatcgccaaatgtcaccctctttcagacaattttccggcgcatatggaaatccctcgccggacatttacggtgccactgcctgtacactcaacaatccattattgctccgcatctccatctccaactacatctacatctcgaacgctacttagctagctagggtttatg

SEQ ID NO: 285328 - DNA, 182 bp, Glycine max
ttcctacaataatggggcattcattattgcttttttatatggagagaaagtggcctccaagaggttgttgatgatgttgctctctgagttgatagcatgcaactgatgatggaagttgcggcttgttgacgatgatatggtggcaaccatacctgaaagaaatcaatggtgttggtcataac

SEQ ID NO: 285329 - DNA, 370 bp, Glycine max
atcttatcatatattcattgttggaacgcctacatttgccacactccaagttggtagccctggacatgaggaggggtgctggaaagtcatcttaattgtagtcacccttggcccaccttagttgccgtttcttcgggctgccttgattgcagtgttgaaagggggtgtttagtcctacatggactagatatatgacttaaataaagctaataaagtttggacaatcctcaccttaaatagattgatatcctttctctcatctttcaacactatttctctctctctctctctctcttagtttctcttaattctactaaaatcattttcagccacaatagatcatagtccttggtcaattgctctaaattca

SEQ ID NO: 285330 - DNA, 414 bp, Glycine max
  unsure (1)..(414): unsure at all n locations
ntttctttgatatatagctagcaatctatactttgtattaattgtagaatgcacaatgcaaaccaagtaggagggggcaaccttataaagaggtattctctgttgtaatgtcattttaataagttggttgaagaaatacttaagacataataagtacaataaaataataatgtgaactgtctacacccaaaagacaaaaattaaagatggccagaaagttctattatttttcttgtgtatcacataaagtaaccagttatccatcaactaagatatcttttgaagctaagaatcatagtttgagtntaagggtgatttatttatttattttcttctttgcgatggactaggtggtcacatcaagatactgggtttggtctaaccatattgggtgaagtataacgattctcagct

SEQ ID NO: 285331 - DNA, 372 bp, Glycine max
agcttcttattcaaggcacattcttggtggtgaagctccttcttccatggcttattccctagtggatggtgcctcctctcacctcttctcttttgtctttcgctgtatctccattgtgaaaaattaccattgatggacttcattgaagctcaaagatctagcctccatagtgtggaagcaatgacttccaagattattttgatgatgccaaagaatcaagagttaagcaagttccaaagaataaggagtcaaaaagcttcaagaacaatcaagtttcaagattcaagattcaagaacaatcaagtttcaagactcaagattcaagaacaatcaagatcaagattcaagaatcaagagaagactcaatcaagt

SEQ ID NO: 285332 - DNA, 368 bp, Glycine max
  unsure (1)..(368): unsure at all n locations
tattgcatcgattatgtcgcttagcgagatctgcttattatattacctgcaactcttcgcacgcatattgctgccaaaatctgagcttaacggcatggaatggtgcttaactcaatcaaaatgaagtttggccgcaagaagttcaacttagccaccatgattggcgctcagctctatgaacttcagttctggccgtaaagaattgggctttgtgacacttagtcgcacttagccaaggataatgtatcgcttaacggnttggctgtcngcttaccgaattcagatcgaattgaagttggcttagctcagccttggctagcttaacggaccaaatcatcctcagatgccaaggtcgagcgctaagcgct

SEQ ID NO: 285333 - DNA, 376 bp, Glycine max
ttcttgttactattgaagaagtttatcatgttgtttcctctatgaaatcgtataaggcacctgaacctgatgggtattagaaaatattttttaagatattttgggaaaaggttggagatgatgtttggagatttgttagagaagcgattcataaggtatgtttgatgtgtaggctgctaagactattattgtcctaattcctaaaggtgattctcaaaaaacatttagagtgtgtttggatagagaattttaacaaaggaaagtaatttatcagagaatttaaatttttctaatctagaattcattgtttggatgttttttttatgaagaatttaaatttttggaattttaaaacggaatttcaaacaactaaaaa

SEQ ID NO: 285334 - DNA, 400 bp, Glycine max
  unsure (1)..(400): unsure at all n locations
ntgcggatttggtcttcgccagtgaaaggatcgatgtgggtccgaatagaggcacatttgatcatcctactangacgactgagaaaactggggcaattgaagagggtgagaaagagggagaaacccatgctgtgactgccattcctatacggccaagtttcccaccaaacccaacaatgccattactcagtcaataacaaacctcctccttacccaccacgcagttatccacaaaggccatccctaaatcaaccacaaagtctgtctaccgcacttccaatgacgaagaccacctttagcacaaaccataaaaaaaaaaaaaacaccaacaaaaaggaattttgcagcaaaaagcttgtagggttcaccccaaattccgtggtcatatgctaaacttgat

SEQ ID NO: 285335 - DNA, 346 bp, Glycine max
ttcttctaaaggatgtgagcttatttatgagaggggtgtatgtagctaagctctagcttctcaaggaagctatctcaaagaagcttatcatagaagtattctcaagaaagcttctcaaggaagctacctactctataaatagaagcatgtgtaacacttgctgaaactttgatgaatgagagtcttgtgagacacaactcaaagttcaacttctctacctttttcttccttcaatttcgagctccccctctctctttctctccctctttcttttcctccgctgaagcatcctctacaagcttcttatacaaggctcatcttggtggcgaagctccttcttctatgg

SEQ ID NO: 285336 - DNA, 305 bp, Glycine max
aagagaaattcaacgccaagtcccaattttgaaaccatatatattgtcatataacataatcactttattagaagcgcataagacaacatactcacatggcccctgtatttgtgagctcataggaaatcaagcaagggctaccaagaatccttgttgctcaacataattgacgaaagtcggacaaggaaatgtggcattaaatggctcaaatcaaccccaatacaaaatttcattactctaagcacattgcaaacaaaagcaatccttaattacaatccagggcagatgttatttctataacaaaa

SEQ ID NO: 285337 - DNA, 365 bp, Glycine max
tgcattttatcttttttggatgtttatgccctgacggggggagtccttaccttggtaataaaatattgacctaattagcattatagttcctgaataatgatagtgttctttttacattgataaatgtacatattttttttctccatatcttacactacatactttttattctatatattgcactatcttttatttataattctaagctaaaggttatatttttcgtttatacattattactacgtaaaataacattattacacaaattaaattatttgccatatatttactatatactgcacacattttgttggtagtttaagtgaatccatactcaatcattacatgtcttaagtttgaagtga

SEQ ID NO: 285338 - DNA, 387 bp, Glycine max
actgagttgcatgcatatttttaccttttttttttacacaatatcatctacgatggcaatcggtacatatttctctacttctcaactaattggatgctgtcatcctaccccctctctgaatctttacaagcacaagatctaatatggggcctagagtctcaactcacaactgatgtatgtacgaaaatatccagttttacaatcttaatatctactagattcacaaccgaggaggaaaagtaactccctttccccagtgaccttgcatgcgtaaccagtatgcccatcataaacgcatgtgattcatgccttgtgtatgtgctgtgccctacaacttgcggaattgggggtaattgtggacgtaaatatccactttaaaattaaaat

SEQ ID NO: 285339 - DNA, 372 bp, Glycine max
ttcgcatgctttcttatggttcgacttggggcccgacttatacgagtaagatgatggcggtggatccttggcgtgaggattccttatatcgaaagtcttcttggcggatggtccacgcggcagcgtgaggatcccttgcatcaaaatccttcttggtagaaaggtcacgcaacatgtcccatgggtggagcggtggtgcaagtatctagagcatgtgggctttaatggccaccttggaaatactcatggatgaaaatggcttctgctagagggggagactaccatctggatgacactcacactttatggggagattataggagtacacgtgtgaggtaaagtctcacatctcataagaatgagaaagttaaa

SEQ ID NO: 285340 - DNA, 346 bp, Glycine max
  unsure (1)..(346): unsure at all n locations
caatgcccggcatcagagatgcagtantcaccaccatctgtctgcccaagggtgaactcatcacatgcgtgccttgataaaatttctataactgtaaagccaatgagggtctctttcttgccagtaatagtcttcacaaactccttctcagggttcttagccaacacatcatattcaggagaccctttctcaagcataaatctcctgcaaataattggcctattcaggattaaacctccatatggatactgtccaaggtaacagcaacatgaagagttgaagcaatccatataagggtagcggatgcttcaaccaactcttcccaggtttgcatctgttgccacca

SEQ ID NO: 285341 - DNA, 365 bp, Glycine max
tttttggaaggatgcttcaatggaggaaaagtaagagggagagaaagagagagggcggagcacgaaattcaaggaatagaagagggagagaagtataactcttgaagtatgactcacaagactctcattcatctaagttacaacaagtgttacacatgcttctatttatagactaggtagcttccttgagaagctttcttgagaaaacttccttgagaagctagagcttatctacacacacccctctcataactaagctcacctccttgagaagctttcttaagaagattcctaaagaagctagagcttagctacacatacctctctaatagctaagctcacctccttgagatgagaagctagag

SEQ ID NO: 285342 - DNA, 368 bp, Glycine max
taaaaccccttgatcattactaaacaagctaaaattattcttaatcatacagcaggtatcctaattacatgcatgaaataagaatgaaaaatagaaaaagggaaagaaaagctgggtggcctcccagtaagcgctcttttaacgtcactagcttgacgcatcgccctgttatccatgatccaagagagttcctacttcaaggaccttcttctcaagtctcttttcctccatcacatgcactttaaaacaaacattttggctaggcggatctttgtcctcctggaacatatcaaagctgatcttctgatcttctatgcccatctatagaatcttcttccccatgtccattatgaagcttgcagtaaaca

SEQ ID NO: 285343 - DNA, 698 bp, Glycine max
  unsure (1)..(698): unsure at all n locations
tgcagactgcgtcngnntttgattagccccnntcggaatnagccattagcgancntcacccanntaagngtctgagatantcncacgccatcgagtcacctctcgaggagtactcccctnnnctagcaaagcgcgnnacgcatgttgttctactnantggcatatgtctctgatctatacaggcntncatatgtaacagtaggcgatgtatacgccgcatattctacgtatcagatagtgtgaggactactatggttgtctctcgatttagcgcagtgacgcgcaccatgtatattgtctgagtcatcacatcctagctgtcaccgatgctacgatatttgttacngttcacagcacgcttgtgtatatgacgatagacctacatcgagtagcagaataatctcgtacgataataangcttcattatacatactatgtcacacatacacgtggtgtgatagatgtctctaatactaggtaaagacacagtttcttcaaaccagctctgcgatttgagagagacctttacactaaatagatctctaccacatctccttgcggaaaagcgtcgtattactcaattagatagaggttgcttagtgcatacgtaacattgacttgtgctgagatggatagactaattattacataggagagagtgtcaacttagataggctccatacaatctatcgcatacg

SEQ ID NO: 285344 - DNA, 354 bp, Glycine max
aactcaagcgtaaccttatcgctattggagagtcatatttgaacttgatgacggagcagcaaaactatctgagagattacggcgcgaagtatattcttcctcgtcgaccatgcaaccctcatcgaagtcttgagcataccttaaagggtcataccccaagccaccaacgggatcgaaagtgcttgttctccttggcaaggaagcttcaatttgagacaccccagacccaaagctagcctcgtctaagagatgatgaactattctccatcacttcgagagagctcatggaatgaaagtacaacaactcaatatctaatgctttttgaagcctttcttattcactacttttcactc

SEQ ID NO: 285345 - DNA, 466 bp, Glycine max
  unsure (1)..(466): unsure at all n locations
tgagcgcanccattgacacgngtgaatgcattgattgattcgttgaataccacacgggaattcgagatccgttccagacgacctctataatgccatgttgcacgctttctttactcgcatgtcctgacactgggcgtacctgatagtgagcctgggactaataaaggggaattctctagaggtgcaagagaagatgatgtctcttctttggtccagaaaaagcgcactaaggcaccggtagtttgtaattgtgactttgataatactcttagaaacttaatgggaacaacggctatatagacggttcgaatgctgaccatatcataacgcgactgatgacatcagacaacgtatgagttcgagcacactccacatgtatagcctcttgcatttgttggatgagattggctgacctctatttggaggaactcgcaaatgaatgatactacctttatcatactgggag

SEQ ID NO: 285346 - DNA, 391 bp, Glycine max
tcaagataaatggcctcagcaaattccttatttctataatgaaattctatcaatagacctccaatctttaatggagagggttaccactactggaaaacccgaatgcaaatttttattgaagcaatagacttaagtatttgggaagccacataaatagggccatatatacctaccatagtagaaagaattacaatagatggtagcacatcaagtgaaagcataacaatataaaaatctagacatagatggtctgaagaggatagaagatgagttcaatacaatctaaaagccaaatacataataacatctgccctgagaatggatgaatatttcacggtttccaattgcaacaatgctaaagagatgtgggacactctacaattaacacatg

SEQ ID NO: 285347 - DNA, 367 bp, Glycine max
  unsure (1)..(367): unsure at all n locations
ttcttgcacacaagattctccttgcctggcacctcnaaaccttcaggttgggtcatattgatgtcttcctctaaatccccatgcaagaatgcagttttaacatctaactactccaagtgaagattctctgcagctacaatactcagaataactctgatggtagtcatctttacaactggagagaagatttctgtgaaatcaattccttgtttctgctgaaaccttttcaccacaagtctctccttgtatcttcttctatcgtcggatttttcctttaacctatagactcacctattctgtaacgctgtctttccttctataaatttagttaaagaccacgtcttattcttttgaaggggtgtcatct

SEQ ID NO: 285348 - DNA, 388 bp, Glycine max
gtgcataccccaaggatccattaggattttacttgtgaaagagagccatgagggtgggctcatgggccactttgggatagacaagacccttgtcttactcaaagaaaagttttattggccccatatgaagaaagatgtccataagcattgcactaggtgtgtggcttgtttacaagccaagtctagggtgatgcctcatgggctatacacacccttacccatcccagctgcaccttgggtagacattagtatggactttgtccttgggcttcctagaacccaaagaggtgtagactctatctttgtggtggtggataggtttagcatgatggcacactttataccatgccacaagatggatgatgcgttccacatctcaaaactcttt

SEQ ID NO: 285349 - DNA, 353 bp, Glycine max
tgcttcaacataagccacggttcaaataagacatttaggttaagggttagggcattacttgcggtttgtctataataaaatcaaatgacatctattaatatgcctgtcccaaccaactgtctcagattttgtgcatatgacatactgtgttcttgcttcagttccacgtattacaacagtttactagaaaatatcattgacattaaggtccagagcaaaaaatgcacatgcttttatataaaagtgtccccctcctccctctctcttttagtaaaagagagttatatccaatattgttgaattcagttcgtgaatactaacagacaatatgcaattaatcaattatactactt

SEQ ID NO: 285350 - DNA, 364 bp, Glycine max
  unsure (1)..(364): unsure at all n locations
tatcaacatcaaacttggagaaatatntctttggttctagacatgagaagcatcaagtataatgttacttcctcactaaagcggtgatctatctccacacatattttatcaatagcaacataaaaaatctttgcacggtaatgatgaagattagtgatagtcatcccttctgctcttgaacgaccccgcaccgggatttcgtcatccatatttggtaccggaatacttttagctacacaaaatacttggacattggcaaaaaaatattccagccactctctctcattgtgcccaaccgagctttgacaacatcaactaattgcatggcattcacagtattaagaaccttttcttgcaatacatt

SEQ ID NO: 285351 - DNA, 358 bp, Glycine max
  unsure (1)..(358): unsure at all n locations
ctttcactcgcatgtccgattcaagcgcatagcgtatcgagacgctagaaatctaacaaaggaagctctcgagaaattcaaatggtcataacttttcactcgcatgtccgattcaggcgcataacatatcgagacgcttgaaattgaacaactgattttctcgagaaattcaaatggtcataacttttaactcgcatgtccgattcaagcgcataacatatcgagacgctcgaaattgaacaacggatgttctcgagaaattcaaatggtcataacttttcactctcatgtgcgattcaggcgaataacttatcgagacgctcganattgaacaacggaagctctcgagatattcaaa

SEQ ID NO: 285352 - DNA, 368 bp, Glycine max
ttacagcagattttagtaatgacccactaaccttttttaaaataacttaatgccattaacctagggaattaaaaaaacttaatggctagtgtaactgaaattgtggcaaccaaaagtcacccccaacagccaacaagtcagccaccatttggtctcccaaaaggctgatgcctatgttgccaattgggcccttattacaacttgaactaaacctaactaaagcccttttagttgattaacccaaaacatatttttggtcagccaactttacaaggattgggccattatttagacaaactaaacactctaaaattgaaacaaagtggtgtcatttattcctcctccatttgggccatgatacaactcac

SEQ ID NO: 285353 - DNA, 374 bp, Glycine max
agcttatttagcctatagtctaaaatactctgtcagggctacctccttatctgggggcatcctgctcttttcttataaacctcacaccagaatcccatgcttccaatgtggggctcaagtaccataccttgcaattgtaacctaacaaaacctatcaatctgctgctgtgtttagaaactccttcacaatcaactatctacaagcttaatccagctaagatcaattgaaattaaatccaaagagtaaaaccataacttcggagccataatgtctttcaaatagcacctgtaagtcagtatctggtctgtctacatcattgatttaaggattttccccacaccaccaacattccacagcttagccatacatttaa

SEQ ID NO: 285354 - DNA, 393 bp, Glycine max
  unsure (1)..(393): unsure at all n locations
tgcggtcgcggtgttcggcggtggatgttgaggctgcgcgttggataggaaagagcggcgtgcatggctgctcctccatttgggaagaatatatgtgcctatgtaataatggatttggcgctaactacggtcttgctgttcccttcacggacgtggaaactctgccacagtgccacagtatctcggctntacaaaatattaaaattgtaatttcaaaaccatattatctctgttctattataattaanaaaaatatgccaaaaatagtgatcattttaattctttaatataccattacttatctttttctactcatatgatgaatgttataaaagtgtttatgtttatttttataaaacagctctaaatgattttattttgagatggggaaat

SEQ ID NO: 285355 - DNA, 374 bp, Glycine max
tttttattgctgcttaaagcatgtgtgatatacaaaatctgaagatcctaatgagtggtgaatttgatatgaaagatctaggggctgcaaagaaaatcttaggaatggagatctatagggatagaactcagaaaaggctatttttgtctcaaaaggattacattcagaagatacttgtgaggtttggaatggctaactctaaacctatcagcactcccctttcagaaaaagagaagttgtctgttatgataaagattcaagctcaggctgatcaggattatatgtcaaaggtttcatactcaagtgttgttggcagtctcatgtatgccatggtctgcacaagacctgaccttgcttatgctgttagcatggtc

SEQ ID NO: 285356 - DNA, 392 bp, Glycine max
tactatgacttatttttaacagcttacaatttacttatttatgatcaattaacgctaagcaattgtctggtacgggggttttctgtgaagcttttaaacgtcttacattgacaattgcatgtattatctgttggtaccgtaatattaaaaggtttcttatattagacgtgccacctaaaacaactcatttattcaatattaatgatttggttaccctcgatacaatttactcaattatgaccaattaaaggctagcaattgtctgctacggtgttttttgtgaagcttttagacgtcttacattgacaattgcatgtatcatctgttgctaccgcaatattaaaggtctcttatattagacgtgccactaaaaacaactcatttattcaata

SEQ ID NO: 285357 - DNA, 379 bp, Glycine max
atctttacagcttattttagtatttacccactaacctagaattaaaataacttaatgccattaacctaaggaattaaaaaaaaacttaatggctgagtgtaactgaaattgtggcaaccaaaagtcacccccaacagccaataagtcagccaccatttggtctcccaaaaggctgatgcctaggttgccaattgggcccttattacaacttgaactaaacctaactaaagcccttttagttgattaacccaaaacatatttttggtcagccaactttagagggattgggccattatttagacaaactaaacactctaaaattgaaacaaagtggtgtcatttagtcctcctccatttgggccatgatacaactcacaac

SEQ ID NO: 285358 - DNA, 387 bp, Glycine max
tttaaccttgacttggtagaacctcttgccggtttgatttgttcccatgcttgctaaagtgagacaaaagctggtgcaaatcaaaactccgatatctcatgggtggaatggatgaatgcatgaaggaatgcatataacacagatgtaatctaggaatgcgggggtccggggaattcgtccccttcttagacacaatgtctaggggtagcaaagtgccccaacgtacgtttttaagaaggcgacacggaccctccgttggtttgtatacagaagggatcaagacagaacccatatgcgatgcctatgcaaaagacacaatgcgggaatgtacacagtatgataatattcactgaacataagcaaaagggtatatgatacttatgcatg

SEQ ID NO: 285359 - DNA, 377 bp, Glycine max
ttctttagaattcatttaaaagatcgtgtagtttttcatcattctttcattaattataagtcttcgtagttttgcattgatgttcttttataaacataaccacaacctctcttaggatcttaaggtgttacactttcattttgggtaaataagttagatacatcattgcctttatgctactgtattttctacttgcaaaaacttgctaggctatgaatggaggaacaaatcataggacataacctttaaaattgtgtgtaacttttcgtggtttaagtgtggtttctcctaatcaacgttttaaattgcagttacagttgtgttttgatccctgtctctatttctatctgataaaaataagtaaataacacataaaa

SEQ ID NO: 285360 - DNA, 392 bp, Glycine max
ttgaattcattatatgcacccttaggggtccattctttctttgtatgttgacatcttcatctcgtctactttcagtattctttttcttcattttaagcgagtttcgaccgatcgtttaagctgtaatctcagttaatcaatgttaaaatgaattttgaccgatcgtttgcgttgtaatctcatttaatcacctttaaaataaaattcaaccgatcgtttatgctataacctcggttaatcatcaaaaaggcaagtgtcaaccggacatttgctttgaaagttctcttttaatgagttgagaaataaccaagtgaaactaaggctaaaatcaatcacaaatcaagctctgcccacaaaaggtcatttgaaccgtttaaggtccaacccttaat

SEQ ID NO: 285361 - DNA, 377 bp, Glycine max
ttcttgtagggttaaagtctcacttattgtcacgtgctcatgcaacaattgttatccgtggctatacgagacatcttgccaaacaaagtcaagttcacgataactcgcctgtgctttttcttccatgctatatgtagcaaagtgattgatccagtaatgtttgatgagctggaaaatgaagccgcaattatattgtgtcagttggagatgtattctccccctgctttctttgacatcatgattcacttgattgtgcatctagtcagagaaatcaaatgttgtggtcctgtttatctacagtggatgtacccggttgagcgatacatgaagatcttaaaagggtatgcaaagaatctatatcatccgaaagcatctat

SEQ ID NO: 285362 - DNA, 321 bp, Glycine max
gaacgaggctgaagaagctgctgctcatgttcttcaagattctgtggagaataatttatctcatcctcattcgtcacaagatagagacatggaattggtggtaaatatttgtcacaacacagtacttgtatttcaacctaagttgttgcagcactccattgttatatattacaattattcatgtttggcatctgcatggacggccctgcaaccgttgctccagcaataacgctgcataaccttgctataacgagagccaagcaaaggacggttatgacgcagcataaataaaactgaagacccatcttttgttgcattttg

SEQ ID NO: 285363 - DNA, 375 bp, Glycine max
ttgcatgcattctttgagccaaaatcctgactcaccataaaccttgacccagggtgagaatgtcaatccttaccctcggaagcaaaaaaagaatagaggggaaatttccaatcaaagaaaaagagaaggaaaatttccaatgaaagcaaaaaaagaaaagaaggaaaattccccaatcaaagagtgggagaaagcaaaaagaaaagaaaggaaaattcccaatcaaagaatgggagaaagtaaaaaaaggaagaagaagaaggaaagaaagctcctgatcaaggatcgaaagaaaacagaagatatgtgcagagaggtctttggaccggacaatatctgaacaatacagaattgccaccaaatgaacgaaaaaag

SEQ ID NO: 285364 - DNA, 405 bp, Glycine max
  unsure (1)..(405): unsure at all n locations
ntgttagtttccaccaaagaactaagcttttcagttttgagtagactctcttttcaatcatgttcttgtatatgcaaaactcgaatatgagatgctggttaatggatctcaacttcgnttcacttgaaccaacataatgttggttgagattcatggtttgaatttatttctagactgaaaaatttaaaaagaattataaatataaaattaaaacatctattaattaagatattaaattttattgaaaaaattaaacaagttcaggtatacatgaataatatctagaatattaataattggttctattactgtacctttataataaatagtcaaagacatgtccaaacaaatggtttttatgacgaataatactactcatttaatccaataataaatattaattac

SEQ ID NO: 285365 - DNA, 371 bp, Glycine max
tgcatgtcttcaacatctgaccacttccagggtgctggaactacttcacatggatttgatggggcctatgcaagttgaaagccttggaggaaagaggtatgcctatgttgttgtggatgatttctccagatttacctgggtaaactttatcagagagaaatcagaaacctttgaagtattcaaagagttgagtctaagacttcaaagagagaaagactgtgtcatcaagagaatcacgagtgaccatggcagagaatttgaaaacagcaggttcactgaattctgcacatctgaaggcatcactcatgagttctctgcagccattacaccacaacagaatgggatagttgagaggaaaaacaggaccttgc

SEQ ID NO: 285366 - DNA, 360 bp, Glycine max
taaacattcaatttcgaggctctcgatatattacggtacttaatcaagcatccaagaaaaaatttattgtcgtttgaatttgctcagagattcaacattcaatttcgagcgtctcgatatattacgggactcaatcagacatccgagtaaaaagttattgtcgtttgaattggctccgagcttcaacattcaatttcgagcgtctcgatatgttacgagactcaatcagacatccgagtaaaaagctattgtcggttgaatttgctcagagattcaacattgaatttcgagggtctcgatatcttacgggactcaatcagacatccgagtgaataggtattggcgtttgaattggctcag

SEQ ID NO: 285367 - DNA, 369 bp, Glycine max
ttcttgggaaaattagttattggcccataacttgagaaggcatattttactattttagaactctaagtagtaagtataaatctagggattgcatctttaaataattttccaagttcttgttaaatatttgttagatggatctaattaaaaaaaatattagttcaagaacctattaaataagtaaactatcaacctgatccctgaataatttgaaattctcaattaggttcctatacttaaacgaaccctaatgaaaatgttgccaaggatccaattagaaataatttacatgtttagggttctaaatctaattacagacttttaaaagtacaggaacttatctaaaatccctaaaatagttcagaaacc

SEQ ID NO: 285368 - DNA, 576 bp, Glycine max
  unsure (1)..(576): unsure at all n locations
acatcgctacacaattatngtaactgtacaaaccgnganagtacggatgacangtancncacaaccaccaacgcagagatgatacgagacatcacaaccacaaacatacaaaaactcaagccacgcgaggcaacgacaagcaacaaattgttcctttcgactacgacactccaaccggagaaagagcgaaaaacagaaccgaacgcccgcaccgacaatgacgcaaccggcacgacgcactccgagaaaccgaccaccaacaaacggcgagcacacacacggacgcgcggaaggccggcggacatcgaccacctcgaacacaccacgcacaagacaaaccgaccacgcggacgcctgaacggacagacctacgcaagaagcgcgcaacgaacacccgcgatgcaacacaacgcaaacgaacagcgaacagcgtacagcaacgcactgcaggagagcacaccgcacacagaacaaaccgccgcgagagaagacacacacgagacagaaacgctgcgcccgaatagagcgggcggaacggaaacgagtgctacaggcaccaacgacaacaactacccg

SEQ ID NO: 285369 - DNA, 370 bp, Glycine max
atcttcgatattgttctaagcactgtcggcccaaagggagaaagattaagatgaccctcaatccattattcataactccattgattatttttatttaagaactttaaagaaatccattttgtatttttatttaacaactacaaggaagagaagatgaagaatgcatggattgcactttttgtgcaaccacatgtttttttatcaagaaattcacacagctgttggaaaggaaacgaaagaaattccacttaccattattgaaagaactaatgcagttctgatagtattataaaagcgaagatcttataagagaatgaaatccttttggagtgctataatatggtggtagaattattcctacatatgacat

SEQ ID NO: 285370 - DNA, 388 bp, Glycine max
tgaagtgagaaagcgtggaagagtcagtcttccttcttttattcgttgaccacagagtggtacctggagatatgtcgcgagggtcaagagaccttggggacgtcagatggggtgctattgcccaaaaccaagcttgaccaatcccgacccaacccggacatagtcagtcagtgagaacctgtgatgtacctaaacaggtgagctcctggcagtcaaccgataaaagaacaaagaccacaaagcacggaggcttgtgtggtggctggccagctatggatcttgagtgatatttggaatatggcctctggtagtcgattaccaagggtgtgtaatccattacaaggtttataaatgaagacaggaagttaagatggcctctagtaatcga

SEQ ID NO: 285371 - DNA, 372 bp, Glycine max
tgcattcttgcccagagaatgagtccacggaggaaatgcttaccacctcaaaagactggaaagcggtttctaatgactcctctgcggcttccacataaggcatagaggacgggcagctcaccaagaggtcttcctcgcctgacacgatgaccaaatgcccctccactacgaatttcaacttttggtggagtgtagagggaacaactcccactgagctgatccacgggcgccccaacagacagctgtagggggggttaatatccattatttggaaggtgacttgacaggtgtgagggcctatttgtactgagagatcgatctctcccctaacctctcggcgggtgccgtcaaaggcatgaaccaccattgaac

SEQ ID NO: 285372 - DNA, 396 bp, Glycine max
ttgagccaaaatcttgactcaccgtatatcttgatccgggtgagaatgtcaatccttaccctcggaagcaaaaaaaagaagagaaggaaaatttccaatcaaaggaaaaaagagaggaaaggaaattcccaatcaaagagtgggagaaagcaaatagaaaagaaagaaaattcctaatcaaagaatgggagaaagaaaaaaagagagaaggagaagaaggaaagaaagctcctgatcaaggatcgaaagaaaacagaagaaatgtgcagagaggtctttggaccagacaatatctgaacaatacggaattgtcaccaaatgaacaaaagaaagaaaaggaaaccataacctaaaagtggtcttctccctttgattaccaaccaaaatcctgtgcgt

SEQ ID NO: 285373 - DNA, 348 bp, Glycine max
tttcttcttaagcctttatggtcttaaacagcatatggatgatgattgaaaggagacctcacatgcgagtatataacatgtaactctcaccaaccatggatacgactttgctctactctagaacgccaagagaagtccacgaatcccctaaactacctggaaatgcccttggtcgggttatcaccactcatcatcccaagtgtctttgaatcgttcaaaccgtctcctaggggacctatattatatctcatccatcttctcttaacgaatcctcactcatccttcatgatgaaaagcatctatcctcgaacgatgggcgtgtcagtacatgggaatagacgctaaaga

SEQ ID NO: 285374 - DNA, 369 bp, Glycine max
ctcagctttaaaacaaatgcttcattatttcctaatattcatgagaatttcgacgcatcaaccagaatcaagcccaagttattgggcaagcaatcaatggggctaaacacaccaaatgattatgatgatggatggctcaaattctcacaaaggtaaacttatcactttcaaaatgagctttcaaaactatcatgacatgtaaatgaaaatcaaggaattcaagtcacaacatgccaaaaacttttattttcaaaacaattacccatttcttgaacatatcctataattcagagataaacatgcaaagtcgtacatgcacacaaaattgacccataatattaaactaacaatccgacgaaactaacaaca

SEQ ID NO: 285375 - DNA, 360 bp, Glycine max
ttcttttgttccttttttataaaaagagaagttctgaaactcatcacgttgtctagaaaagccttgaggtggatccaagtgctctctgatcattcattagcatattcatgttttggtggcatactcaccactgtttgtttctttagggaactcaccataactaaaaaagcgcaaaggcacccctataacacccgatccagaagtaagatggataacgaagagggagtgcaagaacagatgaaggccgacctatcggccttaaaagatcagatggcttctatcacggaggccatgctaaaacttcaaaaaactatagaagataatgctacggcggccgcttccaatacaactagggaagcg

SEQ ID NO: 285376 - DNA, 393 bp, Glycine max
tatgctgcaaacatttacaatatatttcctcaaccttaacagcaaaaccaacctcagcaaaacaattatcacctctccagcaatagatacaaccttggatggaggaatcaccctaatctcagatggtctagccctcaacagcaacaacagtagcctgctccttccttccaaaatgctgctggcccaagcagaccatacattcctccaccaatccaacaacaacaacagccccaaaaacaaccaacagttgagacccctccacaaccttccctcgaagaacttgtgaggcaaatgactatgccgaacatgcagtttctgcaaaagaccagagcctccattcaaagcttaaccaatcagatgggacaattggctacccaattgaatcaacaacag

SEQ ID NO: 285377 - DNA, 375 bp, Glycine max
agcttgcccagagaaggagtccacggaggaaatgcttaccacctcaaaagactggaaagcggtttctaatgactcctctgcggcttccacataaggcatagaggatgggcagctcaccaagatgtcttcctcgcctgatacgatgaccagatgcccttccactacgaatttcaacttttggtggagtgttgagggaacaactcctactgagtggatccacgggcgccccaacagacaactgtagggggtgttaatatccattatttggaaggtaacttgacaggtgtgagggcctatttgtactgggagatcgatctctcccctaacctctcggcgggtgccgtcgaaggcacgaaccaccattgaacttggctt

SEQ ID NO: 285378 - DNA, 412 bp, Glycine max
  unsure (1)..(412): unsure at all n locations
tcacttgcttggggatgcaatacacttcggcttcatttgcatcagctatcatgaacgccgtaccttctgtaacctttgtgctagcagtaattctcaggtgacattcaattttctttttaaagcagaatatatgatactttaattactaactaaatcccaagagacaatagcaagtaatattcccaacatcacatgcatggcttttcattttgtaaaaaggttgggggtaccttgtacccttctaaaatgttttcattttggcatgtatgcatgctttttcttttacgtctaaacatcacatcctttatctttcagctctatttttattattttttaattatcttgacactttttctcaggcaagcgctacaaagagaaactanaattagtaaggaaataatttatatgtaat

SEQ ID NO: 285379 - DNA, 366 bp, Glycine max
agctttgaaaattttgggagttgtgagtgtaactgatgttacactcacttaagcagttttcgtgcttcttactaagcgagcaactgcgctaagccgacgtttcagattcaaaatcagttttctttttttttttaacaaacaaaagcttggcttagcgctcagataaaaccgcttagcgagttatgcaaatcaaaaaacctgcaactctcgctaagtcgggctctctaccagcttagctaaaatgatgcattttaagtacagaggagcatgcgcttagcggaaaaggactcgctatttctcacattgccgcaaggaattcagcttagccgccatgactggcgcttagcttcatgaaccccagttctg

SEQ ID NO: 285380 - DNA, 406 bp, Glycine max
  unsure (1)..(406): unsure at all n locations
tcttagtttcagatgatgcagatgggttggtagctacctcatgcactcctctaatgactatggcatcatttctggcactaaactgctgggagttggaagccatcttctcaattaaatttctggcttcagcaggagtcattgtctccaaggctccaccactggcagcatctatcatacttctctccatattactgagtccttcataaaaatattggagaagaagctgttctgaaatctgatggtgggggcaactggcacatagtttcttaaatctctcccagtactcatacaggctctctccattgagttgcctaatacctgagatatccttcctgatggctgtggtccctgaagcagggaaaattnntttcaagaatactctcttaaggtcatcccagctcgtgat

SEQ ID NO: 285381 - DNA, 375 bp, Glycine max
  unsure (1)..(375): unsure at all n locations
tgtttatgcattcattataagctttttgaaagtactttaattatttaatatactttttgatcagttctagatttttccttacaagttctactactaaaattgcgatacgcggtcaactaaaccccgaaaagtaataaaatgatcaaaagctatttttttggttaaataaaaatgtcctttgaaaatccaagttgttatttatttgagttcaacattctaaatgttgtgtgacttacataaaaatattagcatatcttgagggactaaatgacaatgagtattaagtttaggaattatactgatacagngaggaatctcattatttacttttatggattaaattaacactatctcacacttttacgaaagaatttg

SEQ ID NO: 285382 - DNA, 371 bp, Glycine max
  unsure (1)..(371): unsure at all n locations
tggcatagcacaaatgtgacgagagattggtgccttctttaattatgccaatncttctgctacaacgtcagattctttagcatatgagactttttatatatagctgagcaaatacaataaatagcatagcatattactattagcataatcaatattgtcctttaaaagatgcaactctcaccaatgttcaatgataacttggcaaagtagtttctacattctcccgggcattgatttcttcaataactatctcttttttacaaatggaaaattgtgtgttatgtagacatcaatctttggtaatgtcatcaaatggaaaattgtgtgttatgaacacatcaatctggacttcctgcatactaatcacaata

SEQ ID NO: 285383 - DNA, 383 bp, Glycine max
agtcttcatgatgaatcaacaatgattcaaaggtgttttgatgataacaatgatgacaacaaaagatgatgacaaaaagctcaagagaatcaaagaacatccatctcaagaaaatctagaacaagtcaaagagttcaagaatcaagaagaattcaagactcaagaagaaagtctacaaacaagaatcaagattcaagatctcaagaatcaagatcaagattctagactcaagattcaagaatgaagaaaagactcaatcaagataagtattaaaaagtttttcaaaactttgaatagcacatgagtttttgacaaaacctttaccaaagagtttttactctctggtaatcgtttaccatattgttgtaatcgattaccagtag

SEQ ID NO: 285384 - DNA, 398 bp, Glycine max
tgaatcagacctcagtgtgaaaagttatgaccattttaattttacgagagcttacgttgttcaatttctagcatctcgacatattatgcgcccgaatcggacatccgtgtgaaatgttatgaccatttgaatttctcgagagctatcgatgtttaatttcgagcgtatcgatttattgtaagcctgaaccggacatccgagtgaaaatttatgaccatttgaatttcacgagagcttccgttgatcaatttcgagtgtcactatatgggatgcgccccagttagacattcgagttaaatgttatgaccatttgaatttctcaagagcttccgttgttcaattctgagcgtctcgttatgtgatttgctttgatcgtaaactccggtgaaaagttatga

SEQ ID NO: 285385 - DNA, 355 bp, Glycine max
atctttgctcaagatggaggaacatattcatactttgaggagaaacaagaaagaattcaagagaaatactattgagtgaaacacaatgcttattgagtttatcctttgcttggtaaagtttttggaccgagtcttacatcattgtaaacacactccttgagtgttagaatttgtggttcttcaaactgtttgtttttgaaagccaggagtggtttagtgacaaaataatacttctttgttcttaaatttaaggggagtctgagggttgtgctagtaatggcctagatgatacttgtaaaaccaaaagtgtcatgttagaatacttgttgtaatcaaatgttgattagcgcaagcc

SEQ ID NO: 285386 - DNA, 391 bp, Glycine max
tcagtgccaagattccaacaacagtcatggtggatatgtatttgtgtgtgcctaattaaagtaattatctttagagatctaatcataatatttatctatattgtgcctaattaaagcaattatctttagggatctaatcataatatatatattttgtagtgtgcctaattaaattaactatctttacgagtctataaataagatgttggagtctataactaatgacatttgaaatccactacctattttatgtttttaaagctttgagactgtttcgggtgtttctgatgcatggacaacactatgaggacagatcataatcatcgttccttcactactggtatgtctatgctaatttcttctaagctttgtagtttgactttgaccatga

SEQ ID NO: 285387 - DNA, 442 bp, Glycine max
  unsure (1)..(442): unsure at all n locations
tgagcgcntgtgatgcctttgatacatggactaccttagctggttcccggtgattccccagagttcaccagagagcacgcgcttgtcggccattcttcgtgcgtcgccgtgcaatggctcccaccatcccagacacaaatccctgttataactacctattgtgcagctctttccattatcgaatgtacgaactgtcaaatcaccgatatgtccttctcttccgatccgaagaccagatgctctttcacagtaaccttcgtactttgtcgctgtttacatggaacaattcctattgagttgagccgatgcccatcaactgcccatgtcgcggcacctaactccattctcgaatgccattgacacagatatgtctatttccctccgaaaggaatcttgctaccctctcgtagggactcataccgttcacccactttaagccgtc

SEQ ID NO: 285388 - DNA, 401 bp, Glycine max
ttcctacaataatggtcccttcttattgcattttttatggagagaaagtggcatcaaagaggttgttgctgatgttgttctctgagttgaaagtatgcaactgatgatggaagttgcggcttgttgaagatgatatggtagtaaccatacttgaaggaaatcaaagttgttggtaaaaaccaataagagaatatagaacctaattggagatagataggttaatagaataggcaagaagaacaaattatacgcaaaatgaaaatgaagggaaagaacaacacatatataggatcaataaaacaactgatgattatgtgaaagttgatcataaaaagggcttgacatatatgcagcatttccctaagtgcttgttgaggatcaaagttgagtgaaaaaaaaac

SEQ ID NO: 285389 - DNA, 363 bp, Glycine max
tttgtcgcattaatgtgcacgcgccgatggattgaactgggacttggaacaggaacattcgcttatcctgcgttgatcaatacgaatccctctgctaatgcacagaataataaatgtggcaaacaccgagtcctgtgtggcaatcctacaacgatctgctacactattccgcccagttctccatgcccaagtctaactctattcttgtcattacctcccacgcatatcgacaagagtctcccaacattcccagagacactgcctgaatataccacaatacactactgatgtccatccacgtacccatctccatctgcaaatgaactctccttaactaccctgggtaatggacccgacgaccac

SEQ ID NO: 285390 - DNA, 286 bp, Glycine max
caccatacagacctttggccttccaatgcacaacctggagcaattgaacagcccgaaacttatgctgcaaacatttacaatatacctcctcaacctcagcagcaaaatcaaccaccatagaacaattatgacctctccagcaacagatacaaccctggatggaagaatcaccctaatctcagatggtctaaccctcagcaacaacaacaacagcctggctcttccttacaaaaggtgttggcccaagcagaccatacattcctccaccaatccaacaacagcaata

SEQ ID NO: 285391 - DNA, 317 bp, Glycine max
ggtcattggcatgatctgatacccctggaccggacagtggcacgcagaagctttttgattttccattttcagggtttggtgtcaccgagctctgccatgagcgctgctacggaaccacgacattcgttttagattcaacagcaagatgaagaacaaagatctgacgcggagaaaccgcctcggaactgattggatctcaatttcgacagatctgatcgattcaacgagatgatccttcagatgtacagcttcgacttgaagcccgagtcttacgaccttcccaaggttattctggactgactagcgttcgaacatgc

SEQ ID NO: 285392 - DNA, 433 bp, Glycine max
  unsure (1)..(433): unsure at all n locations
gcgaagacaaaccccaaagccaagcctgagaaagtggaggagttaaaacccccacaancaggagattgagcgagactgaaacccacaaaacaagagcgacacaaccccggcacaacggcgacttaactttcaccacaccaaaaagggaaagggacagccaaaaaacacaccacaacagaagagacgcggaacacaacgaaaaggccacgaacaaccgacgcacagcaaaaccgaacaaaagcaacggcaggcccgaaacagacagccgccaaaaacaaaaacagcggacgagacagacagacgaaaacaagcaaccacacaaggaacaaagcgacaaagcaacccacgaaggccacgacaacaaaaacaacaacaaacgccgaccacaaccgaccaacacaaaccccccgaaacaaaccccaaaaacaaaacc

SEQ ID NO: 285393 - DNA, 357 bp, Glycine max
atcttgccacccatctcgcccaggagagctaggttgcttgctctagaatgcaccaccttctggaggaacttcctgaaaagcccacgtacgcctggttgctatttgcaccaccctgtttactagatacaccccctgcttttttttgctgattcattttccgcaacgctacgaaactttacgaatatcacaacgagactcgttttctttccgctatgctacggatccttacgaattacgtaatcatccatttttttggctttcagaatgttatggaacttcacaaaatgtgcattaacactgtcttttgactttcagcatgtcacataactttacaaattgtgcaacaatgctttcttt

SEQ ID NO: 285394 - DNA, 391 bp, Glycine max
tgaccttggtttagacatgattgatacatgatttgtgacttgtaggatttgatttgggcaagattggatgaggggaagtgtggttttcgaaatctgcattttgtgcagatttttgctgtgaaattgtgcagcaggattttgcataagtgcagcaaaatactagacatttgctggttgtggaaagagcagtgcagaatgagttctggatgtttgctagtagatcccaacggtcaaaatgtaagcttatgtactagagacttccagtaaaaatttggagtcgatccaacggttaacgaattgtaacgaacgaattgttactggggtctttaagtgagaaaagctgtgattttggttggtgttttggcaaagatttctgcctttgctctgtttc

SEQ ID NO: 285395 - DNA, 365 bp, Glycine max
ttcttgttttgtttgcaatatttatgttgtgtttagattgatctctataaagaataaagtttggaccaattggaaataggcatgactgagatcacattgtatgtaattttcatgttgcttatccatattgacctatgtcattgagtgtactgatgtggtagtcattggggtctagttacatttgttgtagtgacaaagacacaatgattccattattgcatgagatggaccaggttgttaaggtggaagtttaaaggttaatagcatacagatgcgcgcttaaggatttttgataaaactattataatatgtagcccaagtgggagattgttggaattttctattccaataattaatgtgggcta

SEQ ID NO: 285396 - DNA, 305 bp, Glycine max
ctataaaactaagcttcctagaatcttaaaggtcctgctgtgctgaccatttctgttggtaggtagcaagagcctatatgctgacttattagagtagatcccagtagggtctgctttccacaacattgagtcctgcagctgctgatgaatagatatagcagatatatcgtccatgaaggctattgcttgctcattcttgcgataaaaaaagttccttctccatttaaaatcccaattccaagtattctgataaaactttcccattttataacatgggaaggttttgctgtctgctaatcacaaat

SEQ ID NO: 285397 - DNA, 355 bp, Glycine max
atcttcggaagaaagtgatgaggtataagccctaaaggcagagcttgaaagagcccgggtagtcgaagagaagttcaagtccatagccatcaaagtctgaaaaagtatgatgaactaagggacgtcaatatggccaccgctgaagccttggaacgagaaaccaagaaggcccgaaaggaagaacacgaccaaagcaaagttttgaggggctttatagggcagcaatagtgagctcaagctccgaagaggtgaaaggaatcatcatgggtcaaaggcatgatctttaaggacgagctaaaagcttgcctcaggtcgaaaagaaatttgtcccaacagttaagcgagactgaaggga

SEQ ID NO: 285398 - DNA, 400 bp, Glycine max
tcatttctggtccataggaagacaaactatatcctgtagtttaaggacactttcaactttttacttgttatgttcataccacatttaactcataatatcattaacattcaacaggaatcactgagaactttgaagcattgttcctttcctaatgtatctctggaaggcctaatatctgaccaatggaaagatatgggatggcaaagacctaatccatcgaatgactttaagtacacaaatatgttcttatgagagctcacgtgacattttggtcacttttcctatgtgaaagaatttgcttattaaatgttatgaaaacagtgtcattttagtgctgctaacggttatggtagcgtatacaattcactaatttaatttatgggatataattaaaccaaat

SEQ ID NO: 285399 - DNA, 359 bp, Glycine max
agcttgtagggttaaagtctcacgattgtcacgtgctcatgcaacaattgttagccgtggctatacgagacatcttgccaaacaaagtcaggttcacgataactcgcctgtgctttttcttccatgctatatgtagcaaagtgattgatccagtaatgtttgatgagttggaaaatgaggccgcaattatattgtgtcagttggagatgtattttccccctgctttctttgacatcatgattcacttgattgtgcatctagtcagagaaatcaaatgttgtggtcctgtttatctacggtggatgtacccggttgagcgatacatgaagatcttaaaagggtatacaaagaatctatat

SEQ ID NO: 285400 - DNA, 391 bp, Glycine max
ttgaatgaggctgaagaagctgctgctcatgttctacaagattcggtggagattaatttatctcagcctcatttgtcacaagatagtgacatggagttgatggtaaatatttgtcacaacaaagtagttttatttcaacctaatttgttgcagcactccatttttatatattacaattattcatgtttggcatttgcatgtaggtccctgcaacaattgttccaccaatagcaaggaataagctaaccataacaagagccaaacaaaggaaggttatgatgcagtataaagaaaactgaagacccattttttgttgcattttgaaggttgctgagtttgaaggttgctgatgaagaaaactgaagaagcattttttgttgcattttgatat

SEQ ID NO: 285401 - DNA, 375 bp, Glycine max
atcttgcagacctaacattatctatgtatgataagcaaaacacatctcaacacatgataataataactagcactatattattcttttaattatagctcaaattcaaatggttgtgattttgtatttgaagatactctccacaaaatatattaaatcgcatatataaataatggtgttgacaagaactactaatacgtcccatgaccccaccccttatctacttattccatattgacacatatgcataattaatattaagctataaacttataaaaaacaaatttttatgttggcaaaaaaatgtcaatattaacaattatctatcactagacaataaataaattcgactaacaaaatttaaatatttaaataaaa

SEQ ID NO: 285402 - DNA, 405 bp, Glycine max
tcttatcaaattatatgatcatatgttaccaatgctttattattttattgtcaatgtaaacatattgcacattgtaatgttggagaagaaaaagacaattctgtaacatgtcgagtgtatattctgagcacaaattggccctttgctaaatgttaaaccgaagcaaaatcaccatgattgaacaacagatgtaatttcataaattaactcctgagtgcaacaaactgccatacgttggctccaaactcataaattaactatttgtctgtcaggagcaaatttattcttagctacctatttacccttgttgatatcatgactaacatactggcttttgttcttgaattagcatccacataataaagccggaacaaagaacataattagaacacccattttcttctt

SEQ ID NO: 285403 - DNA, 372 bp, Glycine max
ttcttatacatttatgattctccctatgcttgaagttcattttagaagtctaaaataaagttgactttttgtctagatctactataacttgtggtttttatcaagattatgaccaacctatttttaactcatccgatgaaatgtaggacttgacatttaaattttgagcacatattaaatttgagcctcaattttatagtagtatatattaaatttgatcactttaactattccattaaatcatgcaatattgttctaataaccatatatcaaatttaacattatttaaacaataatatatatatatatatatatatcaaataaattacttatattttatataacattaaatatttaaataaataatgctat

SEQ ID NO: 285404 - DNA, 406 bp, Glycine max
  unsure (1)..(406): unsure at all n locations
ttaaaatttgaattaaaacgttcagaaacagccggtaatcgttttctatatatgtgcaancgagtacacagtgcaaactttgaattcaaattttaatagctgctgtaaatcagttttggccactggtaatcgattaccagagagtaaatttgttgaaaaaaactttttaacttaaaattcttggccaaaccttttgctacttcaattggaattcccttcctatttaatataccctctctaagactctacagactgggttgatcattcatcttgaatatctcttaattctttgtattgaatagagctttgagactttgagacgcatgtgaaactttggcatcatccaaacattcagcttgatcctttgtctacaatctctccctctttgatgatgacaatccctgaa

SEQ ID NO: 285405 - DNA, 380 bp, Glycine max
atctttataagctcaggtttgggagacgaaggtcaagtggtcgcgatatacgaagatgatgttccaagtacattggatttggtacgaccatgccctcctgatttctagctgggaaattggcgagtggaggaatgccccggcatttacgcaacgagcataatgtaaacctttacggttttaaaagctctatagttgggcctaggctttagagtttttccttttgttaaggctttgtgtcttttgtttttgaatttataatacaaggatctttcttcatctgttcctacgtctctacccattctcattcatttgcatgtgtacttctttatttctgaaacgacagatctgatgacgagtcccccgaaggtactaatacctgg

SEQ ID NO: 285406 - DNA, 399 bp, Glycine max
tcaaggctaagtcttcatgttgcttcctctatctctaacaatagcctcaaccatcaacaacaacataattccatcaccatttgtcatcaggattcatatgatcatacctcacataagccatagctgatgtcaactatcatggattctcatcatacataattataacaagtgacacacattgacaaccaactaaaccagttatcactactacatacaccaatagccaactaggccaccccaaactcagatgtcaacactaactctactccatggagtttcaacacaatatgagtggttccttatgatccctaatagaataacttttgtgatattttgtatgagtttttatgccattttacatgcagtttcttggcacaacccacgtttggagactaattt

SEQ ID NO: 285407 - DNA, 375 bp, Glycine max
ttcttgtaatctttcacacatatactgtaatcgattaccagagtagattttcagaaaatattctcaacagtcacatctttttatgtgattcttgaatggctatcaaaggcctatatatatgtgacttgagacacgaatttgctaagagtttttcagaacaaaaaaagtcttatcctcttataaagcaaaattgttttatcctcttacaaattccttggccaaattacttgtgattcaataaggaatttttgagtgctcaaattgatcaatctatctctttcaagagagatttcttcttttcttcttcttcattctgaaaagggattaagagaccgagggtctcttgttgtgaaagaattctaaagacaacggaag

SEQ ID NO: 285408 - DNA, 384 bp, Glycine max
  unsure (1)..(384): unsure at all n locations
ctcagcttctccgaagcttattaaaggctttagccatttcagtttcntctgaaagacccacggtcagatcatggaaaagtgtttgtgaagttgcagaccaaattttggaagatccaacggttaatgaaggccgggcagcgttcttatcgaggcagcttcatgtagctttctctagaagcttcctcgtggcttctttgagaagctttctcaagaggcttctttgagaagctacattcttatctatccacccctctattaactaaattaacttccttaaaaataattacggatgaaaataacgccacaaataatcaaacattanacataattactaataatatatagatatttatatcagggtgttatagtagtggtcccagtatg

SEQ ID NO: 285409 - DNA, 374 bp, Glycine max
tttttaatcctatttttctaacaaatagccttcacaaagtgtgccgaatccgatcaatgtgagtgccatcaccttgatgcatggcaaccaaatgcatgtgcctacacacactagcaacatctgcactggaacctgtcaaccttgattctacacctgaacaataggatgacttaattgcactatagatatagctgcctatcataaattttcatgcaggtagaccttattatagtaattccaactaacatcaccctgctatccctctctcattcccacctataacaattcccaacaaaaagatggaacatgcgtataaggacatcttggagaccttcaaaattgcagaggagatcatacctctgctagatgccatc

SEQ ID NO: 285410 - DNA, 383 bp, Glycine max
  unsure (1)..(383): unsure at all n locations
ttacataagattntagtaatgacccactaacctataattaatataacttaatgtcattaacctagggaattaaaagaacttaatggctgagtgtaactgaaaatgtggcaaccaaaggtcacccccaacagccaacaagtctgccaccatttggtctcccaaaaggctgatgcctaggttgccaattgggcccttattacaacttgaactaaacctaactaaagcccttttagttgattaacccaaaacatatttttggtcacccaactttacaaggattgggccattatttagataaactaaacactctaagattgagacaaagtggtgccatttaatcctactccatctgggccatgatacaactcacaaccttggacttt

SEQ ID NO: 285411 - DNA, 353 bp, Glycine max
ttttcatgcattcttgctagccaagatgtgctgtagccttcggattgagcttgaacttgggcctgaatcagtccctgaccctgagttctccttctccttctcctctttcaaggcacggattagccgatttggcagatacagataccgatcctgaaagcgggaacgattggcgacaattctccgcccaggtctccatacccaaatgtcacccttttccggccaattttccggcgcatatggaaatccctcgccggacattccctgtgccactggctgtaaattcaataatacattattctcctccatgctcatcttccatctccatctccatctcgaacgctacttatctagct

SEQ ID NO: 285412 - DNA, 388 bp, Glycine max
tcgacctcagatccctcttgttggactatgcttattttatacagcattataatcataacataattaaaaactaaaaaacctgcaatctatccctagcaatgccattatctagccctgctctatcaagttctaaggaaatagtatagttcccagtgctaaagttcctaacagtacacaccaatgggtgatcagactaaaagcatgcaacaatgaagcatcgatagaagcagtgaacacataaaccacacttaattagatatgaaaagtgtttacatcaacttttcattagacatccccaactagagttgtagcaagccataacaaggaagccttttctacaattagatagagaatacagagaaattattgcttacacaggaagggggat

SEQ ID NO: 285413 - DNA, 355 bp, Glycine max
tgccgccttgtcggccagggaggacaaagcatcccaaagaactatgcctgttacgacgagcgattgtgaccgctttaggagcggtatgcaccacgcttactttgtagctctctacggattgtgttttctgcgggaactaaacatgcaatttaggccccacgaactttctgactatctacaagacaaaatattcatatatgggtgccgataggagactcccatgggatactttgatcacacaacagccttgcctgatcgcacatagatgccccatcagaaagtcgtgcagacaagagaactgggtctacgcaagcagatgcgatagatgccaaaacgcccacgcacaggcgcgatg

SEQ ID NO: 285414 - DNA, 377 bp, Glycine max
aattcttcgaatatgaattcttaaaccccatcctgttcccaaggagtctcactctgacctaaaatggggaatatcctccctcccaacctggtggagctaccagaaacttggttagctgaattaaaactatgtttcgtcccatcaacatctctaagaaattcaggctccttagtggtaaccactgagtccatcaagttgccgctgaaccccaaatcagaatacaccctcaaggcatcctagatatgaaaatagatactactagatatagtagtggcagaacattaaaaaaactgatatatttgataatatcacaataaagcacccatatatatgttcatatcctctactgtcaaatcagacaaagaactcatatgact

SEQ ID NO: 285415 - DNA, 307 bp, Glycine max
ttcttcaagttgcgtggacaacaacttatattgggccagcaatgcatcttgagatcaaagctctaatagactatatttggcaggaatatgaactctatcatgcataattgtgtggtcactggcaaccatattttcaattgagtccatggcttcttcaagtgtcttcaccggcataacccaattttgaagatgcctaactatataagctctgaaaaagctacagtgggagtgttctgtaacaagctatagaatcgttcttatgcctcagtcaaagattcatctagaaactgatggaatgaataaatta

SEQ ID NO: 285416 - DNA, 375 bp, Glycine max
tgacccttacgagatagatgggacgatttttatattaacttggagaaaccttccatgaatctctggtaatatcctgctaggcccaaaaaactgctaaattcaaaaacagacttaagactctcgcactcgagaatgacttctatcttagaggagatacagctataccccttgagatatcacatgccctaggaagctaactttctctaaccaaagctcacactcggacaacttagcatagattattcattcgtatgggtatgcagcacaaacctaaagagctcttcatgttcctctttagccctggaatataccacaatatgttctatgaatactaccacaaaactaacgaggtaagggtgaaagactctatacatg

SEQ ID NO: 285417 - DNA, 479 bp, Glycine max
acccgcctggcgaccacgacggcgagaaagttgtgatcccaccacagaaaactgaactttgagcctgatgaccctgcaaaccacgggaacaggacccgcaaggaacccgtaagagacatttggcaaacattctaggagaggaaccggacggagccaccaaaccggaacagcacatgcagcatcgagtcggacccagggcaggggccaaagaagcagacaacacctacaattccggcctaacaaacaagatagaagaacgagcagacaacaacaggtagcgaagcaccaggatatagcccaaaagatccatacgcacgcccgcggaccaacgcgaggcactacccgcaccgacttacagcccatagagaagcacccaaccctcaaaaaagacggaaaaccaggcggcagcaaaaaacccgggcccaaggccaaaccaaaaaagcgggccaacaaggaagacccccaaacacacaagctga

SEQ ID NO: 285418 - DNA, 352 bp, Glycine max
taggaagtatcaatagaggttgaacccttttaagttctctattggggtcaaaccagggaaatagcgaggtttcatcgtcagccacatagggataaaagtggaccccgaaaagacgaaggtcatccttgagatgccggaaccccataccaagaggcaagatcgaggttccctgggacaaatgacatatattgccacatccatatcacaactcactgctatttgtgagccgtcgtacaaactattacgcatacaccaaactgtacgctggaacgaggatgcaaagacgcatatggaaagatcaaaaagtgtgccatgaatcctcctgtgcttatgccaccggaaactcgaaagc

SEQ ID NO: 285419 - DNA, 140 bp, Glycine max
aagtgctcttacgcatatggcggtatacacaccacataggggactcttcgcacaacacgcatgaggcgctaaataagcagccccgaacccgacaagaacggtgagcgaaacccggcgagcagaaagaaactcaccgacac

SEQ ID NO: 285420 - DNA, 363 bp, Glycine max
tttgcatgctttctttatagatcatatgatctcacagagagaaattaaaaaaaatgagagttgtgtataaaaaatatgaatgtccatgtatcatcactctaaatcttttgtaataacacaaaattaattccttttattcgataaataaaatttgatgaactattccagaattttttattacatctctaaattatttattttttagtttggtatctgaatttgtacttattttttttaattaagctcatgccacacttaattaaaataaataaatacaggttcaggatcctattaaataaacaatttaataatctaattaataaaataaatagtttacggacttaaaaactattaatatatgca

SEQ ID NO: 285421 - DNA, 555 bp, Glycine max
  unsure (1)..(555): unsure at all n locations
tgcagatcgccanctgcangcanaagtcgcanagaatgaccgcacaagnagtagtcgaagagacattnannctnntccnnncnnccaagagacggggttganatagaagatcgctagnacattncgccanannnccnnnnnnanannnannnananacananagcccggcggccngcggacacaacagcgcacacacgcacgtggtggggctctcacgcaacacagatgccgagagccgatcgggagggcaaggtcaccccacgaaacaatacaaaccatagaccgaaaagaggccagggccccacacccgatcagggagccgccaaacacgaccacccgcgccaccagaaaaaaaacaagaggctaccaagccaccgacggacaccaccgacccgaagaacaacggggaggaaacgcgccccaagaaaaaagaagcagccgcaacacaacccccccaaggggagaaacacatccccccggaggccgagaaggaacacaaagacacggcaaagcaggggacaagacccaacccacgccacagagaagaccccccg

SEQ ID NO: 285422 - DNA, 361 bp, Glycine max
ttcttgcttatctcttcagggagctcaacacagtactgcatatgttccttcaacttggacctacagcaagcaataaaaacaaagtatataactatatattctctaaaacaacaaaaatcacaacaaatccagcatcatcaagttcacatatcacaaattcaatacccaaattctttgttcaggctgttcgcggccgcagtcgtggccttcccgccaccgtatttcgccacaaaatcatccttcgcacgctccagaaaagccacaggcacctgtctcccaatcgattcatccgcaacaacacaataagctaaaaaaaagtgagtcagacattcatttccaaaaacataacgctgaacttcaa

SEQ ID NO: 285423 - DNA, 391 bp, Glycine max
  unsure (1)..(391): unsure at all n locations
tccatgactttcactttctctcacttatcattntctattagctagacccaaacaatcggggcctacatgagtaccctgaggtacaattgtaatcctcattatcatcttccatttgcaacagcaaaaattgtctattaggacatttatgattaaaagagaatttctcatacaaaaataacacaatcctttttcccttctcaactgcatttcagcaggagtaatcttttttacattcgaggaccgaattggagggcctgatggagtaggtaaaagcgaaagtaaactggatttaatttgcgtttttggttgagcattaatagagattggggtagaagaaatctgggaatatttgtgactataggaaatttgaaatggcttataaacatgacca

SEQ ID NO: 285424 - DNA, 373 bp, Glycine max
ttcttcattcttagaatgaagttagtagagatacatatatcgtgaataatcatctataaaggttatgaagtatttcggactatttgcatccatgtctggacaacatatgtctgtatgtatgatttctaataaattagaactcctctttgcaccctttttagacttgttagtttgcttacccttaatgcaatctacacaagtctcaaaatcagcgaaatccaaagtactaagtactccttcatttactaatcgcttgattctttcaatagagatatgtcctaatctccggtgccacaacatagaggattcttcattcacaatacatcgtttttaacccaacagaaacatgcatagaagtagcatcatttttgaa

SEQ ID NO: 285425 - DNA, 479 bp, Glycine max
  unsure (1)..(479): unsure at all n locations
ggacgcacacagaatcgcaaatgacgcaagggagcgacgtacatacttccnncccaggaggtgaatgaactgaaacttcccaaacaacanancaccaagaaaagagggcccggaacatcaacactttcaatgggagtctcaccggcgaacggcgaacccgaaaggggaggggcacccgccaccaggcaacaccggagcgagaataacaaaaggcagaggaacaaaacccccggaaagccccccgaaagggcgcgtttaacacaaccacaaaaaaaagagccggcaataacatggggataccgggcgaagccagccccccaaataagcccgcacatagcatggccaaacaagatgaaaacaaaacccaacaccgccaagcccaaagaaaaaacacactccccagaacgggagaaatccaagggtcacaggcgcaacgacacgggacgcgcgacccccttaaaaaacagaagagccccccc

SEQ ID NO: 285426 - DNA, 378 bp, Glycine max
ttttttatcatgttcacgacaaaggactaaagaagaaatctccgtcttatgaccactacaaatcaagtcctccttgcctaacacatgatcaagccttgagcacaacaggcacggaatttgcaatttgcagtaaccagcaaactttgctataacataagaaaaaacggcatcgataaacaggaaaaagatcagcaaccattcgagaaaagccgatgccaaggccgtggtaacacccggggagagcttacgccactcagaagatgaaattccagtggtagccatcatccaaccaactcaattagcttcgaaaggagaaaccgattgctgaaagttgaaacagatcaaactatgaccttcttcccaaaatgatatgaataa

SEQ ID NO: 285427 - DNA, 409 bp, Glycine max
  unsure (1)..(409): unsure at all n locations
agaattatgaactagacttcaggacctataaaactcaactgctactgtttttatccttatgtcgcaatttatgtttctanaaatataacttcaccactagaaacgacataaattgcttttacatataagccttggcaactcaaatgatcaaattccttaatgtgaaaaggggaacaaacttttctatctatagaatcttaaaggaaatacggatttacaatattcaagcctaactataaccctgaaatactttccaccttttatcaaagctgctttagaccgactatgaacacaactctctaacaaagtccggaaggtggccaattgtcatcgagttaatgttcaacaatttgtggattatactcttacatgcatgattatgcatcacatgactatgtggacatgcagn

SEQ ID NO: 285428 - DNA, 382 bp, Glycine max
agcttatcagattaacattttttttcaaaatgcaacaatgagaaaagaaagcacaaagaggaaattcacagaaccaaatgagattaacatcaattcacattttgtttctaaagaatataagagaaaacacccgattcactcaggcagaggaaaacctctcaaaggtgcataattctcatgcaggcaattgttccatcacaattccaatcactgatatgtcataaatcaatttttgcaagtcatttcccatcaaatcaaagataaattgcataatcatcatggatcattagggcttttaggatttggactagctttgaaagaaatattggtttttctggatattcaaaaataccttgagaataggaaagcaacataaaaacaa

SEQ ID NO: 285429 - DNA, 402 bp, Glycine max
  unsure (1)..(402): unsure at all n locations
tgaatctaanaagttgttcagcaatcttcatgcccatcttggaccttaggtcgatgttgttgaacctactagttaaagtcatttcccaacctcaacccatcattgaagatgcactcacaacaatgaacaattccagcactcctcatgaaataactcccttgactgcctctgctccaataggtgtgtctaaagagagaatacaagaatttttgtgtaacgatctacctcgtcgctacgatatcattactctaaaccgcataaatttcaattttaaatgaaaacttcattaatttgcttatgaaaaaagagagtaaatcttttgcaatatacattcaccagacaaacgcacgaatacttaaatgaatntatatgtatatagatacattaactcagtacacatca

SEQ ID NO: 285430 - DNA, 378 bp, Glycine max
ttcttgaccatttttgacccaacccgggcatagtcggtcagtgagaacctgtgatgcaggcgagctcctggcagtcaacagataaaaggaaaacaagaccacaaagcaaggaggcttgtggtggctggccagctgtgaattttgtgtaatatgtggattgtggcctctggtaatcgattaccaagggtgggtaatcgattacaaggcttaaaattgaggacgggaggctaagatggtctctggtaatcgattaccaaggggtgtaatcgattaccaggcttgaaaacgaagtcaggaaacttagggagtctctggtaatcgattaccagcctgtgtaatcgattacacagaggaatgggtcactggtaatcgattacc

SEQ ID NO: 285431 - DNA, 416 bp, Glycine max
  unsure (1)..(416): unsure at all n locations
gacctatgatactcagcttcaatgtccttcttgatcaaagcttcgaagcaaatgttttttatatcgacattnttttcataaagtctatatatttactttaactataaaatatatcacacatattaccaatgttttgttgaggaagctcattgattatgccaatggttcatcttaaccaggtctctgattttggattggctaagttgaccaatgatactaatacacatgtctctactcgtgtcatgggaacattcgggtaatttcgccaccccatggtttaatacctacgtagaaactataaagaaattgataaaaatgggaattaatagtttaaatttgcatgtctaaacaggtatcttgccccagaatactcatcaagtggaacattgacagagaaatctgacgttttctcattt

SEQ ID NO: 285432 - DNA, 376 bp, Glycine max
tttcttcaacctcttattactgcgtacttctatattttgctcacgtttgaaaggctactaatctttgaaggtgctctattttttgtcagaagactttgccttattgcaagctcaatattctccaattcttatcatcaataatattaacataagagtagtaattaatcgtgtcattacaggcaagatagtttaatttatttgagaagtcttttgatagatttctgcataaaagtttcaaaattcaaatccattcagcgatgaaatatatactttattcatatgtaaaacccggcagcagatcaacaccttagctggttttataccttcgcaatgaaattcaaaggacaaccttgtactcttttttacgggtactatt

SEQ ID NO: 285433 - DNA, 375 bp, Glycine max
  unsure (1)..(375): unsure at all n locations
tgtcagaggtcattctatgcttgaaactttatattttatttctttttggnagcaaatacatttaccaatggaaaatattacggatattgcgttttttgcattcttatggtggtattcatgatgcacaccttccaggagtcaatagttgcagccggtgctggattagccttagttgactcagtggtgatctcttaacctggcatgtgcatctcttggtaataatctgtgtgcgtgtttcggcgaggggtaagtgagtggatatggatatgtacatatctacttcttctggtgacttcatactggaaaggactatttgtgtgtgcgtaccttttttgtatctttaaacttgcgttcgctagagggggttaaggagac

SEQ ID NO: 285434 - DNA, 268 bp, Glycine max
  unsure (1)..(268): unsure at all n locations
tttgcattagacattttgccctcacatagttctttcgacgggaagggttgcggagggagcctcaactactttgttagtttcatggggcctgttcgctgtttgttggatttggtggagcgaatgtantggtctactctgggccatgtagcattttggaaggaaggagtaagttgctgttgttgttgatggctagaccatctgagattatggtgattcctccatctgggattgtatctattgctggagaggtcataattgctatgctatg

SEQ ID NO: 285435 - DNA, 99 bp, Glycine max
aaaccatgccttgagctcccaacttgaacggttaaggccttccctacttgaaaacccgaatgccaactcttatagctgccataaatttgaatctgccgt

SEQ ID NO: 285436 - DNA, 367 bp, Glycine max
  unsure (1)..(367): unsure at all n locations
ttcttgcaagatggaagcaaagaaatctatcaatggggggtagaataaccctcattaattcagtcttaacagccttacccatctatttgctgtccttcttcaagatacctaaacatgtggtgcaaaagattgtatctattcaaaggaatttcttatggggaagtcaccaagactccaacaagatcccttggggaggcgccatttgcacatgaatcactcttgaggcaaaaatcaaggatcaaatggctcanggaaggtgacagtaacacatgcttctttcataaatccataaattttagaagacattataatgcaattcaaggaatattcattgaaagtatatgggttcagcaaccaaaattggtta

SEQ ID NO: 285437 - DNA, 362 bp, Glycine max
tgttgacacgcggagatttacgtcatctttcgcgcacacaagatctgtcatactgacatttgagtcacgctgacgggcggaaatacccgagtggttatccgtataaacattcttttgctgtctgtaagacaaaaagcctgatagcacgcagagactaacgtcgtcttctgcatccttcgtcaatcgcggccgacaagcccgttggcacgcggagatttacgtcatcttccgcgctcacaagatctgtcatactgacatttgagtcacgctgacggacggaaatacccgagtggttatccgtataaacattctttttgctatctgtaagatgaaaagcctgatagcatgcagagactgacatc

SEQ ID NO: 285438 - DNA, 366 bp, Glycine max
atcttagtcttgatgttactccccatatctctaacaatctctccccttttggctttgatggtgccaaacttgaattgccttttgagtgcatttggagattcttgagagtagagactttttttaaaaaaacctgaaagtttataatcactaagagaagtgtcaaatcacatcttcatcattaagtacagttgtatacggatgtatgtatacaatgcattacttcctcctaatgcaatgtttctccccttttttccattatatagccaaaaagtcacaactactgatagagtatacaaaaaaaaatatgatgtgaatagggaaaaatgatcattacaattaattcataaagaacattacgactattat

SEQ ID NO: 285439 - DNA, 359 bp, Glycine max
tccatcaagtggtaatcatagcacaagatcttcatatatctacggttgtgtgtttaactctttcgtgttttatgtttaattgctagtattgtgttagtatgtgtgttcgcgttgcttaatctcttgatattttgcttagcgagtgttctgtttcagttttcctattgagcgctttccctatttcagtattgcgtgttctctgtgaatagcgttttgcgacggacttatcgaccatttctacttgcgccaaaccatagtaatagtaaaaatcccttaccgactgattttatcgaccacccatgctgaattatttgtgactttttgcttactacctagggttgttatttctggctgaattt

SEQ ID NO: 285440 - DNA, 367 bp, Glycine max
atcttgtgcgaatttttcactcccacattttatctctagcatgcattggatgttggtctcgtcctttgtcacgggaagccggaaggtccatatcaccttcttaattgtacacatggggcactgcgcccccaaatacgcaagtatgatgagataatgttccgggctctcgtgtctgtaaaatgcattcatatcatgcatcgcataaacatctcttcatggcatcataatgaacatatcgttcctgcatttgtctgttatcatattacagcctcacattttgcatgagtcatggcatcatcatgcatatgcgttcaacaaactttttgatctgcaaaattggataccatttgtcttcatgtttgctcat

SEQ ID NO: 285441 - DNA, 396 bp, Glycine max
tccagcatatgaagggaatttttactctcttacattcttcaagcacaccgtacgtactccatcaccatagttgaacgttaaaattgatacccgtatctcaaaaactaacacgtcatccatggcttccgataataacagtctattcttcgttatccttgctagcttcctcagtttggaatctactgaggcacagatatactaatattgctccagcgaaaaaaccaatgccggaacctccttctcttccaatcttatttcttcattattattaccattctccaacactgacaaaaacacacctccgaatcagcctatggagtccaaagtgaaacccagcctctacactcatcaggtcgctccccctctaaagaatgcatggatagttattcctatagc

SEQ ID NO: 285442 - DNA, 365 bp, Glycine max
ttttttgtcttaattgatagatgaggttgagggacaaaatctgcgtgaggtggggagagaatggctcaagaacaacacgatggcttacagaatgggtgagggccaggagtacaagcgccttaggttattatgttatacaaagacggtcctaggataaaaaccgacgttgtcttaatttatagtaattacaacattgccacagcacccattctaagacggttattcataaccgccttataatgtacgacgtaaaaacaaatttttgtttccttatttacaaaattgccaccgcgccatattctaaatcagttcttgagaactgtcgtagctggcgcgtcgtacattcaagcttttgtagtagtgta

SEQ ID NO: 285443 - DNA, 402 bp, Glycine max
  unsure (1)..(402): unsure at all n locations
tacataatatgtctgaagtttagtacatatgctttttctttaatttcangatcctaagatgttgagtttttaattaaaccatgtgtggcaggaaatgaatgttctgagagattggcatactatgggatgagtacaaacctggtgaactatcttcgggagcgtttcaaccagggaaatgcaaccgctgcaaataatgtcacaacctggccaggaacatgctacatcacaccattgattggagcctttctagctgattcatacttgggaagatactggacaatttccagtttctcaattgtctatgttattgtaagtttagagattttttttttcttgtttgttgagtccccatgttatgctaaaggcatttagtcttcactcttctgacctcagtttatattt

SEQ ID NO: 285444 - DNA, 356 bp, Glycine max
tgcttaataaggctatacgctggaccctggctgacattcctggtattagcccatccacatgtatgcatcagataaatttataggatggggctaaaccagcaagacaaccacagagaagactcaacccggtgattcttgatgaagtgaagaaggaggtaaccaagcttttgcaagctggaatcatttatcctatctccgacagccaatgggtgagtcccgtccaggtagtctcgaagaaaaccggcctcaccgtcataaaaaatgagaaggaggagctgattcctactcgggtgcagaacagttggagagtctgcatctactataggaggctaaaccaagttaccaaaaaggaccac

SEQ ID NO: 285445 - DNA, 295 bp, Glycine max
  unsure (1)..(295): unsure at all n locations
tgtatgagtatggggtacccatcacatgtggtactatgtggcggncgggcgaaggtgcacaacagggtttccacatcctcaatgcgcgcataaacccaccatccccccgtgcccaccttcaactgaactcaagcactgccacgtagcccatatcctcgattctctcagacaccgggtccccatcaatactctcaagcttccaccacatgcgatcagaaacaacattcacacagcacgaactatcacagccgagccaagcacagcagaggcacagaactctgctcaacacatccac

SEQ ID NO: 285446 - DNA, 361 bp, Glycine max
tttttattcataagctccagaagcaagctttgctgaagaggaatgattcagccatggctgatagcttcaaccagggttattagggtataagaaggctaaagctaaaattgagaataaaaaatatctgacttcattcataggttaaggttaggtgaaccacttcatagctaaaaataacctgttatattctcaatttttaaaaaatttatgaattttactcttaataaaattgtgctttttatatgtaattttttattttttggccaaaatttaaaatttatttttaatttatttttaaaattttatttttatttttttagaaaatcttacttcaacttttatacttattaacaaataaatg

SEQ ID NO: 285447 - DNA, 394 bp, Glycine max
tatgttcaaacggttgcaaatatataagcattattattatttcttaataagttaagcacccggcaagcaactgcaatggagatatgccctttgaactttgaagtcactcaatagctatacgtcaacaaatagcatcaaaaggttaatgggtcgacaaattttcgaccaagcaaatcaattgacaagatacgaatttaataattcgggcctcaaaattaaagctgaaatcattatttcacctagtgttaacattgattatgtctgaataaagaagcagaaaaagatataaaagacatggctaaaaagcaatccacatggtacccctctttctccacgtgttctctgtatctcagagcgtcttccaagcttaaacaaacgcagcacaatttttaca

SEQ ID NO: 285448 - DNA, 374 bp, Glycine max
cttgggagttctgagtccatgagggtactcagaagctaaagggaatcactaatagggtctatttccgctgaatctttcgtctttgattttttttttttcctttcaatggggtagagagggttttctctctcaaaatccaattttatctcttcacaagagataaatttttctatgatgaattgtctaattattagagctatactaatgaagaaattagaaacaaattgagcaatgaatttctaaatagggcaaaagttatggataaggaatttatttctctggatatattagaaaaccaaattcgattgtctaatgatgaaactaaaacaaatatttaactaaaatatctctcaatttggatattgaagagagag

SEQ ID NO: 285449 - DNA, 376 bp, Glycine max
ttgatcaatgttctggattgtctaactagtgaaaatgagaaagatctaagggctttcttgtaagacttagatcgtgaagaaaccattcctgcagggggaaccaactttgaagaattgaaaagcgggagtcaatccgagaagaccaaggtggagttgaagatcctacccaaccacctgaagtatgtgttcttggaggagaacgagaccaagcccgtggtgatcagcaattagctaacagtagaggaagataacaggttggtagaggtcctcaagagacacagggaggcaattaggtggcacatatcagatctaaaaggaattagccttgtctactgtatgcacaagataatgatggaagaagactatagacctgtca

SEQ ID NO: 285450 - DNA, 377 bp, Glycine max
ttctttttcgtctttaagaagttcaaagctacagtggagaaaaaaagtggttgagaaatcaaagatatgaggactgaccaaggaggagaattcacttccaaagagttttgagagttctgtgaagagaatggaatcagatgtcccctgatggttccaagatccccccaatagaatggtgtgacggaaagaaaaaatagaataatccttgatatggctcaaagcatgctcaaaagcaagaaattgccaaaagaattttgggcagaagctgtggcatggccgtttatctattcaatcgatcaccgacaagaagtgtatggggaaagacaccacaagaagtatggagtgggagaaagtctggtatctctcacttgagggtc

SEQ ID NO: 285451 - DNA, 379 bp, Glycine max
  unsure (1)..(379): unsure at all n locations
ntgatgtaatatttataccgtcctagaacctaaactcttatacttttaataaaataaaagtgatataattaatgatttatggtgtaaaatactaattaacattactcatacattttagcatcattacaggtgttcctgactctagcaacttctagtgctgccgctgctactgccatagtgtacttaacacacaatggcaatcaggattcgaattggcttgccatctgcaaccaatttggtgatttctgccaagagattagtggagcagtggtggcatcgttcgttgccgtgggtctcttcgttttgctcattgttatgtgtgcagcggctctaccaaatcattaactagcaccacttaattaattatatatggagctat

SEQ ID NO: 285452 - DNA, 453 bp, Glycine max
  unsure (1)..(453): unsure at all n locations
gagcgtanncgtgatgcttgtaatcttggttgaccactctgagacccgcngatcctctcgagctgacctgcgggatgcatttttgcaacattctacccgcatttttgacagcactcgcgagaacagagtatcgtatatatgtagcataccaccctgactacgttggcacctacgctgacaccgctgaccgatgcacgtgatggcgccgagaatctggacctgcttaatcataagcaggaggaaggcctgcaccacccgcggtggcggcaaaagctgagctgggttcgtagattccatgctcctacctagcaggtcacgacataaaagggtgcagatgatatggatttcattatcgcttggcccaggcttacatctccacagaacccaacttcttggaatgaacgtgtgatcattcggaagcgaaactacatctgatcgatagtaaatccaagg

SEQ ID NO: 285453 - DNA, 553 bp, Glycine max
  unsure (1)..(553): unsure at all n locations
cctatgctcttaactcacaaacgtgagaacagttaaaattgatcacttacaacactaccaaaccccgggtgctttgatccgtagtagatcccgtgacactatcanantactcaagtctncacacgcgtggctcttagctcctgacagaagagcagtaatatatgtatttcaatctgagacaggcacattgaagcatgccgacgaagacaaaatgtcagcacagagaaaaccacaaaggaagaacggtcgaaaagacaacacgaaccagcatgctccaagccaattccgacggaaggaaatcatagggagcgaacgccgctgaatggagaatagcttatcacgaaagctaaaatgggtcacatgacactggtaggacatcggacaaccaagagtgaacgaaagtggacccctctagaatgcttgatcatactcgttcgatgacattttggaaaaggcaccgagaagcataccttgagcgaagtgaaaaccaatgtggaatagaatgtgaacaacgttctctgaaatatacggataccaggaaccggtatctacg

SEQ ID NO: 285454 - DNA, 378 bp, Glycine max
ttcttcagaatatacttccaaaatggtaacaagaagtacctccaaattaattaacgtcattaatgaagatagtgaccaaaactcagaaaacacaactgagataggatcaatatcagaaaataatataaatccaattaattccaaacactggaaaaccccctccaaattatattatcaacgtccaaccgcccctgacctactattagaggaaagaggagaaaacaatttcaagagttttagtgctaacaacatctatgaatggaacatagatgcacaaacggagtataatatcatgaatacactccaacatatgaccatggttgctacggcttaccaaacctcccacgaatgttcaaaagagaccattatagatatctt

SEQ ID NO: 285455 - DNA, 406 bp, Glycine max
  unsure (1)..(406): unsure at all n locations
ntactttnttttcccccaatacttacaaaaatattatcttattttttttacctcatgtcatttgaagaatgtgttttgctacaaagtaccgatactttaatttgcttcatgcatctatacctgataccaatatattgatatatttcactggtacatatatgtgaagaccaaatctttaaaaaaattatgaaaatcaaatatagtgacatagaagtaagtataatatagaaatataaaaagtattgtttcttgatgaaccaaatataaaaattgttttgtttatagataatttcaagaaagaaatgagattgatcattgatagtaccattcttatttgtgaaaaataggaaaaaataatttacaatnttttntattntgtttttagtaatgtctaagaagtatgtat

SEQ ID NO: 285456 - DNA, 373 bp, Glycine max
atcttggcattttgatgctgccactgtctatggggagggcgttttcaacatcagatcaaaggtttacatgtcaccaaaactgtggtatctcagagtcaatgtaatagaagctcaagatgtgataccgggtgacagataccgcctaccggaggtttttgtgaaagctcaagtgagctgccaagtgctgacaaccaagatatgccccagcagaacaaccaccccattctggaacgaagatttgatctttgtagcctgtgagccatttgaggagcaattaacaatcactgtggaggatcgtgtgcacccttcaaaagatgaggtactggggaagataagcctaccaatgaccctctttgagaagcgattagaccat

SEQ ID NO: 285457 - DNA, 398 bp, Glycine max
tatcctatatgacactccttataccaccaaatctctaagtctttcacttttaaagtcctgctgaatgggtacaaagtgacttgcagcaatttgatgagtaactcaacattatatataattagtgcaaaggcacttatgttcatcaaattttaaaatcctatacatatctaaaatgaacttaatgttaatttcaggatgtgtcaaacatcatatactcatttatgaaatgtgtgggattcacccatctaaatttggaagagattacggaatgcaggattgtttataatcattggaggaatgttacacaaattggttatgaatagaagacttttgcacaatcacgaaatttggaagctaaaactcaaattatatttgagttcctagatgcaacatctaac

SEQ ID NO: 285458 - DNA, 348 bp, Glycine max
gacatgaagaatgtgcagctactgagcattcactcaatacggtctaaagttcactaaatatgacacattcgttcgcgagaaaccacctcattcggtggaatgaggatgagatgcgacgaaatccataacatgttatccacgatactcgtattattatagacgtaagaagaatcttaatatacatgctctaatcgctgtacatagaatcccatagaccaatggatcacttggctcggcggatgagtgagctaaggcttgaagttcggtcgcttactttaatacaacacagactacgttgtgcgagaaaattacatcatatgaataatatataatactacacttggatac

SEQ ID NO: 285459 - DNA, 482 bp, Glycine max
  unsure (1)..(482): unsure at all n locations
cacaactatagtaacaaaataacgcagaaacacaacaccnnccccncagcggatgaccgtagcatcgcgacacggaacacacaacctcgacatgtggtgcatcgagcaccaagtgcgccttggatttatctaaggacaatggcgcgagactgacgatccaaaagccgccattccaacacggcgaggccactacgaagaaacctaacaccgaagccaagcgcgagaaaccggagaggagtagcagaatctagcccacacccctgattgaccagacgagcacgaccactataccataccggtggagctcaacaaaaatcgaacatccaacgaagataacaagccgtacacggaacaactaaacacgggatgcagagacagccaccacaagagacaaggggacttagtcacgactctcggaagccacaagagtgccggaccataatgatcagctgttcacaggcaaagaaacgtcaaaccataag

SEQ ID NO: 285460 - DNA, 467 bp, Glycine max
  unsure (1)..(467): unsure at all n locations
agctctgcccaccctttgggccttttgatgccttcgtatgactaccttcgaatacccgcngggtacaccggggatcctcctgcaggggacctgttttgtttgctctttttgaacaacattctcgagccggctgaggtgggatccttgtgacgcataatcctcttctttaggatctagtccttgaccgacatgactctttcagacagtatccagatcattctgattatgctactgattacgccttgccaacattgatctagatcgcattattatattggtgtaacttcctgaacattttgcatgttatctggctaatgttgcattacgtgcctacgagcgaattcggacaaataatataggtgtaatttatgatactcactaacttgttagacgtcgtcccatcataacgtggagaattccttcactacttatttatggagaactttcgtgataaaataaattacgcg

SEQ ID NO: 285461 - DNA, 754 bp, Glycine max
  unsure (1)..(754): unsure at all n locations
acgatgcacgacacanacagatcgtcanatgtcatgtataagngagagaggtagtaantagaaaaaangcgagacacananncacccacnacnnncaaagagagaggtnntggaaatcgaagtccactncgcatangccccgnanannacnnanacaaaanacnncagggcngaggagcgcagaancanggcgcnactgcaaggcaggagcncaactaancgagaggtanttagntcatagacacacacacacnacgacgcgcgcacacanaaggcgagagcagagcgacgagncgaaaccnacgcgcgcnctacagccataagcgagcgacataacagagctaaaaccgcagcaggcacacacaggaagcacagcacacgccaccgcgcgcacacatacgcctgttacacctccgggtgcagagatataccgtacgaggccagaagataccgcagcgagaagctaccaacgagagcgacgcacacctagcaagcactcaggacacagataaccaacagctcacacacacacaaaggcggcggcacacgcacaggacagatcgcaaaaagcacacggacgcctacacgtggcagcacgcaaacggcagccgggagagacacacagccccgcaccgccgactgtaagaacgcagcgccaacggcgcggcaccacatacacgacagcgcaaaccccacagcgagatagaccaaggcaaggccgaacagcacgaacacgcgcaggggaccacacccc

SEQ ID NO: 285462 - DNA, 104 bp, Glycine max
cctacccttatggacctaaagctcctttgatgagctcttattttggcacaactagggtgatgatctcttacttcggtgtattgcaactttaatatctagaaggg

SEQ ID NO: 285463 - DNA, 332 bp, Glycine max
ttgctatgatgcaggtgttactgatatttcgtgttgcgactgccaaggagagcagtgtagatgatgcacttccatttagcatactgtcatctaattgaaagttgcatccccgacaaccaagatttccttactatcatcgctcgaggcatgtatgtgattctcacacttatgtgcttaagtattataggcaatggttaacatgttactattcttttgtagtacattgtatttcattgagggagccataggtccccgtttgagattgcgtacgacgattaatacggataggttggattaattgttgaattcatacttgaattgtccgattggac

SEQ ID NO: 285464 - DNA, 118 bp, Glycine max
cggtccggcagaccatactcatgtgtgacacgctatcatcaaatttcagccgataatccggttattatctctcattcatgcgacgcaagcaaacgtttaacgtcaccagaaactgcct

SEQ ID NO: 285465 - DNA, 357 bp, Glycine max
ttcttctcatcagaagccactctccaaccataatattggccatcaatattctgctcattgaaataaaataaaataaaataaacaggaccaaaaaagtacatatgagcaaaatttcaatgccctgaggcataagcatcagcgcaactcatcatttggataatgaatgaacatttacagacatataaattcggcaaagtcatgcttctacagtctacttggtcatcattatgcggctacagttggcccaatctttcctgcatgaaagaaagaaacaattttaatccatgtttcagagcaggaaaataaaaatgataaataaaccatcacattttttgaaaaaggaatttatgtagatag

SEQ ID NO: 285466 - DNA, 268 bp, Glycine max
ttgtggatgattgactccttttcatcggcttcttttgtgcgccgtaacaagagccctttggcggacgtaggcacctaaagtcctgatcagggtatgcaacccctcaaagaatactcttcctagcgactttgtaagccacatcaagttcatcacaccttttggatatgaccgctatttcttccttgaaggagaacttccgttcacataaacctttgtctggaaagcaaagtgtcctccaataaagatggactgactgccatgagatgct

SEQ ID NO: 285467 - DNA, 356 bp, Glycine max
tatcttggttcgatggggtgggtattgatatggatgaaactactattcaatacactaatgaagcccaacaagctattaccgagaggcccaagtgagttagcatgaagccaaaaaattgaattgtttatattcattacacatgattattatagtggggtttattaacggaccattctaaaagttaatagtggaattctgttagaggggaattggggaaaatattcgagtgttaagactgtcgtcctttatataatacttactatattggtgaaaaggtatcaatgagaatattgtctatttcttctctctactatcttgctataggatcctctatcctttaatttagagaactcctt

SEQ ID NO: 285468 - DNA, 383 bp, Glycine max
tgatttggttatacaaggctcaatttgtgctatcttatgtgctaaatggcctaaatagtactttatttcttttcaattattcatcttggaatcatgggaaacacaaaagttgacatataatacatttatagcatattagcctgatgattaaattgattgtaagccctcatgttttggggtagagagcggaagaactgacaactccatatcctttctgtgtcatatgtctctgaccaaggtggagaaacatcagtcaatattagcattaattattggttatcattcttggtcttcatgtgaatttgatttcccatagtctctcttgctgccattaccatcatcttaattatcaatacaacccaagaattatgttgtggaatatt

SEQ ID NO: 285469 - DNA, 357 bp, Glycine max
ttcttcaacatcagaccacttccagggtgctggaactacttcacatggacttgatggggcctatgcaagttgaaagccttggaggaaagaggtatgcctatgttgttgtggatgatttctccagatttacctgggtcaactttatcagagagaaatcagacacctttgaagtattcaaggagttgagtctaagacttcaaagagaaaaagactgtgtcatcaagagaatcaggagtgaccatggcagagagtttgaaaacagcaggtttactgaattctgcacatctgaaggcatcactcatgagttctctgcagccattacaccacaacaaaatgacatagttgaaaggaaaaaca

SEQ ID NO: 285470 - DNA, 377 bp, Glycine max
tgtgtgttggtgctttgggtcatttctcagtttgttcatttgaaacatgaaaacaaacacacctatagaagtcaataatgtttagatgggatatggagttttgaacttataatgttttatgttgttttgaagtagacattggagaactttacttttatgcttttccttttcttagttgttcacaatattttcttcagcgcttatcctatggtgtttttatgtatttaacagagggatcatgccaaaaagagattggatagtcatcactttgaacctaatggaagtagcggtaaactgccctgttatctgataatatatttagaacactcttctgtagtcagtattatatttttttcatgcttgatgtttttaactgt

SEQ ID NO: 285471 - DNA, 377 bp, Glycine max
ttctttaggagaaaccataaaaactaaggtagttcctaaacaaaaatcaattgaggaagcttcgccaagtatccccattgaaaaacctttattcaaacctttcaaagttagtgagaaggctaaacgaaaaattagggaacttagaaaaactaaatccttaattgaaggcgtaggtgataaccatagtgaattacttaacaagattggtagtttacttaaagtcattccagatactccccaagcctcggaaaatacttccaaaatggtaacaagaagtacctacaaattaattaatgttataattgaagatagtgaccaaagctcagataacacaactgagataggatcagtgtcagaaatgaatataaatccaatta

SEQ ID NO: 285472 - DNA, 392 bp, Glycine max
  unsure (1)..(392): unsure at all n locations
ntacagcccctcaccttggtctatgcaacgggcttggcttgtctctaagaggagaagttgctggacaatcattgccctttctggcctcgaccatctacttttcctccaccaccgaccaccacgccttcgccagctatggctcctccttcggtgcccgtatttccgcctccagtgaagcctcaagcctcggatcccattaaatggctatcctatgaggagctcaccttgcgatgtgaacatggtatttgtttcaactacgatgagaaatttcatcgcggccacaaatgcgcctctaaggcttttctactcattatggacgatgatgacccttttgaagacgctgctcctttggtggagccctcacccgaaccacctgatacccatgacccact

SEQ ID NO: 285473 - DNA, 378 bp, Glycine max
agcttgaagattagactatacgaggtatcttccttgggtatagcaatatctctaagggctactgtgtctacaacttgcaaactaagaaactcgtcatcagtcgagatgttgaagttgatgagtacgcttcttggaattgggatgaagaaaaagtggagaagaacgttcttatacccgctcaactacctcaagaagaagctgaggaagaagacccaggtgaaccaccttcacctgcaccacaacaacaagatcaagaactatcatcaccagagtctactccaagatgagtaagatctttggtggacatatatgaaacctgtaacttagccatacttgaacctggaagctttgaagaagcgtcaaagcaggacatatggg

SEQ ID NO: 285474 - DNA, 401 bp, Glycine max
  unsure (1)..(401): unsure at all n locations
tccacatcaagcaagtgcatctcaaagctcttatgctaacaatttaattcaaaagttggagaatttgcttggaaaccttgtagctgtgcttaaaggacgaattgcagaaaatccacaaattaatcaagtcttagaagctatagatcaagaggtatgaatttataattctacttattcgacgatttaactatgatatgatactttacaaagaagaaacattcttttaatttacgtacctacaaatggttctactagtcaagatcatcaaactacaaacaatcttaactagaggttaggtgaaatatacatggtaatgaagatgcgagccggtgacataatgttatttcacgaacatgatttanatggtaatgaagatgtgagccgacgacataatgttcaag

SEQ ID NO: 285475 - DNA, 377 bp, Glycine max
atcttcataaatggtgacaaaattgtgttcataacacgtttcatgaattttttcgactctcgtatctttagagaagggaaccaaagtgccgatctcttggcaaattatggtcttcatgcaagtgatcctatttggtgggatcatctcctccttttattttcttaagcttttatttgtaataaaaggtttttttttttaccagaatttaggtcttgttgagtctatttgcatgggttttggttattatagtgtggtatatgattactagattatattggtgtcaacataattgggattagttaatatgttgtgatgttgtgcacttcaataagtttataaaaaaatcattctacattaagatgagtcatctaattatt

SEQ ID NO: 285476 - DNA, 335 bp, Glycine max
  unsure (1)..(335): unsure at all n locations
acatccactgacttagaacatttgtttcttctctcacaacaccaaacttggcttggattggagacttctatatttattaaagtgggttttttgtgaagtacctcacaaaaatagattcttcctanctagggggattccactctacacttctcatagatatacaataaatatagtggaagtgggttctcttgatgagaaagaagaacagatttctctcataaggaggttgatgatatgtcttgattcaatcggttgttttaaaaaatcagcttaggcttttnagaaattttcacactgtcgtggtgagacacatgtggtggtgcaagttgacactg

SEQ ID NO: 285477 - DNA, 372 bp, Glycine max
agcttcttatttcttgctcatcttggtggtgaagctccttcttccatggcttattccttaatggatgacgcctcctctcacctattttcctttgtcttccgctgcatctccatggtggaaaatcaccattaaaggaccccattgaagctcaaagatccagcctccatagaagctccacaagcaagcttccatcacttccgttttcaatttcgagcgtctccatatattacagggcacaatcggacatacgattcaaaagttattgtcgttggaatttgctcacagcttcagctttcaattacgagcgtctcgatatatttcagggctcacttggacatccgagttaaaagttattgtcgatcgatttttctt

SEQ ID NO: 285478 - DNA, 136 bp, Glycine max
gaaaacagaagctctgagaaaaatcaaacgataataacttttaactcggatgttcgattgaaccctgtaatatatcgagacgctcgaaattgaaagcggaagctttaagaaaagtcaaacgaaaataacttttgac

SEQ ID NO: 285479 - DNA, 354 bp, Glycine max
ttcttagacgaccttgtttgagtcgagaatactttattatttatttggacaagtttgaatatgatgtagaagaaaatgaatgtgagcctttttcccctttgaaagacttaaaaaaaaagttttaaaaatacttttaattaagatttgaattttttttccttattagtatatatgtgaggggtagagagtgtcacaagatattaggagcttccatgggttagcaagcttctataaaaggttcgttcctaatttctctacaattgcatcacctctcaatgagctggtgaagaaagatgtggcatttacctggggtgaaaaacaagagcaagcctttgctttgttcatagaaaagct

SEQ ID NO: 285480 - DNA, 396 bp, Glycine max
tatgccccactctcttgctcatactagccttactttagcatatatattctttactttcctcactcatattcttacttgagcatcgaagtcctttgttttgcaagtcccccctcctgtcaagggtacctctctaagccgacgcgtgaagttcaggaccgcactcaaccacgtccatcccaacgtgtcacggttccggattttggcaagaacaagtttaaataattaaaccaatggtgataagtgagatgtgaaagaagaacctggccatctagctaagaagcgaccaatatacaaatgatggattagagaagatgggatttcttgttgttgggcaagaagaggctctctcctcaataagaaggtttcttccatatcacattcttccactcactcact

SEQ ID NO: 285481 - DNA, 503 bp, Glycine max
  unsure (1)..(503): unsure at all n locations
gacacgcgttnggnnttgatngccttggatagcatacggctactataaggtgagttcccgctgataccctgagtcctctgaggcacgcgttctcttacattatcatataatggctagaggtgatacttgacatggattggtttgggtaactgatacaagggaacccccagattaatctcatgacacaacctgctcaaaagatgtatgattgtaggagacactatcatagcaaattcgtgggtcactgcactagacaacactatgatggcactacatcagagatgccgaaatgctgatatgcgcctatgtgaatgcaattggcctcaagatgtgatttccatctatgatacatcaacacactgtccccaacctatggaactactatcaataagtgcattaatacaacctcacaaggacgaacggtaaaattgcacagagtgaacccttcctgtgtactcattctgacataagactattgtgatcaatgaataatgttatatgaa

SEQ ID NO: 285482 - DNA, 377 bp, Glycine max
  unsure (1)..(377): unsure at all n locations
tatctttacatcttttctgactgtggaaccaccattttatgtantatgattcctttgaaaaaccctagagaaagagactttgtagaagtatccttttctgaaatgggtgttattttcgtgaccttcactgaaccccgatcacattgacgtgatcagaatttcaaattgatgttcctttagtagaatccgaaatgccctcaaccctttcatgtagtgacatgggtatttgactcagagtattgttgttaactctatttctgaaatccatagtaatttccttcattctggcgtaatagagacttacgttggaccaacaagtgtgaacgagagagagacctctaagtgatgcanagaggaaccgatgggatgctcatgat

SEQ ID NO: 285483 - DNA, 368 bp, Glycine max
ttcttaagctccttcaactgcacaaggctcttaatatttgaagagtatccttgtggaaccttcacccgacgaagacactgacaaaaacttatctattccttcttggacaaagtatggcaggctgggggcaagtaaattttcttcccatcagaccttggatgcaactgtgatcgtatacccatatcagctagatcttgacgggtattcaagccatccttcgtcttgccttgaatgttaaggagcgtcccaatcacactgtcacaaacatttttctccacatggataacatcaatacaatgtctaacgtcaagatcacactagtatggaagatcaacgaaaatggacctcttcttccatatgcaactctg

SEQ ID NO: 285484 - DNA, 378 bp, Glycine max
  unsure (1)..(378): unsure at all n locations
tggctttggtttagacatgattgatacatgattttttacttgtaggaattgatttgggcaagattggatgagaggaagtgggattttcgaaatctgcacttatgcagaattttgctgtcaaaataggtgcagcagaattttggctttgtgcagaaaaatgcttgtgtgtggttggctgtggaaagtctagtgcagaatgagttctggatgtttgctagtagatcccaacggtcaaaatgtaggcttatgcactatagacttccagtaaaattttggagtcgatccaacggttaacgaattggatcgaaggaattgttactggggtctttaagtgagaaaagctgtgattntggttagtgtgttgagcagagtttttct

SEQ ID NO: 285485 - DNA, 367 bp, Glycine max
  unsure (1)..(367): unsure at all n locations
atcttgtagaaaggctagacatgatacatgtcanggtttggtttggttcaaagataaaagggatgccccacattatttccatgacacaaatgcaaaaatgatgatttggaaactttacgcaaaactggtcatgcatgcacctatgtggacactcaagtgtcaactttttatggtcatgtgatgctaagtgtcgcaagattcatttcctctattttagtcaacccaacgtttccaaaatatgttcttttatccatttgtgcattcatccaagtccatttcgggcgttcgagaaaattttcacagcattcacccttcaggtgtatacacattttttttaaaaatcggttatgatcaatgaattttttca

SEQ ID NO: 285486 - DNA, 249 bp, Glycine max
taattcacataaataatatgtttaaaaaagtgtatacctaatgaaaggagcaaaatgggtaaaaagaacccatacgttgtaagggaaatacactaatagtttacgtgtgaggtcatgtgatagttaatcacttatcaattaagtataggtcttgattgaatgcatgatcacggcaaacaattgatggtcactgtgaaaagatgctagtctaagatattctttatgatttgaggtggataattgaatctt

SEQ ID NO: 285487 - DNA, 233 bp, Glycine max
ttacctctatcttctgtgaacgtctgctgcgtctacagggtggaaaatcaccattaaaggacctcttagaaactcaaagatccagcctccatagaaacttcacaagcaagtttcattaataatactaagcacactacaatcttaaagactaaacatatgatgtattctattattgtttaatgcttaacttaataactatagggtcactgtaaatcttcttggtacggtcactc

SEQ ID NO: 285488 - DNA, 370 bp, Glycine max
  unsure (1)..(370): unsure at all n locations
acttaattaacaaaatctaatccggaaatatatcttatgnncttgtttgtttaaagaaagtgataaatcagcttcaaatcaaacaacctgcaattgagtgctctcgtccagtacgacaacgtcttggatatggatgttcactgcacccaagaattggtcttttgagatcaatgctgaaatcaggatctccaagatcattgtaaacatcataatcatagattctttcataactcttacgttctccttctccatttcctctcaatagcattagctccacttctctaagtcttctcaacccacatggtgtttgtgatggcaaataagactgtttcagaataagttaactcgatttaaaaaaaaaaagcctata

SEQ ID NO: 285489 - DNA, 354 bp, Glycine max
ttctttacaattacaatatgcattcctctagatacaattccagtgcatactaattggttgggatattgattatcatgttctcttttgctcaagtggcattttctacttgaagtctagacattgaatttatgaggttttttcttccttattgctaaatcacatgaggcataattaattagaaagagcatctatgcctaaatataatattcaaagtgcatcagtcttatttatttatttggataaacataattgataatttattaagatagaaaggagaggtacgaatgtgagagaataagaaactaaatagtaacaaaataaaaaggaaaataaaaataaaaatgagaaacatac

SEQ ID NO: 285490 - DNA, 399 bp, Glycine max
  unsure (1)..(399): unsure at all n locations
tgtcttgtgcagaattagggtatagaatagcctgtcacagatttttccaacattccagagcacaccatagtgccaattttgggaaaagggctctagaggcagcaagaggagcaatttttgtagagatacctaggttttgtaatctcattattgttagggtttcttctataatggttggttaaacactcttgttggggatttctaaagaacaactgatgtaattattttaatatctaattgattgtgtttcttgtgttcaatgcttctttcagtgcttaaattatgtatgctcttggtctgatcacccatttgtgtgcatagttaggtgactntagcattgngaaatgtattgttgccttagaacttgaatgaagcagaattgaaacttagtcttacaag

SEQ ID NO: 285491 - DNA, 350 bp, Glycine max
tttttcaaaccacaacaacaaaaaatctaggtgtccaaaacccctcaattcaatgggttttctaagtttgaaaagtgaaatttagaatgaggtaaatttgaagcaaactctcacctcacacaagtccataacatcaatctaaacttgctcaaactgaatttacacctaaaattccaccgaatcaaaatttgactcttcaacacccaattttgccctacaaatggctctttgttcactttggtcattcgtttttctctctagttcagcctaacctttctcacatgtcctaaatgacatttcaaactagtattaactcactttaacctccatataccacagaattcagactt

SEQ ID NO: 285492 - DNA, 357 bp, Glycine max
tctgcttcttttccctataaataggggaatgttgttgtaacaaaaagattcaaccctcctgggatctaagattcactcaaaattagtgagaagaatgtttctgtgaagagaatccaagccgaggcgctttcgtgacgtgttcgtgggtgattacgcatagattgtcgaccgctcttcattcgctcttgcacaatgttcggtcttcagccggtaagttaccgaaatcgtacttttcgatgcattctatgtacccttagtggtcctcatttgtttcgcgagctttcatgttcattacatttactttccgaacccccttgtgacgtgctttagatatttatttaagtcattgtctcggct

SEQ ID NO: 285493 - DNA, 354 bp, Glycine max
ttcttctccgaagagcatgggtatttccagtttcctgaaaatatctaaaaatcttgccagatgacgatctttttatttcttggaaggtatcacagggtaaggtacttccacaccttcatccacaactttttgactcctactcttctttgcattcttattatttttttcattttctatttctttttctttttcttggtccttctattctttattcttaaccattgtttgttcctctttttcttgattactttcacctctcacctcatttttcttgccatcagtacttttcttgtcatcatttttcttctcatgtacaacattatcctcatcctcaacctccacaaaccttttact

SEQ ID NO: 285494 - DNA, 395 bp, Glycine max
tctcaaggaagttttctcaaaaaagcttctcatggaagctacctagtctataaatagaagcatgtgtaacacttgttgtaactttgatgaatgagagtcttgtgagacacaactcaaagttcaacttctctcccgcttttcctccttcaatttcatgctccccctctctctttctctctctctttctttttctccattgaagcatcctttccaagcttcttatccaaggcacattcttggtggcgaaactccttcttccattgcttattccctagtagatggcgcctcctctcacctcttctcctttgtcttccgctgcatctccatggtggaaaatcaccattgaaggacctcattgaagctcacagatccagccttcatagaagctccacaag

SEQ ID NO: 285495 - DNA, 336 bp, Glycine max
cctcgatggagaagcagtcacaatctatagaatttatgtttggacttaattgtaaaaactaactcaaggtaagaattgccgtcacttataatttcacaatactaccagctagttgatgtcaccccaacaagtcgggagatggacgtctcaattatgaactttgcaggattaggcatctttgtgagggttgataacaaccttgataacatgtgacccaataagccaacaaccacccttattttgaagccatattagcattcaagtttaggtcttacttaacttctaaaagctagtttgataggtgaaaattgcccccttataccactagtctatgtg

SEQ ID NO: 285496 - DNA, 434 bp, Glycine max
caccgaccctcctccctctcgggtccgcgacccacccccccaggctgacttgacgtgacacaaccactgactgaaaagggcgctgacgtggctattggaccgaagaactggaatttgaattagctatatgttaaatttgttccgaaaaagaagaaagataagattacctaaatttgacgggcctgcaaatacaggcattgaccctacccattgcctatttaagatcttattaatgactagcttaagaatatattaaataaaaatatgtaaggagttcatttttaatggcttaaataggatatgaaattttttattttaatataagagcatcgtatacaaatgtgggaatttatttttagctgatttttacaaaagaataacaatagtattgttatgatcatctctaagtggcaatatcacacatcatcaaaaca

SEQ ID NO: 285497 - DNA, 675 bp, Glycine max
  unsure (1)..(675): unsure at all n locations
tgcatacctcgcgtcctaacatacttcgcgccgcggtaaaaataacttctgtgggcacgnaggcgactcacgagcgcagcgataantcgctgtgtcgccgtgttgagaacattgggagaacgcgagaacactccataaggacaacgccctcgtgacatcgcggtttncttgcacaatattaccgtcactatgtattganagagcagacgacaaatagtagcactgcaccgatgtgtattctctatgtgtgctctctcgaactctccacaatacttttaacctcaatacaagaaccataacatgcacactagagtcgctagatctctacatgaggtcgtcacaccaatctataaaaagctcaacagactgactgacactctaggtaacactatgtatttagangccatggaatcggaatatcttcatctctgccacacagcatagattaacttcacattcgctccgaccaccactctgggatgacatatctatttctgcgaatctcctcacacaaaagttagtccaaaaagctcagatgatcttcctgaccagcacttcatgaattctgaacccatccacacatcctctacaaattgtgttcccaatgaacaaattacccgaanggttaatccccagttctattctttctatccgccaaccatctgacgtgattcc

SEQ ID NO: 285498 - DNA, 326 bp, Glycine max
atactcagcttgttttcttctatgtaattgtttaaaacaatccttattaacacttttttactttctggtagaacctcagagtattttacaagactcttagatctgagatttgaattaatcaccacttaaactctctcactctttttcgcaaatttattatgtaagaatgaaatccaaaattctttcacatatgaatcatatttattgagtacttgagtatcatacttgaatccaaagcacaagaatggtattataggaaatgatacagtacacgaagctccattttgggtacttgcaatatccattcaattgagaaacactgctct

SEQ ID NO: 285499 - DNA, 429 bp, Glycine max
  unsure (1)..(429): unsure at all n locations
tgccacggtccgagcattgtgatgagtgggtaacatacccaggcgcaaccccttcgaaaacctatcgacgatgacaaagatacacgtgttgcccttgtaagagggtaatcccacgataaagtccatggataaataatcccatggttgtactggtatcggaagaggactcaacagcccatctggttttctgttatcgtatttggtacattggcacgttaagcatcctgctatgaaggcacgggtatcagctctaacggaatcccacgtaaagttttcttgtaagcgatgaagcgttttctgaatccccatgtgaccacctgtcggagattggtggaatgcttctagtaacaacttagtgaaggaggaatttgagggaatccanatacggcctctgtgtaagatcanataagcagttaacgtgtactctgg

SEQ ID NO: 285500 - DNA, 288 bp, Glycine max
acagagtggtacctggagatatgttgcgggggtcatgagaactttgggacgttaggtggggtgctattgcccaaaaccaaacttgaccaatccccacccaacctgggcatagtcagtcagtgagaacctatgatgtacctaaacatgcgagcttctggcagtccaccgattaaagaacaaagaccacataacaaggaggcttgtgtggtggctgaccaactatggatcttgagtgatatttggtatatggcctctggtaatcgattaccaagggggggtaatcgatta

SEQ ID NO: 285501 - DNA, 335 bp, Glycine max
agacgctcgaaattggatgttgaagctctgagcctatttacgcgacatatctttttactcggatgtctgattgaagcccgaaatatatcgagacgctcgacgatgaatgtggaagctctgagccaaatcacacgacaataactttctactcggatgtccgattgaatcctggcatatatcgagacgctcgagattgaatgttgaacctctgagcgaatgccaacgacaataactgtgtactcagaagtctgatatagtctcggaatatatcaagacgctcgaaattgatgttgagctctgacaaattcaacaacataacttttactggatgggga

SEQ ID NO: 285502 - DNA, 547 bp, Glycine max
  unsure (1)..(547): unsure at all n locations
actctcatgtaacngagcatgtntgtgcgaccaagaatatcacgcgctggcctanttactattccncncccccactagagcccttgaccctttgattcatgaactccaggcacaacaaaacgccgctagttcaggcctgatgcagacgctactctctatctggcagctgacgggacactgcaatacattactgtaacactgccagaatggagctacagtgtaaacaacgtccgtcagataatgtcaaacctgcgggaacattggaaggctagcagcgcatttaaggcatccaaaggggactataaacaaagggtatccattacaatctgctcctcaaggagaaccctatactttacaaactctgtttgatactgattcgagaatggaaaatggctgaccgacaaaccaaatttgtgaggaagaattctcatcgagcctaaacctgtgacaagatcgtcaacaaccaaaactcgcgtgcctcgacgacaaacaagctgaaacatcaagctcggctgtacttgaatacaacatctatggaatcaatccc

SEQ ID NO: 285503 - DNA, 644 bp, Glycine max
  unsure (1)..(644): unsure at all n locations
tcgtggcgcataccaacgtgctgagatcgggacactcacgatagatatctagctgatgactgtaganaccccccccccccncncaagcgatggcattgaaaccttttgatnccntcgacactatcagaagacacaaccnnaannctctacgcggtgacgcatatgtaggtagcgacaagatgtatatcgttaacagtgtttagtattcgtattggagcgtgacgtctagatagggaattgttcttagtatgtatacacgatgactggaagaacatagnggtgaaagagtgataaaaggatcattgtatgcctggagaaatgatcggctactgaaactcagatagaacggatgtgatggaactgtagtgcatgggatgaaatagactagagtagattgcctaagaactatttgtactgttgggaagagatatctctgctaaacgtgacatctgtgtggcctctattaagaacaggtggtggtggtaatatgcaatgaagttcattcatttgctgtgataattaataagggtaggcttgtgggagtggtgtaaaagagaagaccaagaaagaatgttctgcagttgaccatttagaaatcatactagcagtgtcagcatacgatattgacgtcttgaatgaataag

SEQ ID NO: 285504 - DNA, 362 bp, Glycine max
  unsure (1)..(362): unsure at all n locations
tggagctaggtcatgaaataaggtgttttcaacgagtgaggcctttcaagtttcaaacgatgacgaggaccaccatagcgcaagtagctcaacagtccagcacgatagcgatgacgacgatcactacgacgcgagtagctcagtaagagtcattttcgggggtgaatagcttgaacaaggtagagtgagtcacaagaatcattctcgggggttgttgtacgatgccttttcgagtttttgtaaacccgtggactcggagcaaactcgcgagtttaccaaacctcgtccgagtctacgcanaatcggacgagtttactccgngttcgattctgctttcgatttaacttgccaacccttagtag

SEQ ID NO: 285505 - DNA, 581 bp, Glycine max
  unsure (1)..(581): unsure at all n locations
cacgatacgacccgcggtgccgtacgacgctacagacattggcgtgatctcgcatacacaccacccnccgccgcatggatgaaacctgtagancngtgttgaatcactagacaagcagtgaancttgagaatactcacgcttaacaacagtacttttacccacgtttttccgaaacctatgtgacagtggatttctcatatgtaccaatatgtaactaagcatgtgaaatggtcgcatcaatagatgctgctatgacatcaacctttggacacatccctttacctaacaaggaagtcgatactatcagtacccttcttcaatatacagaatgatgcaccatgcaaacatatcgtaatacaagaaatgccaccactaataatcagcctaatactcataaccaatgaaatgcctcatatccgagttattccatcttctaatcttattggagtatctggagaattaaaaaaaagcggctgggtctcccgttcaacataaatctaacgtttaagtctattaatcactcaacacagcgcgttatcatattcaacatgcacactatgcacagcaaagagacggaatc

SEQ ID NO: 285506 - DNA, 402 bp, Glycine max
  unsure (1)..(402): unsure at all n locations
tcanaacacagcatcacagaatctaggtgtccaacacccctccattcaatgggttttctaggtttgagaagtgaaattgagaatgaggtaaatttgaagcaaactctcacctcacacaagtctataacatcaatttagacttgttcaaactggatgtacacctaaaatctcaccgaatcaaaatttgactcttcacacccaaatttgccctagaaatggctctttgttcactttggtcatttgtttttctctctagcacagcctaacctttctcataagtcctaaatgacatttcaagctaagattaactcactttaacctccatttaccacagaattcagacttaaccttccaactctcaaagcctcacttctttttccactcataacatcacattctcac

SEQ ID NO: 285507 - DNA, 413 bp, Glycine max
  unsure (1)..(413): unsure at all n locations
gtctatgtggataaaagagcttaanaactgagatgttagaaaaggttggttatccattataaatgtcttaatcattttctcaaagatgataagtctcccatcccgaaagcttcttcactcccaaccttgatcagaaaatcaaacttattttcaaagtttgatttaaaattagggttttggcaacttggcttacaactagaagatcagtataaaactgaagatcagtattaaacagtcttttgtgttccgaatgctcagtaccaatggacagtccttccttttggtttaaaagtatcaccctttctcttccacaaagccatgactaagatttttagcctattttggacaacatcattgnttacatagatgatatccttttctgttcaaaagacattgtctctcataaaaactta

SEQ ID NO: 285508 - DNA, 395 bp, Glycine max
  unsure (1)..(395): unsure at all n locations
tcgtcaacatgaagttattttcttacccaacactcacgtattctctcccttttagctattggcccaaacaacctaacttcttcaactttttcttccatggaaacttaacctttaaagatctccacctttcctagttttcctggttggtattggctcaaaaccttcattaattcttttcatccttcacaagttaagcgagcttcttctttcttttcttttgagaatagagatacacaccattttaatttattcctctccttgtcatagttttgtaagagctatggatggattcatactctcctacccatatttaccanatatttatgaatatatgtttttggtggtggtttaagatgtttaaacacataatgaccaaggtcttgacgttcatcaca

SEQ ID NO: 285509 - DNA, 433 bp, Glycine max
  unsure (1)..(433): unsure at all n locations
nttatcttgccaagttcatacaaaagtgttacaacttaacctaactgtttctaattatatgggccatcaaatctatcatgtgttgacagtaattgattagcctgtgaatttcctcaggggctgaacacacttcagtgatggcctttgctttggctagtagtcgcgggaggtcttgacttccatttaaggtcaaggcgaacctatccatccacatggtcgcttcttgatgcaatgcatcaatcaccctccctcttgcttccttttcggcggacgcttgtgcgaaatcctccactagcttttgttcatgagtcacagactgggttaactcttccttggactgccctatgatggctagcatgcttcgctccgtggcttccaagtgttgagccaaactcctcttggatcttgagcaaagagctaaatcttcctttaa

SEQ ID NO: 285510 - DNA, 411 bp, Glycine max
tgtacttttgaacacttgcttatcttatccagagctttcagtttctaaactaagtgcttttaaactatttgcataacttttgttgattctgttacttatggtgtgtgtcacgtatttgtgttccattccttgtttagttatgatgcattttttgatgatactcaagtcatgtgtaacttttgaacatctacctatcccttgactggagatatctttcaagcatgcttttgatcatacaaaacttttcatttctattgcactttgatatgggaaaagcaagattttcctttcatgattctagctagtaaactctattctagtagtcctacttctattggggctgatcctatgtctggaaggttgacatactttcaagtgaatcttcgtacctttcttgatgcttattgatca

SEQ ID NO: 285511 - DNA, 352 bp, Glycine max
  unsure (1)..(352): unsure at all n locations
tctagccaaatggacttaccttgtattaattcctttgatagcccttttgagccttgtttccctttcctttgttngaagctcactacaagccttaagtgaaaaaccatgatatcatcatatccttaaggaattttggagctttggaattgttttgggaataagtgtggggggtttttgtttcattggacaacttgttttggtggctatgcttcatgatgtattttgggccatacttgatgtacattgtatattggttaaatgttggacatgctgaatgaaatgttgtttctcaaaggctatagaataaaaaaaaaaagaataaaaaaaaatattcaaaaaaaaaattcgaaaa

SEQ ID NO: 285512 - DNA, 423 bp, Glycine max
ccatccttgccctatgaccgtgtgaacgtgcacaccaaactcagcttagacataaaatcatggtttttcttccttcaagcctttttaggcctttcctccatcttagatgataataatatgcaattactctttgacttaccttccttggcgtgtcaactgtcgggataaacgccggtatatctcctcaggctaccaagccaaccacactactgagtgaaactacattaaccctaacctcaccgtattgcactcactatataatttccccttatgcgagtaaactcagctaagctatccttagatcttacttatggccacactcaccatttttgtgacttgacttacacttacctccgacataaggattataggttatgggcccttattccttacctgtcattttatcaatgggatcatggatgc

SEQ ID NO: 285513 - DNA, 535 bp, Glycine max
  unsure (1)..(535): unsure at all n locations
cgggcgacacacactncgcgcgaacgtgtgatcaacacgcgcacaggcccgatnanctcccnnccccccnnccccaccgagcatggaaccgcttgatnccagtgaacacccagngacactatagacaacccaagcgtgtgaacgtagatatagtccaccattatacaacatgttgatctatctgctaggaggacatcagatatatagatacatacatatacatatatactgcacgtgagaaatcgagactcacgggcgcatatcaaagttccatacttactggattcactgggatagcgcgtgtatactacatacaactcatatcgccatactcaatcgacccacaagattccatagccgcgctatgagatgatctgaaaacactcgagccacgcgatgaacctgagacatgagaaatgcgacctgagactacaaactgtgaagagacgagataacggcaaggcaacatgtgtaattcggaaaatccggaaaagcacgagggatggacattggaaaggtaaatgggaccgagacn

SEQ ID NO: 285514 - DNA, 406 bp, Glycine max
  unsure (1)..(406): unsure at all n locations
cgcgaatgcaaacatttggaaagttagttttaccagagggacactactcttaaaacaaaaatggcatacaacctcctcccataaatacaaacatcaatgtaaatttagagcaagcttatgtgcatatttccttacgaacgttcacttgcacaagacattctattaactaagaaaaatgcacccatatacaatcaaggcagcttcgttacctagattatttacatgtacttccaaggtgtatttgttacttacatcacacacatcgtcttggctgaattacatacatgcatactcaaagcantttggggtcccaaaaattgacatgtgcacatcttggtattcctaatacctatacatacaccaacttcatgatgaatcctgactatctacacaataaggtgctaca

SEQ ID NO: 285515 - DNA, 403 bp, Glycine max
tgcatgattcatattctccccctttgtcaagcatattctttttgatatcatcaaaacctgcatgatttacattctccccctttttgatgatgacaagcattatccaaggcttgatctttttgacatcatcaaaatcttcatgatttacattctccccctttttgatgatgacaaccacttgtaggttaggagcaacaacaaataaaaaaatatctatttgcatatagtttactcccccttggttttgcaatgtttgcttatatgagacaattgaagatttcatatttttcatatataaaaagttgtctcatataaagaatagataattttcttactatttatctttatctttctctcccctttgcaacatcaatacaatcatgaatgagaggagaaaatgtac

SEQ ID NO: 285516 - DNA, 302 bp, Glycine max
  unsure (1)..(302): unsure at all n locations
ctcagcttgaccattcccttgcctctttgttggtttgctattangtactcangcacatcacgtangtgcggaggtggtggattcttgctcaaaactttgtcatgcttcagtagatctgttcaaatacaatttcaatcctttaaatttaacttcaaacataagttttaaaaaaaataaaaaacaataaatgccaattgtatattttaacgataacatcaacctattacattacctaggtcttttggattagtttcgaagtgggctttcaacctaaaataaaagcacaagtttgcagaaatgaa

SEQ ID NO: 285517 - DNA, 381 bp, Glycine max
tcatactccacatattttgttcctgatcgagccatatataccatatagtaggtgcctataaaaaatcagtagctacctcttccagaatccatagccccatgaccaaggtgtcggcctgtactttcttcacaacacaacatattacattcttggcatgtcctacaccaaccacatatagtagacaccatctagaatgttgtccccttcattgatttaacgtcattcaattaggttgcctgacaaacaattcataaagtgatatcaaaaaatcgaaatcataagcaatttaacattatttatacatcgttaactgatatcaagatattcaagacataaaagacatcctagatcgggaaacataaatgacagagaatgaatacc

SEQ ID NO: 285518 - DNA, 443 bp, Glycine max
  unsure (1)..(443): unsure at all n locations
ttgacctatgcgccaanaaaatttcagattgcattgactaatctagatcgcacaatttcaaacttgagtgttgttcacacgtcaattcatcattaacatccttgtccaatgtctcaaaaaaagaaacaatccatattgcaccaactaaatcaacaatgcagataacatcgattgttcacacgacaatgaatcattacgtcctctattgaagtgtaagttatttattaaaagctctcatagaaaaaaatgggttatttaaaaaacataaaaaaatcacatttttaaggtgtatttttcaaaaaatcacaacgaaattgtatttttgtatggtatttctagaaactacataacgaanatgaaactttngtgtgtaaatttgaaaaaatatcctacaaaaacctgttttcattnntgtgtttttcctcaacggaataatattttca

SEQ ID NO: 285519 - DNA, 443 bp, Glycine max
atgaagctaactaaagtaaagatacatgaacacctctacactacatatagtgagtgtttgttaaaaactttcccatgttaacgaacattttatccaataacagcccaatgttgcttctataattacttcatgattatatgagaatgcttggttgaagcgcctcacacgataatccataatcatgtacccttatttaaacttttacacacacttacaagttaacagaatacctcacgatcaaacctatccccagctatcacaattcaaccttcatctagatatttcttaagattgctgtccaatacaatttatcctataaaaaaaatctttactaaataaaatggtaggttctctgagcattgtagtccaatattaaatcttttcctgataacataaaataattttcctttcttctattttgagttactcttttacagtggaca

SEQ ID NO: 285520 - DNA, 432 bp, Glycine max
  unsure (1)..(432): unsure at all n locations
gtaatgtatttataatttttggtgtccatcattattattataaatgatgtaagtaaaaaataataattaatattacataaacaaaatacaatgacaaatattatttaggtgatattattattaatattttaacaaatttgcggcggagttaaactaagctgcccaatggccagatttataatgacttgcttgctattctacaaaaggataaaaccaaaagtcaacgtctagtttggttaattacatgaacctcctgatggctctgactgcaatttaaagaaaacagaaaagaaacttgtctatatgaccaccatttcttattttcacacaacattggtattttttatgtctaaatccacanacttttgtttagtttgtgcagtaaaatcagacataaatgaaatacaccttattttaattatctatgtgaat

SEQ ID NO: 285521 - DNA, 418 bp, Glycine max
  unsure (1)..(418): unsure at all n locations
cttcaaactcagcttggtaacaatatcctttanataagaaaaatgtttataatatcttatcaatactaattaatgaacttaaaggcgaaatacggaagataaaaaattacaatgttcatattttttatgatttatgcatttaatattttttttcttttaatttcttaactaatatctaaaagcgctaattaacaagaaccataaaagtaaaccaatgagtaactaacaatcccgttataaaaaaaaaggttatcatcatgtcttttttggactaatcatatcatcctatgatttcatttgacaaataataaagttaaaaatgaatcgaaattaaaatacataggaccgaataggagttatgagttaatatatttaattaagacacatatctgttaacaanattgatacagcttgaatg

SEQ ID NO: 285522 - DNA, 376 bp, Glycine max
ttctattaagaagctgatactctattctgatatcctatctaatagttcggttgtacttgatagtatagttattaaatcaccttagataggatcatcttatcaccactaatctatatattttaaaaatatgttgattctaggagttagctttccacagctatcaccacttgtttatgtatacatgaaaacattcaagagataatcacactcagattattcccctaaatttctttctttaacattgccaagaaggctgtcaggcagtcaaaaagtgttggaataagtggtcattggtttcaaagcccaaaaagatgtagtatgtgttacatgggaatgggcatagtaaccaatttgattaagaccttctcgtctgatc

SEQ ID NO: 285523 - DNA, 395 bp, Glycine max
  unsure (1)..(395): unsure at all n locations
nttgaaatcaaactnttccactggttatcgattacatgaaactggaagtcgatttccagagagtaaaactctggtaacttaaaaaattntgagaaaaactcttttgaaaaacaaaactgtgctatgtttgttttttgaaaaatcttttcaatacttcccatgtgaggtcttcttgatttcttctctctaatcttgaaatcaaacttctcttgattcttgaatcttcttgattcttctcttgaaatttatcttgatcttgaacttgntgactcaatcttgaaatcattctttngagctttttgtcatcatctttgttatcatcaaaactacttgaatcaacttgattcatcatcatgaagcttgcttctacagtctctgcgtgtcaacgggctcac

SEQ ID NO: 285524 - DNA, 355 bp, Glycine max
  unsure (1)..(355): unsure at all n locations
ttntgtttaatttcctaaacactttttaatgtctgttcattttctcttttccaagttctttcttctaagttagtttggcatctttcacccaccaacccatcccatgtaacgaaaacatattangtaaaggtaaatcaaagtgttttatccaataatgtcantccaaattggtagttggaatacttcccaattaaaaacgacaagttaaatgtaaccaccctataaattaagtggaagtattaagcccatttgggctaatatgggaagattgagtcagattgacagaggcatttcatacaaaagagtattaataatagtaacatacaacggtattaatattatggattagactgtg

SEQ ID NO: 285525 - DNA, 385 bp, Glycine max
  unsure (1)..(385): unsure at all n locations
tcttagtctcaactgatgaagatgtaattcgggctactctatgcactcctctaatgacaatagcatcatttttggcactaaattgctaggagtttgaagccatcttctcaattaaatttctggcttcaataggggtcatgtctccaagggctccaccactggcagcatcaatcatacttctctccatgttactgagtccttcataaaaatattggagaagaagctgctcagaaatctggtggtgagggcaactgacacatagttntttaaatctctcccaatattcatataggctctctccactgagttgcctaatgcctgaaatatcctttctaatggtcgtggtcctagaagcagggaaatttttttctgagaatactctctt

SEQ ID NO: 285526 - DNA, 394 bp, Glycine max
  unsure (1)..(394): unsure at all n locations
ntgacgggtttgggagacgagttttagagggggtttgacattttaatattgagtttgttgtgatgagataaagttgtattgatactaatgtgtttaatcacattattggagtacgatgaggaagatgaataagatactatggatgctgtgtaaagaatgctagccatggtggatataaataaataaaggtccgacaaatttgtggggtagcgttggctgagttgctcacttgctcacgagataatcttatttacgaagctatgcagtacattacattgatgcttgtgtaccttttatgccactagtatgagcataaatcacatgcgtcaagttttccatgtgcatactacgttactacctgcttatccgtccaattgattagatgtactattat

SEQ ID NO: 285527 - DNA, 362 bp, Glycine max
  unsure (1)..(362): unsure at all n locations
ntcacgctctcttcttctccatcttagctttcacgctttttttttttttgcatctaaggcctctgttctccgtctaccttgaagctctttcttctgcatctacctgaagctctctgttctccaactaccttgaagctcatttcgtataagctcgagcatcgtttccgtcgcactcgagcatcgtcataactctctacttcttctccttcgccaccttacctaggtatgtttcgtctaatcctgtataaatatttgattgcattcatgtatcgcacacttagtgaagtaaacatgactagggtatctcatatttaactgagatctccttacccttactgtgttcttgataagaggagcacccc

SEQ ID NO: 285528 - DNA, 410 bp, Glycine max
  unsure (1)..(410): unsure at all n locations
tgtagcaattcttctaggcttggagtcataacatgcaatcctctagaacccttacctcccactctttcgttataccgagactcgggaaccccaataagttttgcctttntaatgtactccgaacaaaacttaatagctttttttgccacgtaccttttaacaatagatgcttcaggatagtgtaaattctttgcatacccttttatgatcttcatgtattgctcaaccgaatacttgcattggaaataaacaaaaccacaacatttaatttccctcaccagatgaacaattaatagaaccatgatgctgaaaaacaaaggaggaaaatacatctccaatggacataagataataacaacctcattttctacctcatctaacttgacaggatcaatgcacttgctacatat

SEQ ID NO: 285529 - DNA, 372 bp, Glycine max
tcaccggatgatgccgatcgaacatttcctaatttacatcatccaatttttattcagggattgaattgaataaacaatggccggtgtcggtctttatatggccccgactgatatctttcagccgacattgcgcaatttcttttacaaacgctggccgatagtgtttttttttacgctagaggaagttttttgttttggtgttgtataaaaaatgtacaacgcaggtcggctatgttttaccgtgcgagctcaaccgatggttcgttccgacagacactggcatgttgttcttctcatttacgaggctcagacaacgttggccatcccggcaaaaacaaaaaaaaacatttttacggaattgatcgaaaaaat

SEQ ID NO: 285530 - DNA, 394 bp, Glycine max
tgtctcaacgtttatgcgagacggagaccaacatgctagctatcatcgccaagtaccaagaagagttaggtctagccacggcccacgagcatagaatcgcggacgagtatgctcaagtatacgcggaaaaagaggctagaggaagggtgatcgactctttacaccaagaggcaaccatgtggatggatcggtttgctcttaccttgaacgggagtcaagaacttccccgcttgttagccaaggccaaagcgatggcagacgcctactccgcccccgaaaagattcatgggcttctcggctatggtcaacatatgatagacttaatggcccacataattagaaatcgttaggaaactcgtatgggctctcagaccctgactagatacgacttcct

SEQ ID NO: 285531 - DNA, 371 bp, Glycine max
ctaatgaattgggctctaattgcccatcagacatggcaagttaagccaaatttaatttactttacctcacggcatcaagcaatttgcttgcaattccttttcttctgttagagggagcaacccaaatggccctaatgccacaagcagcgatggttggtttgctatcacagaagattgcaccttccatcctttcaaaatcactcaaggaagcaacttttttttcaacctccctttggaaaataacattcccaaaccgaaaagtggtagaacgcgtcctcacttcccttttcttcacgctatcaggagagccagacacaactttgaatgccttttcaatgggttctgcaacgaggcactccacaaccctgtga

SEQ ID NO: 285532 - DNA, 407 bp, Glycine max
  unsure (1)..(407): unsure at all n locations
tcagatcaaagcaacacaaaatctaggtatccaaaacccctcaatttaatggattttcaaggtttgagaagtgaaattgcggatggggtaaatttggagcaaactctcacctcacacgagtctataacatcaatttaaacttgtttgaacgggattcacacctaaaatttcaccgaaccaaaatttgactcctcaacacccaattttaccctagaaatggctctttgttcactttggtcatttgtttttctctctagcacagcccanactttctcataagtcctaaatgacatttcaagctaggattaactcactntaacctccaaataccactaaatccagatttggccttccaactctcaaaacctcactctttttccactcataacaccatattctcactttct

SEQ ID NO: 285533 - DNA, 427 bp, Glycine max
tgaccaatcccgacccaacccgggcatagtcggtcattgagaacctgtgatgtacctaagcaggcgagctcctggcagtcaacagataaaaggaaaacaagaccacaaagcaaggaggcttgtggtggctggccagctgtgaattttgtgtaatatgtggattgtggcctctggtaatcgattaccaaaggtgagtaatcgattacaaggcttaaaattgaggacaggaggctaagatggtctctggtaatcgattaccaaagggtgtaatcgattaccaagcttgaaaacgaagtcaggaaacttaaggagcctctggtaatcgattaccagcctgcgtaatcgattacacagaggaatgggtcactggtaatcgattaccaggcatgtgtaatcgattacacagtgtattattgcataattcatg

SEQ ID NO: 285534 - DNA, 413 bp, Glycine max
  unsure (1)..(413): unsure at all n locations
tatccttatggctggcctccggatttcactccccgtgccaccccgaaagatctaagccaagcccctacttttgaggggcaactcccgccttatgacgactatcccggacaagacgatggggaaggagatacccatcttggccccctgctccacctcaaagatccgtccccccatgaactacccccaccgaacatagtctgccatatcccagcctcacccacacccgtaaaagaatctgttcccttcgcggaagataagggaaagattgaggcgcttgaagaaaggttaagagcagtcgagggccttggcaattacccattctcggatntaacagaattatgtctcgtgcccaatatcgtcattcctcccaagttcaaagtatcggactntgataagtacaaagggacgacatg

SEQ ID NO: 285535 - DNA, 259 bp, Glycine max
gaactagttccgctccggagtacgacagtcaccgctttatgagcgctgtacaccagcagcgcttcgaagccatcaagggatggtcgttctccgggagcgacgcgtccagctcaaggacgacgagtatactgattttcatgaggaaatatggcgccggcggtgggcaccactggttactcctatggccaagtttgatccagaaatagtccttgagttttatgccaatgcttggccaacagaggagggcgtgcgtgacatg

SEQ ID NO: 285536 - DNA, 429 bp, Glycine max
  unsure (1)..(429): unsure at all n locations
ttgtgaactntanataatattagctagaatccattattttaacttaatgtacaatcatgtacaagatgattctaataattaatggctcttttacgagttatgacgtacgtaaaacgatgcacttctatgcttaattcggcatagttttaaataaatcaacatatataagattcgtatgacttcatgacttcattaattaatgattntacgaatttcatccattttttttatatcgtgctgccttttttacttcttctattggaattagataagataaatacatgtgtcggagtaaaatacagataaattaacattagttacacaaataacggttgtacatgtcagatatatatgtggggtctatgcaacacatctcatgttcaaagagaattcgtcaaatgaaatgaggttatcaactcaatcgagtag

SEQ ID NO: 285537 - DNA, 389 bp, Glycine max
tgcacttatagcttctaaacaaatatggagaacataagtatgtttctcctacttcaaaatgagggggagtatattgataaggatgtgaacattgttctatccctactgtgagatgctaagaaattcttagttaacacattccttactcctttcgtgaagggtctttctgcaaagccttatatgtagaaatgtcatctatttcttataaatccttgggttagaataatccaagaaaagtgcagaaattccttagatattttcttaggatgaaatcattgtaattcttagcaagacaaaaagaacatgtggactaagtatcttttgtccttctccactttggggctttgtcctttctcactttggccttcgtccttctccacttggacctt

SEQ ID NO: 285538 - DNA, 421 bp, Glycine max
  unsure (1)..(421): unsure at all n locations
tgattcatgattcaattcatgtatctttccattattaaccgaaatatcactaccaccaacagctctcttgatggagcttgggtatttcattaactgaccaataccaaaaccagaatttattgtaacaccagagtctttagcaaagttcacccctttatcattgttcaaacatttattggtccttatgcccgaattggttgattgtcttcctgtgtggccgtaatcagaatacagtttcttgggcatgatagggctgccatcattccacanaatttcactagtttttgtctttcccccatattgatcatcaaattgcagacatggtgaaaaagataaacccttggccacatttttaggttctgatctagctctaccagaagcattaaccacagcagacatatatgtctttgagttaagctga

SEQ ID NO: 285539 - DNA, 411 bp, Glycine max
  unsure (1)..(411): unsure at all n locations
tgtactgtaatagaattggggcggtcatgaccttatgggctcatattgggaaccgcgacaggtagacttgggatattttgaagatatatgctaatatatttagaattttttttaccaaaaaaaagaaagaaagataaagatatacctaaaatttgaacgtgtcttccagagtacaggtcattttaccctacccatttgtttattttaagatcttattaatgactagcttaagaatatattaattaaaaatatgtaatgtattttcattcttaattgctttaaaatagtatattgaacantttttattttaatataaaaaacattttattaaatatgtgttaatcttattttttagttaaatttttaaataaattaattaacattatntattttgtattatcattctcctaa

SEQ ID NO: 285540 - DNA, 398 bp, Glycine max
tgtttgtcgtcttcaacgttctctctacgggcttaaacaagccagccgacaatggtttaccaaactatcaagtttcttagtctcccatgggttccaacaatctaactcggaccactctcttttcttaaagctcactaagtcagccactactatactcttggtgtacgtcgatgatatcatactcacagggaacagtatgctggaaatacaagatatcaccaccctcttggattaaacattcaaaataaaagatcttggtgacttgaaggtctttttgtgactcgagattgcccgtaccaatcatggaatccatttatggcaacgaaaatatgccttagacattttgtctgattcagatatgctaggatgcaagccacactcgacacccatggattatt

SEQ ID NO: 285541 - DNA, 391 bp, Glycine max
  unsure (1)..(391): unsure at all n locations
ntatatcatttcaatgactacacaagaccttgcctcacatatatttcctttggaattcccaattcttagagaaatgggagttgatcaatgtatgattttcctactagagttaaggtccccacctttgtttatctttcatccctcattatcctcaagttgtccacaatcatgcttatctttcacccttttgaggatattggatgatgaaagacaaacaaaggtgggaacaataattttggaaagaaaatcaactatttctagaatagggaattccaaagggaatgacgggagatgtcttgtgttgtcattggaatgataaacaatttattgactctctgatttataatgttatatatccagttataacacgacgattacaataactttatgt

SEQ ID NO: 285542 - DNA, 444 bp, Glycine max
actatcaatactcagcttaacattcaatttcgaggctctcgatatattactgtacttaatcaagcatccaagaaaaaatttattgtcgtttgaatttgctcagagattcaacattcaatttcgagcgtctcgatatattacgggactcaatcagacatccgagtaaaaagttattgtcgtttgaattggctccgagcttcaacattcaatttcgagcgtctcgatatgttacgagactcaatcagacatccgagtaaaaagctattgtcgtttgaatttgctcagagattcaacattgaatttcgagggtctcgatatcttacgggactcaatcagacatccgagtgaatagttattgtcgtttgaattggctcagagcttcaacattcaatttcgagggtctcgatatattacgggactcaatcagacatccgagtaaaaatt

SEQ ID NO: 285543 - DNA, 320 bp, Glycine max
  unsure (1)..(320): unsure at all n locations
gagacagccgaggggagaacagtgcgaagcccccccccacagggtgacttaactgaacaancaaannccggcaagaggacaagaccgatgaaaagcaaggccaggagaaaaaaccggagaaacccgaaagaccggaaaaacggaaaaagaaaaacgggagagcaaggaaaagcgacgacaaagggacacgaaaaaaaacacacacaaccacaagagagggaaacgagcaaggggcgaaaccgggacacgggccaacgcgaaagagggggcacggaaccggaccaaagacgaacaaaagcggggaaaggggcagacgcaga

SEQ ID NO: 285544 - DNA, 402 bp, Glycine max
gagagcttccgtgttcaatttcgagtgcctgtatattgatgcgcctgaatcggacatccgagtgaaaagttatgaccatttgaatttctcgagagcttcctatgtttaattttgagcgtctcgatatattatacgcctgaatcgaacctcagtgtaaaaagttatgaccatttgaatttctttagagcatccgttgttcattttcgagcgtctctatatgtgatgcaccttaatcggacctccgtgtgaaaagttatgaccatttgaatttctcgagagcttccgttgttcaatttcgagcgtctcgacatattatgcgcccgaatcggacatccatgggaaaagctatgactatttgaatttctcgagagcttccgtagttcaatttcgagcgtctggaca

SEQ ID NO: 285545 - DNA, 381 bp, Glycine max
  unsure (1)..(381): unsure at all n locations
tacataatataaatgtgtgcaattttattacaggttcagatggtgaagtatggacatattagaatattttctttatctgtcactttattgaaatgaccatttttttaaaaaaaatttgaaacaaatacaacatgttcttgttattaaattttgaaaattactttccgacaaatattgggcttatgaaaagtactttctagaatccaatatcaaaattgaattctaaatactattntccaaaacctataattatggcgtctgaacaaaatatattttacaatgatatttaaaattgtgtatttcaaacaaagaataaatctcataacgtactttcttgaatgacgatatatgagtatttntttcaataaaagtggaatgaat

SEQ ID NO: 285546 - DNA, 385 bp, Glycine max
ttatacataggatacacctacaaaaggaaacacattaatagttattatttatagcaggtgccttggtcttaaagatgcaagttttcaaaactcctaaagacaacaaatctaacatgggatcagtgaaaaaccgtttcagagatttgatgaattatttcttcatgctcttgaccggcacgatgaatgtcccgcataacacgcttgacaagatcaaaatgaactccaccagtgacagatacacgaagatcaagcaaaggtcgtaattttgtcacttaaggcatagatgccttctatgattacaatacgagagccagggacttcaacagtcctgtaaggataacagtaccaaagatatcaacaaaaaactaacatatcccagtgccaa

SEQ ID NO: 285547 - DNA, 415 bp, Glycine max
tatgataaaatctgggacttagccttggtagaagtctccacagaggccattgcctccctcggctagtattatgatcagccgttgaggtgcttcacctttggggacttccagctatcaccaatggtagaagaatttgaagagatcctatgatgccctcatggggaaggaaaccatacctcttctcagggttctatccctcattagctagaatttccaagatagtccaaatctcggcgtaggaattacaccacaggaagcaagtcgaaaatggggtggttggaataccgagaaaatatttggaggcaaaagcaagagtcttggcaaagtaaggtgagtgggccccgttcatagatattctcgcactgttaatcttcggaggagtcctctttccgaatgtggatgggttggtggacct

SEQ ID NO: 285548 - DNA, 407 bp, Glycine max
  unsure (1)..(407): unsure at all n locations
aatgtctctcaatcaagttcctgtgaaattattgaaagcataatggttatgcatttttgttnttattttgcttcatctctgtatatcatcacaacttcagaggcttggttctaggattcaacttccaaaggcttacttactctaatatatctcttattcaagttgttctgtgagttttcctgttttagtctgaagctctgagctttgtttgatagatatgccaaaggcaaattgcagtttctaatttgttgaaactacaaagattgagtttagaactgatagaagagttaccatgtgtatcaaactagcattagaaatcggtatgggtgtttgctntttgcgttcttaactcttataccatactagaaactacaaagaagtgattggatcttcactaccattgtggt

SEQ ID NO: 285549 - DNA, 82 bp, Glycine max
cccagcgattatatctactactgtgtgatgttgcatgaattttgcgacttaaactactagataaggtctcttgatataaatc

SEQ ID NO: 285550 - DNA, 192 bp, Glycine max
cctagaggggatggacctttttgggtcctttagaggatcaataacaatgcctataggttgtaccttacaaaagagtatggagtccacaccacttttaatattcctgatttaattcctttgtaggtggagctgatattgaggaggaagaaccaacctatttgaggctcaattctattcaatgtggagggatga

SEQ ID NO: 285551 - DNA, 386 bp, Glycine max
tataattattattgtttattgttttgtgtttcttggcagatggagtcaattcaacaaaattataatgatgattccatggaccattcatctagtagtcctccaggttcgcctgatataagtgacgtagtcggagccctgccgttggatcctcgagttggtgagaaataccaggcggaggtccctggcatcataaaagaatcagaacggcttcaacttcttatgaatcctgctgattcagaagttatgcttgataactcgctttctttagcaattggcttgcccatctcactcacatggataccacatgaagtggacgaatgcggcatgaaaggaatcttgccgactttgatggtacagtcaatacatatgaactagtgaaagaaact

SEQ ID NO: 285552 - DNA, 374 bp, Glycine max
cttgtttaatgctattcccagctctttagtttatttaactttgttctccactattctctttattttgtgactggctcaatcacttagggcaattgtagaagagttttttatattttaaaggtatgatttttgttacactacctttttcatacgtgtgacgaattatttgatagcacttgagtcgcaaatcttgattcactggtcaacggggtaaaggtttcatttgttgcttgtaatgtattataattattaataataatgtcttggctgttcgctttgttttctcaaattcacattagtattcgcaacttaaacaaaactaatgatcctgtcccacaatggaaatgtaaaacttgttttttaacttatctggt

SEQ ID NO: 285553 - DNA, 391 bp, Glycine max
  unsure (1)..(391): unsure at all n locations
ttganagacaacagaggacagtgggccccacactacgaagggcctttcgttgtaaaaagggctttctccggaatggccctggtgctcaccaacatggatgacgaggagctaccttcacccatgaactccgatgttgtcaagcgatactacgcttaagatctggggcaattgaagaagtcgctgcatgtttgttattttaattcttatgtgttcttcttggtttcccccagggattcctatcctctgtaattttctcatcgcaatcttttaaaagacaagaacgtacgattgaggttctggtcctcgtgttgtgctttacaatatgtgtagtatttgataacctgagccttttcgctcagtccatgggatgccccaagngcttaaatgaaac

SEQ ID NO: 285554 - DNA, 431 bp, Glycine max
  unsure (1)..(431): unsure at all n locations
nttgagcaattcanatggtcataacttttcactcgtaggtccgattcatgcgcataatatatcgagacgctcgaaattgaacaatggaagctcttgagcaattcaaatggtcataactttttactcagatgtcctattcaggcaaataatatatcgagacgctcaaaattgaacaacagaagctcttgagaaattcaaatggtcataacttttaactcggaggtctgattgaggcgcattatatatcaagacgctcgaaattgaacaatggaagctcttgagcaattcaaatggtcataacttttcactcggaggtcctattaaggcgcataatatatcgagatgctcgaaattgagcaatggaagctcttgagcaataacaatggtcataacttntatactcgaggttcgatngaggcgcataatgtatc

SEQ ID NO: 285555 - DNA, 379 bp, Glycine max
aaagcggtttctaatgactcctctacggcttccacataaggcatagaggatgggcagctcaccaagatgtcttcctcgcctgatacgatgaccagatgcccttccactacgaatttcaacttttggtcgagtgttgagggaacaactcctactgagtggatccacgggcgccccaacagacagctgtaggggggggtaatatccattatttggaaagtaacttgacaggtgtgaaggcctatctgtactgggagatcgatctctcccctaacctcttggcgggtgtcgtcgaaggcacgaaccaccattgaactccgcttaagtgggaagcattgaatggtaatttctccacagtgctctttgcatcacgtttaactga

SEQ ID NO: 285556 - DNA, 428 bp, Glycine max
  unsure (1)..(428): unsure at all n locations
tcgtgaattgcaattgngaagtaaccatttgaatggaactattccttctcagattggttacaagtataacttggagatagctttaaatttgagctataaccatcttcatggaccattgccccctcaattagcaataggggtggaaataggccaggtcggcctacaagagcctacgacctaacctacataaagtctggcctaaactggtctgtttaattaaaatgttaagccgagacttttttaaaagcctattaaattaaatagactatgcttaagcttattaaaaagtctcataagcctgataggtcggcctatatatatgtatatatacttatattaatttttgcgtaccaatatatacttatattattnttgggtacaattaaatttttttaaaaactattgatacacattactgttcatacttc

SEQ ID NO: 285557 - DNA, 433 bp, Glycine max
  unsure (1)..(433): unsure at all n locations
tgngtttgggtttgagttttctgaacctcgagggtttgggtttgggtttggattaatattaaacaacttgtcttaatgccaattgaatttgagatagaattcaacacctggcttttctgacttgtcatttctgcataatatataagtttgtgacttttgctgaaatttatcanatagtcttgacaatttttccctgagagtaacactgctacgcatatcctaatagaaagaaaccaacttatgggaggataaggaaggaaatganactcagcttcgacttagacctagacatgtgtttaaagattgaacaaaagcaaggcagatttctgacagggtttgtcagattacgattcattcacagagcgattcttacatagtgaanacaacacgaaatatagtatggataagacnaatatatttaagcatatatata

SEQ ID NO: 285558 - DNA, 418 bp, Glycine max
ttaagatgtgctcaattgtgtaaccaccatatatatatatatatatatgggtagtagttcatactcacgtaaccacaagctgcaataatgtgtgaacatggatagtgaagcgcaaaatacttttcgcattgacaataatggccattcaagttaacagcccacttttgtccgccacgttgcgttataagattgaaagtctcctctacttcaaacctttgcgattggatatcatagacgtgaacgatgttgcgaacaagcttgtcttgaattttcctaaggtctttaacaaccttagaacaatatacttgtccttcatttaaatggctttgggcttggcgaccacgatgaacaaagtactttcaacacctactatatgttgatttcaccagcgctattatgggtatgttgtgacaatcct

SEQ ID NO: 285559 - DNA, 434 bp, Glycine max
  unsure (1)..(434): unsure at all n locations
tgctggcctcaaacttgctaataatatgctgccacacttaccgacatttagagcttacccctaaaggaataccaaggtaagaaaaaggaaattccagttggctgcaattgagagaagaagctgcctccctacaccagcccacagatttacccaaacacccaaattggctcttattataggttatctttaaaccagaaaccaattcaaagcttttcaggatacactttaaaactttaacattatcattagtggcagtcccaaagaacaaggtgtcatcagcatattgaagtatattaacttcctcttttntctttcccacttggcagctattgaagagattcttttctactgctgatctcatcaacccagtaatgccttccaccactatattaaatagcaaaggtgcaaggtggtcaccttgccttaagcctctc

SEQ ID NO: 285560 - DNA, 322 bp, Glycine max
tcaagctctgccgatttaggtccgccagttttaggatcgtttgtgtctgataacaggcacatttgactatcctgctttgatatataagaagcctacggaaaatggagagaataagaatggggtagaaacccgtgttgtgactgtcattcctacttgggcaaattatcccactggctcaacaatatcaatactcagccaaaatcacgccttcttattacacaccaccctaccagccaagaacacccaatcatgcataaaagccacccctaaatcaaccacagaacctgcctgctgcacaatcgaggccagacaccacccctaa

SEQ ID NO: 285561 - DNA, 372 bp, Glycine max
tcagcacaattactatttctcaatctcagttttataataccaattactaagtcctttttaactagacaattgaggtggtgcatgtttacatgtgcatccctacgaagcaatagtcaaaaatcatcaatcttattttccaagcaactaagctcatgatatgatgcatgttcaatattaagcatgtagatattacctatttttctacctatgtgaacaacctcactagtttttgcttcacaaatgagacaacaattcttgttgaatgcaattttgaagcctttgtcacatagctgacttatgctcaagagatagtgcttaagttcatcaacatatagaacaattttttttattcgagaattgtgcttaatttca

SEQ ID NO: 285562 - DNA, 405 bp, Glycine max
  unsure (1)..(405): unsure at all n locations
tagctacacacagcccctctcataactaagctcacttccttgagaagcttccttaagaagattcctaaagaagatagagcttagctacacacacatctctaatagctaagctcacctccttgagatgagaagctagagcttagctacacaccccctataatagctaagctcacccacataacanaatacatgaaaatacaaaaaattccctactacaaagactactcaaaataccttgaaatacaaggcaaaaaccctataatactaaaatggccaaaattcaaggcccaaacaaagggaaaacctattctaatatttacaaagataagcgggctcatacttagcccatgggctcgaaatctaccctaaggatcatgagaaccctagggcctttccttagatctc

SEQ ID NO: 285563 - DNA, 202 bp, Glycine max
aaggcttgatatgtttctatacatgtaaatctttcagcctccaagcataacatttttgaaaatgagaaatacttgtgttacatagctctacatcaaatgttaaatgaatggatctcaagtgagcctattctcattcaattaggataatctatatgcatgcaccctcctgcatgtgcttataaaagatcactgctagatatca

SEQ ID NO: 285564 - DNA, 440 bp, Glycine max
  unsure (1)..(440): unsure at all n locations
actaagcttgtgacacgccggagattacgtcatcttccgcgcacacaagatctgtcatactgacatttgagtcacgctgacgggcggaaatacccgagtggttatccgtataaacattcttttgctgtctgtaagacaaaaagcctgatagcacgcagagactaacgtcgtcttctgcatccttcgtcaatcgcggccgacaagcccgttggcacgcggagatttacgtcatcttccgcgctcacaagatctgtcatactgacatttgagtcacgctgacggacggaaatacccgagtggttatccgtataaacattctttttgctatctgtaagatgaaaagcctgatagcatgcagagactgacatcgtcttctgcaccctttgttcccccggngacaacaagtcagttgcatgcagagatattntatggtcacccgt

SEQ ID NO: 285565 - DNA, 441 bp, Glycine max
  unsure (1)..(441): unsure at all n locations
gtactctagcttaaagattggctaagattttgttaaaacataagcacttanacaatgaaggaaagctggagttgctgcacatgatgtccaacgttatgtcaaagaataagatcgggctgcacaatgcacaaagcaagataaagtgtcaaatgaagaattgaagctgcaggattcacgatgtcggatataatgtccaggacatcctgcctgaaaatactggaattgctaaaagcattgaagctgcaggatccacgatgtcggatacaatgtccaggacatcctgcccgaaaatactggagttgctaaaagcatttgaagttgcagatccacgatgtcggatacgatgtccaggacatcttgcccgaaaatactggacatataaatctgttatatctttaacagattattgtgcagttagcaagagattagatgatctatctt

SEQ ID NO: 285566 - DNA, 425 bp, Glycine max
  unsure (1)..(425): unsure at all n locations
agtagaaacatgggaccaactcattntatttcanaaagaaagtcgtatctagtcaaggtctgagagaccatacaagtttcctaacgatntctaattatgtgggccattaagtctatcatatgctgacaatagccgagaagcccatgaatctcttcgggggcggagtaggtgtccaccatcgccttggccttggctaacaagcggngaagttcttgactcccgttcaaggtaagagcaaaccgatccatccacatggttgcctcttggtgtaaagagtcgatcacccttcctctagcctctntttctgcgtatacttgagcatactcgtccgcgatcctatgctcgtgggccgtggctagacctaactcttcttggtacttggcgatgatagctagcatgttggtctccgtctcgcataaatgctg

SEQ ID NO: 285567 - DNA, 429 bp, Glycine max
agtcacttcaaacattgattggatgcataagtactaaggctctattaagctattgttacaacctacgaccgctgaccaggttcttttattattattattattattattattattattattattattattattattattattattattaattgttttgcctctgttgaatagaatgaacaattaccctttaggaccttgattcaatgtagcatttggaaattggcctccttccttatgtgtatatcttggtctctctacttttgtttggaatttctattaattgttttgtgaacttagtataatttttgttgagcactgtactgcatttccactgtaaaaaatataatcattatatatttctaaatcaggttatacatacatctgataaacaattggttagaattgatatttttattgatgtcattgtga

SEQ ID NO: 285568 - DNA, 421 bp, Glycine max
  unsure (1)..(421): unsure at all n locations
tctgttctgaattcgagcatctcatatactactggaaacaatcggacatccgagtaaaaaggtttgttgtttgaattttctaagaggttatgatttcaattntgagcgtctcgatatattacgagactcaatcaggcatccgagtaaaaagttattgtcgttagatttttcttagagcttctatttccgattatgagcgtctcgatatattacgagattcattcggacatccgagtaaaaagttattgtcgtttgattttgctcanagcttctgttatgaatttcgagtgtctcgatatactacgggacacaatcggacatccgagtaaaaaggtattgacatttgaatttgctcatagcattcgttgtcaattacgagcgtctagatatattaaaggattcattcggacatccgagtaaa

SEQ ID NO: 285569 - DNA, 386 bp, Glycine max
  unsure (1)..(386): unsure at all n locations
ntaatactattcaatgttacaccatcatatagactatataacgattggtggcggttgtgtcggcaacgataaccgtgataatagcggtgacaataataataacgatggtggtggcgatgatggtattgatggtggtgataatggtggcaatggcgatagcggcgacaatgaaggcaacaacaatgacggtggtggtggcggcgacgatggtggcgacaatggtaggagtgacaacgccagtgatggtggtgtgatggctgtcatggtggagaagcgatgatggtggggaagatggtgatgatggtggtggcgatgatgacagtgatagtgatggggttggtgagggcaactatcctattctgttgctctctaaccaattcaccccc

SEQ ID NO: 285570 - DNA, 327 bp, Glycine max
acacgacaatatagggaaaggaatcctacagatgcagcgtatctgaccttctctgaagagaagagtcccctgcttgtttcacatcttccaactgatcttcagacagcacttcattgaggtcagcagaagaatcgagagcatttctcttactacctgccatagatgccccttctaatgatgcgtccattacagcgctattgccagaaccagaacagtcatcagaggagtcaagcagcttgatctgcccaaaaccaataataattactacaaagacataagcagctacagcacaaaaattggtgggaactgcacacctctataacatta

SEQ ID NO: 285571 - DNA, 422 bp, Glycine max
tcagaccaaagcaacacaaaatctatgtatccaattcccctcaatttaatggatgttcaaggtttgagaagtgaaattgataatggggtaaatttgaagcaaactctcacctcacacaagtctataacatcaatttaaacttgttcaaactggatttacacctaaaattccaccgaaccaaaatttgacccctcaacacctaattttaccctagaatggctctttgttcactgtaggcatttgtttctctctctagcacagcccaaactttctcataagtcttaaatgacatttcaagctaggattaactcactttaacctccaaataccactaaattcacatttggccttccaactttcaaaaactcactccttttccactcataccaccatatcacactgtctaaccctaggtaactcta

SEQ ID NO: 285572 - DNA, 380 bp, Glycine max
gtttcatgtaaaacttcaattaaatattaataattgatacacttgagccatagttttaaaactcagactagtaattgacttgattaaggtaccagattagtgggttactggttaaactagtgggatcacagattgaaccatatgaattaatataatattaaatacataatttttaaattaaaaacatactataatttattttttatcatacatataccagaatcttgtgttgctatagaggtaactatatttttaagcaccctaaggtccaataactctcaaacacctccaaaatttctctactattagacatatacgagcaacaagtgcactcatagccaagtgcatgggacaagcaacatgtgatgtcaaagctaaat

SEQ ID NO: 285573 - DNA, 391 bp, Glycine max
gctgaagctcaaggaatagcttgaagatagtttttgtagaaactttggcttttacatgcccaacttccttaagtgacatttgtattggttgttatcttaggtgctgcatcttagtacacttgatatttgtgttgcatcatgaatcatcatggttagtgggaaaaaaagtttcttcaaaggaaaaaactctatgttttaatcgattacagaagtggcataatcgattacaaccagatgtctgaatcttaaagaattgagtctcgtatcagtttaatcgattacagtagtctcataatcttgattacattgttgtttgagacaatgaatgagttatccaagaatcctttgttttaatcgattatcaagtggattaatcgattacttctctatg

SEQ ID NO: 285574 - DNA, 373 bp, Glycine max
  unsure (1)..(373): unsure at all n locations
cgagttcaataagataattctaatggagtctctcctcctgggtnttgagaaaagcttatctacgtggaaatgcagttaatcccatataagttacgatgcacaatgagaaaaataaaatcgcacatatgctggttactcttctatatgaaaaaaaaagataaggattaattgcaccgctagatttgctttaagctccatttctatatcgatacattttatacaatcttctaaaccactgttacttctacaaccactcttgtatctgtatattatacaacctttactccctcaactgcttcccactttcaggtactcactctattccaaataatgcatgcattaaatgttcatagataaaaataagtagctaggc

SEQ ID NO: 285575 - DNA, 436 bp, Glycine max
  unsure (1)..(436): unsure at all n locations
nggtgcacaatgtcggcatgaagtcactcgtgaagtaggttctataagagattgtgtttacagttccttgaacctgattgttaattttacattgaagaatatgtggggatttaaaaataataacactttgttaaagcttattgagaaggtgaattcaatatcaaaatattagcacatttgatcttctgcaacacttatagactagagattagagattaattcacatttcgcaatcatggttagcaactcttggacagcttgtggattgatagaacaaaagtaatgtaaaggcaaaaagaacttgactagaaacatatgtgatgaactaaggtctacgctaatactggcaaaaatgtcactgttgtttttttttaaataatgcttttataaccattctaaaaagctgttcaagataatgtatttttgtactagtgat

SEQ ID NO: 285576 - DNA, 420 bp, Glycine max
  unsure (1)..(420): unsure at all n locations
gtatgataattttcatgtaacaagctaaattatattggataactctgataaaatagtttcaactcaagacaaattgtagacatagctaaaaagtgaaaatgatcatgtangctgagaatgatggctctgaacttaatagtaggatttattaacttatagatggaggaaaagactaggtagatgctaagaactatttccctttggatgatctcctttctaaacttactcttttttcctctattatgaatgttgnttttcctctattcatttagttcattctttgctttcataattaatagttttttcctttgcggaattttctaatatatatgaccgagaatgaattttttgcattgacctattaaaaaatcatactaccattntcagctaccactattacgcctttgattataatgtcat

SEQ ID NO: 285577 - DNA, 408 bp, Glycine max
  unsure (1)..(408): unsure at all n locations
ttctggtgggacatcttcacttgctttccaatctgacattcaccacagattctgccttcttctattttcaaattgagaatgcctctaacagcacctttgtcaatgattatcttcatgcctcttaagtgcagatgtccaaatctttgatgccatattctgacttcatcttctttggaggatagacatgtggaggagtaactggtttcttgaggtgtccataggtaacagttgtcctttgttctgctgcccttcattagaacttcactcttctcatttgtcaccaagcattctgactttgtgaagtttacattgaatccttcatcacacaactgactgatgctgatcaagtttgcagtcagtcccttcaccagcagtactntgtccagactaagaagtccatcatgggct

SEQ ID NO: 285578 - DNA, 365 bp, Glycine max
agattgagcgagttgattttagccttagtttcactctagctatttgtcaattcaattaagaatgagaaatcccaaagagaaaacatctgattgatctttcgcttttattttactaaaaggtattttctgattattatatttatgattgtaccccttattttgatttccaacgtggttacggcacgaccgaacggtcggaattcattttaaccaaatttaacggatgatacaagtcaaacgatcggtggaaatttattttatttttagattaagcgaaaaatgacttaaataaatggcttaagcacgtcaaaagggggtataaaaagtaaatggaaacgagaataaaaatacatgaaacacaatgt

SEQ ID NO: 285579 - DNA, 407 bp, Glycine max
atagacaaccgtttgtcactgcgattttaacagtaactacaaagttttaagagtctccacgaccatgggacatttgatttctacaaattaaacagaccagttgtctaagtccatgttcaatcatcttaattggtcggattgatatgctctcttcaagcaacaagagctcaaaattttgaactaagcaagtgaaattgtaatcataagtgggtcttacaggtaccaaggttggtgtttttaaaactgtagcatgacatataatagggtccagtacactacaacacaacatctcgataggataaagagtggccatctgaaaaatcgagctcaatatattatagtaaatgatgaaaacaccagttttttaccctactacaattggtaatatatcttatgttcagcttaca

SEQ ID NO: 285580 - DNA, 407 bp, Glycine max
tcaagaaaaagatggcctcagcaaattccttatttccagaagggaattctatcaatagacctccaatctttaatggagagggttaccactactggaaaacccgaatgcaaatttttatcgaggcaatagatctaaatatctgggaagccataaaaatagggccttatatacccaccacagtagaaagagtttcaatagatggtagttcatcaagtgaaagcataaccatagaaaaacctagagataaatggtctgaagaggatagaaaacgagtacaatacaacttaaaagccaaaaacataataacatatgccctaggaatggatgaatatttcagggtttcaaattgtaagagtgctaaggaaatgtgggacactcttcgattaacacatgaaggaactacagat

SEQ ID NO: 285581 - DNA, 412 bp, Glycine max
tccatcacttttcacacagaggtcagattcgggctcataatatgtcgagatgctcggaattgaaccacggaagctctcgagtaattcaaatggtcataacttttcacacagatgtccgattcgggcgcataatatgtcgagtagctcgaaattgaacaacggaagctgtcgagaaattcaaatggtcataatttttcacacggaggtcagattcgggcacataatatgttgagatgctcggaattgaaccacgaaagctctcgagaaattcaaatggtcataacttttcacacggttgtccgattcacgcgtatgacatatacagacgctcgaaattgaacatcgaaagctcttgagaaaatcagatggtcataacttttcacacggatgttcgagtaaggtgcatcacata

SEQ ID NO: 285582 - DNA, 416 bp, Glycine max
  unsure (1)..(416): unsure at all n locations
gtgcggatttagttntcgccagtgtaaggattgttgtgggtctgaaaaaaggaaaatttgatcatcctgctttgacaaataaaaagcttggggcaaatagagagaatgagaaggagggaggaacccattttgtgattgttattcctacatggccaaatttcccaccagctcaaaaatgtccatactcaaccaatatcggcccttctcattacccaccatcttatccaccaagaacacccaatcaaccacaaaggccacccctaaatcagccacaaggcccgcctgccacacttcaataccaaacaccacccttaacacaaaccagaacaccaaccagggaaggaattttccaacatagaagcctatagaattcaccccaatcttggtgtcaagctaacttgctcccatatgtactc

SEQ ID NO: 285583 - DNA, 415 bp, Glycine max
  unsure (1)..(415): unsure at all n locations
tgtaattcagtaatacaccattaatgacagattgattcttatttcttctatgtacgttatatgcttgtggtaggaacctatgtacgttatatacatcatattggatgtttgcgattccttgtttgtagcaatgctaatgccttatagtttgatgacctgtatcaagctatatttcttaaggaatactattttgatcataccttttggttttggtacaatccatttttttgtgttgcatgttgaagtcaagtaactccattacacttgcaagcccgagtataattcattctttgtgttataagcttatgtcanactgtctgacgtctccatatgtgtgtacactatggtcatgttttggtttctagaattcatttggaatatttgttgttgattctgaataagtgatcattcttga

SEQ ID NO: 285584 - DNA, 409 bp, Glycine max
tgtaggattatggggtacccatcacatgtggtactaggtggcggtcgggcgatggtgcacaacaagttttccacatccacaaatcgcgcataaacccaccatcccctgttgcccacctccaattgagctcacgtactcccacgtagcccatatcctcatttctctcaacaccaggtccccatcaatcctcccaagcttccccaacatccaggtaattcaacatccaatcatcatggactaacaaaatcaagcaaaacagggcaaaggcagaaaactctgcccaaaacacaactcaaaatcacagcttttcacatacaaatacccgcgtaacatgtccttcgttccaattcgttaaccgttggatcgactcgaatattttactgggagtctctagtacataagcctacat

SEQ ID NO: 285585 - DNA, 399 bp, Glycine max
tctgatgttctgccagcaactctgataggtactgtctgcaaaaaaaaaaaaaaaaaacccacccttttcttttatgaatcaaaagcacacaaattcatctaaaacaaatcaaacagacatggccaaatccaaagggtgtttcaccaagagtccaagattgtgtcctttttctttttttcagttttgatctaaaaaaaaaacatcacaagaaagagaaaccaactcacctgtccacttctggattgctcctaatctgaggagaagcagctctagcaggagagaagttgggattatacaagcctgacatggctcactttttttctttaagttcttttttcctttaggattggaagaaggagaagaagaagaaaaacaaaccaaaaaaaaaaaagttgaaaa

SEQ ID NO: 285586 - DNA, 385 bp, Glycine max
  unsure (1)..(385): unsure at all n locations
tagtaagcgtcgttctcgtgttacttaaggatgttcttagtgtgcaacctaagtgggagattgagaatcttgtacgtgtagtactcatagaaacgctgaatcgcaatttctgggagatgtctggcatatagttttttaagagtatagagtagttacgaaagttaccagaagtagttaggatgcctagtgtaaaaccttaagggaatgtaaagtcgttagtaaggcgttgctctgttgaacatagaggggtttaagagtgagtgttcttgtcaaacgtagatggnctacaggattgctgatgatacttgtatgattaatgaggtgggatataacgagttactgccaataggggaccaaatatttttgtacaactttttttcccaaa

SEQ ID NO: 285587 - DNA, 352 bp, Glycine max
agcttcttttggaccttgaacaggcaactaactcctctttcaaaaccatgctatgtgctcgcgactggtccccttcttactttcgcaactagagttcactattgctaccccataaagctccgcgaaatttgttccggccatactctatcttgcgagccctcttggtctcttgttcaagggctcttgcaataattgcaattctcttcccgtaacccggcacacatccttccgaacgtgtgtagcggccaacttgaacttctccttggcaagttttgcctttcctaactcgcttttgagagcttggacttcttcgtcctctttcggtgcttcaaaaatctttttgctgacgact

SEQ ID NO: 285588 - DNA, 455 bp, Glycine max
  unsure (1)..(455): unsure at all n locations
gcgggacnttataggatctaatgcgtagtcannacactttgnaaacnnatctnntcaacganannnctggannanagtngtggtgtgggtttttatgtagatattntaagaagatatgtgtaggtatataagatatagaaaaattattataatgggttttgaaagnaaaagagaatgggaaatattggtaggaaaaattgtgattaattgtatttanaattggttataaaaaggtaatgatataaaaattatttgttaattaaaaaagataatataatgaatagtttaaattatttatttaatagatatgtaatagtgttgtaataagtaattattgtatagtataaaaaaatattgatataaaagaatttaatatatttgaagaagaaataaataatagtattataatagaaataataaaatatataatattatatgtaaattaattgaaaaag

SEQ ID NO: 285589 - DNA, 384 bp, Glycine max
  unsure (1)..(384): unsure at all n locations
agctttatgacactagtccttggaaaactttattttaacaccaaggcaattaccacggctgttcttaaatccatatttacagaacaaatttggggcatggggctcaatacacatcaaaaacaggttctaaatatgtattagactaacaaggcatccaattagacaaagagagacatagtgctctaagaatcaaattcgcatgcaaattgaaaattataggattaggaaaatcctcaccttttcccacctatctttactcttgaaaacccaaaatgattcaagctctagcttctcttttccttagagagaaatacatgaagaaaggatggatgaagattattcctgcacccaaatggagattctaggagctntaaaatccactct

SEQ ID NO: 285590 - DNA, 430 bp, Glycine max
agaatactcacgcttaccgaaagtaaatattaagatgtagcatttttcattctaagataattagtttatttaacatttactcttaatacgacttatacagtgactaggttccaattttcatttttaaaatgaaaatattaataacttataaaaataacaagtgcttggtggaccaatagtgtttaggaagtataagttacttgtcatgtctaggtaattgtcctattttaagttttagttaagttttaattagttaactgctagaaagtttttggtgaaattttacactattaaaaagttttctctaatgttagcattaggcacaaaacttatttgtacgtgtaagcacttaaaattgagaaacgtaaagaaaaataatcgagaggatcttttcttctgaaatttaaaattgagacacagataaggatta

SEQ ID NO: 285591 - DNA, 169 bp, Glycine max
tatgcatgctcgagcacactggaggagaaccggcttccaacctcgaattctttctatagcgcgtcgaattacaactggacgcccgccgcattacaactgaaaaggctgagaataccgtgtttgctcacaacttaatcgtcttgtctcagagtctccttttatcacatga

SEQ ID NO: 285592 - DNA, 345 bp, Glycine max
agcttccattttcaatttggagcgtctcgatatattacgggtgtcaactggacatccgtgtataaagttattgtcgtttcaatttgctcagagcttcggttctaaattttgagcgtctctaaatattacgggactcaataagacatctgagtaaaaagttattgtatgttgaatttgctacgagcttccgttttcaacttggagcgtctcgatatataacgggactcaatcggacatccgcgtataaagttattgtcgattgaatttgctaccagcttcagtattcaatttggagagtctcgatatatttcgggactcaaccagacatccgagtaaaaagttatt

SEQ ID NO: 285593 - DNA, 395 bp, Glycine max
tgtagcaatatcaaacgaaaataactttatacacggatgtccgaatgagtctcgtaatatatcgatacgctccaaattgaaaacataagcccgtagacaattcaaaggacaataactttttactcggatgtccgatagagtctcgtaatataatgggacctccaaattgaaaatggaagctcctatcaaattcaaacgacaataactttttgctcggatgtacgattgagtcccgtactatattgagatgctcgaaattgacgacacaagctctgaacaattttgaacgacaataaatatattctcggatgttctattgagtcccgtaatatatcgtgctacttccaattgtaaatggaagctcgtaggaaattcatacgacaataactttatac

SEQ ID NO: 285594 - DNA, 377 bp, Glycine max
agcttcttttgtaccttgaataggcaactaactcctctttcaaaaccctgctatgtgctcgcgactggcccctttcttcctttcgcaacttgagttcactattgctaccccatagagctccgcgaaatttgttccggccatactcttccttgcgagccctcttggtctcttgatcaagggctcttgcggtaattgcattctctttccgtaacccggcacactccttccgaacgtgtgtagcggccaacttgaacttctccttggcaagtgttgcctttcctaactcgcttttgagagcttggacttcttcgtgctcttccggtgcttcaacactctctttgctgacgactgttaacttggcgagccaatctaaacct

SEQ ID NO: 285595 - DNA, 420 bp, Glycine max
tagcctgctgcgctaagtgcccagtcaaaatttcagttttattttgatgtttttgtgaaaataacctgtgctaatctcttgtgttttgtcttatattttgcagatggcatctaagaaaaggagggctccttctacaccttcccaagtcagatttgatctgtctcagttcacatctcaagaagcttgtgagaggtatacaaatattgtggtgcctaggaaactactaccagagaggaatgtgatagtttattacactgagttcgacaagttcaaggaggaacttgagagaagagactacgatgaggagttgactgattttaatgacagcagcatagacattggcattgtgaaggaattttacaccaacctctacgacctcgaggataaatcacctaagcaggtgagggtgagaggtcactt

SEQ ID NO: 285596 - DNA, 344 bp, Glycine max
tatttttgagccaaaatcctgactcaccataaaccttgacccaatgtgagaatgcctatccttatcctcggaagcaaaataagaagagaaggaaaatttcctatcaacggataaaggagaaggaaaattttcaatcaaagaacaagagaaagaaaatttccaatcaaaggaaaaaaaggaagcatagaaatatccaatctaatagtgggagaacgaaataaatgattgaaaggaaattcccaaccaaagaatgggagaaagtaaaaaagaagaaagctcctgatcgaaagaaaacataacatatgtgcacagaggtctttggaccagacgataattgaactata

SEQ ID NO: 285597 - DNA, 260 bp, Glycine max
cctttgcatttcatctatatcatacagaattgaacatacaaatgaatccgaagactttctaggcttgtatgggttaggcagccaacaatcatgttttttaggattgaaagcttaggtcatgagagattcatctagaataccttcactttttttattcatcctaccctactcgccttatttagcacttactttattattttgacataccacttattcttctattgtcttacagtttttctacacagaaacattatatacat

SEQ ID NO: 285598 - DNA, 385 bp, Glycine max
tagctttataaacaaaaacatcataaattaaaacataagaaaagagttcaattgtatatttgaattgtttgtgaaatttttttgacaagtccaaactttgtctaagacagaagaaatgaacttttaaaaagattcatcctaaggtgaatatataaataattgtgtctagcttgtaggaacacaatttataaaatacttaagcaaaaatctttttgataacttacaaactgtacaactaaatctctcttttaattagggttaagtttacgacgattcaaccttattttaatgattatcactaagaaaaataatatcatattaaacacaattagccaacattatgtattccaattaatttgattcttataataccccaattgtttat

SEQ ID NO: 285599 - DNA, 429 bp, Glycine max
gacactatagacaactccacgcttaggattcaacattaattaccgtgcttctttcccacttgttgaattatatgcgactttatctagatgaaaacgatcgaattctactccctgcgggatattggattatatctgggccaccaatcccgtggaagaatcattggaaaggatgggaaacaacaccggaggatttgaatgatgagcagaccaaaattgagaatgtagccaaaagcctgtgctggaacaagctactggagaaggacgatatagccatttggcagaaagccaagaaccatttggattgcaaagccaaccgtaagctctctcacaatctgcctctctgcaaggcacacagtaaccctgacacggcctggtatgtgcttcatattccattgtcccttgtatttcattcacgaaatatttccatct

SEQ ID NO: 285600 - DNA, 376 bp, Glycine max
  unsure (1)..(376): unsure at all n locations
ttgcttctatataagcttaaccattntatcaataaagacaagtggagtnttattcataaaattagagtttatctcttttatcttagtgagagtgattctcctaaattcttgagtgattcaagaacaccttggctgtatcaaaggactttcacaacctttgtgtgttgccctcgctggacagagtgattctttccttcctttcatcttcacccttgttctttcaaaccacaattccagaaaatccacctctgcccagaattatctcgtggccataaatcccattttaagcactcaaattaagtgattcttgagcctaaattgaatttcaaaacgagacctttcacctcgttttggaatcacctcattgggagccctg

SEQ ID NO: 285601 - DNA, 408 bp, Glycine max
tctctagagctaaggatgggaataacttagattaaatttcagtcatccacctcacttagcgtgacctctacgctaagctagccatagcccatgtgctgagcgagtaacactcctcgctaaacacatcaacccccatctattggttgttggggtcccgctaagtgagacatttgcgctaagaccaaaaccttctctggttgcgcatttattgaaattaggctaagtgagtaagctcgctaagcgcgacatggtctcccgctaagcgcgtatatgtgctaagcgtaaaagtctctcaatttgggctttcatggtaattatgctaagcgaaccatctcgctatgcctaaaagtctctttggaatggcaatcgcgcttaacgagaccatcttactaagcgcaacccactact

SEQ ID NO: 285602 - DNA, 238 bp, Glycine max
tcatcacacagagatcagtcggaccgggacctcaagctacgcagcagcttctttaaaaggtccacaaccattagtaccgaggaattccttcactaccaccccgtattggaacggcacccactgtaaaacccaagcaagcctatagaggtccccacgcagcacatggatgccaaaaaatctagcatcatacccatacagtagaccaatgacttagatggcgcaccctactgaagcgaca

SEQ ID NO: 285603 - DNA, 713 bp, Glycine max
  unsure (1)..(713): unsure at all n locations
caccctcactttctacgttaaatcgagatagcgattcgcaaattaatacggttctnntcccagcccgcacaatgaatgatgcatgtgatacctgacatacacagactgacgcagatccagactagcttgttaccagctctgctaggcttgagcaccttctgattgcttcgaaggcttgttctagacctcgaggnactactcttncaccaagactataacgagctagtcagatcatctctagacaagggaactctcatattgttactacacaatgacatggtgctgactaacatacatcacatcgctctagtgaaattcgcagacgtttgtgcataacactgtctcatgagcttccacctctncagtttgcatgacatggagagagtgatactgctcaatacgcaagtgcgataccattatctaatatacgacttcgcgtggcctcggactcatatctcgaattctctcgtggacacacgccaaatcatagctgtgtatattcagtcattacatcatgtgtacacgtcaccagtctacacgagtatcgtgntcgatcatgcgtcaatctgtacagtccactaanatacgccgcgaatagctgtgnatngtactcagatagatcgtggactcgacgttacgtaatgagcagacatgataacgtattcgatgatgatgcaccgtggaggatactatgccgacgctctacgacaccg

SEQ ID NO: 285604 - DNA, 422 bp, Glycine max
  unsure (1)..(422): unsure at all n locations
cagcttattgtgttntatcttcgtattatcttctcttgtaatcttttaaggagaaatttatctaaacaggatccacgtctagaactttacgtgtcttttttttacaagataagctgtattgtcttggggtcgcatcctagttctcattgttggttatcctagtgccaagttgtacatgtttgtagcgttgcttaattatactttacaatattaattatcaattttcttgcaggatggaagaattaactatgatgagtttgtagccatgatgaggaaaggcaccccagatataactcacataacccatagacgtcgcagataacccctgcattgctttgttgggttcagagtgtctacacgttttatagtataacggcctgctatttgattcattaggcacttgcatgatatttgtgggtcta

SEQ ID NO: 285605 - DNA, 364 bp, Glycine max
agcttgagatgaggaagtgtagaagggtgaaacttcctgcttttattcgttgaccacaaagtggtacctggagatatgtcgcgggggtcaggagaccttggggacgtcaggtggggtgctattgcccaaaaccaagcttgaccaatcccgacccaacccgggcatagtcagttagtgagaacctgtgatgtacctaaacaggcgagctcctggcagtcaacagataaaaggaacaaagaccacaaagcaaggaggcttgtgtggtggctggccagctgtgaatcttgtgtgatatatgggttatggcctctggtaatcgattaccaagggtgggtaatcgattacaaggcttataaatgaagac

SEQ ID NO: 285606 - DNA, 404 bp, Glycine max
  unsure (1)..(404): unsure at all n locations
tctacagaaggtttgttcctaatttctctacaattgccttacctctcaatgagctggtgaagaagaatgtggcatttacttggggtgaaagacaagagcaagccttttttttctcaaagaaaagctcatcaaggcacttgttctagctcttcctcacttttctaaaacttttgagctagaatttgatgcctctggagtgggagttggagctatattgttacaaggcgggcaccctattgcttattttagtgaaaaacttcatggtgcccccctcagctaccccacctatgataaagagctntatgccttaataagagccctccaaacttgggaacattaccttgtttccaaggaatttgtcattcatagtgatcatgaatcacttaagtacattagatgacata

SEQ ID NO: 285607 - DNA, 377 bp, Glycine max
tcaagcttggaaccttattcatcacaatcgttcccagtctcacaggtctcaccgcctctttggactccgacattgcaacacttggtgatctcctattctctgtcactgataatccattcaaaggttgacgtcatgtccctcaaaacttatgatcatgcgctaaaaccttatcttgcattcttttttcctgttactgcatgattttatcgtcgttactacatgcgagcgatgatctttttctcttaattatacttttgagatcatctggatactataattatgcgataataatattttcataactgtattttttctcaaaaaagaagacactgtctgccagataaatgttacaattttcgctataaaacactatgttt

SEQ ID NO: 285608 - DNA, 410 bp, Glycine max
tgcgttgtaaaaggatctgtttggtaggttaacatttgagaatggcaatggtgagcataattaaaactagccattaatttttacagaattgataaatgtttaatatgattttacatagaccgggaacatgtagagattattcaacactgaagggaatggggattgaggttagaatttttgaaatgcaaacatgtttgacaagaatacctgagttacccgattaaacaaattattcaccattgtactgagactttgtgtaaaggttgactaattctgaagtcatatgattggaagccctagaattggggtaccaagcaagatcaacaattgttgatggggtagacattactgcttgcaaataggttgaatcaaggcttgctagttgccatgagagcctgttgctgctgaaa

SEQ ID NO: 285609 - DNA, 383 bp, Glycine max
agcttctacttatgtggcagggcgagcttccttcactttcttgcctcaaccgcgagctttgaccaccgctctttctttccgtgatgcttctctttatatccgcctgagtgggtttatagcctaaaccatacttcccacgatttcctttggcatttatcaagctagttatgccgccgttgtctttgcctaaacccattccgggttcgtaaccgttccccaacataactcgggccatcattactgctgcatcggacaggcaagcttgcccagagaaggagtccacggaggaaatgcttaccacctcaaaagactggaaagcggtttctaatgactcctctgcggcttccacataaggcatagaggatgggcagctcaccaagatg

SEQ ID NO: 285610 - DNA, 422 bp, Glycine max
  unsure (1)..(422): unsure at all n locations
tcatgatgaatcaagatngattcaaagagttntgatgataactaagatgatgacaaaaagctcaaaagtcaagaacacttcatgataacaaagatgatgatctcaagaatcaaagaatgagttcaagattgaatcaataacacttcaaggttcaaaaggaaatttgatttcaagaatcaagaatcaagaatcaagaatcaagttccaagaatcaagatcaagattcaagactcaagattcaaaaatcaagagaagactcaatcacgataaatattaaaaagtttttttcaaaaactgagtagcacatgnaatttttctcaaaaccttttaccaaagagtttttactctctggtaatcgattaccagataattgtgatcgattaccagaagcataatgtgttttcaaaaagcttcaactgaat

SEQ ID NO: 285611 - DNA, 384 bp, Glycine max
agcttatcaacatcaaacttggagaaagagttcttggggtcaagacatgagaagcaatcaagtataatgttacttccttcactaaagcggtgatccatctccacacatattttatcaatagcaacataaaaaatctctgcacggtaatgatgaagattagtgatagtcctcccttctgctcttgaacgaccccgaactggtatttcgtcatccatatttggtaccagaatacttttagcaacacacaaaatccttggacatcggcaaaaaaattattccagccactctctctcattgtgcccaaccgagctttgacaacatcaactaattctctttgcaatatatttgaaagctcgtttgtttcctatgacctggatcacgcac

SEQ ID NO: 285612 - DNA, 423 bp, Glycine max
taatatctaagctaacagaattatagcataaagcattcatgcttgacatagaaaaggccgaagtattggaccctgttccttcgaaaatgttatcgtattcttgcaattaaagttatgtttgagaatacctaactgttggtatcttatttcaagacccgcaacaattctttcctttaatttgttatttcatatagtcttttgctttacattagacaactaagagtttaagatcaaacataatgtcagtttttatagttaatttattttctagcaaaaagtacttatcttatactaatatgtgcgattatatatgattcggtctcttactaaaatttcatattcgactcctataaattaaaaaacgtgattaaaaaagatatcattaaaagtgaacaaaattaattcatactcgatactcatgat

SEQ ID NO: 285613 - DNA, 386 bp, Glycine max
agttttcccctcgatcctccgatatcaaaaccgtctgctgcctcccagcagaatcagccacaaaaaccgaattcctcttctcgtcatcacctaaaactagtgccataaaactaattggaccaatggatagacttccatgaaacacagtctgggtaatggaaagcgaatacgagtcgacaataagaatagtgcatttaggaggcttcctaggctgagtttctctatcaattactccttcatttccttcaaaagaacacgctatacagacatatctcggcgttgaaggcaaagttcgaattatgcggtgagtgccaacccaaggtggcaatttcctcctgcaccggcaatgaccactggttttgctccaaacacacaaaaaaccatcg

SEQ ID NO: 285614 - DNA, 420 bp, Glycine max
tactgtgttttatcttcgtattttcttctcttggaattgtttaaggagaaatttatctaaacaggatccacgtctagaactttacgtgtcttttttttacaagataagctgtattgtcttggggtcgcatcctagttctcattgttggttatcctaatgccaagttgtatatgtttgtagtgttgtttaattatactttacaatattaattatcaattttcttgcgggatggaagaattaactatgatgagtttgtagccatgatgaggaaaggcaacccagatataactcacataacccatagacgtcgctaataacccctgcattgctttgttgggttcagagtgtctacacgttttatagtataacggcctgctatttgattattatgcactcgcatgaatattgtgggtctacact

SEQ ID NO: 285615 - DNA, 381 bp, Glycine max
agcttgtgaaagccaccttcacaatcgaaattgttgaaattgctacaaatttctagaatattcttaaatataatatgtatgaaaatggtagaatatcctagaactatagtgtgtatgaatatggtagaacaatctagaactataatgtgtataaatatggtagaacaatctagaactataagtgtatatataagatagaagaatctagaactatcatgatactaatctatcatgaaaactttagaaagacctaaagtaatgtagaagcattcaccaccattgagaggttggtgacttaagcctataaataggcaattggtatgttgtaattggtcatccaagaaatcaatgacatatccttctttctaaaacaattctcta

SEQ ID NO: 285616 - DNA, 421 bp, Glycine max
gcttctggtagttcttaatatctggtctgctcttgagactgaacctgcgctccttcctgcaactcgtacaatgtaggaactcatccctgtgaaagtttcgtttcctcattgcagtgtctttccagttagccacatttgcctggtgtgtgtaatatttcgtcagaggtgtcttccagagtggaactctatcttcatcttcacaatgaacccagatgttgctcttccaccttccagtcccttctttcaaagcatgcttctcaaacgcttctggagtcacattcactgatccaaataataattgtaaaactaaattagtgtaataagattatctattatctatattttactttggcttcttatgtttaaaaagttgaactttggtctgagtgtctttattagaccacattgatcctttcgtcac

SEQ ID NO: 285617 - DNA, 568 bp, Glycine max
  unsure (1)..(568): unsure at all n locations
cctctaccacncgtcaccacccttatgcaagtagcagggacgcacgtccactcctcaacaccncatccccggganacccctttgagtcgatgcctgcgaaacactgcaaaccngagaacgacacagtcaacagcctcaggaggaacgggcgctttccgtcgccgaaacctcatgcaggcagagactgagaagagcacagggacatatccaatcacgcataccaagacatgacacaccacgacgccatgaccggcgaactaacgtgcaaccaagagagacaacgcacaactccctccgagtccaagagaggacaaccggacgcatgcactaggcgcgaagatagacgacatcacaacgcaccgggagaggactgcgccggcaccggggacaccaacaaatcccgaacccaggcgggcgccagcgcgcctagcgtactacacacggaatattgagcgccaagaccacacgccatccgaataacaacggaggcgaatccgttcccctcaagcaggggggaaacatcccggacgccgagcacgcacaccacccgggagaaccccgcgcagcc

SEQ ID NO: 285618 - DNA, 373 bp, Glycine max
ttgctttcttaagaaaacttccttgagaagtttctttgataaaacttccttgagaagctagagtttagctacacacacccgtctaaaaactaagctcacctccttgagaagctttcttgagaagctagagcttaactacacacccctataatagctaagctcacccccatgacaaaaaaacatgaaaatacaaaaaaaatcctactacaaagactactcaaaatgccctgaaatacaaggctaagaccctatactactagaatggccaaaatacagggcctaagataggaaaacaacctattctactatatacgaagaagagtggacccaaccttggcccatgggctcaaaaatgtaccctaaggttgatgag

SEQ ID NO: 285619 - DNA, 431 bp, Glycine max
  unsure (1)..(431): unsure at all n locations
acactatanacaactcatgcttaagccttgaattgagtgccattaccgtgttgatttttaagggagaccatatctgtagatgaggtgtttccaggtgaacttttctacctccctaactgaaatatcttgtaatggccttgcctcagtccacttagtgaaatagtcgatggtgaccaataagaacttgaccactcctatggcttttggcaatgggttcaatatgtccatgccccatatggcgataggccaagtggaactcaagctatggtggttgttgggaggggtgcgtggaacatctgtgaattcttacctcctctgtaagtagaaggtggcagccaataatatccgatacacaacactttggttgctagggaacgacctccgatatggaggccacatattctttcatgttagtatcgcatgacatagtc

SEQ ID NO: 285620 - DNA, 381 bp, Glycine max
ttgctttgtgtaatcgattacacttatttggtaatcgattaccagtgactgtttctgataaatcaaaagatgtaactcttcaaaaggtttttgactttttcaaattggttttaaatttttctgaaagttataactctactaaatggtcttcttgactagacacgaagagtctataaaagcaaggttttgttttgcaaattaaattaatttcattctttcatactttacttttccaatcaatcctttacaagccttgaatctctttgaacttcttcttcttctttgtaccaaaagctatctgaagttttctggttttccaaaccttgaaaacttgcgctattcatcttttcattctcttctccctttgccaaaaagaattcg

SEQ ID NO: 285621 - DNA, 391 bp, Glycine max
tgagatgaggaagtgttgaagggtgaaactttctgcttttattgttgaccacagagtggtacctggagatatgtcgcgggggtcaagagaccttgtggacgtcaagtggggtgctattgcccaaaaccaagcttgaccaatcccgacccaacccgggcatagtcggtcagtgagaacctgtgatgtacctaaacaggcgagctcctggcagtcaacagataaaaggaacaaagaccacaaagcaagggggcttgtggtggctggccagctgtgaattttgtgtgatatgtggattatggcctctggtaatcgattaccaagggtgggtaatcgattacaaggcttaaaattgaagacaggaggctaagatggtctctggtaatcgattacc

SEQ ID NO: 285622 - DNA, 544 bp, Glycine max
  unsure (1)..(544): unsure at all n locations
ccgcgacgcagcgtcccgcgcantcagtgtgtgtgaaagaatacatatcaaaagtaccantgcataatntgnannccnnnaagggagtttatttgagcgtcgaaaacaccagaggatacgactcgcgcgggggcacctagaagacgacctgcaggcaagcttgcttaaacacccaaccccgagcgtatggatagatcacgagactatatcataaatacgagtaaaaagaaattgccggaagaaggcacaacaggctacaccaacagtgtggatgaatatggaagaacacggtacagcaacaaagagcataaataagggaaaacagcctaggacaagacgcgtagctataacataaaagaaccaacgactagcatgataccaagccatcatgagaaattcagaaagaccgaaagtgacgtataaacagtcaccaacattgagaggttggagacgaacgcctatacataggcacaaggtgagtcgcacatgctcatacaaaagaataaggacatagacttggctcataaacaaaacactacaaccg

SEQ ID NO: 285623 - DNA, 368 bp, Glycine max
  unsure (1)..(368): unsure at all n locations
ttcaaacgacagtaactgcttattcggatgtccgattgagtcccgccatatatcgagacgctccaaatctattgttgaagctcttagccacttcaaacgacaataactttttactccaatgtctgattgagtcctgtaatacaacgaaaggctcgaaaatgaatgctcaagctctgatccaatacatacgacaataactttttactcggatgtttgattgagtcccgtcatatcttgcgactctcgaacttgtatattgaatttctgagcccatcctaacgacagtaactctttactcggatgtncgaatgagtctcgtatatatcgacacgctcaaactgaatgtgaagctctgattaattcaacga

SEQ ID NO: 285624 - DNA, 379 bp, Glycine max
ttgcttatgagcctaaacttgaagcttcaatgcagggaaacatgcttatggctacgaatacaaaatttggtattaggattaaaaaaccatgaaaatagggacttggttgtaagaatttgggctgccccatgattggcactttgcacctaagtaacgtgggagatgcttttcaatggtgtgtagatatatgtgtaaatataaagggcatgaaattctttgcaaagggagacggagtattgaagacccttcctaaatgaatgtatgatagcacgggattcccttttgaatgcaagtatgtgcataatgttaaatatcttgccaatatgcatcagtgtgagtgaaataatgaaagattgcatggtatagatattctgagtgt

SEQ ID NO: 285625 - DNA, 562 bp, Glycine max
  unsure (1)..(562): unsure at all n locations
ccccaactgctcacnctaccactctcaatatatggcgctcgatgtgtattgttaatgtttagtagcgctcttactctctaccctacganaccgcggannattgaatcgataccatgtcgagaccgtgacactatccaatactccacgctcaatactgctttgcggacttgctcttacatttccatgtggacgtcttttgtgtgaatgagtgaaatgttatgacatcccgcttgaacgattaagatgaggaagccgaaggatttggctattcactatggaggtgcacatggggcaactgaaagctttatagtgcctatttatcccccaccctaaacttgtttcttcctatttgtgcaatatcttcttcatggcggccggccacccatcctcagaggtcattactaaatcatcctcggggcctggctacggacttctttcgtcaatgagcatctttttaacccacgggctaaatctgctaaatggattcttgcaccacatgtcagaaggtaagcgccacatagtcgactaagctaacttgacctatagcagagctactcctgcc

SEQ ID NO: 285626 - DNA, 379 bp, Glycine max
tgcttatcattagagatgtcagaagatagggtttaaatgtctataggcttttgaagagcttgtcgttaaagattcatcactatcctttatgggtgcttacttagtgtacaatcaaatgaaaacacattatattacaccaagagaaaaaaaaaatccaatgacaaggaatggctaattattgttaccaagtgatgtctttctgtctaaacaatgttgaagcaacatgccacacatgatgagctaatcgcttaagtagtagattggaaagatgttcgaagtttacatcaatgaaatgaacatcaaaagcactcaagaagatcatatttatgacctcgtcaagttcttttagcaatcaatgttgcacaatattatcctaaat

SEQ ID NO: 285627 - DNA, 310 bp, Glycine max
gacctatgaaactcagctgcttttgtcaaagggatgagccggcgttttaagttttggtatttcttgttggatcatttgaagtcattcacttacatttagtatttggatatatatatatatatacattgatctatgcgtgtgaaatcattgagttttccgataaatgtaaaagctacttgattcaagacattctattgctttctgcaattatttagatattggagtctatactacaaatggtgaaaatagtggttcatcagcacactaaatattctaaacgatgtctcggtgtaggcgtttattttattta

SEQ ID NO: 285628 - DNA, 380 bp, Glycine max
agcttgcctaattcacctgaaattgagagaaaatgattgttaaatacaaaaaatggaagtactaagtatttattatctatgcttaacaaaagatacttataacactacaaaataaccataaattggaagagtttgatacaacttacacaagctttatacacaaaagttagtcgtatttaccggctaacaactcccccaaatttacagttttgcttgtcctcaagcaaaaagagaacagctcacttgtcctcaagtgacaataacatgcagtgactatgtacaatggtgtatgaaacaaatgttactgattgcatgataatagaatgaagcattctgtactcatcacttgtctttcacaaaatatgcaactattcaaagag

SEQ ID NO: 285629 - DNA, 406 bp, Glycine max
tgcttgtggagcttctatggaggctggatctttaatcttcaatgaggtccttcaatggtgattttccaccatggagatgcagtggaagaagaaggaaaaggggtgagaggagacaccatccactatggaataagacatggaaaaaggagcttcatcaccaataatgtgccttggataagaagcttggagaggatgcttcaatggaggaaaagaaagagagagagaaagagagagggggggggggagcatgaaattgaaggaagaaaaaggagagagaagcttccttgataaggggcacgaaattgagttgtgtctcacaagactctcattcatcaaagttacaacaagtgttacacatgcttctatttatagactatgtagctttcttgagaagctttcttgagaa

SEQ ID NO: 285630 - DNA, 378 bp, Glycine max
agcttgttgggtcgcgattgacgaagggtgtaaaagacgacgttagtctccgcatgctatcaggctttctgtcttacagatagcaaaagaatgtttataaggataaccactcgggtatttccaaccgccagcgtgactcaaatgtcagtatgacagatcttgtgagcgcggaaaatgacgtaaatctccgcgtgtcaatgggcttattgggccgcaattgatgaagggtgcagaagacgatgttagtctctgcatgctatcaggctttctgtcttacagatagcaaaagaatgtttatacggataaccactcgggtatttccaaccgccagcgtgactcaaatgtcagtatgacagatgaggtaaaactccgtgtgtc

SEQ ID NO: 285631 - DNA, 410 bp, Glycine max
  unsure (1)..(410): unsure at all n locations
ntgaggatttggtctttgccagtgaaaggatcgatgtgggtctgaaaaaaggcaaatttagtcatcctgcttggacgaatgagaaaactggggcaaatgaagagggtgagaaagagggagaaacccatgctgtgactgccattcctatacggccaagtttcccaccaacccaacaatgtcattactcagccaataacaaacctcctccttacccaccgcccagttatccacaaaggtcatccctaaatcaaccacaaagcctgtctaccgcacttccaatgacgaagaccacctttagcacaaaccaaaaaacaccaaccaaaaggaattttgtagcaaaaagcctgtanggttcaccccaaattatgttgtcatatgctaaacttgatcccatatccactcaataattc

SEQ ID NO: 285632 - DNA, 383 bp, Glycine max
agctttgaacaatatacttgtccttcattgaactgtctttgggcttggcggccacgctcaacaaagtattttcgacacctactgtacgttgatttgaccaatgctgttatgggaatgttgcgacaatccttcaaaaccttattgatacattttgagaggttggttgccatgtggccatatcgacgtccttctctatcataagccatcgtccatttttcttttgaaatgagatcaatccatgttgctatggctagactcagttcacgaaatttttctagattttgatcaaaaatgtgcttgcaaggagtgtaggctgcataaaattagttatgaataacaattttaagtatatatcaaagttaaataaatgtgaccatgaaata

SEQ ID NO: 285633 - DNA, 420 bp, Glycine max
tctaaggaggtgagcttagttatgagaggatgtgtgtagatatgctctagcttctcaagaaagttttctcaaagaagcttctgaaggaagttttctcaagaaagcttctcaaggaagctacctagtctataaatagaagcatgtgtaacacttgttgtaactttgatgaatgagagtcttgtgagacacaactcaaagttcaacttctctccctttttcttccttcaatttcgtgctcccccctctctccttctctctttctttcttttcctccattgaagcatcctctccaagcttcttatccaaggctcatcttggtggtgaagctccttcttccattgcttattccctagtggatggcgcctcctctcacctcttgtcctttgtcttcggctgcatcttcatggtggaaaatcacca

SEQ ID NO: 285634 - DNA, 386 bp, Glycine max
agcttttgcatgtttagatatttctagagagagaaaggtccaagttctagagagttttgagagcttttgctgtaaaaagacttgcagagaactgagcgagaagaggaagccatcttgagagcatgaaatgagtctgggagtgattgtgaggttctagaggtggaagagacatctccactacttgtatttcttcaatccttcatttttctcttctctttgttgtaaaggaagcttcctagatatggagagctaaatcctctgctggttcttccttgtaggtacttgatgtaaatacttgtatatctatttaatgatgttttatgtgttctctgtgctatcagtacgtcatttcagtgtgcttttgccttgatcacgtagatgcatgc

SEQ ID NO: 285635 - DNA, 403 bp, Glycine max
tgaagacaaactggatgcgttggtcaacttggtaacccagctggccttgaatcagaaatctgtacctgtcgcaagggtttgtggtttgtgctcctctgctgaccaccatacagacctttgcccttccatgcagcaacctggagcaattgagcagcctgaagcttatgctgcaaatatttacaatagacctcctcaacctcagcagcaaaatcaaccacagtagagcaattatgacctttccagcaacagatacaaccctggatggaggaatcaccctaacctcagatggtccagccctcagcaacaacaacagcagcctgctccttccttccaaaatgctgctggcccaagcagaccatacattcctccaccaatccaacaacagcagcaacctcagaaacag

SEQ ID NO: 285636 - DNA, 384 bp, Glycine max
agctttatctagtaaaatgcaatcttccactttgcatttaaaccacctaaaccttagtgataaaaattcaatttccaatatcaatgcaccttatcttttatcttggaactctacaaaaccttacacttttatctttctataatttaaaattctcacttttcttttttactttttgtataaacttgtgggaatgaaattttagtagtgaatgaatatttgagaattggagaaactagaagttttggaggaagaggtctactgtataattgatcaattcttgttttttttttgcttgatacagaaaaaggaaattgaaaaataacaaaaaataattgaattctaacatatatgcactgattgaactaatcatctaaaattgtgctc

SEQ ID NO: 285637 - DNA, 415 bp, Glycine max
  unsure (1)..(415): unsure at all n locations
ntgaacaatatacttggccttcatttaactgtctttgggcttgttggccacgctcaacaaagtactttcgacacctactgtacgttgatttcaccaatgctgttatgggaatgttgcgacaatcctttaaaaccttattgatacattctaagaggttcgttgtcatgtggccatatcgatgtccttctctatcgtaagccatcgtccatttttcctttgagatgcgatcaatccatgttgctatgtctggactcagttcacgaaatttttctaaattttgataaaaaatgtgcttgcatggagtgtatgctgcataaacatagttatgaataacaattttaagtataaatgaaagtaaaataaacgtgaccatcatatatgaaatcttacccaatttcttcaacatttctttttg

SEQ ID NO: 285638 - DNA, 382 bp, Glycine max
agcttcaactttcaatatcgagcgtttcgatatattacgggactgaatcagacatccgagtaaaaagttattgtcgttttaatttgcttagagcttcggtattgcatttcgagcgtctcgatatattacgggattcaatcagacatcagagtaaatagttattatcgttttaacttgcttagagcttcgataatcaatttcgagcgtctcgatatattacgggactcagtcagacaaccgagtaaaaagttattgtcgcttgaatttgctcagagcttcggtattcaatttcgagcgtctcgacatattacgggactcaattagacatccgagtaaaaagttattgtcgtttgagtgttctcagagcttcggtattcaattt

SEQ ID NO: 285639 - DNA, 414 bp, Glycine max
tcttgtttatacctcgatcggccatgtttcctgaccgacgtttactaaaatttttttcgatcagtatcggtgagtaaaaattatttttacgaggttggcgaacgttttcccttccaagcaattgaaaagatgccagtgttcgccgaaacacaacttcgttgtgctcgaacgaaaaaacctagccgacctacatataaaatttttacggcaacaccgaacagatgagctacctctaccgtaaaaaaatgttatctgccagcatttgtaaaaaagttgctcacagtcgactgaaaaatatcagtcgcggccttacaacatcagacgtcggccattgtactttatattcaatccctgaatattatttggatgatgtctattaggaaatgttacatcggcgtcatccggtgacgcttc

SEQ ID NO: 285640 - DNA, 383 bp, Glycine max
tctttgcgcaacaaatattttattgttgcgtgatcagtgtaaatcactatctttgatcccaccaaataagatcgaaatttctcaagtgcaaacacaattgccagcaattctttctcagtggtggcatagttaatctgggcatcattccaaactttgctagcataatagatggtatgaaacattctgcccttccgctgccctgccctagcatagcacctactgcataatcacttgcatcacacatcaattcaaactcttgtccccagtctggtgctataatcacataagcagaaaccaatttggctttgagagtgttaaaggcttctaagcattcttcattgaatacaaacacaacctccttgttcaacagattgcttaagggg

SEQ ID NO: 285641 - DNA, 407 bp, Glycine max
tcctttacacaaagagaagagaaaaatgaaggattgtagaaatacaagtggtgaggatgtctcctccacctctagaacctcacaatcactcacaaactcatctcaagctttgttctctagaggtcatcgcataacaaaatctctcaaaactctctggactcggacccttctctctctagaatctctcacatgcaaaagctccttgagaaaatggccaaaatcctctccaaaatctgatttcaggcttaaataggtggtttttttgtgctagcgcgcttagcacgactatggaccgcttaacccgcattagtggatttcggcttagcgcgtgcttttctcgctcactggatggactgaagcggtgtgcttaactgcatgaccctttgctcagcgaacatgcacaactc

SEQ ID NO: 285642 - DNA, 381 bp, Glycine max
tagctttgtggccatgtaaacactaaggcttagggtttgttttcccccgttcaatcaacccagtgtttccaaacaatgcactttcatcaagttatgcacacatccgagtccatttaggccttcgggaaaaatctttcattgcattcgtggtcgaagccggtaagtgcaccggatcgtgcaagtagtataaaacggtaagaaccgagtgtcgaactcttgggaaacttgtgttacttggtaaagctatattcagtgaataggtgtctagtatgaaaagatatgtgtggactatgaacaagtatgtaaactaactattaaaaaggaaaatcacgtgagtaatgatgtgtaaagacaagtagacaacgtgttggtcttcctatt

SEQ ID NO: 285643 - DNA, 414 bp, Glycine max
ttagtgattgtgtgcgaccacagattttatattgagtgtcctcatttatatgttctataaccaactctgcatgaatttgtaattgtcataacatatgatttatgaatatgatctaggccttctttctttctttacatcttaagccgctggccaagcaactatcccaatgtagttatttatcatttgcaagccctttgagccaaacacttgatattttgatggaacactaacctaagataaaaatttcttgccttaccttaggttaggagagcagcggtgttttgttggggattctatcatttggtggctaatgtaatgtaaatactctgttcttaatacgggtattaagggaaaacagaaaagaaaagaacaatagaatagattagaaaagatgaatatacaggagaaggaaaa

SEQ ID NO: 285644 - DNA, 369 bp, Glycine max
tgctttgagcaaattcaaacgacaataacttttgactcggatgtccgattgtgtcccgtagtatatcgagacgctcgtaattgaaaacggaagctctaagcaaattcaaacgacaataacttttgactcgggtgtccgattgtgtcctgtagtatatcgagacgctcgaaattgaaaactgaagctctgagaaaaatcaaacgacgataactttttactcggatgtccgattgaatcccgtaatatatcgagacgctcgtaattgaaaatagaagctctgagcaaattcaaacgacaataacttttgactcggatgtccgattgtgtcctgtaatatatcgagacactcgtaattggaacagaagctct

SEQ ID NO: 285645 - DNA, 414 bp, Glycine max
tctgttttcaatttcgagcgtctcgatattttacggtgctctatccgacatccgagttaaaagttattgtcgtttgatttttctaatagcttttcttttcaattacgagcgtctcgatatactacgggacacaatcggacacccgagttaaaagttattgtcgtttgaatttgctcaaagcttttgttgtcaattacgagcgtctcgatatattacgggactcaatcggacatccgagtaaaaatttattgtcgttggatttttctcagagcttcagttttcaattacgagcgtctcgatatactacgggacacaatcggacacccgagataaaagttattgttcgttgaatttgctcagagattctgttttcaattacgagcgtctttagatattacgggactcaatcggaca

SEQ ID NO: 285646 - DNA, 383 bp, Glycine max
  unsure (1)..(383): unsure at all n locations
ttgcttcatatagaccaagaccagaagtatttgtaccttgatttaccatgatctcttaatacaatatctttattgttgatttttttttcctttggagaatgtcaaacgtaaatcacatttttttatcagcataaattaatttgttagttttattaaaaatataactttggaggatttgaacccacgacctctcccccctctctttccccttctccctccaccacctctcatctgtcaaccaccttatatctctcaaatataaatcacatttgttaattgaaaggaggaaaatatcaaatgtaaattgcttcttttttccactagaaatgcttacaacatgtcttttttctatactctctnttcaacattatctctacttatta

SEQ ID NO: 285647 - DNA, 419 bp, Glycine max
tatcaatacatttgaagaggccatccaccacttcattatcactgtcaatgtttggattggtgtaaaagaactttggattcagataataacccgctgcatgcaaagggtggtgaagttggcaatcccatcttttatcaatgattgcaaggatatccttatacttcccttcattgttattgaaagctctttgaattgcttctttggccctatccattgcttcataaatgaaacccattgtaggttttttttcattatccaccaacctcaacacacttacaagaggccccatagcctttaaagcataaacaacatcattccaaaatgatggcataagaacaacatctgttgcttgcttccccttgggctctttagctgccttagacttcaaccattcatctgaattaaacatccttctaaga

SEQ ID NO: 285648 - DNA, 375 bp, Glycine max
agcttttgagtccataagagaaactattaaaacttgattacatgtctggtaaaaattgtgcaaagcaataataatttgacaacttgtaatattttccccccaaatgtgtagtataacttgtaattccaagatatgtagtgttcgaatgtcctcccttctaaaaggtaaaaaaaaatagtatttattactttttttatgaaacgaaaagacattgtcttaaattgtgtgtgacttgacttaattttatactaactgtgggtggataattattgatgtgacaattaatactacaagtaacgacaaaggagcttcacccacagggtcaacaacagtagaagcaccacaagattcacctgtagacgacgttgatgaatc

SEQ ID NO: 285649 - DNA, 410 bp, Glycine max
  unsure (1)..(410): unsure at all n locations
tgtgggtgctccccttattcctcttcaggttccattataccatactttgactcgccccctcaaagattgttccattgtaagccttaccaatcatctatatattaatttctctttgaatttaagttgaataattcttctttgaattaaactagaatataagaggggcgagtctcataaaaaattacaaaaatcctcttttatattatttccatccttcataacaaacacaaccttataacatataaatctataacggtgatgaataactcatataaactacatcacgcaattatagtttgtgtcttggttaattctctatacatatgaaccttgagtatgtaagtatgtttttaatgtaaaaacatttanggtaattttataagagtgatgttacattgtgttatgagaaa

SEQ ID NO: 285650 - DNA, 381 bp, Glycine max
tgcttatagttattggagggagaataaaacaatccaaaatcaattgtacccttcaagtaacaaagaattctttttgcggcttttagatgaggagaggtaggagcctccgtaaagcgacacacaactcccaccgcatatagaatatcaggccttgtattggttagatatcttaaactccccacaagactcttgaagaccgtggagtctaccttctctccttcatcaaactttgataacttcatgccaccttccatatgtgttttcacgggattacaatcaagcatattaaatttcttcaacacttcttttgtgtagcttccttgtgagacaaagataccattctacgtttgcttcacttccattcccaagtaatatgacatg

SEQ ID NO: 285651 - DNA, 404 bp, Glycine max
  unsure (1)..(404): unsure at all n locations
tcacaactccaatactctatatgagctatgccactaatttctatctttatcctgtagtttctaagtcttgtccacttcaatttaaaatcaaaattactcaaactgagattgatttaaactatataagctaagaaaacatgagtgaatatcatgctaatttcaattataatttgtccttctataaataaagattatagttaaattctaggaaattctatggagaccaaccttggaacttctcctcaagtgacaaaatatcaccagattccttgacagttacactaggacttagcgagtgcattgatccacgttttcctatgacgccaacagttatttctacccatctgctgtgccctttccacgtgaggccatggccagttgcatcctcaaattntgatgtcaca

SEQ ID NO: 285652 - DNA, 389 bp, Glycine max
  unsure (1)..(389): unsure at all n locations
agctttcaacaagagtcttcacaaataaccatcatgaagcagaaaactaacaaaactacccatcatatctcccaaaaccccatacccacgaaatttaagagagaaagaagtccacccaaacctgaattttcgaagtcccactcgtagccacgcacttcacgacttcgaaaatgctctcctttcgcgatttggagcagaaatgagcaccaaaggttggagctttgttggggtttcaatggagaatggaggagaaggaaaaagcaacgtgaggaagagggagagcttctgaattttctgttttggctgagtgaggagagagaaaagctttttggttntaaataaaaggttntcctctttttctattattntattcatgctctgccacatgt

SEQ ID NO: 285653 - DNA, 420 bp, Glycine max
tctacttatgttgcagggcgggcttccttcactttcttgtctccaacgcgagctttgaccactgctcttccttcccgcgatgcttcttttcatgtccgcctgagtgggcttatagcctaaaccatacttcccacgatttcctttggcatttatcaggctcgttatgccgccgttgtctttgcctaaacccattccgggttcataaccgttccccaacataactcgggccatcattactgctgcatcggacaaacaaggctgccagagaaggagtccacggaggaaatgctgaccacctcaaaagactggaaagcggtttctaacgattcttctgcggcttccacataaggcatagaggatgggcagctcaccaagatgtcttcctcgcctgacacgatgaccaagtgcccctccactacg

SEQ ID NO: 285654 - DNA, 388 bp, Glycine max
agcttgtttaccccatgttgaatttgcttacaatagagctgttcatagcaccaacaattgttctccttttgaagttgtttatggttttaacccactaactcctcttatcttttgcctatgcctaatgtttatgtttttaagcataaagaaggtcaagcaaaaggcggactatgtgaagaagcttcatgagagagtcaaagatcaaattgagagaaaaaataaaagctatgctaaacaagccaacaaagggagaaagaaggttgtcttcgaacccagagattgggtttgggtgcacatgagaaaagaaaggtttcgaaacaaaggaaatcaaagcttcaaccaaggggagatggaccatttcaagtgcttgaaagaatcaatgacaatg

SEQ ID NO: 285655 - DNA, 424 bp, Glycine max
tctagtcgtccatagacctcctctgtggtacggtctatcaaactttgcatctgtgcattcatcgcatccactaacagacgttgagcgccgtccaactgatggtactcgtcaccaccaccacctgctccagccataattcaacaggaaaaaaaaaatgtgcaataaaaattattaaggtttcaggacctcacaacactctactcacgtctcttagatggtagtacactcgtgtttaatgctctcaataggcttttgtgtaatgtattccctcttgccttttaccactcgtgtttcctcttaagttcctggatggaccaaattagacacacaaggtaatataaaataaaaggaaagacaatataatgatcacaaacagatttgatttgggataacaacttggacttgatttggataataatatatt

SEQ ID NO: 285656 - DNA, 386 bp, Glycine max
agcttggttcgaggtacttacccgttgaagatcgaagaacgatgaagaacgaatgaagaacatcgaagaacggttgaaacctttgcgagattcctcacggaaaacgttacggaaacgtttcggaagcgcctcggcttagattttcttcacggaaacaattttcccaagcaaattcgaaagagagagaagtgccaaaggggctgaacccttttcttcttcacttcctcccctatttatagcaaaataggggaggtggttgccgcccagctcgcccaggcgagctcagctcgcccaggcgagccaggttgcttcctccagaagcaacagccttctggaggaatattctggagggcccaagtgggcctgggtgctatttgcacccccat

SEQ ID NO: 285657 - DNA, 424 bp, Glycine max
  unsure (1)..(424): unsure at all n locations
ttctagctnttcattggtgtatttggatctccttttgttgctctaaattgtgggagtgtgctcaaatatatggggcaattttggtttgttttcttgcttgattaggttgaattaggggtgtgtatgggatggccttaggcctataatgcatttttgaacaatgggacatgccacattgtccccgttctcttgctattgacgcctaaacgcgcgcccaccaagtgttcggtgaaatgcctcaatggcattagcgcgtgacttttgtaaggaaacaacccatggagcattntggtttgtacacattttctttttttggaatatgtattcattcctgaaaaaggctatagtaattgccccgcatatatcctatgcctangaactaaaatgttatgctaatagaacacaagaggatgtgcatattggg

SEQ ID NO: 285658 - DNA, 368 bp, Glycine max
ctgctgcatgctgcttgtcttgattagacatgattgatacacgacttatgactagtaagatatgcttagagccaaatagagtgaagacgagtgagaattctactatctgcactttatgcagaatattgcatggaaagatgtgcaccataattttggctacgtgcatagagtgttgtgcatatgcaggtgggctaaagagtaatgcaaatggagtcctggactatttataataaatgccaccggaatcagggtgcactcatgtgatctatacttccattagaagttatgagtcgatccaacggtctacgaattgcaacgaggagactgttactggggttgtttagagagaaaagcagcgatatcgagtg

SEQ ID NO: 285659 - DNA, 424 bp, Glycine max
tgcctgtccgatgcaacaataatgatggtccgagttatgttggtgaacggttacgaacccggaatgggtttaggcaaagacaacggcggcataactagcctgataaatgccaaaggaaatcgtgggaagtatgggttaggctataagcccactcaggcagatataaagagaagcattgcgggaaggaagagcggtagtcaaagcttgcggttgagacaagaaggtgaaggaagcccaccctgccacataagtaggagctttatatgcgcgggtctgggggacgaaggtcaagtggtcgcgatatacgaagataatattccgagtacattggatttggtacgaccatgccctcctgaattccagctgtgaaattggcgagtggaagaacgccccggcatttacgcgacgagcataatgtaaacct

SEQ ID NO: 285660 - DNA, 383 bp, Glycine max
agcatctcgtgccaatccttgtatgacacggtcatcttttggataatcttttttatattcttattggccgcttccacggctccattcatctttggccggtagggcgtggaattgtgatgctgggttttaaactcctcgcacatttccgccatcatcttattattccggttggtgccgttgtccgtgataatcttccttggcaaaccatatcgacagatgatctctttcttaatgaacctgaccaccacattcctcgtgacattggtatatgaagccgcctcgacccacttggtgaaataatctatcactacgaggatgaagcgatgaccattcgaggccttgggctcgatggccccgatgacatctattccccacatggagaa

SEQ ID NO: 285661 - DNA, 412 bp, Glycine max
  unsure (1)..(412): unsure at all n locations
ntgcacgtatcggtcaagtgtatggaccacgttgtatccaaggtgctcatcgataatggttccagtttaaacgtgatgcccaagagcactttggagaaattaccattcaatgcttcccacctaaagccaagttccatggtggttcgtgccttcgaaggcacccggcgagaggttaagggagagatcgacctccctgtacagatagaccctcacacctgtcaagttaccttccaaataatggatattaaccccccttacagctgcctgttggggcgcccgtggatccactcggtgggagttgttccctctacactccaccaaaagttgaaattcgtagtggaagggcatctggtcatcgtatcaggcgaggaagacatcttggtaagctgcccatcctctatgccttatgtgg

SEQ ID NO: 285662 - DNA, 379 bp, Glycine max
tatcttgaggatggtggcacaatacattcccatgaagaccacgagagttttagacttttagtttacaccccaaaatgtaaacattgctctaatgaagggggcaacatcctctctttatgtgttgaaggcctctagtgcagtgatatgtgtcacgctatgtgtctgccatgtcagacgttatttttccctctccgcgtctctaacatgtcagacattggggtgcctttctgttgtgtacggtggcgcagctagtccaactactatgcaaccattcacccaagttaacaaatggaaaatccttcatttgacaacttgcgattgaagtgaaaagcgagactctacagttatactattttataaacttataacataggcatat

SEQ ID NO: 285663 - DNA, 382 bp, Glycine max
  unsure (1)..(382): unsure at all n locations
ntgaggggttttcggtgaatgtgtgtcttgcaagtctgcgtntttattttctttttctcttcatgttgatcgtttctgaagaaaccttctgtatatgggcattgattactattacttcagcttgaaaattggctcagatggatggtttattcaacttttattccttattttttttctttgaggtattttcaactttattacctcatttccttttccaccctattgttgattgatcaaaattcagttccatcctttctcaaggattaacatctgaagttagccttttttttttttaatatgaatcttatgttaagcgaaaatatgtttatgtaatgcaaccaatgaagtgggaagcttgagaacattgtgagctatatatatg

SEQ ID NO: 285664 - DNA, 417 bp, Glycine max
taatatggaaaccccatttactatgttgatccggtgagttgggtgtactttgagacttgggtcaccctgactagccactataggacacaatttatgtagtttggcttaagtagaaggcatcagacgttaatgaagcttcttatggctaagcatatactcctagactacttcacgagttaaaaaatggtaccccttgtgcatggagaagaaaatgaggaacatgacatgcatatgcatcgtgttgcagtataatgtattgaatggtattgtgttgaaatgatataaaacttgtgtgtttctattcatggttgttgttgcattgcaagcatgtgaataatatttgtcatgtgtaatgtaaagtgacaatgtgtcaaggtcatggatatgtgtccacacaatatatgtatattgtttcta

SEQ ID NO: 285665 - DNA, 383 bp, Glycine max
tttcttctcaagtaagctaccatcactaactatgcttgatttgtgtctttttgaacctgtatttggagacccataaaaccaatatggagcatcagagctacttgttggagaggatgaagcatccaattttcttgataagtaaagatcattcatatcgtcatcatcatcaacaaaatgtttatacaagtattgacaaacccacttgtcatcaatatactataccttgtaaactcaaaaatagtcagcaataacacctctttgctcatttgtcaacctgtatgagtgaaggtagcctatttgaatttatgattgtacaaccacaagttgataaaggacaacttttgattgtttactgtttagtgcctcaccttcttgcctttcca

SEQ ID NO: 285666 - DNA, 407 bp, Glycine max
  unsure (1)..(407): unsure at all n locations
tagccaaacaggccctaagtgtctaagaagaagtttattcaaacaaaagtctaacaccagaatcattataattattattaaccatagtgattacacttatttagatgcaacagattctgtttggacacagcgattacactttctaaatatcattattttcgtattaagtacactctaacactaaatgagggggagtaacctaaatcttaccctcttgatttactgaaatttgcaatacactatgttctgcttgggaaagttcttttatttatttatattatttttatatcatttatagcagattgatctaaccctaaaccaaaggtaccaagattcgtgttcgatgtcacagaanaagacaacgaatgaatgaatggcaaagatgagagtgaagctttaagagacat

SEQ ID NO: 285667 - DNA, 381 bp, Glycine max
tagcttaatgattatgtaattatcttcatactgcttctctggaagaaattatgcttagagacaaagatattagaattgtttcactattttacttttatagtaaatgtaatcttattctattgtttgagtaatacacttttaagtgaaacaaaatttgtgtgtaaaactgatggatttgggctgttttctaaggagaaggtatgcattccataataattataagtggtacaagaataatgttgctttcattttatctatgcaagtattttttgtttattgtttatcttcagctctttactaatactagtatatgctgtttaatttcaaggtatatagttagaaagagcataaagagtgcagaagacatagttcgtttccctt

SEQ ID NO: 285668 - DNA, 416 bp, Glycine max
  unsure (1)..(416): unsure at all n locations
tccaacaagtggtatcagagcacaagagcttcaagtatgtgctccttaaagctccattagttttcagctttactttctcctccattgttgtttcttcgtttctctccatgtatctcctcacgtgtcttgtgctgaatgttgttaacataattttttagaagttccaccgattaagcttgctatagaagctaaatttgattttctatggttcaaattccttgttcttgttcttgaaccatgaattgtgttcagtttaagttcctttgagttttatattgacaattattttggctgaaacctaaaccatataattcttactaaaacattaaagtagaagaaaacctcaaaaatctagaatgacatattcacctattgtagttntgtcataaaagtcatgtctagtcatgaaacttgtc

SEQ ID NO: 285669 - DNA, 382 bp, Glycine max
agcttgagatgaggaagtgttgaagggtgaaacttcctgcttttattgttgaccacagagtggtacctggagatatgtcgcgggggtcaagagaccttggggacgtcaggtggggtgctattgcccaaaaccaagcttgaccaatcccgacccaacccgggcatagttggtcagtgagaacctgtgatgtacctaagcaggcgagctcctggcagtcaacagataaaaggaacaaagaccacaaagcaaggaggcttgtggtggctggccagctgtgaaacttgattgatatgtgagatatggtctctggtaatcgattaccaagggtgggtagtcgattacaaggcttataaatgaagacaggagactaagatggtctttg

SEQ ID NO: 285670 - DNA, 421 bp, Glycine max
tgttacggatcaacttgattcgtaagtcacttgcatatcaacttgattcgcaacaggcatatggatcaacttgatccgtaacaagcttgcggatcatctatgtcaactacggatcaaatatagcttctgcagatcaacaaaaccctatgcggatcacgtcatagcatacacggatcaagctgaatgagatgggtgcaccagcaataatgctaggtgcacctagcaacacccatttaaatttcgtgatctattcacaagtttccgtgtttcccatcgtcaccgcttagcttagggtttttttaaccaagattttcaaaatctatctataataatttatctatcccaaaatagatccgaagcccacatcacgaaataagattgtttttcaagcttcggataacacatattatcatttgatgtt

SEQ ID NO: 285671 - DNA, 395 bp, Glycine max
  unsure (1)..(395): unsure at all n locations
tctaagttnttagagtaaactcaatatttaaattctaatgcaagtttttaacaagtctcatcatcttcatcttcaaggtctgccatctcttcctctcagtttttctttcaccactactcctgtaggcctcttcctcttctttagtttcttcatccccacgttattcttctcgtactttgggcctgtttgtttaacctttttttaaaaataaattaagcagttttctgtttttttatgtaattttttattttgcatttacaataatttgtttttttatatttagtccttgtaaaatgagcagagttttgaatttggtcattatatttttttatgattttcatccttataaaaatttgaaataattgttattgtccctattttcatgtgataaatgt

SEQ ID NO: 285672 - DNA, 375 bp, Glycine max
agctttgaaatttgaaaaccctagcatgggataatctattaggcatcctaagagtttatgaattccatcttcagaactgagataatcaaccaaagaaagatttatttgcccttaagtctagagagacaagctccaaaagattagaaaagaatgcttctctaaatctcttaaagtgaagatagattattctgatgggtcaaacaatagttttggagattccacatatgatgaagtagctctcatgtctatgaggttcaagcaaatgatgaaaaagaaagggaagttccaccattcctccaaaagaaaggacataagattcaagatgaaatacgaggaggatagcattgaaatcatctgctttgaatgttgaaaacc

SEQ ID NO: 285673 - DNA, 412 bp, Glycine max
  unsure (1)..(412): unsure at all n locations
tgcttgtggggcttctatggaggctggatctttgagctttaattaggtcctttaatggtgattttccaccatggaaatgcagtggaaggcaaaagagaaaaggtgagaggaggcgccatccactatggaacaagccatggaagaaagagcttcaccaccaagatgagccttggataaaaagcttggagaggaagcttcaatggaggaaaagaaagagggatagaaagggagaggggggagcacgaaattgaagtaagaaaaaagggagagaagtttaactttgagttgtgtctcacaagactctcattcatcaaagttacaacaagtgttacacatgtttctatttatagactangtagcttccttgagaagctttcttgagagaacttccttaagaagcttctttgagaaa

SEQ ID NO: 285674 - DNA, 384 bp, Glycine max
agcttagcttgatagcttaacttacagaatgaatctggggcttagcgtaggatggcgcacttagtgcagctataataaattttcacaaagaggaagtggcacttatcacatcatccacgttaagcccactgcttaaggtgcaacttacagtgaagatgttcggcctaacgtaacaatgtgcgcttagctgaaccattcagccaatcaatcaagggtcattgcgcttagtgcgagtgatccctccccactgcaattactttttgtgttcttgtgttctatgttgtagcctataaaactaaaccctcgatccctcgtcaggctgaatatccaagcttcgtctgcagatccttcatttaagactacacccgatttatgtagccctct

SEQ ID NO: 285675 - DNA, 424 bp, Glycine max
tgaccgaatgtaagatacatcttcttcaacctttgtcattcttgactccatttcattgaagcgcatatccacttgcaattccaaggtatcaaacctctcaccaacaaaggtttgaagaccatcaaacctttccataatcttcgaaagaagagatgaatcttctccttcatgtccttcttcaccaacatttctagcacctttcttcacccaagagccatcatgctcctttatgtaaccaaaggatgctatgactgaagcgcctgtaaggaatgatctcatgattggaacataaggttcagaatcaagagggatgttgaagtgttgaaggaaaagggtaacaagatgaggataaggcaatggggcattcaatcgcaatgccttatgcatgcgatatctaacaaggtgtgcccaatcaatttgtaaa

SEQ ID NO: 285676 - DNA, 421 bp, Glycine max
tatgaatacaacctatatatacgaaaagagcacaattatatttgtatgatgattaaaacacggcgtatgcgtatattataagtacttcatcactaagggcttaattaagatattttcctgaccgcaccctgctatgcataaatgacgctgacagtcgactaactcgatttttatacctacaatcataaacttgctagagtctaccataacctcaagactttgacatcaatggtgagatgagggtccaatttcactgaagaattacgtgaaataacatccaatttacagacatgaactcacctttgcaatatgactaacatctatttaattcaaaagtttgacgtctgtataaccaatgaacatgcgcattcatcatccatccctgcagcatagaatgacaaaattccgccctctttagata

SEQ ID NO: 285677 - DNA, 382 bp, Glycine max
agcttgccctgagaaggagtccacggaggaaatgcttaccacatcaaaagactggaaagcggtttctaatgactcctctgcagcctccacataaggcatagaggatgggcagctcaccaagatgtcttcttcgcctgatacgatgaccagatgcccttccactacgaatttcaacttttggtggagtgtagagggaacaactcccattgagtggatccacggacgccccaacagacagttgtagggggggttaatatccattatctggaaggtgacttgacaggtgtgagggcctatttgtactgggagatcgatctctcccctaacctcccggcgggtgccatcgaaggcatgaaccaccattgaactcggctataacggg

SEQ ID NO: 285678 - DNA, 408 bp, Glycine max
tgagatgaggaagtgttgaagggtgaaacttcctgcttttattgttgaccacagagtggtacctggagatatgtcgcgggggtcaggagaccttggggacgtcaggtggggtgctattgcccaaaaccaagcttgaccaatcccgacccaacccgggcatagttggtcagtgagaacctgtgatgtacctaaacaggcgagctcctggcagtcaacagataaaaggaacgaagaccacaaagcaaggaggcttgtggtggctggccagctgtgaactttgattgatatgtgggttatggcctctggtaatcgattaacaagggtgggtaatcgattacaaggcttaaaaatgaagacagggggctaagatggtctctggtaatcgatttaccagggatgtaatcgatt

SEQ ID NO: 285679 - DNA, 348 bp, Glycine max
cgcttattcttatggctcgcctccggacttcaccccccgtgccaccccggaagatctatgccaagcccctactttcgaggggcaactcccaccttatgacgactatcccgggctagactatgacgaaggagatacccatcttggccccctgctccaccttaaagatccgtgctcccatgatctaccccaactgaacatagtccggcatattccggcctcacccacacccgtgaaagaatctgatctcttcccggaagataatgtaaagactgaggcgcttgaagagaggttactagcagtcgagtggccttggtcattacctcatctcggaatcagcggatctatgtc

SEQ ID NO: 285680 - DNA, 420 bp, Glycine max
  unsure (1)..(420): unsure at all n locations
tcaccttctggtcctcctcatagttgttgcatgagaaaacatgctctattttcatctcccactccaagtaggcctccggatcattctttcctttaaatggaggaatgttgagtttaataccatcaattcggttttgtctaggaacaccatcattccctcttctcctcctttcttcgtcattatgatctctattctccatttgatccaacctctcatggagcgcatcatctcgttgtttcattaacctctccaaatgttgcatcaaagcttgcatttggaattgcgaaagccccacttcatcattaggattagtacctgacatctcaaacaaacaaatcanacgtaacaagacaattatagttgttggttgaataccctcacccactcaagggttcacacaattatggcgtttctctaatg

SEQ ID NO: 285681 - DNA, 384 bp, Glycine max
agctttaagtgtgattcctttctttttcttgtcattctcctcatgctgattcaatcttattagttccatttcatgttcctgtaactttccaaacaaagttgcaagagacatgtttgaaagatcccttgattctgtaatagccattacctttgattgtcattccctgcttaaacatctcaaaactttattaataagatccttattgggaaatatctttcctaatgatgcaagatgatttactatgtgtgtgaatctcttttgcatgtcctgtatagtttcattaggattcatcctatacaattcatattcatgagttaggtatttattctagacctttttacatttgtagttccttcatgggttacttgtaagttattccacata

SEQ ID NO: 285682 - DNA, 425 bp, Glycine max
tgcaccaacttctcatttcatccataagatactagttcatattttaatttaatgttcagtaacaagactaaacatcataataagaccaaagatatataaattttttatttgatacttatctgtatatactaaaaggaaaactgctgaaattagtaattattgattatttttgcaacatataggaaagaagacgttatgtgtgcttttttagtgatacgatgttatgtgtttaacagactaataatatagttttacgtattgaaacatcaaattataaatattttgtataaaaattaatggtatatagttgttggatgtatttattcagaaaaaaaggttattgggtgtatttctttttattggccctccctgtcttctaagtttaagtttgtccctgcaacatgtcattgaccaattctatgttt

SEQ ID NO: 285683 - DNA, 415 bp, Glycine max
gtgagaaatacttgctcgatatggccgacgtattactggtccctgtcacataccacgctctagggcatgccatgaaccttgccatagattctcatgactaactgagctacaccaccggcggagcgttgctgtggaagtgatcccagatgagaacctttcgcaagcggtcaaccaccaccaacataactgagtgaccgtgatacgaaggaagaccaacactactgtctagagagaaatcctgccatggttacgccgaaatcggaaggggagacaggaggcctggggcacgactgagaactgacttagttggctgactggtggcagagctcgtgaccaatagatggatgcctcgatgcatagatggccagacaaaattctctcgagtacgggctaacgtcgtcattactcccatatg

SEQ ID NO: 285684 - DNA, 412 bp, Glycine max
  unsure (1)..(412): unsure at all n locations
ntactattacaaaccaagcttagtgtgtgtttcacataagcctaaatgcctaaaaaataagcataaaccttaataaaaatcatttttcataaaatataacctaattgaaaatttttaaaattcaaaaatattctcaacgcttcacgcgaatcaagttgatccgcaagtttcacgcaataagagcacggatcaagttgacccacaataagagcacggatcaagttgatccgtattaatcctgcggatcaacttggttcgcgtgaagcttgcggtagaacttcattcgcattctacctgcggatcatctcacactaatgcggaccatctacattcacactatgcatacgcggatcaaccacacacatacagcatctatggagacgcaaatgacaagggagtggcttaccttgac

SEQ ID NO: 285685 - DNA, 408 bp, Glycine max
tcttgttcttattttataagccttatatttttatattttaaaaaacttataatgtaatacttaagtcctaaaatactcttattcaataagatggaaaggcatgtcaaatcgaataaacaaagggaaaagaaagcaacaaaaaaaaaagctaccatcaagatctaaatctccaaggagtaagaagctttttggatagcaaagcttaaaaagaagaagaaaaacaacattttcaaaagagaggaaaatagataaatccaacatgggttcaacaaactactctagcactagcctttggaacaatttcaagcaatacaaattccaaaggttatgtatgtcttggcctttgctatctttttccggcctttggatgaaacaagaatgaatggggggtccagattcacctttgaa

SEQ ID NO: 285686 - DNA, 172 bp, Glycine max
agcttcttgcgtagccgctcttggtgctcagaaaatcccaaaaacaaatccctcttattactagctattttgaattctttagctcttgaatgtacaaccttcaaattgttgctcgttcccctctttgagaatgaggaggattctcataggacttcatccaactgatgtttgt

SEQ ID NO: 285687 - DNA, 416 bp, Glycine max
agaggagtggaatccaatttatctaatctatgggcctagtcttgatttgatagatattctattaacaccatttaaatcccttggacccaatgacaggccataatttatttcagacagactataaagacatcatgcaactaaaataataatatataccaatgacttctttcatattgatgcataggaagatatcttaaatacaatgtttctcgccatatcttgatttacaattacaaacaatgctacagaatatggacaacataaaactaagttcctgaccaaacggcctaagcagatggcaatgataaacttatcagtatcatattcacactgtcagtgctatttcctattgcaattatgactcacatatacaacatactgcgcagatgacatgatataaccacccaaaaataatg

SEQ ID NO: 285688 - DNA, 376 bp, Glycine max
agctttatcctcatcgtccctcacagtctttagatttgggagccaatccaatccttgtgttcggactctcagccacttatgatagccgccgatgatcccattactgcttcccctaagctctctgtcctttcttcacgctgcatcccatgccttgcgaactccttggagtaccctcgcgttgtggtcactaaaaccccgtgcgatgaaaggcgtgatgctttcgtctaatggcgctcctctcatggggtagccaagctgtcttatggcgagaacaggattataattaatacaaccccttgttcccatcaagggaacatttggacatccttcgcatgaagatagaatcttgattctttcttccttctagcaagggaac

SEQ ID NO: 285689 - DNA, 418 bp, Glycine max
tgtccgcaaaaaattcactaaaaaggattttaaggtttgatacttcaatttttctcactaagtaaaatggatccttttaaggtccaacgccttaaaaggaccaccttccaagtaaaaagaatcgcttgattcaccctttagaaagaactacgtaggtctgatttcctcttcgatggagggtacgtacgagcaagagccccacttttgtcgacctcaaaaattaaaaagaaataaaagcttaggaacacaatttcacacaattctaatttaaggctgttatcctttgggataaacgtgagaggtgctaataccttcctcaaacgtaaatataactcccgaatctggaatattcttcatgaccggtttccttcggtttttctgacattttccacaaataaacgttggtgacgactccgcg

SEQ ID NO: 285690 - DNA, 402 bp, Glycine max
  unsure (1)..(402): unsure at all n locations
tgtcccaattgagccagcttattcctcttgntgatgcaccttttgatccccaccaaaataaattcagcatcatttaaatctcatcctctagtgtggttggaagcaagtggatactcatgcaatatgaagggatttcctaattagaagttccttattactagctttggaaagatactttctcgagtagtgattgatgcattccaaaatttgatcctttatacaactgaaaatttctttatttcatttgcctatgatagaagggaggcctaagcattttctagaccctatgattgtataggcacccaaaagaaacatgatagtttgcgtcaaatattgctgagtgttggtgctgaaaaaatattatgacttgtctaaatatatcatttggtccaaagcccttcc

SEQ ID NO: 285691 - DNA, 379 bp, Glycine max
agcttgttgtttgttgccaagatgtgtagcagcacctttttcggcgtgcagctagggctgagcgtctgagcatttgtttcccttgcgaccccatttcagtaacccttgttcattcaccaactctcatgcagaaatactactcaggcaaattttctctttatataactttattgatttatttaatttaagattaataatagtataaacttaagaaatgcatttaataatttcattttcttaaaacttattatgatggacctcgatctctagatcattttggcaaatttagtcaatcacgataattaaaactcaataactaagctccaaaaaaatattttcgttaccaatggcaatttttgtcactaatgttggcgtcact

SEQ ID NO: 285692 - DNA, 409 bp, Glycine max
tgacaaaaggcctacctcatgtggtatgcgtccaatgaagttgtttaaaccgaagctaacgcgagataaggaagaaaggtttccaatccaagttgggattgttcctgtaagattgttaagacctgcagctagcactcttagatttgtgcagtggctgagattacttggaaaactgccaccaaagttgtttatgctgaagtttaggtattgaaggtatagtaaacgaccaacctcttgaggaaattcaccatggaagctattgtttaacaagttgactgtggtgaggaatgtgaggtttcctatgaagggtgtaagagtgcctcctagtctcagttgctcaaggctaaggtgtgtgactcttccattggagatgttgcatgtgattcctatccaatcgcagtgattgatg

SEQ ID NO: 285693 - DNA, 562 bp, Glycine max
  unsure (1)..(562): unsure at all n locations
ctcatctacatcatgcntccgtctcnttgtgattaggtagttcgtctgttgtacatctgtatnacatatnttaatctacancaactcgagacgcgaangcgtgttgtcgtgancactataagcaaactcgagcctagcgtccgggggtactgtataggtactctgtggcttgtcggcttgttcttatttatcaatccacatgaaaggaagactgggttctatatgttatctcctaccgtgtgcctcgagatgagttgctatattaatggcgatgtgttgtccttccgcccacccataggaagatgaagcctcgtggttaggtttttcattaaaggttgacgcccctacagcttgacaagcagccatattctgcccaatatattttgctttacgaggagtcacgagcagctacactctgctattttgatcaccccaagaatggtggtgtttctaatacgaaaacatacccagcagtgcttattgtgttctgctcagaaaccattttagcttccagaaagagaaggttctatgggttcttcattaacctgcttatcacaccacg

SEQ ID NO: 285694 - DNA, 414 bp, Glycine max
tcttatccaaggctcatcttggtggtgaatctccttcttccatggcttattccctagtggatggcgcctcctctcacctcttctcctttgtcttccgctgcatctccatggtggaaaatcaccattaaaggacctcattgaagctcaaagatccagcctccacagaagccccacaagcaagtttccatcaataaacttcataagattttatcaatgtgatcataattatcataatatctacctagagagcaaagctcattcagaatggtgtggaagcgtccaaacatggtttagatatcttctccttcttccatactaaagagttcatacttatgtgtcagaagactcaacttgttatgctttaccttggaggacccttcgtaggtaatggctaaggtttcccacatctgtttg

SEQ ID NO: 285695 - DNA, 509 bp, Glycine max
  unsure (1)..(509): unsure at all n locations
tcccaacgcatgcaccatgttacagggttcaaatattatgtgcntattattatacccgacggcgagatgatctttattcttcttggaaacaactcgttccgggatcctatgatcgactgcgagctgcagattataccttctttttctccaaaaatataatcgagacgggacaccctctgacacaagtaaaagaccatccccagcagaaagagagccagaccgactcacagacccaccgaaccccggacaataataataaaaaccactgcgcgagctatatacaagcaagctcccacacaaagactttcctccctttccgatggcatactccgagctatgacccttcttactaggagaaacatttactggcgggcatacctgcagaaggtattccagacacccctccccatagtactatgaatccagagccaaaagcgtgctatcatagaggaggtgcccgacacaatatttgaccctacctccctccacacgattaggtgaggccctcg

SEQ ID NO: 285696 - DNA, 420 bp, Glycine max
tagccgaattcagatcgaattgaagttagcttagcttatccttggccagcttagcggaccaaatcagcctcagatgcaagggttgggtgctaagcgcatgaacagagatgcacttagagcgaggcttgcgcttagcgaaaggactacttttcaaaaaaaagttttctgagttatttttcagtccttttttctaagaaattgaaacccttatgttaaacattcaaagaaaggctgatatactcctatgtacagatcatatagcaagttccaaatgattaaatgcatgaaaaaacaaagataacatacattaaaactgggttgcctcccaggaagagcttctttaacgtcattagcttgacgcatagcttaataccttcaatgtggcatgaaagtcacaaagaacacatcttccttgaagtt

SEQ ID NO: 285697 - DNA, 384 bp, Glycine max
agcttgttatgaacatccattttgtaagcagagaaaagaacgtttccacaaacaataccgaaagatagacatgttattgagggcttttgtgcaaatacaaggaaaaatgcaattaccatcttgctcctcttagcctcttcatcgatgtcattaccatcatcaccaatagctttcctggaaaagtacatggcatttataaatgtcagtacatcaataacaatatgcatatcatgagagtgaaacaacaaaacaaacagatactggacttcaaaccttctttttgtaatgacccgatcatcatgaccagcctcagcatggccatggccatggccgaattcaggaaccctgctaacaacgttcctcagaaagtcaaagacattatag

SEQ ID NO: 285698 - DNA, 422 bp, Glycine max
tagaatacctgctgccaattcagttcccaagtctaattacaatttcatttccattaaatctgtattgtcttgtaataaagaagtcattgatatttggcatttccgtttgggtcatccttcatatgataggatgcaagtgttgaaacaaacttatcctatgttgacttgtgataaaacctttgtttgtgatacttgccataaagcaaaacagagaaaacttccatttcccaatagtgactcctatgcttctagtcctttctctttgatacatgtagatatttggggtccttgtaccacaactactttgaatggacataagtattttcttacaattatggatgatcatactacgattgtttggagttttataatgacttcaaaagctcagactcaaactcatttacaagcctttgtttcctatg

SEQ ID NO: 285699 - DNA, 386 bp, Glycine max
  unsure (1)..(386): unsure at all n locations
agcttgttngattatggggtacccatcacatgtggtactatgtggcggtcgggcgatggtgcacaacaagttttccacattcacaaatcgcgcataaacccaccatcccctattgcccacctccaactgagctcacgtactcccacgtagcccatatcctcgtttctctcaacaccgggtccccatcaatcctcccaagcttccccaacatccaggtaatacaacattcaaacagcacaaactatcacagccaataaaacagggcaaaggcagaaaactctgcccaaaacaccaaccaaaatcacaacttttctcacttatagaccccagtaacaattccttcgttccagttcgttaaccgatggatcgactcgaagattttactg

SEQ ID NO: 285700 - DNA, 428 bp, Glycine max
ctcagcttctcaaggaagttttctcaagaaatcttctcaaggattctacctagtctataaatagaagcatgtgtaacacttgttgtaactttgatgaatgagagtcttgtgagacacaactcaaagttcaacttctctccctttttcttccttcaatttcgtgctcccccctccctctttctctccctctttcttttcctccattgaagcatcttctccaagcttcttatccaaggctcatcttggtggtgaagctccttcttccatggcttattccttaacggatggcgcctcctctcacctcctttcctttgtcttccgctgcatctccatggtggaaaatcaccattaaaggaccccattgaagctcaaagatacagcctccatagaagccccacaagcaagcttccatcaagtggtaatcagag

SEQ ID NO: 285701 - DNA, 382 bp, Glycine max
agcttctggatgaataatccacatctgcacatgaacgtcattgtcaaaacgagatccagggccaataataagactccgtgaatgaaggataattacaaaactttcctgtttattatctttggttgtgtgaattctagtgaggtctatagcttgaaattaagttattttcattggaccaacaaaagagcgagagacatggaagaccctcgtatgattaaagacaagtcactctaccaatgtgcattgggaaactgttatgatctgtacttgcataaagacaaatagcttgccataaacatttgatatgggtagccttatcatggaggtattggccgtagccatattgatagtgacatcatccaccgtcctaacctaaatgcaa

SEQ ID NO: 285702 - DNA, 413 bp, Glycine max
tatattaattaaatataaagcaaaatcattttgttaattgggatttatattccaaagtttgaaaatggaaatctttctatatggagaggggaaattcggtctcagagtttggagcaaactttctaagtaataatttcacggattcatatgaaagtactaataatttcacggagtaagacgtaagattggcaatcccaaaaagccatataattgactactaattactcatcatatagcttttgaattaagtttgcagaatttattatgttgactagttaaggtgatgaaatttcgaactaactatagtgatagtactatcttgcttctccataattcacaaagaccagcataaccaactctttgacggttgacttgagtttaaaagttctataaagaaaaaatggagattgaat

SEQ ID NO: 285703 - DNA, 257 bp, Glycine max
tgtagcaaatgcaaacggcgataacgttttatctctttgttcgattgagtcacgtaatacatcgaaacgctcgaaattgaaaacagaagctctgtgcaaattctgacgacaatacattttaactcggatgtccgattgagtcccgtaatatatcatgacactcgaaattgagaataaaagctctgaacaaattcaaacgacaataactttgtactcggatgtccgattgagtccaccaatatgtctagacactctta

SEQ ID NO: 285704 - DNA, 414 bp, Glycine max
tcttttggaccttgaacaggcaactaactcctctttcaaaaccatgctatgtgctcgcgactggtccctttcttcctttcgcaacttgagttcactattgctaccccatagagctccgcgaaatttgttccggccatactcttccttgcgagccctcttggtctcttgttcaagggctcttgcggtaattgcattctcttcccgtaacccggcacactccttccgaacgtgtgtagcggccaacttgaacttctccttggcaagttttgcctttcctaactcgcttttgagagcttggacttcttcgtcctcttccggtgcttcaaaactctctttgctgacgacttttaacttggcgagccaatctaaacctcgtatatgaactttcagccattcgtggtacccaccaatgat

SEQ ID NO: 285705 - DNA, 381 bp, Glycine max
tatcttccagcaccagcgatttcaacctagaaatcaagagtagtgtttatgttgcttaaggcttggatagttacaatttgtgtttgcttatgctcaattatcttgaataacacaattccagagagcttaagacttattttgattcacaaatccagccacaactcagcaccacaactcaacttcatcataggcatcatgtatgaaacttagaaaacaaaaaaaagttcaagaacaagactacttctaggaattgatttagaacatgttatgaactatataacatgcatgaattagactcaaaattcaaaagataggctaagaatgacaagaatacatgaacaaatgtatctagaattcaatcaactaaataaaattcaacac

SEQ ID NO: 285706 - DNA, 393 bp, Glycine max
tcctccagaatcgtggtgtgattggccgtcatgggtttgtaacgatcgtacttggaccctttggggagaggttggcgcttgtctgacttgtgcctcttgtctgacttgtgcaagtcgcccttggtgtttcctttgcgctttacgtgcttctatccggcttggtggacttctttcggaatctagacatttcttccatctggacgtagcccttaggttgttcacgcagctcgtgcatgctactggtgcacaaactgtttgcaaacttgccggggcgtaaggcgaggagcatggaatgcaatgctacctcatggttaagatttcgaatctagacagctgtgcgctcaaatttgtccatgagttttctgagggactcatcatctgcttgtcgtagac

SEQ ID NO: 285707 - DNA, 377 bp, Glycine max
tgcttggtatgaaaagttaagttcttttttaactgaaaatagttttatatgaaggaaagtagatactactttgtttcacaaagattatggaaccctaaaccctaatcatctagatatatatggatgatatcatattcggttgtactattgactctctgcgaaaggatttttccaagtttatgcaggccgagatcgaaatgagtgtgatgggagaattgaagtttttccttggacttcaaatcaaacaagcagacgaaggcatatgcatacatcatacaaagtacgtgaaggaactcttgaaaaaattttagatggacgatgcaatatatatgaaaactctcatacatccgaccactatacttagactagatgatgat

SEQ ID NO: 285708 - DNA, 406 bp, Glycine max
ttgtgtaatcgattacacttattgggtaatcgattactcagcgactgtttctgaaaaaatcagaagatgtaacccttcataaggttcttgactttttcaaattggatttaagtttttctaaaagatataactcctctaaatggtcttcttgaccagacatgaagagtctataaaagcaaggctttgatttgctttccaagacactttttacattcattcactcaatcctttacaagtcttgactctctttgaacatcttcttctgttgtgaaccaaaagctttctgaagtattctggattttcaaaccttgaaaactcgtgctatacatctattcattctatttacgctttgccacaaagaatgcgccatagactaaccgcctgaattctttttgtgtgtttctta

SEQ ID NO: 285709 - DNA, 381 bp, Glycine max
agcttgtaccaaaaacaaaatatttttttaaaaaatattacatgacaatgaaatcgctatataagatactacaaagatcacattttaaaaaaaattcatatttaaatacccatttttggcgttttttttttcgtgggtgtggcagtgccgtgagacaatggagggtggccatttctcatgtttggacgtcaaagaacccaaaaacattattcccgttctccggttctgtcaaataacagctaaaaacaaagccagaaaatccaaaaaaaataggaaagtgaccttttttcatgttcaagtacccatgtttgggaattttttccgtaggtgtggcagtgccgtgagacaatggagggcggccatttctcatgtttggacgtc

SEQ ID NO: 285710 - DNA, 415 bp, Glycine max
cttctggtgggacatcttgacttgctttccaatctgacattcaccacttattctgccttcttctattttcagattgggaatgcctctaacagcacctttgtcaatgattttcttcatgcctcttaagtgcagatgtccaaatctttgatgccatattttgacttcatcttctttggagaatagacatgtggaggagtaactggtttcttgaggggtccataggtaacagttgtcctttgatctgctgcccttcattaagacttcactcttctcatttgtcaccaagcattctgactttgtgaagcttacattgaatccttcatcacacaactgactgatgctgatcaagctcgcagacagtcccttcaccagcagtactttgttcagactaagaagtccctcatggactatcttt

SEQ ID NO: 285711 - DNA, 351 bp, Glycine max
agcttcatacaaataagagaaaaaatgtttttggtgaaagaaaatggaaaaagatgagggagaatgtcttctccagtctctctaccctatttctctctgtttttcaagtagcaaatgcttggccagattgtggatgtggtggtgactgtggtgaccttttgttttttgccaatctcagtgttgtaaaggctcttatacttctcagcacacgaaggctcgctcatcgaacatgtctcattgagtaagggtaagtgaaaatacactaagcgagctcgggcgcgctaagcgcgaaaagagacaacgtcctcattgggcgggctggctggatgctgagtgcgcagatctctaact

SEQ ID NO: 285712 - DNA, 411 bp, Glycine max
taattcaagtagaatccattaaaacaaaaatgtaaaacattagaggtcacatttaactatatgtaacattaacatcttctaggaactttcgtgcttgttcgccttccacaacactttcattgatgacagcagaagcaatatcactatctcctacataattaaatgtaaagaaaattaatagaaataatcctaaatataataaataaaatgttatctgacaaacacaatgatttaaaaggaagacaataattagaaaatagtgtcatgtgaggaagctccaaaccactgatatgtggaaaatatagcataaattttaaaaacttgacatataaaaatacaccatgagctaggaagccttgaaccactgatatgtggaaaatataaagtatccatgtacatattgcatcaaat

SEQ ID NO: 285713 - DNA, 376 bp, Glycine max
agcttaacaaccctaaattctgattgtaatttacatttagcaacagtcaaaatcacttgacgttcaatttatacactttagatgcgtcttgattataacgaatgtcttcacaatactagctagatggattattgtgatatcgtgatgtgttttttaagaatttttttaattcttaattttattggtactaatatgtagaaccatgcaatacatgagaaattagtgtttaatttttattattattttaattaatatgtaatataagcattttttattcttttctctttcaagtcaattttaaaaattatttaatgtaaagaaaaatgagcatgattttagaaaaagggagagaaaagaaaataatagcaaagaaatt

SEQ ID NO: 285714 - DNA, 412 bp, Glycine max
tccaccctgcctgtggcatggcaacaagcacatggttcactaatcatgaatgtcacgcttggtcgaacctgtcaaacattggtaaagcatcggtaattcattttaataaatcttactaaacttaactgagtgttgtgccaacaattatcagagggaaagcaacttgaaaaagaaaaatgtagttcaagcattattcttttcaatctatagccattttagcatgtctgagttcagtgagttgaatcaagttgaaagatggtgatcagtaaatttggcatactatttgagaagttatacttgaataaaaccaatggaaagttatatacaaaagaaaaagggggaaggtcgcttgatgtttcatatgaaacacatctttcttttccacacttgtctctgataatgggataacaaa

SEQ ID NO: 285715 - DNA, 382 bp, Glycine max
  unsure (1)..(382): unsure at all n locations
cagcttcattaatagacttcctccagaagcttcattaagaggcttctaacacactcccaacatcttttcaaagatcccaaccgtcatatcatggaaaattgtctttggaagttgcaatccaaatttcgagaagatccaacggttaacgaaggctggacagagtttttaccgagacaacttcatgtagctntctctataagcttcattaagaggcttcctccagaagctttctcgtggcttctttgagaagctatctcaagaggattctttgagaagctagatccttatctatccacacccctctattaactaaattaacttccttaaaaataattacggatgaaaataatgtaacanataatcaaacatcaaacataattac

SEQ ID NO: 285716 - DNA, 418 bp, Glycine max
  unsure (1)..(418): unsure at all n locations
aagcgcgggtctgggggacgaaggtcaagtggtcgcgatatacgaagatgatgttccgagtacattggatttggtacgaccatgccctcttgatttccagctgggaaattggcgagtggaggaacgccccggcatttacgaaacgagcataatgtaaacctttacggttttaaaagctctatagttgggcctaggctttagagttttttcttttgttaaggctttgtgtcttttgtttttgaatttataatacaaggatctttcttcatctgttcctacgtctctacccattctcatccatttgcatgtttacttctttatttctgaaacggcagatccgatgacgagtcccccgaaggtactaatacctgtgacccgcctatcaacttcgagcaagaaacgaatcanacggaagatg

SEQ ID NO: 285717 - DNA, 421 bp, Glycine max
ctaccaagttatcttgagcccttcttcatcaagcataggtatttaacctccattttcaactctaagcttgattttcatttcattttcttgctctattctcacatgtagtttctaaatcttatttttgcactcttgaaggttggaaacttgaatctaaactccgccattcttccctctaaatttcatggagactacaagaggtagggaggggtctccatctcttgaaccctatgtttgatgttaaacttccttgaacatgttgctgtcttgaaattcttgtgcttgcttccctattatggatctatgtgttgagctattttacttgagttttttaagccaaaaatgagttctatgaatgttagaacctaaggttagccttatatttcacttaaattggattttcttgcaaaagttatgaata

SEQ ID NO: 285718 - DNA, 381 bp, Glycine max
agcttgtaatcgattaacgtaattgtgtaatcgattaccagacataaaaaattcaaatttcaagtctaaagagtcacaaatcttcagaaactaactgtgtaatcgattaccacttttatgtaattgattaccagtaaggaatttttgaaaataacttccaagagtcacaactgttcaagaaatttgttatgaccatctaaggcctataaataggtgatttgggatacaaaattttttagagtgtttctgaacaaaattgtcttatcctctcaaaaccaaattgtcttatcactctcaaaatattccttggccaaacacttgcaaattcaataaggaatcttgagggagcttcacattgtaatatccttctcttaaagagag

SEQ ID NO: 285719 - DNA, 422 bp, Glycine max
tgtcccaattgagccagtttattcctcttgttgatgcaccttttgatccccaccaaaataaattcagcatcatttaaatctcatcctctagtgtggttggaagcaagtggatactcatgcaatatgaagggatttcctaattagaagttccttattactagctttggaaagatactttctcgagtagtgattgatgcattccaaaatttgatcctttagacaactgaaaatttctttatttcatttgcctatgatagaagggaggcctaagtattttctagaccctatgattgtagaggcacccaaaagaaacatgattgtttgcgtcaaatattgttgagtgttggtgctgaaaaaattttatgacttgtctaaattaatcatttggtcaaaagcccttccataggtatctaggaattgag

SEQ ID NO: 285720 - DNA, 382 bp, Glycine max
agctttcatccgttcttcgacgctcttcattcgttcttcatcgttcttcgatcttcaacgggtaagtacctcgaaccaagcttttcgattcattctatgcacccgtagtggtccacattgtgttccgtgcatttttattctcgttttgtttactttttataccccctgttgacgtgcttaagccattttacttaagtcatttctcgcttaacttaaaaataaaataagtttccaccgaacatttgaattgcattatccgttaacttcggttaaaatcaattccgaccgttcggtcgtgccgtaaccacgttggaaatcaaaaagaggtagaaaataatataataatcaaaaagacatcttttagtgaaataaagcggacaat

SEQ ID NO: 285721 - DNA, 420 bp, Glycine max
tttgttttcaattacgagcgtcctgatatattacggtatcttttcggacatccgagtcaaaagtgattgtcgttagaatttgctcagagcttctgtcttcaattacgagcgtctccatgtattacgggactcaatcggacatccgagtaaaaagatattgtcgtttgattcttctcagagcttcaattttcaattacgagagtctcgatatactacgggacacaatcggacatccgagtcagaagttattgtcgtttgaattggctcagagcttctgttttcaattacgagcatctcgatttaatacgggacacaatcggacatccgagtcaaaagttattgtccgttggatttgctcagagcttctgttttcaattacgagcgtctcgatatattaccggactcaatcggacatccgag

SEQ ID NO: 285722 - DNA, 374 bp, Glycine max
agcttgcctgaaactatatgagatccctttgtcgttgccttccaacgagggtgaagcttaaggagaacccaatctcctatctggtagttcacttcacgacgtttcccatcagcttggcttttcatagcagcttgttccttagaagcttatttcgaatagcttggaaagtgttatccctatcagttaacatctcttcaacggcctcaatgttcgaagaccctgtaatatattcaggaaagttaaagggttttcggccaaaggtgacaccatacggattggctccagttcccgcattccatgaagtattatgggaccattcgacccacgggaggagcttcccccccatgcttggccgacgatggatgaaggctcgc

SEQ ID NO: 285723 - DNA, 422 bp, Glycine max
  unsure (1)..(422): unsure at all n locations
tctaaactntatacaagaacgaagctctgataccacttgttagacaagtggcctcagatatcttaattagggggggtcgaattaagatattgcaaactatttccccaattaaaaatctatttcaatttcaatgcaagttacaagttcccttaaaatgaactcttaaataatgattcaaatagaacaatctgaatataaatgtaaagcaataataaataaaagagtttaagggaagagaaagtgcaaactcatatttatactggttcgaccacacccttgtgcctacgtccagtccccaagcaacccgcttgagagtttcactatcttgtaaaatccctttacaagttctgagcacacaaggacaatccttcctttgtgttcatatttttttacaacaagagaccctcggtctctcaatccct

SEQ ID NO: 285724 - DNA, 362 bp, Glycine max
tgcttccattttcaattacaagcgactcgagatattacgggactcaatcggacattcgagtaaaaagtcattgttatttgaatatgttcacagctactgtattcaattttgagcgtcatgatatattttgggactcaatcggacatccgtgctaaaagttattgtcgattgcatttgctacgaggcttcgttttcaattacgagcgtctcgagatattacgaaactcaatccaacctccgagctaaaagttattgccgatggcatttgctacaagcttgcgttatcaattacgagcgcctctatatattacgggacttaatccgacctccgagataaaagttattgtcatttgaaattgcta

SEQ ID NO: 285725 - DNA, 417 bp, Glycine max
tcattgcctaacaagccaacttacaacagcaagccttatgagactcagcataaggatgcacagaccaaagttgcgtatgtaaaaaaattgtatgaccaagtgaaggtgcaaattgcaaagaagaatgaaagctatgccaagcaagcccaaaagaaaaggaaggaagtggtacttgaacccggtgatgatcttggacatttgaggacaaatgttttccaagaaggagggaatgatgagaatcatgaaacaggccaaatacagtctaaaggcccaagtggagaaggacgaaggcccaagtggagaaggacaaagcccccgagtggagaaggatgaaggcccaagtggagaaggatgaatgcccagaggcagagacactatcaagactattaattgatgctgaaggccaagattaatttg

SEQ ID NO: 285726 - DNA, 379 bp, Glycine max
tttcttgcactgcaagtctcttagatcttgtagaaaagctagattgtaacggaatctaattgggaatgaaaacataatttcagatgcaagaagctaaaacaccaaatgagaacagtccaactctagatatctagcaaatcattcacatgatcatcatagctattattttccatacaatctttatcttcatcaatatccatggcagtttctctagattccatcaagttcattatcaaattaagtttcttcaagttatctagaggggcaccaacaacaacactaacatcctttcctacttgaaccaagtttcattcggagtatccaaatccaaaccaaagttatatgaaattccatcattattcctaatctaatcatcata

SEQ ID NO: 285727 - DNA, 417 bp, Glycine max
  unsure (1)..(417): unsure at all n locations
ntaatatatcaacagactatgatataatatataagactccatggacttagtttaaaaattattagtatgtataattaattaaatagtaaataattaatgtatttgatatgcaagatggttgttatactgttagttttttctttttttgaaacaaagagactttattacccccttcaaatactagtcaataatacaagtaggatgtgtctcaaaatcttgaaagctagtgtaacttctagaagcccgagctaataagtgagctattagatttgtttgccttggagtgaagcaaactttgtaaagcagtgaggatttcaacaaggatttaccgtgccttattatttctccaaacccggagctatctatatgctccttattgacactattcgatattctttggcagttcacttcaatttc

SEQ ID NO: 285728 - DNA, 379 bp, Glycine max
tgctttgcttttgctctcctacagattgagataaatgaagaaaaattcaaagcttcccttcaccgatccgaatgactgagatgaatgaagaaaagtccaaagcttcctttttcctcgccaacaaactgagatgacggaagaaaagagtttagtccaaaccttccatgttcctctcccacaaactgagaaatattgtagcatgggagttgttgcgactggtttagacaatcttaatgttggattttaaataacctctccccttgtaaaataaaagaaataaattatagatttccatatgctacgctgatgaaattcactcaacctttcatcctttcgtaatccataataaacccaagaaacaaattataaattagagaaa

SEQ ID NO: 285729 - DNA, 418 bp, Glycine max
  unsure (1)..(418): unsure at all n locations
tgcctcacagaggtccaggaaggataaggcggccgatggaactagttctgctcctgagtatgacagtcaccgctttaggagcgctgtacaccagcagcgcttcgaggccatcaagggatggccatttctccgggagcgacgcgtccagctcaagacgttaaagaagcgctactaggaggcaacctagtaccttttgaatctatgcttgttatttgatcactttttatagtaggacgcacctagttgctcatgatcctgggaatttaaataaaacaagcgcaagctcgaaaggtagtcatacctcacaaaatatatatatgtatgtttaggtagtgaaaataccttagatatgcatgtatgtaaacaaaaaaacacttcacaaaatatatatatatgtatgtntaggtagaaagatacc

SEQ ID NO: 285730 - DNA, 329 bp, Glycine max
agcttgggtttaaactctctgtagttgctctattgttgttcttcagattaaaccaatgaggaaggtgaaactgacgacgaaggtgctttgagttttttttttcctttctttcttttcatttgttcttgtttgattttatgtgttggggtttgatttcgacgatgcgatgtgttaggattgctgacgttggtttttattttgttccgacgaggaaggtgaaactgatgacgaagttgtgctgaggtttattttggtttttccttttgttcttttcgattgttcttgtttgatgttatgtgtggggatttgacttcgctggtgcagtgtgt

SEQ ID NO: 285731 - DNA, 406 bp, Glycine max
  unsure (1)..(406): unsure at all n locations
tccatcaggaagggtcgtccctgtgtggttcagactttgtaaaaggagttttacaaagagagtggaaaatttcaagtgggttgcttgaggactggacgtagacacgggaagtggccgaaccagtataaatcaagtttgcattccttctttccttaaacttcttttatttattgctatttatcttttgctttaaagaagtttattttgaattgtcttttgagtaattcatgttaagggtgcattgttaatccaaaaagagagagtgaaagtttaattggggaatagtctttgtattttaattcaaccccccaccccttcttaagataactgaggccatttgtccaacatcctattcttgataactcacttctctctaanaagacaaactttccggaatgataaaatg

SEQ ID NO: 285732 - DNA, 377 bp, Glycine max
agcttatctgctgttaccaaccaatggccaggagcatcatgtgggcctcgcacgacctcagctgtctccacgtatttaagtagtttaccggcgcgaactggcacaggaggaccatctggataaactccagagttaagtgcagttggagcctgttttggaggaccggtggtgccatgctgagtgaacgaaaatgttgtgctcaaatttgtgagaaaagattttcttgaagcctctggtgcagcagtccactctgacttccggatactgcaattgggtatatgagtaaagagaagccgtagatgaagcacattccttggccagctccctttgctaaggagttgtgcacctgttacaatatatacacctgcagaattaat

SEQ ID NO: 285733 - DNA, 417 bp, Glycine max
ctataaggaacatgctggagaggaattgaagttggtgtgcttccagaagtgatgccacgccaactgaataggccactatgtgatttcatatctagttaaacacctcacataaggatctaagcatcagttcactacttcagtctgcccatctattagaggacaataagcagtgctaatcttcaagagggtacctggtctctggaacacttccttgcaccagagactcatgaaaagactgtcgatgccagatactactgatgcaagataaccatgcacactcaccacttctttaatgaataactcagctactccctcagttgtataagggtgactccatgccaaaaaatgagctcacttagtcagcctatccactaccactgatatagtagccttccctagagctactggtaagccttc

SEQ ID NO: 285734 - DNA, 378 bp, Glycine max
agcttccatcaagtggtaatcataaacaagagctgcaagtaggtgctccttaaacctccattaattttttgttttaccttctcttccattgttttttcttcatttttctacatgtatctcctcaaatttcttgtgctaagtgtttttaacatgattctttagagtttccaccgattaaacttggtatagaagctagatttgattttctatggttcaaatttcttgatcttgttcttgaaccatgaattgtgttgagtttaggttcctttgagttttgtcttgttatttttttgtggatgaatcctaaactataaaattcttacaaaaatattaaagtataagaaaacctcaaaaaaatctatagtgatttgttcacct

SEQ ID NO: 285735 - DNA, 410 bp, Glycine max
  unsure (1)..(410): unsure at all n locations
tctcaagcaagcttccgtcatgtggtattaaaagcataagagcttcaagtaggtgctccttaaacctccattaattttcaaatttaccttctcctacaatgttgtttcttcatttttgtacatgtatttccttgcatgtcttgtgctaaatgttgttaacatgattctttagaatttccaccgattaaaattgctatagaagctagatttgatttcctatggttcaaatttcttgttcttgttcttgaaccatgaattgtgttgagtttaggttcctttgagttttgtcttgctattttttgtggctgaaacttaaatcataaaattcttacaaaaaaattgaagtagaagaaaacctcaaaagtctagagtgacatgttcacctattgtagttntgtcatagaagtcat

SEQ ID NO: 285736 - DNA, 388 bp, Glycine max
agcttgtctgcctttccaacatcaagaaccaatgcttccactatagagccactctccaaaatagttccagccactatggaatcatatcaaaatgagaattggtacttgcacttgataagaaccatccaaacatattagttaataactaaataccatgtgggaaggagaaaaattacactgataattggcaataaaaccaaaaacatcattataatgttcaaagcttataacaagtccaacatcctcaacagccttaactttgccttttgcaaccataccaatgttaaatccttcatcccactttgtatcagatgcaccagagccacagtattccaaccttgcaatctaattcaaagatgcacacaagataagaagtaatagaaaaggg

SEQ ID NO: 285737 - DNA, 424 bp, Glycine max
  unsure (1)..(424): unsure at all n locations
ntataaggagacattttggtagagatattgaagttggtattaatccagaattcagcccaggccaagtagttaggccactattttagtttagttctagttaaacacctcaaataaggttctaagcatcagttcactacttcagtctgcccatctatttgaggacaataggcagtgctcatcttcaattgggttcctggtctcttgaacaattccttccaaaagagactcatgaaaagtctgtctctgtcagatactattgatgcaggaaaaccatgcagtctcaccacttctttaatgaataactcagctacttccttagttgtataagggtgacttaatgccaaaaaatgagcttacttagtcagcctatccactaccactaatatagtgtccttcccttgagcttttggtaagcctccaatga

SEQ ID NO: 285738 - DNA, 383 bp, Glycine max
agcttgttccatttggtccattgctgagaagttatggtgatacaattgcaactgcaaaaacaatcggacaatattgggaagaagatctatcctgcatgagttggcttgatcaacaacctcatggttctgtcttgtatgttgcctttggtagtttcactcattttgaccaaaaccaattcaatgaactagctcttggacttgacctcaccaatagaccttttctttgggttgtgcatcaagacaataagagggtataccctaatgaattcttggcgtgtaaaggtaagattgtgagttgggctcctcaacaaaaggtgctaagccaccctgctatagcatgttttgtcacccattgtggttggggacatgctacgtgcacccag

SEQ ID NO: 285739 - DNA, 422 bp, Glycine max
  unsure (1)..(422): unsure at all n locations
ntgcagtagatgccactctactctaaatttttgaaagatatgttaacaaggaagcacaaatatattcatcaggaaaacatcatagtggaaggaaattgcagtgttgtgatccagaaaatccttccacccaagcataaagatcctgggagtgtaacaattccttgttcaattggagaagtcaatgtgggaaaagctcttattgacctaggagccaacatcaatttgatgccactctccatgtgttgaagattgggagagttggaaataatgcccactcgaatgactttacaattagctgaccgctccattaccaggccatatagagtaattgaagatgttttggtcagagtaaaatattttatcttcccagcagactttgtggtaatggatatctctgaagatactgacatccctgtaatatt

SEQ ID NO: 285740 - DNA, 384 bp, Glycine max
  unsure (1)..(384): unsure at all n locations
agcttggttcgaggtacttacccgttgaagatcgaagaacgatgaagaacgaatgaagaacggttgaaacctttgcgagattcctcacggaaaacgttacggaaacgtttcggaagtgcctcggcttagattttcttcacggaaacaatttttccaagcaaattcgaaggagagagaagtgcctaaggggctggacccctttcttcttcatttcctcccctatttatagcaaaataggggaggtggttgccgcccagctcgcccaggcgagctcagctcgcccaggcgagcagggttgcttcctccagaagcaaccgccttctggaggaatattccagagggcccaagtgggcctgggtgctatttgcacccccattnttacta

SEQ ID NO: 285741 - DNA, 419 bp, Glycine max
  unsure (1)..(419): unsure at all n locations
tggttcgaggtacttacccgttgaagatcgaagaactatgattaacgaatgaagaacgtcgaagaacggttgaaacctttgcgagattcctcacgaaaaacgttacggaaacgattcggaagcgcctcggcttagattttcttcacggaaacaatttttccaagcaaattcgaaagagagaaaagtgcctaaggggctggaccttttttcttcttgcattcctcccctatttatagcaaaataggggaggtggttgccgcccagctcgcccaggcgagctcagctcgcccaggcgagcagggttgcttcctccagaagcaaccgccttctggaggaatcttctggagggcccaaatgggcctgggtgctatntgcacccccatttttactaagtacacccccctctgctgttttttttg

SEQ ID NO: 285742 - DNA, 386 bp, Glycine max
agcttctttagtagcgtatattattacttacaaaatgatttatcaaagaatcactaataaaaattgaaattgatgtttgattcttctagtccaaaaattagaacttgggactattttccaattaattgtcggactggctcctccgactttaagtcaataaacagaatacattatcgttttatattaagtaggtaaattttaaggatgaaaatcgaacttgaattgaactaatattcttaaagattaattacaacgaatgaagtttttatatgtcaaatgagtttcagttcagatctaaataaaagagtctgcaagatttttaactttttaatttgaattacacacacatcatttataactcattccaaactcaacattacacacat

SEQ ID NO: 285743 - DNA, 423 bp, Glycine max
tgcttaatcaatactatgatagattgatgatggctaaccaagttatcctactatggtagtatgtgctttaacacaatgttaggaaatccaaaattgaccatattgcctacaagcttttgatcaagtaaccccaatgactaagatggaaatgtattgtgattagtgattacacccttaattaacttaatagtttattagtttattttattcccatgcaataattcatttttagaactacgatgttggggtcttattttctaaagtggtctagccttaaataactgaattttagacctttgctcatataccattaattcattactatttaaagttcatatgattttatctatttaaatgtgatatttatgttactcttatatttatattgttgactggttgatcaaggcattatatatcatgatt

SEQ ID NO: 285744 - DNA, 378 bp, Glycine max
  unsure (1)..(378): unsure at all n locations
agcttctcaatcctttttcctattttttttcctgtcttttttgttgggttgtatgtaacaaaaactattatttgtgattatatatttatatatttattgcaatgtgttatctaatatatctaatgtaaaggagtagtatatggagaaaagatgtagatttgaccgctatgagagagagaaaacaaataaaaaactctctctggtattttttgattattataaagatttgggacttgaaaaaaaatctaaacacaaaataacatgtagatttgattgctttgagagagagaataaaataacaaactctttctatacccaacgatagaagactagactaggaaagttacacagtanagcaaaacattcttagagagaacg

SEQ ID NO: 285745 - DNA, 406 bp, Glycine max
tgattcatgattcaattcatgtatctttccattaacaaccgaaatatcactaccaccaacagctctcttgatggagcttgggtatttcattaactgaccaataccaaaaccagaatttattttaacaccagagtctttagcaaagttcacccctttatcattgttcaaacatttattggtccttatgcccgaattggttgattgtcttcctgtgtggccgtaatcagaatacagtttcttgggcatgatagggctgccatcattccacaaattttcactagtttttgtctttcccccatattgattatcaaattgcagaaatggtgaaaaggataaacccttggccacatttttagtttctgatctagctctagcagaagcattaaccacagcagacatatatttc

SEQ ID NO: 285746 - DNA, 387 bp, Glycine max
tatcttatgctataaacatttataatagaccccctcaacaacaaaaccaacgacaacagaataattatgatctttcaagcaatagatacaatccaggttggagaaatcatccaaatctgagatgggcaagtccttcacatactacaacatcctgcccctactttgcaaaatgttgttggtccaagcaagccatatgttcctcctccaatacagcaacaacaacaacagtagcagcagtcacaacaaagacaacaagcaacgaggctcctcctcaaccttccttataagagttagtgaggctaatgaccatccagaatatgcaattttagcaagagacaagatcctccattcatagtttgacagatcacatggtgcagatggctactt

SEQ ID NO: 285747 - DNA, 417 bp, Glycine max
tgccatgtcgtcgtcgttctgacctaaacctcttcttggcttgtacccaagcctcaacattacacgggctaccatcaatgcagcactggatgaacggggttacactgggggagactcgatgtcgcaacctacccttcagcgggagggcgacgcgagactcacgggtgcatcttccaaggaaggaaaacacgcggagttgccaccaacgtttattcgaggaaaacgtcggaaaaaaccagaaaaggcgtggtctacgaactttaagtgtgaaaggttcgggagttgtatttatgcacggtgaaggtactagcaccccacgcgtacgtcacaaggtacgacagcctttaatcaagtgtgcaaatatgacttcaatttggtttatttcccctttttaggcttttatgtcttcttatgctt

SEQ ID NO: 285748 - DNA, 373 bp, Glycine max
agcttgttgattatggggtatccatcacatgtggtactatgtggcggtcgggtgatggtgcaagacaattctccacatccacaaatcacacataaacccaccatcccctgttgtccacctccaactgagctcctgtactcccacgtagcccttatcctcgttcctctcaacgccgggtccccatcaatcctctcaagcttccacaatatccaagtaattcatcatccaatcgtcatgaactaacacagccaagaaaacagggcagaggcagaaaactctgcccaaaacacaaaccaaaatcacagctttccttacttaaagaccccagtaacatttccttcgttccaattcgttcaccgttggatcgactcga

SEQ ID NO: 285749 - DNA, 422 bp, Glycine max
  unsure (1)..(422): unsure at all n locations
tggaattgcatttgggcacctattttgaatctcctatgctgtccctatatacataaaacagtcccacaatcccatttttacaaaatcacattcacaccccattggggcatttcaccgagcacttggtgggcgcacgtttggtcataaattgcaagagaatgggggcaatgtggcaggccccattgcttcagcatacaacataggcctaaggccttctcacacaaatcctcaactcaacaaaacaagcataaaaacaacccaaaactgccccacaaatataagtacgttctcacaatttagagcaccaaaagatgaagaaaatacaccaatgggaagctaaaaaactcaaggattgaatacttacttgttggagtgaatagaaataccaaaaagaaagaanaatgcaaccaaaagtgacttgg

SEQ ID NO: 285750 - DNA, 382 bp, Glycine max
tgcttgcataaacattatataatcatcaatttgtcaaagctaaattcattcaatcgccaaataaggcaggcaaggaaataaaaatggaatctaaattctaaatagcccttgctaattaatatactacaatcatacgtaactaaacaccatgctacagaaaatagacatttgtctacttccaaggaagatgaggtgaagataagagctaagttgatatttcatatgagaaatcccaagtattggtatgatggcctctcttgcatagcattcattttccttcacatattccagaaattgaaacaaagcattttcttactgtaaattaaaatgtggtcagtctactcaaattggtgcataccttcgatcattggttttgtcagct

SEQ ID NO: 285751 - DNA, 422 bp, Glycine max
  unsure (1)..(422): unsure at all n locations
tcgcctcctgcgggtcccaccatctacaccgtccatttgctccctcaacaacccaagaatggtactcctggcctccctctgagtccgcagcgattcctgcaacgccacaccgagttgactcatatcgaaccaaaaaaagagttacgaattgaagaagtgatgagggacgcgagtagtggtaggctagggccacagagatctcgtgagctggaagagcatttaaacagaaaacgacttcttaaacaagaatatatatatatatataaaattaatgtatttaaaaattataaaaaaataaacaatttttttaaaaaaatcttataattatcgatggagaataaagtaatttgctaaggatcatctattcataatattaagtgctacattntcatagtttagtaattaatttgaacacgtatcag

SEQ ID NO: 285752 - DNA, 382 bp, Glycine max
agcttttggcatcatataaaatttatggtgatcaacaatcacatcacacttgcttttcatgggttgtgttgtggtgatcacaccattatctatgggttttttaacttttattttagtaattctactaaaattataacatggtatttttttagaacttgcattttagtttatttattatacaggataaatatatattttataaattaaaattcatgattaataaatacttttaatatataaattatattataattaaatccaagataaataaatatatatacaaatatataaattatattttaaatcaacaatgaacaatttagactgtgcatggtgtaaggttatttttaattattaataatttattttaaaaaaattagag

SEQ ID NO: 285753 - DNA, 419 bp, Glycine max
  unsure (1)..(419): unsure at all n locations
ntagcacgattgtgaaatgaaattatgcttattttatcattaaaactcaattaccatcgttcatttttatatttccctccttttaatctaccaaaatggtactgtaattttttatttacccagtctgggatttgtgcgcgaaaacattaggtttgtgaatatgaatacaaaaattacattgggatatatctttaatcgtattcatatgcctactaccaaccagctctttcttggacttgggcttaattctgatggaaccattaaggtcaacgactcattgattctgatgaaattaattaggtaaagaatattagttaggaaaatgctaatattgaaatattaaagatatttttttatgaaaaaagtattatcaacatacccttatcaagtggttaacaggtctaaatatgaactgaatg

SEQ ID NO: 285754 - DNA, 379 bp, Glycine max
agtttataaaagtccttctgattcaatttatgcattcctaactgtatgccatgagatgaagtgcaaaggttggacctcatgttagttgttaattattgattagtttaaacacttgagcttgagtgaaacagtgactatgaggcactggttaggcatccttccatgaaatctgtctgctgattagtttcattcagttgtgttgcttaataaaaatgctcttatctctcaaaatctgcatgtcttgtgaaaaaccattgattgagtcattgtatagatttcttatcatatgattaatgttttggaagcaaacaccctttgtaaataatcactgcattatttttgcaattgaggacaagtgagttgttctttatttgcttga

SEQ ID NO: 285755 - DNA, 408 bp, Glycine max
tgtgtgtaaaaaaaaaacttgaatttcaaagttaggctaagcgcacggtgccactaagcgagcatcttcgaaaaccaaacgtcgcttcgagaaaacaaaatggcttatgtgagtgtaattgcagttacactcacatttgttggaaactgctgaactgcctgcatcttctctctcgcactcattttactgcattttcgccttcttttgcatcaaagcatcaacgatacaagtaagttccttactcccttcattttttttttgttgaaccttagggtagaaaaccatagattttagttttcagtctttagggttttcataattttagagtaggtaaaaaattaggacttttcatatgattgtgttgtgtagatattttcaattgtcttgcatgtttgataatgcctttta

SEQ ID NO: 285756 - DNA, 377 bp, Glycine max
agctttgagcaaattcaaacgacaataacatattactcggatgtccgattgtgtcccgtagtatatcgagacactcaaaattcagaatagaaggtctgagtaaaatgaaacgacaataactttttactcggatgtccgattgagtctcgtaatatatcgagatgctcgaaattgaaaacgaaagctcgtagcaaatgcaaaccacaataacttttaacttggatgtccgattgtgtcccgtaatatatcgagatgctccaaattgaaaacagaagctctgaccaaaatctaacgacaataacattttactcggatgtccaaatgaatcccgtaatatatcgagatgctcgtaattgaaaacggaagctctgagcaaa

SEQ ID NO: 285757 - DNA, 403 bp, Glycine max
tattgtcgtttgaatatgcttagaccttatgttttttatttcgagcgccacgatatagtacgggacacaatcggacatccgagtaaaaaggtatagttttttgaatttcctcagagcatcagttttcaatttcgagtgtctccatatattacaggactcaatcagacatccgagttaaaagttattgtcgtttgaatatgctacgagcttctgttttcaattgcgagcgtctagatatactaagggacacaatcgtccatccgagaaaaaagtgaatgtcgtttgaatttgcacagagcttctgatttcaatttcgagcgtgtcaatatactacgggactcgatcggacatccgagttaagagttattatggtttgaattttctaggacctactattatcaat

SEQ ID NO: 285758 - DNA, 375 bp, Glycine max
tgctgctacaagtttatgtataatctaaatttagcatatgaagaacctgatttcagttttttcttctcccaaaggtgcttctggagaaatttatccaaacaagtatcaccttgataatttggttttaagtgaaaatgttactcagttaagtcaaattggggggggggattattatacaggacaaatatatattttataaattaaaattcatgattaataaatacttttaatatataaatcatattataattaaatccaagataaataaatatatatacaaacgtatgaattatattttaaatcaacaatgaacaattcagactgtgcatggtgtaagggtattcttaattattaataatctattttaaaaaaatt

SEQ ID NO: 285759 - DNA, 406 bp, Glycine max
tttcagcacgggtttggtgcctatatttatctagttctagtgttaaattacttaaaaatatttcacaagtgacttgtttgagttttgttggggtaaacatgttttgaaatgagcttgatttgtgtgtatgatgacgttgtatcaacaatatactgattatttattcctgtatagtaagatttgaagttatttgagaatgagattatcctattcaaattgatagatattgtatcgaattgtatgaattgaatagggaattttaagattctaacaagtcatttgtcagctttttgtgtttttgttcgtggcgatatgtttcccatggttattgtatatgagaaagtggttgaataattgaatagattgttaatttggtccctaattgataatcgtttgttaagttgct

SEQ ID NO: 285760 - DNA, 389 bp, Glycine max
atcttctcccctattttgctataaatagggggagaagtgaagaagaaaagggttcagccccttaggcacttctctctctctcgaaattgctgaggaaaattatttccgtgaagaaaatccaagccgaggcgcttccgtaacgtttccgtgagtaattacgcgaagattctcgaccgttcttcaagattcatcgttcgttcttcgttttcttcagtcttcaacgggtaagtacctcaaaccaagcttttcaattcattctatgtacccgtggtggtccacattctgcttcatgtatttttattctcatcttcatttactttttatacccccttttgacgtgcttaagccatttatttaagtcatttctcgcttaatctaaacataaaata

SEQ ID NO: 285761 - DNA, 352 bp, Glycine max
agctttttcaaaatggatgatgttttcacaaaaaagtttgaataagaaggtgaaaacaagttactaatgtgtagtccaaccattttaatcagacaatattttgtgactattgtctaatctcatataaaaagatttcacaaagtattttcaaaagcatacttatgcgcccaagtgtgtataaatatgctcaagagaatataagtcaaattacacagatcaaagtataaacacttggtttatattggttcactcaacctaaggtacgttcagttcttctgtataatctggtaagggtttcactaatcaaactgattataaacaagtattcttacctatcactcctagctgcaac

SEQ ID NO: 285762 - DNA, 386 bp, Glycine max
agcttctagctgggttgatttggtcctttgatggtttttgtgtatattgactgactgccctaagatgttgaacatggttagtatagatacatttccatttgatatgaccctacctacttcaaattaaagggattaccatccaatcttctcactaactattaaaccttaacttgtaaattaacatagagaaatatgataatattaactgctacgcatgttgctttcttcatacctaactaaccgtgtgacctaagacttagtagtatccaaacgaaaacataagtttaatgtaaatttatttttatgcctacacattattaaacaacatatgtatcaatttctattaaagagacacagaacagaaccctgctatatagccacataac

SEQ ID NO: 285763 - DNA, 305 bp, Glycine max
ttcttgtcgcaatgtgtatgagtggcgggtttggaaatgagggtgatagagtctgcaatggttgagattgcattctgcattgcggagaaagaggatactctcagctctgctaccttgctcacgcattcgctaattgaactcatgctgtgtagattatctatccttcgttctttgtctttcccacaataatagcacagatggctaagatgacggccctattttatggtcctatgacatgtataataacacttctggacttgaataacatataacgtgccattctggacttctagactgaatctact

SEQ ID NO: 285764 - DNA, 389 bp, Glycine max
ttcttaactgttatcaacaaaggaatattccctttttcctggtcttccataaagtgattttgcatttcaacactaaatccattttcccccttcaattccacggagaccgttgatgtgtttttccctggctgcaagaaaggagggatctgccccgagctaagttgagatcctacgtacattatcccaacttcattctccaaatagtccaatccgatttcttcattaggattatccgctgtcacgacaatgacaacatcagtgtataccttactttcctttctgatatcaaatgacttgacattaatgcgttcaatgtcataggaaggaaccttatgcttaataaagtaaaataaagccataccaatttccaccaagagtataataatgat

SEQ ID NO: 285765 - DNA, 121 bp, Glycine max
atctcctgcccgattgttcgtgactagggggagaagccgaatagaaccgggctgggacgcttctgcacttttctccctctcgaataagctgacgataatttttgaccgatggattatccaa

SEQ ID NO: 285766 - DNA, 378 bp, Glycine max
agcttgattctacaacgagaagcaaacatggtgatggtgaaatcccctggaatgtctagctacaaacccctttaaacattacaatacgtctcctatggtctatccctacatcacaaccatatcccaaaccccttatccttaaaccttccaccacacttcactcactatgccaaccacaaaatcactttaacctaacctatcatggaaccaaaattcccattaaactaagccataaaacactcaaaactagaaacaagttgagtttgatcccattctcatgtcgtacactgagttactacctcacttaattcataatggaatggtagcacctatcccaatgaatcttgttaaggccctatatcccaacggatataatgc

SEQ ID NO: 285767 - DNA, 199 bp, Glycine max
ccgggaactcaagagaacacctgcaagcatgcaatctttctaactgggttgatttaggtccctggaaggtctttgggtatattgactgactgccctaacatatagaacatggttaacatagatacattaccatatgatatgaccctacctaccttccagtagatggattaccatcccatcttttaactaaccaataaac

SEQ ID NO: 285768 - DNA, 466 bp, Glycine max
  unsure (1)..(466): unsure at all n locations
gagtgatgaacctgactgtatcggatgacacctctgacagccgatcctgtanagtgggactgcaagcatgcaatcttgagatcatattcttgcacatttttgggtcatttgctagtacctgattgataccgttgtcatattttgggtcagaccgcatatggtcatcatattcactccaatattgattctataactgcacatatgacatgtatctagttattcttactgcttgttgtcatgcttgtaacctggcaagagcaggcttctgagattgtcctctgatggggaatgaataacacgataatagaaatccttcttcactgatatttgaatcatgttaccctttatgcacgacactatgggcatggattcagatttcgaactattgtgcaacaagtgaagtactgttggaacaactacacatcttgcatatatctaggatagcttgagcatttagtagaaaacn

SEQ ID NO: 285769 - DNA, 368 bp, Glycine max
agcttgtttatgtgttgattttaactttggtttcagctatttactttcaaaatcattaaaagaagacttgcgaaggtaatgaccgattgaaactttattttacattgataaaccaaagttacggcacgaacaatcggttgaaactttattttacattgattaagtgagattacgatacaaacgatcggttgaaattttattttacagtgataaggtgagattatgacacgaatgatcggttgaaatcgctttacacaaagaaatgagattactgattgtagaaacatgagatgaagatgtgaaaagcaacaagagggacctctaacggtgcatatagtgaattcaaagtttcataatataaactaacc

SEQ ID NO: 285770 - DNA, 387 bp, Glycine max
agcttgagaccatatactaacacactttgacaatcatccgctactaccacattgtaaccttcgtcatcacttgggtcagaccgcatatggtcatcagtttcactcccattatcatactcagaccgcacatatgccatgtcaatagttcttcttcctgcttcttgccatgctagtaacctagcaggatcaaccttcggagattgacgtctgatggtgaagtaatcagaggataacagagatccatcatcacaatttttctcagtcatgtaacccttttcgcaggagactttgtccatggatacagattgtgaacttttcagtatcatgttaactactctggcgacactaacacatatatctttatgtaagagagccttgatcatatga

SEQ ID NO: 285771 - DNA, 389 bp, Glycine max
agcttattcattgatgaacaatgaaaccttgttttattgaactaattgctttccacatcatctcaggttgccgagattctcaaagatcgtccatcatggtattgtgactgtcgatgcctcaatgtattgagtgtagtctcaacagggaatgggggcacaatagagcttatgtacatgcaggtctactgattattttatacaaaagaaaagttgaactatagtttaaattatcttttaattattcctatgttgttttcttgatattcaaatttgattttttttctaaacatatgcaccaacaacattggcagctgcaagagacttctggactttgagatacgctactagtttggaagatggaagtcttatggtattgagtggaatcttga

SEQ ID NO: 285772 - DNA, 388 bp, Glycine max
atcttaagcccaacttgcatcaaataagtgtaaaaactagttatttaagttgaatgacctactagatgtttaaataagttgcatgtccatagtagggtttccccttctcaccattaatagaatttattaattttttcaatgattaatctttattggctagcctagttggaaacctttagtaaggtccctagcgcatgacataaataacaagacaaagtaatcaaccttcttctacatgtatcactactaaagaaaacttttttacgatgcagtatctacgatggttgtaaaaaaaccgtcttcgttcgtattacggtgacaattttgtaaatattatgaatatttcaaagacgggttttgcaaaactgtgtttaatacttcgaaacaa

SEQ ID NO: 285773 - DNA, 215 bp, Glycine max
tgcttctacatttattatgcaccggattgagatattacagggctgaaccatacatccgagtaataagatacagctgtcggtagtcgctctgaaccgccacattcaatatcgatcgttacgatagattacggaacagaatcggacatcatagtaataagtcgatgacgttcgaattatcttagagctctggtataccaattatagcgtttacatat

SEQ ID NO: 285774 - DNA, 308 bp, Glycine max
agcttgtacctatattctatgattgtatataatgagattgtgataatgttatccaaaactaacttttattcaggagaaacaaaaaatgctgacagcgcaaacactacaacttgaataccatccccatcacctattcatgagttaatgtccatgctattccttcgcaatgcacgtgacactatcattgcgaaggatacacaagtggatcatggacaaggaactaagacaggagtatgtactctggaattgactcagatgatgaagatgctacaatagcaacgctgatgtttttgctaaataacacatgc

SEQ ID NO: 285775 - DNA, 370 bp, Glycine max
  unsure (1)..(370): unsure at all n locations
ttcttgtctctctaagttggttgccggcgtgaaacacaccaacactgtcatggttgtcgtcgacgattatacaggccagatcgtcgacaattatacacttctagttttgaatatatataccctagggtattattgtatactactgatgctgggtatttgatacagaaaatcgaagagaaaaattggattcgaggccagcacctccagacaaggtaagagtggaaggtaagcttaagttttcatatctccattgtgccttacaattgctttatttatactaattccttggtaaccataattgacattntgtgcaaaggtgtatatctaaggaattattggctaacaatntatgggtaagcttgtctcccta

SEQ ID NO: 285776 - DNA, 382 bp, Glycine max
ttctttagattgaaatgttacaagagtaatatatggcttctagcaacctttgctagcttgctgttatgctcttgtaatgtacttgcctgtcatgtcatatgcacaacaaaaatttatctttataaatcccaaatgtttttatgtacaaaccttctagcagtcagtagaaaactaattaatttcccttcagaagcagaaaattaatttaacacaacctaccaaccataaagtcaaagaagaaaccaagtaaaaacatttaacattgctttcagtaatgtcatttaagaagagaaatataatgtcataaaactctactagacaatatatctaagattacttcgggtagcttcatactagccatatgcttccttcttgggggaca

SEQ ID NO: 285777 - DNA, 453 bp, Glycine max
tgtcctgtgctcatttgatcctgttgaccatgcaaaccacgcgacccgggatcctcacgaggctacctgcaagcatgcattcttgccattttcttggtcttttatatgagtgctatgtattaagccttgttcagaatactcgtttattaccgttaatttaatgctaaatgaatcattacatgaattgcatgtttaagtccctgccctaatatacatacaagcctatacatgtcattagaggacttatgtcgcaccgtaatatacatattatctgatgtatatattcaacattactgttctatggccggtaattggtaagattaagcttgagtcaatcccattttgtgggatggtttaacaatgtatcatgattattatcgtttgctaacaaagcccgtccccttattgtatcatcatagtacactctcggatgttatatctatacttcacgcc

SEQ ID NO: 285778 - DNA, 377 bp, Glycine max
ttctttcactcttttgataaatagtaggtactattaattaaacaaggtcttctataagatattaataatataattggtggcatgtattttttttttcttttataagatattaataatataattattggggtaatgtcaaattcaagccttggattatgactcaattaattactagcaggttttacaatattgcgtcaattacaaaaaccaaaataaatgtaataaattgatataatgatagcataaataaaaatattgataattgaagtatatcaataaacaaaaataatagtgaaatatttattgacagaaatgaaagtgtcatagtctaaatctaacacatgtatatatgaaataatattatataaattctaaac

SEQ ID NO: 285779 - DNA, 204 bp, Glycine max
agggtgggctgaatggtgatgcttattcaattacagcatcactatgctgtgactatagacccgagctattatctgatatacagcaagcactagacgcccttcatgttatgataacaagggctaatgttgcaacattgtaaggcaggatgaacaacgtgtatgcgataatttgcatttttgaacagagctttgcagatgctgcat

SEQ ID NO: 285780 - DNA, 360 bp, Glycine max
  unsure (1)..(360): unsure at all n locations
tttcttctccatttccaaatgtgtgatgttcaaatacatggcacgactacacatgaaattaccttaattttcattcaaaaaatgtcaataataaaaatgtattattgatgtcaattttggaaaaaatttgccagccaaaacatgttaatttcgtgcatgaagttgtaactattttaaattatttacttatggtcatacacgactntatagtcgtaaggccggatttcggttattatttattttggttttacgactttcaagtcgtggtttaaaaatgttattgtttttgtgtccatataatcacaaaaatgtgtaaataattttatcagttgtaatataaataatgttatttttttgaat

SEQ ID NO: 285781 - DNA, 380 bp, Glycine max
agcttcattcttacttacaagtttctgttgcacaaagggccaatgctaagcttattcctacatacattggtccctttcaagaggttgatcgtgcgggtgttgttgcttataagcttgcttttcctacttcttctctcgcataaaaaaagagtttcatgtttcccagagaagtgacatgtcactgttgctgattcaagtcttacactttcggatttttctgttgacagttccagtcttaaagaaccatatgccattttggatcacatgatgtgttggagaagaggacaagttgtgaccaacggtttagtcaagcggaaacatcacttgcctgaagattccacatgggagatctactatgatctcacgaaatggtttccttc

SEQ ID NO: 285782 - DNA, 395 bp, Glycine max
agcttgtacgattattgggtacccatcacatgtggtactaggtggcggtcgggcgatggtgcaaaacaagttttccacatccacaaatcgcgcataaacccaccatcccctattgcccacctacaactgagctcacgtactcccacgtagcccatatcctcgtatctctcatgaccgggtgcccatcaatgcttccaagctttacccatcatgcaggtaaaacaactttctcacagtgcaaactatgacagccaagaaaactgggcaaaagcagaaaactctgcccaaaacaccaaccacaatcacagcctttctcacttaaagaccccagtaacaattacttcgttccagattcttaaccgctggatcgactcgaaaatcttactggaagtctc

SEQ ID NO: 285783 - DNA, 386 bp, Glycine max
agcttgctcatataggtttccttgtttaagagttggtacatagatagcggatgctctaaacatatgacgggagatgcatcaaagttcactcttatctctcccaagaaaagtggacatgtgacttatggcgacaacaataaaggtagaattcttggagttggaaaaatatgtacaaactcatctttcttcattgagaatattctacttggtaaaggtcttaagcacaatttgctaactgtcagtcaattatgtgataaaggctatctaatatcatatgattctcataaatgtgttattgaaaatgagcatgataggaatataaagcatacaggtgatagaacaaataatgtgtacgtgatagatttaagtcaaaaacaataccatga

SEQ ID NO: 285784 - DNA, 353 bp, Glycine max
agcttctcgatatattatgcacatgaatcggacctccgagtgacaagttatggccatttgaatttttcgagagcttacgctgctcaatttcgagcgtctcgatttattatactcctgaatcggacctccgagtgaaaagttaagaccatttgaatttctcgagagcttccgttgttcaattgtgagcgtctcgatatattatgcgcctgaatcggaccttcgagtgacgagttatgagcattagaatttctcgagagcttccgttgctcaattacgaacgtttcgatatattatactcctgaatcggacctccgagtgaaaagttatgaccatttgaatttctcgagagcttt

SEQ ID NO: 285785 - DNA, 371 bp, Glycine max
  unsure (1)..(371): unsure at all n locations
agcttatagcagctttttatatgattcctattctcgtaaaattaactttttatagaactaatgtacacgtagcatgttaaaactatttttttattagtgatattttcatcttcatgcatgtgcatacttaagtgtcttctctagaataaatagtccttggttttgttgagctaaatatataccctataaaattgacatattccaaaaaattaattgcgaaatatataggttatcaaccatggagtttccaatgatttaatggacgaaacaatgaacatttttaaagaattccatgccatgcctnccaaagagaatgtgtatgaatgctccaaggacccaaatggaagctgcaagctttatacaagcagtga

SEQ ID NO: 285786 - DNA, 423 bp, Glycine max
  unsure (1)..(423): unsure at all n locations
tgttgcctcatgttcgtgatcctctgggattgactcgtcccggatcttgatcacctgcagctgcatcttaactcttcactgccaggatttttattggagacgccttgtgaacctttcccgacgaagactctggcgagtacttattgtgtcttcctcttggaccaagcacggcaagcctcgggctagtagatcttcttacgatcataccttgaatgcaactgcgatcgtttacgcttaacatctagatcttgtcgggtgttcacaccgtccttcaacctgcctgaatgttaggctcgtgcattacagctgtacggaatatatgccacatggatacttgaatgcagcgtcgacttcatgatcacactatgttgtggactgcaaaaatgtactctcttacagatgcacactttctttatgcttttn

SEQ ID NO: 285787 - DNA, 384 bp, Glycine max
  unsure (1)..(384): unsure at all n locations
tgcttctcatcaaatcttttaataaaattgaactgtgaaaattttgaagtttattcacaaagcaactcaataaattatatacctcagaaacccactgccccaaaattatagcaactttacgatgaatgatacgcaaatttggatgttcatttgagagttcgagtgataaagcaccattaaacctgcaaatgaatgattaatagtcagagtgctttaaaatccagtgacagcaaaacaaaagaagggtccaatatcaaaaaaatattttgatagttaatacgttaaagaaacataaatctgaaccatcaaataagttacctctagtgacttgttgcaagttagattgcctcatatagctcccctaatatgtgttntatgtgtaga

SEQ ID NO: 285788 - DNA, 375 bp, Glycine max
  unsure (1)..(375): unsure at all n locations
tgcttgtcactggagctgacccatcaactgccctaactctttcagactggtgattcctaagctcttgaccttgacttgatagaacctctttttaagtgaaggcgcctgactcgatcccacgctttactaaagggaaacaaaacctagtacgaatcaaaactctgacatctatcatgggtggaatggacgaatgcatgaaaaaatgcatatgacacatatgcattttatgaatacgggagcctgtggatatgtccccttcttagatacaacatttgggcagcacggcgcccgacgtacgtatttaagatggcgacacagaccctctgtcagttgacaaatggaggggatcaagacgcantccgtgcatgatgcata

SEQ ID NO: 285789 - DNA, 348 bp, Glycine max
ttcttctcgatatattatgcgcctgaatcggacatccgtttgaaaagttatgaccatttgaatttctcgagagctttcgttgttcaatttcgagcgtctcgatatattatgcaccggaatcggacttccgtgtgacaagttatgactaattgaatttctcgagagcattcgttgttgaatttcaagcgtctcgatatattttgcgcctgaaacggactttcatgtgacaagttatgaccattggaatatctcgagagcttccgatgttcattatcgagcttctcgatatattatgcgcctgaatccgacattcgtgtgacaagttatgaccatttgaatttctcgaga

SEQ ID NO: 285790 - DNA, 373 bp, Glycine max
tttcttgagagggtttggctttgtaactctatgtttgtattcttagttgggtcaatctgtgattgcagtggtttgtggtgcacgttcatgaatctcactatttaaaataagaaataaagttgatcgaaaaaaagaaaatgaaatagagggtatttaaaaactagttaaataattgtttaaccagttatttatccgtaaccggttatataactggtttttaaaaacaataaccagttataactagttatacaaaactagttatggttatagttataataaccccttataatctagtaatttattagttatagttatgattatttaaataaccaaaccataagcacccctagtcacggttgcacacttaatattt

SEQ ID NO: 285791 - DNA, 294 bp, Glycine max
tgaaatatgagaaacccacgatgagactgatgattgagtggtgctacaaggagtataatgtgccacatctgaggtagaacaatcacgtgatggcaatctatctgagagatcaggggagaaagaagcgacagcaacggcagctgccgctactagaggtctttgaatggctccagaaaacgaactcattgcatatattcaactcaacgcataagcttggcaagcaatactatagcacaacaccaataagtagtaacccttgtccctatctacaatcaaaattctcaacccaaaatg

SEQ ID NO: 285792 - DNA, 393 bp, Glycine max
  unsure (1)..(393): unsure at all n locations
agcttcaagttagaaacttccaactactaaggtttcttcttacaaccttaaatcatgcaagagagaaagttttcccttgtctcaaaacatgggtgagtagtagtgactcactttgtacaccttttgggtttctcttcatttatggaatctatggagagggagtgaaccttggacagctcatggaatccatgtggagattcacatgtgactttactgtaagggccttctttctttattttctttagcaaaataatattaaaatctagctacaaatcaaatacacctaanattgttgtgtttcttaaatatatattatgtattgtaaacagaaatattacaaggaaaagtattccttagtaatcccagagcctggctcctctaaagaatgcaaag

SEQ ID NO: 285793 - DNA, 384 bp, Glycine max
agcttgagattttctattaaatttataaccattcctttcatgtgcaatctatacattgaaagccaaaggcccacaacttatgtgcttgatatgtaactgcttactcagtttttgtggatcacatcgaagctcatgctgggagtgtcaacaatctcgctttttcttatccaaacgaacagctttgtgttgtgacctgaggagaggataaggtcatcaaggttaattgtcacataatttgtcatagatatctatatcaatatcaattaaaaaaccaatttcgagtgttcaagatattgcacgtatgggatgccgttactggtgcagagcagtatacttatgagggacatgaagcacctgttattctgtatgccctcatcacataga

SEQ ID NO: 285794 - DNA, 387 bp, Glycine max
  unsure (1)..(387): unsure at all n locations
tgctttataagtgcgggtctgggagacgaaggtcaagtgttcgcgatatgtgaagatgatgttccaagtacttcggatttggtccgaccatgccctcctgatttccagctgggaaattggcgagtggaggaacgccccggcatttacgcaacaagcataatgtaaacctttatggttttaaaagctctatagttgggcctatgctttagagttttctttttgttaaggctntgtgtcttttgttttgaatttataatacaaggatctttcttcatctgttcctagtctctacccattctcattcatttgcatggttacttctttttctaaaacggcagattcgatgacgagtcccccgaaggtactaatacctgggacccgtctatc

SEQ ID NO: 285795 - DNA, 250 bp, Glycine max
agcttgtggcaggtgactctatcaaaattgtcactgctttctatgttactggaaatcttatcatatatgcttcatgtatgtctacgataccgtctatgtaactcatatctatctaacttcgagtaaatgaatggcagacctatgtgcttaatgcacaaccttcacattgtgaggtatcggtgaacactatacataatacacgttcatctgaagatgattcacctctacatgtaaatatcatgctcttgtg

SEQ ID NO: 285796 - DNA, 221 bp, Glycine max
catattgctgttacactctccgatatagacccactctttttctgacttttcttcaacgcactgatgaaacgcattgattagatccggggagagacatatccccttccgttgccggaatattcggataagggtaagtactctgacttctccggggctaagtgagaccagatgctatagctcacctaaatggatctgaggaaacgtgaacgcccaatgtgact

SEQ ID NO: 285797 - DNA, 376 bp, Glycine max
  unsure (1)..(376): unsure at all n locations
agcttcttattcatattgtttggtacataagcttcttattcacataacaccaatagtattccatttataagcagagattgacgattcaaattacatatttataagagaccaaccaaacacaaagcaaccacagcttataacacccgtaacaaatcctagaacatttgaatttgcaaaggcgggccatgaccactttattctaaaacttcaaacacaacacatacttattatttattgatacatgtattacagctatctctgcttgaaggttatgcatgttgatctcacttgcagctgcatgggtcgcaagtgcagtntgatccacagttgcagccaccgttctcagctgcaacacccatttcagcaccctcgaatt

SEQ ID NO: 285798 - DNA, 378 bp, Glycine max
ttcttctatatagaaaaaatgactcaattgagacaactcaacagaggggaatatttgccaaatctcacgtatccactatgggtaacagatagagtgtgagagagagaaaacccaactctatgttggcggattatgtaaccaactaatagtggtatttaaaggggaaagaacgtgtattgagggagggtggatatgagtgaacattactctttcttcttctttttctctctgtgactattgtactcagtccttctaattgtacacactatactcttagagattgattctcatttttagtacgggaataaaacgagtacattctataatttccagtatttccctttcagaggttatatacgatgacactctcttcagtta

SEQ ID NO: 285799 - DNA, 340 bp, Glycine max
tttctttgcatcttttacgaatcagataatgtggattggaaagaccatatatgtgcattatatatttccaatcactgccatgcctgatccatatcattgaagcattgtgacatagttatgtataagataattggaagaaaatttgtggcttttaataattggtgcaaaacgaacaatgagcgacgagtttttgacgttgtatacctctgaccaggacctcataattacatctgatcagataatactagtagtggtatacatagcttgcgacgttcatgttaagccctaacacgttatcgatgatctaagtggtgtttaatctgtacgtaactggggcaat

SEQ ID NO: 285800 - DNA, 361 bp, Glycine max
ttcttgcatgatttacatctccccctttctcaagcaaattcttcttgatatcatcaaaatcttcatgatcccgactcgttggtggaggatgcatgaatgacaatcaattcatggggctccgaataaaagtggagaatggaggataggcgaatagcgctaggcaatcaattcgcggttctcccgactcgttggtggaggatgaatgaatgacaatcaactcatggggctccgaataaaagtggagaatggaggataggagaatagcgctgggcaatcaattcgcggggctgcagactccatggtggaggatgcatgaatgacaatcaactagtagggctacgaataaaagtggagaatggag

SEQ ID NO: 285801 - DNA, 374 bp, Glycine max
agcttgtaggattatggggtacccatcacatgtggtactaggtggcggtcgggcgatggtgcaaaacaagttttccacatccacaaatcgcgcataaacccaccatcccctattgcccacctccaactgagctcacgtactcccacgtagcccatatcctcgtttctctcaacaccgggtccccatcaatcctcccaagctttccccaacatccaggtaaaacaacattcaaacagcacaaactatcacagccaagaaaacggggcaaaggcagaaaactctgcccaaaacaccaaccaaaatcacagcttttctcacttaaagaccccagtaacaattccttcgttccagtttcttaaccgttggatcgactc

SEQ ID NO: 285802 - DNA, 366 bp, Glycine max
ttcttgaaattgaacaacggaagctctcgagaaattcaaatggacataacttttcaaatggaagtccgattcaggcgcataatatatcgagaaggtcgaaattgaacaacagaagctctcgaggaatttaaatggtcataacttgttacacggaagtccgatttaggcgcataatatatcgagacgctcgaaattgaacaacggaagctctcgagaaattcaaatggtcataacttgtcacacggaggtctgattccggcggatagtatatcgagaaggtcggaattgaacaacggaagctctcgagaaattcaaatggtcataacttttgaaacggtagtccgattaaggtgcattatatatcga

SEQ ID NO: 285803 - DNA, 388 bp, Glycine max
agcttgtacagttaaatataccaatgtgctgtgctgaaataagactaaaaatttgtgcataagcttagacgagcccttgcagttcataatcagtattttgtagatgtctacttgcgcatgcatatactatagttaaactattatacagatgatgggcataaacttattgaagcctaaagataaagagtatactgggtgcctgggtggtgatgtgctaagctaaaagcacggaatttggtacccttggccaagttgttttagttcacttaacctggttgtacagtgcaaatacaagtctttactcatttaagaaattattacaatgtgtatatgctagttaatatcttgaggttttcgggcttcccaatacaagaataaagaatcagct

SEQ ID NO: 285804 - DNA, 396 bp, Glycine max
agcttgcctcaggtcgaaaagaaatttgtcccaacagttaagcgagactgaagggaatatgtgggccatcatcgatgagtgcaaagagaagctaaatctagcggcgactcacgagcaaaggctagaagatgagtacgccaagatatcagcagaaagggaagcaagggaaagggtaattgattcgttgcaccaagaggcaacaatgaggatggaccgatttgctcttactttgaacaggagtcaagaacttccccgattgctagccaaagcaatggcggacacctactccgcccccgaggagatccacggacttctcagctattgtcagcatatgatagacttaatggaccatatgattagaaaccgctaggaagtttgtattgtcgctcagatctt

SEQ ID NO: 285805 - DNA, 303 bp, Glycine max
atcttctacgggagtttacatcaacataacatggtctctttcttgatcctgacggttgatctataaaccttgaagctgaaaaatgttggttagcaggatcacccttcaatctagccttgtacattcttatttatcatctgaatcttctctcatgtgcttgagtatagatgaaacgggttttctacccaagagaacttcattcttggttgcacccttctcttttacgtggagactacaggaagttacggggtctgtccaactcttgagttctctgcttggatataactttttggacatgttgat

SEQ ID NO: 285806 - DNA, 380 bp, Glycine max
catgcaagctgtgagcctgattattgagaaacccacgatgaatctgatgtctgtgtgttgctacaaagagtagaatgtgccaacacggacgtagaacattcacgtgatggtaaattatcggcgagatcagctgacaaagaagcgactgctgccgctgtagccgctacaagaggtctttgaatggctgcagaaaacgaactcattgctgatattcaactcaacgcaagagcttgtcaaagcaattctattgcacaacaccaattagtagtaaccctagttcctatctacaatcaaaagtgctaaccctaagtgagaatcagacgtctataccaatatgtaggcacaagaacaatgctctaatgaaaagacagagagcccat

SEQ ID NO: 285807 - DNA, 358 bp, Glycine max
agcttaacgataaatttaactaggaagtgcaccctgcactgataattgaccattttgttgtaccttacccgtatgaccaacattactacttactgaacatagaagcttcttggaaccatggataaccatattgtgtaaccatattgatcaccttatccgtataaccggcttaatcaacataaaagtaactcatacgtggcaatgtgtgaccagcttctataactcacctagagggatctgtggaaatgtctaccacaaatgttactaaaagatagaccggtggaagtaaaactacatacgtagcattcaacggatacaaatgttgcacacattcttccatcattagcagaagataata

SEQ ID NO: 285808 - DNA, 309 bp, Glycine max
atgcaaccttggcatgctatcttgaaagacttggagtatctatataaagagtaataatttgcatcttgaacatcaacggccttggaatcgatgcaatcctcccaatgtgactctctcatgatcgagccatatatgctggagaatgccctatggttcttatgagccttacggtagattttgggcccatggactaagtctgagcccactcatctttgtacatattaaatcacggttccattatttctaggccttatattcaaggcttcatactgaatggagggtaccctactcatgtaagaattttatacc

SEQ ID NO: 285809 - DNA, 382 bp, Glycine max
tgcttgtgccaataaagatggtgaaaaaattcaagaatagttcaataccatttcatctcttgaaaatctacacccttgtggagtggatcccacctcaagagttccaatcttacatacggagagaagatcagtggaagactcaatgacatataagcatctttataggttgatgagtactctcttttgcattcttccattctacttttgaccaaggatagttgaccatattcctcagaagcatcactgaaaatctcatcagcagcctgcagcaccaaatcacttcgtgactgatatgcttggctctcactatcactctcatcagtgcttgattcaccttctattttatgatcatcccattccatggatgtgaccttattattac

SEQ ID NO: 285810 - DNA, 300 bp, Glycine max
  unsure (1)..(300): unsure at all n locations
ttggtcattgccatggtacatttaccacagtccggataatcagcacaattaccacggtcatagtcaattcatgaaaatcaaggtccactatgaaggtcaaggtccactatgaaggtcatattcaatccacaatacctcaaagctttagtgaaacttttcaaaaccatcatggtggattntaccacaattgtagcctttttagacactgatatctttagaaatatatatatatatatatatatatatcttaactttggtagaataatcttttgttcacttttatcttttacaaaattgaga

SEQ ID NO: 285811 - DNA, 374 bp, Glycine max
tttcttgtaggattatggggtacccatcacatgtggtactaagtggcggcctggcgatggtgcacaacaagtcgtgcacatacacaaatcgcgcataaacccaccatcccgtgttgcccaacttcaactgagctcacgtactcgcacgtaacccatatcctcagatctcctaacaccgggtccccatcaatccacccaagcttctccaacatccaggtaaaacaacattcagacagcacaaactatgactgcctagaaaacatggcatggcataaaactgtgccctaagcaccaatccaaatcacagcttttctcacttaaagaccccagtaacaactccttcgttccagatcgataaccgtaggattgactct

SEQ ID NO: 285812 - DNA, 358 bp, Glycine max
  unsure (1)..(358): unsure at all n locations
ttcttgctctaaatttacattgatgtttgtatttatgggaggaggttatatgccatttttgctttaagagtagtgtcccactggtaaaattaactttccaaatgtttgccttcgcaggaatggccccgaggaagcttgcctcaaagaggtccaggaaggacaaggcggccgaaggaactagttccgctctggagtacgacagtcaccgcttcatgagcgttgtacaccagcagcgcttcgaagccatcaagggatggtcgtttctccgggagcgacgcgtccagctcaaggacgacgagtatactgatttccaggaggaaatanggcgccggcggtgggcaccactggttactcccat

SEQ ID NO: 285813 - DNA, 351 bp, Glycine max
acatcacgatattcacctattgcatttgagaaagttaaattattctaataagcacactagctgaagatgaagtagacacattctgctgctgctgctgcaaagagtactatagggacattgatcgatcttaaggtttccccttggaagtagatctatacaatggtgggggcttatatagagggagttgccgtggtatcccacaactaccatcaggacaagaaagaggtcgcaaaggagaaaaccacatcccagcaaacgtcgaacgggtgtacaatgttagcgaatggaacaaaactagcaaggcagagtatgacatcttcatattcatagccttctattgtatcgtattaa

SEQ ID NO: 285814 - DNA, 344 bp, Glycine max
agtacctctgttccggaaacctttcttttgtcatgtgcacccaaacccaatctccgggttcgaagacaaccttctttcttcctttgttggcttgcttagcatagcttttattgttcctctcaatttgatctttgactctcccatgaagcttcttcacatagactgtctttgcttgaccttctttatgcttaaaaacagaaacattatgcataggcaaaagatcaagatgagttagtgggttaaaaccataaacaacttcaaaatcatcaaaagtattagtggtcaacatctgatttttgctaacaagatatatagtgactgtgtagcacgaaacaacctcttga

SEQ ID NO: 285815 - DNA, 395 bp, Glycine max
  unsure (1)..(395): unsure at all n locations
ttcttgagaccatagacaaacacactttgacaatcatctgctactaccacattgtaaccttcgtcatcacttgggtcagaccgcatatggtcatcagtttcactcccattatcatactcagaccgcacatatgccatctcaatagttcttcttcctgcttcttgccatgctagtaacctagcaggatcagccttcggagattgtcttctgatggtgaagtaatcagaggataacagaaatccatcatcacaattnttctcagtcatgtaacccttttcgcaggagactttgtccatggatacagattgtgaacttttcagtatcatgttaactactttggcaacactagcacatttttctttatttaggaaagccttgatcatatgaagatcaag

SEQ ID NO: 285816 - DNA, 394 bp, Glycine max
tgcttgcacacaagattttccttgcctggcacttcaaaaccttctgcaaaaccttttggttgggtcatatagatgtcttcctctaaatccccatgcaagaatgcagttttaacatctaactgctctaagtgaagattctttgcagctacaatactcataataactttgatggtagtcatctttacaactggagagaagatctctgtgaaatcaattccttgtttttgttgaaaccctgtcaccacaagtctcgccttgtatcttcttctactgacaaattcttcctttagcctatagacccacttattctgtaacactttctttccttctgacaatttaattaaataccacatcttattcttctcaaggaatgccatctcatctgtcattgcta

SEQ ID NO: 285817 - DNA, 389 bp, Glycine max
atcttcaacatcatactccttccattgtgctggaactacttcacatggacttgatggggcctatgcgagttgaaagccttggaggaaagaggtatgcctatgttgttggggatgatttctccagatttacctgggtcatgcttcatgccatagaactttcctataatctctgggctgaaaccatgaacacagcatgctacatccacaacagagtcacacttagaagaaggactccaaccactctgtatgaaatctggaaagggaggaagcctactgtcaagcacttccacatctttggaagtgcatgttacatctttggcagatatatagcaaaggagatagatggatcccaagagtgatgcaggaatattcctgggatactctacaaa

SEQ ID NO: 285818 - DNA, 389 bp, Glycine max
agcttgtggcaaaaggaagaagaagaagttcaaagagatcagaaatcaattggcaaaagtttgttgtctaaagaatgaattggaaagataaagatatataaaatgcaaaacaaagccatgcttttatagacttttcatgtctggtcaagagaaccattacaagagttatgacctttagaaaaacttaaaaccaatttgaaaaagtcaaaaactatttgaagagttacatcttttgatttgttcaaaaactatcactggtaatcgattaccaaatcagtgtaatcgattacacaaagcttttttgtgaaaagatgtgactcttcacatttgaatttgagtttcaacgttcaaacacactggtaatcgattaccaaaacattgtaatcaat

SEQ ID NO: 285819 - DNA, 347 bp, Glycine max
  unsure (1)..(347): unsure at all n locations
agcttcttatccattttttccttggtggagaaactccttcttccttggcttattccctatcgaatggtgcctcccctctcctcttctcctttgccttccgctgcatctccatggngtaaaatcaccattgaaggacctcattgaatctcaaagatccaccctccatagaagctccacaagcaagcttccatctagtggtaattagagcacaacagcttccagtaggtgctgcttaaacctccattaatatttcgctttaccttctcttccattgttgagtcttcatttttttctcgatgtatctcctcacatgtcttgtgtaanatgaatgtgacatgattctttac

SEQ ID NO: 285820 - DNA, 378 bp, Glycine max
agcttttggtatttataggtctctttcaattaaatatatgttgtctttaaatggacatatttctttatgctgagaattaaatgaaggatgtggacgttggagcattaaatgtatgtatttattcatgatgagaaaccactctttgttattggcgtgttgaacactacaataggaaagcatttccctttttgtcgaagcaagtttgtgcaccttgcataactcttcttttgatggcgattgaggaattttagagcttgacttcatttattctttataagattcacaaatcctatgagaatgtctatgcaaaaagatcttagacacaaagtattaaatgaagtgttaaatgacatctttaatgtcgtgtcattgattcat

SEQ ID NO: 285821 - DNA, 451 bp, Glycine max
  unsure (1)..(451): unsure at all n locations
tgagctcgattgatctcgattcttggcaatcaactcgtcccgggatcctctagaatccatctgcatgcatgccatcctgccttagggaggaatccaccggagaaatgcctaccaccttcgaagactggaaaacaggttcttacgactactctgctgcctccacattatgcataaaggatgggcagcttaccaagatgtcttcctcgcctgatacgatgaccagaagcccttccactacgaatntcaacttttgggggagtgtaaagggaacaactcccaccgagtggatccacgggcgcnccaacaggcagctgtaaggggggttaatgcccattatttggaaggtaactngacaggtgtgagggcctatctgtacngngaggtcaatctctcccctaacctctcggccggtgtcgttgaaggcacgatacaccatggaacttggcntacg

SEQ ID NO: 285822 - DNA, 349 bp, Glycine max
tgctttataagtgcgggtctgggagacggaagtcaagtgttcgcgatatgtgaagatgatgttccaagtacttctgatttggtccgaccatgccctcctgatttccaactgggaaattggcgggtggaggaacgccccggcatttacgcaacaagcataatgtaaacctttacggttttaaaagctctatagttgggcctaggctttagagttttcattttgttaaagctttgtgtctcttgtctttgaatttataatacaaggatctttcttcatctgttcctagtctctacccattctcattcatttgcatgtttacttcttttttctaaaacggcagattcgatga

SEQ ID NO: 285823 - DNA, 304 bp, Glycine max
ttcttgcatgatttacattctccccctttctcaagcaaattcttcttgacatcatcaaaatctgcatgaattacatgcttgttgtttcggcacaaaatgagaactctacttggtgcctaccgtatacacatagtactccttaaatgcctgtataaatattaaagtgaaaacaagtgccctaactatagggttcttgagtctttgatgctttggctatgattaaactttaatctaaaccactactgcccatctctatcattccaagcgagctgtgattgtgtttgaaggggtcaatttgcagaat

SEQ ID NO: 285824 - DNA, 471 bp, Glycine max
tggccctgagcctcgacttgctatcggtgtgattccctggaaaactcgatcctattcaggggatccgtctgcatgcaatctcgctcttctttctttgatttttgattcatgggacgatggataaatgccattcttgttttgaaagtatttgtcccagcgtgaaaattaactttccaaatgtttgccttcgcatgaatggtcccgatgtaaccttcctcaaagacgtccctgtaggacaggggtgacgaacgtactatttccgctctggagtactacagtcaccgcttctagagcgttggacgcctataactgcttttaaaccatcaacggatggtcgattatccgggagcgacgcattcagtctatggacgatgattatacttgatttcaggatgaaatagggcgcccgctgggggcaccactggttacatcgatggccaactttgatcacaaatagtacttgttgcttcg

SEQ ID NO: 285825 - DNA, 368 bp, Glycine max
  unsure (1)..(368): unsure at all n locations
ttcttgcatttggagaggttccatcaaccgccctaattccttgatgctgagggtgtctaagcttttaaccttgacttggtagaacctcttgccggtttgatttgatcccatgcttgctaaagtgagacaaaagctggtgcaaatcaaaactccgatatctatgggtggaatggatgaatgcatgaaggaatgcatattacacagatgcaatctangaatgtgggggtccggggaattcatccccttcttagacacaacgtctatgggtagcaaagtgccccaacgtacatttttaagaaagcgacacggaccctccattggtttgcttacacaagggatcaagacagaacccatatgcgatgcctatg

SEQ ID NO: 285826 - DNA, 358 bp, Glycine max
  unsure (1)..(358): unsure at all n locations
agcttgctctaaatttacattgatgtttgtatttatgggaggaggttatatgccatttttgctttaagagtaatgtcccactggtaaaattaactttccaaatgtttgccttcgcaagaatggccccgaggaagcttgcctcaaagaagtccaagaaagacaaggcggccgaaggaactaattccgctctggagtacgacagtcaccgcttcaagagcgttgtacaccagcagcgcttcgaagccatcaagggatggtcgtttctccgggagcgacgcgtccagctcanggacgacgagtatactgatttccaggaggaaatatggcgcctgcggtgggcaccactggttactcccat

SEQ ID NO: 285827 - DNA, 380 bp, Glycine max
agcttctggtgggacatcttgacttgctttccaatctgacattcaccacagattctgccttcttctattttcagattgggaatgcctctaacagcacctttgtcaatgattttcttcatgcctcttaagtgcagatgtccaaatctttgatgccatattttgacttcatcttctttggagaatagacatgtggaggagtaactggtttcttgaggtgtccataggtaacagttgtcctttgatctgctgcccttcattaggacttcactcttctcatttgtcaccaagcattctgactttgtgaagtttacattgaatccttcatcacacaattgactgatgctgatcaatgtcgcagtcagtcccttcaccagcagtac

SEQ ID NO: 285828 - DNA, 284 bp, Glycine max
agcttctcgatatattatgcgcctgaatcagacttgcggtgaaaagttatgaccctatgaatttctcgagagcgtgtgttgtccaattacgagcgtctggagatagtatgcgcctgaatctgactttcctgggatagagaatgaccatatagaatgtggcgagagcttccgatcttgtatatagagcgtatggatgaatgattaaccggaatcggacttccgtgaggcaatctatgaccatgggagtaccgagatagcattccctgcttaaacacaagcgtctg

SEQ ID NO: 285829 - DNA, 390 bp, Glycine max
agcttgctaaaaaatgggaaggtcctttcaaagttactgagtcactcagaaacggagcctactgactagagcacttatccgacaaggcgattccaagaacttggaacctcactcatcttaaattttatcacagttaaacttataagtggtgatgtactctttttcctactctaacattttttcccatgaggttatgtttagagagattttaatgaggcacaccaaaattttacattgaataaaagcattatttccatcattattgacttgttagatctgagtagaacgatagatgtcttcgactaaaagacctaaatagaggtatagagaagttcagatagaaattggcttactaataaactgacaaccacagtttgcaaaatacatact

SEQ ID NO: 285830 - DNA, 388 bp, Glycine max
agctgctgcgagattttttccttgagaagctagagcttagctacgcacacccatctaaaaactaagctcaccttcttgagaagctagagcttagctacacacacccattttaaaactaagctcacctccttgacaaaatacatgaaaatacaaaaaaaagtccctactacaaagactactcaaaatgccctaaaatacaaggctaaaaccctatactactagaatggtcaaaatacaaggcccaaaagaaggaaaaacctattctaatatttacaaagaagagtgaatccaaccttgacccatgggctggaaaatctaccctaaggttcatgagaatcctatggccttctttggtagctatagcccaagcctcttggagtcttctatc

SEQ ID NO: 285831 - DNA, 317 bp, Glycine max
ttctcgtgactcttggcaatttcttgaagacgagtcacttccaaagttgggttaatagaaaaaatctgcagatacaattcacttgtccaattgtgacctttggaaatatattctccgaagtcactcgctggaaatagattatgtgactctatattgtacatatggaaaattaacatgtttagaagctatggtaatcgattacaagaattgtgtcatcgattacaaatgttgaccatgtttaacacaagttgtactcttgaaatttgaaatcttaacgtttaaaacactggtaatcgaatactaccttctggtaatcg

SEQ ID NO: 285832 - DNA, 379 bp, Glycine max
  unsure (1)..(379): unsure at all n locations
atcttttgcttcatctgtagtcatttgacttctggacaaaaggaaggtgatgaactaaggaggaattcaaatgtaatggagattctcagaaagacaaggtttccccgagttcaagacatgggagatgagagttctcctcagacaattctggatcatgagtaagcccttcatctcttttccttgaatctttactagcaactgatgcttagagatcgtgaaactaaataaaatgcagtcctaagtcttaagttttaccctggccaagacctaaacttgtggtttaattggtgtagtcgaataatttggctgggggatttaaattaccggatagccctttcttaccgtgcagcanaggctcttgttgagatgcataattgga

SEQ ID NO: 285833 - DNA, 335 bp, Glycine max
  unsure (1)..(335): unsure at all n locations
ctcgcccaagcgaataagggtgcttcctccaaaagcaacagccttctggaggaattttctggaaggcccaagtgggcctggttgctatttgcaccccccctttttactaaatgcacccctttctatntttttgttattctttttccgtaacgttacgaaactttacgaatttcgtaatgatacttantttccttccgtaaggttacgaatccttatagattatgtatttactcttttttacctttcaaagaagttacggaaacttacggattgcgcaaaaacacctcttttcgatttccgccacattacggaatttcacggaacgcgcaagccta

SEQ ID NO: 285834 - DNA, 333 bp, Glycine max
tagcttgatacgtatccacaaacgaggttgaatgccaccattcttgatgtggtgtataagaaagtgatgaagctactaattgtatggagcatgtaccccattccttataacacgagcgtttcacctatcttagtggtcccttagaactcacgcatccctattgggaggaaccatgataatgagttgatctcgactataaaggccaatctttggcatgtctgcgtggattatacgagactgcccgctgctactaggttggatcacttgcctctctcattcattgattaagatctggagaggttggcatgtttatcacattattgctttcttgat

SEQ ID NO: 285835 - DNA, 374 bp, Glycine max
ttgcatgcattcttcgggaacgacaccttccggcaaccaggaattaactttccgagaacgcgcgctttcttctgcacagccggcaagcttcttcgaatctcatgcgtcgtcttcttcatgaattcgttggcggagtacttcttgaccttcttgtggtgtctctgcttccagcggcagatcggatttgagagaatggcgcggctccggcgagttctgcctttggcagtggcggcgaagacgcggtcagcggaggcgcggacttcgagggcggcggtagggttgctgttgcggcggagcgagtggatgagcttggaggagtagatgcgctgttcggttatggaagtccaggatggagtgagagcgaatgagttttg

SEQ ID NO: 285836 - DNA, 363 bp, Glycine max
tgcttcttcatttggatgattgcaatccttctctttctagctcctacaatgattacattgtattttgtgcaaattaaaagcatgatatattaagataattattttctttttcttgatattaatgtccaggtagaagtgatgaatagaaagtagacacacattatattcagaaaagcagcttaatttaaagtaaccaacaatcacatgagaaaatggtctacaaattctacgcaagttatgggaaatcatcctaattcatgtgtcatattggcgtcatactttggttatgggatcaattagctcacccagcctaagatctttacggccttcaatatgaggactatcgacataaggtgtatcatg

SEQ ID NO: 285837 - DNA, 370 bp, Glycine max
atcttcaaaacttgtaaaatatgtaaatttagtcatctcgctttatcgcaaaaatatgtatttttgttatactttggggaatgtacttgttaccctgttcaaggaaacatctatgtcataattctctttacttaatacacacgtatacatgtgtgtgtgtgtgtgtgtatgtgtttctttgtggcaattaaaataatactttttatttactacgtggtatcaacttagaaaccaactaataagaagttttaaaaatttatctaaaagtccaattgagtaaataaaatgaaagtaacatgtttccaaaactaaaaatgtgtataaaaatattggttttatgtaaacccgaatttatggtgttacacttagc

SEQ ID NO: 285838 - DNA, 393 bp, Glycine max
agcttctttgaaaggagtttgatttgttatgctttgttggtagaaattttcttggaaatattaatttcccttgataactggcccaatggggatttaccattaaatgcaactcatcattgggcaattatatgtatgtgagctgcaagcttgcaactgaaaaactcgatctgcaaaatttatatcatttagcaaactagatcgagtgactttcttaattattctagtctatgtatatccttgtagctctttcaagtttcataagattacataaaagttaaaactcctattttttatattttaatggttttaaaatattacaataacactctttatcattctactttttctattttaattatgtgaaaatattatattatatcctctatctatcct

SEQ ID NO: 285839 - DNA, 395 bp, Glycine max
agcttagcgaaatatgcttgaaagagctttttttttaacaagcttctacataaagcgtattaaaaataagctgcatagaacttattggtatgtcaaaactcataagccatttttataagctcaaatatttcaaatgccccccaagagcatagtgctgttgagacaaacaattttcaaaatatgctcctcttaccactccctctacaacttaaatgcaaattacaaccaacttctcaagacacaagcatggaaaatatattaaacaatgtggtaactttaaaactttgtgacagccaaggacaaatgcaccactaagaatatcttggttaagctatgcatacctcataataccctgacccagattacctctaaaatattaaccgattaaagcatcc

SEQ ID NO: 285840 - DNA, 144 bp, Glycine max
gaatgctcttgttgacctgatcaaagctacctctgtgtaatagttgtctttgattaatgcacacatttacctacttgaagggactgatgaagagaggtcttaatagcagcgctagcaatcctttttgtatcctgcaggggatca

SEQ ID NO: 285841 - DNA, 390 bp, Glycine max
agcttattggagtatagttttagtcctatgtatctcttattttctcaatttctgtacaacagtagttcagttaggtgttctattctggttttgtatcttagcagttagctgtcatctctaactcactcaatggtagttagagctgagctgctctgtttcattgtccataaataccctatgtaaaaactacttgtataggttgaattcattttctcaataatacaatttctctcttcgaattctctctcaactatattaaagctaattttcattttcataatgagtaagataattatgaagtagcagtgcttaccatattctttatttgggcattggcgtctgaaatgtgacttatattactatggataggttcacttcttaattagtttt

SEQ ID NO: 285842 - DNA, 364 bp, Glycine max
  unsure (1)..(364): unsure at all n locations
agcttcgctttccattcttcaaagtctcattattactattagaccctccgataagttccaatctttttcggtcttttctccaccgcactgaaacccgtcttcatttgatccggtgagagagagttcccctttggttgcgtgaatcttcagaaaagggtaagttctctgctttctctggggttcattcatttgggatgctattgctatgataaatattcaataataaccatgactgcccagtttgacttttgaggttgatttgtgtttgtgtttgatggtgtcaatntccacgttgtccttgtaatataatagtttgtgaattggagtttgtgtttatagcaagagaatggatgagtcaaaaaac

SEQ ID NO: 285843 - DNA, 379 bp, Glycine max
agcttggagtagagtggcatttgttgtaaagcttctccgaagggcatggttatttccagtttcctgaaaatatctaagaatcttgccaaatggcggttcttctccttcttggaaagtaccacaggatatgatacttccgcaccttcgttcaaagctttttctcttttcttctctctagcttgatcacttctactcctctcttcattcttattattttgatctttttcaatattttcattttctttttctttatctacttcttcttctttttcttggtcatttaattctattttcttgacgattatttgtttctctttttcctgattactttcacctctcgcatcatctttctttgtatcagtacctctctattcaacaa

SEQ ID NO: 285844 - DNA, 377 bp, Glycine max
agcttgagaaagagacaccttttggttgcaaacaatgtataagaaacaagtgtgacacctaaattccaagcatgcgaaggttcaacatagaaataacaaaactaagaataataaataaagggggggaagagttgaatttaatgaatggattacaattaccaatggtgggggaaagatcttcaacagaacttgaaataaagctgacaagtaggctactttttcccaccccggaatctccaatcaacaagatcttgaaagagagatcatagccactgctctgacctgaggatgaactcattctctcttcctctgatgaatgtcttaggtgtgtgtgtcaaaaagtacagtgaaagaaacgtatgcaagggtgagagaga

SEQ ID NO: 285845 - DNA, 376 bp, Glycine max
atctttgatgaaaaatgtggagaggttaatgaaacaacgagatgatgcgctccatgagaggttggatcaaatggagaatagatatcctaatggagaagaaaggaggataagagggaatgatggtgttcctagacaaaagcgaattgatggtattaaactcaacattcctccctttaaaggaaagaatgatccggaggactacttggagtgggagatgaaaatagagcatgttttctcgtgcaacaactatgaggaggaccaaaaggtaaagcttgccgccacggagttttctgactatgctcttgtgtggtggaacaagctacaaaaggagagagcaagaaatgaagagccaatggttgatacatgggcagagatg

SEQ ID NO: 285846 - DNA, 371 bp, Glycine max
tgcttgtcaacttaagccttaaacctcatcatcatgtctctttaaaaaacaaattggagctctttcttctccattgtgcacaagctcaaccaaaggagagatgaatctatttctttcttcttacaagcttcatacaagtgctcttgaggtttcttccataaaagctttggtaaagggctcttaatcttccttatcttcttttccttaccaaattcgtgcaagcttctcatttatggttccaaaatttcattttcatatttaaaagctcgagatatcaagaatttgatttccttgctcatctaagaaattttgtgtagcttcatcaaggtaaggggggtttctccaattcttgaaccctaatgttgttgtct

SEQ ID NO: 285847 - DNA, 349 bp, Glycine max
  unsure (1)..(349): unsure at all n locations
agcttgtacagttaaatataccaaggtgctgtgctgaaataagactaaaaatttgtgcataagcttagacgagcccttgcagttcataatcagtattttgtagatgtctacttgcgcatgcatatactatagttaaactattatacagatgatgggcataaacttattgaagcctaaagataaagagtatactgggtgcctgggtggtgatgtgctangctaaaagcacggaatttggtacccttggccaagttgttttagttcacttaacctggttgtacagtgcaaatacaagtctttactcatttaagaaattattacaatgtgtatatgctagttaatatcttga

SEQ ID NO: 285848 - DNA, 367 bp, Glycine max
agctttttgctgcaaaattcctttatgttggtgtttttttggtttgtgctaaaggtggtcttcgtcattggaagtgcggtagacaggctttgtggttgatttaaggatggcctttgtggataattgggtggtggggtaaggaagaggtttgttattggctgagtaatgacattgttgggttggtgggaaacttggccgtataggaatgatagtcacagcatgggtttctccctctttctcaccctcttcatttgccccagttttctcagtcgtcctagtaggatgatcaaatttgcctcttttcggatccacttcgatctttttgctggcgaaaaccaaatctgtaaaacttgaaggtgtgtaaccc

SEQ ID NO: 285849 - DNA, 362 bp, Glycine max
  unsure (1)..(362): unsure at all n locations
atcttctagccaaatggacttaccttgaattaattcctttgatagcccctttgagcctatgttcccctttctttgttttgaagctcattacaagccttaagtgataaaccatgataacaccttaaccttaaggaattttggagctttggaattgttttgagaataagggtggggggtatgtttcattggaagatatgatttttggccatgcttaatgttttattttggccatgcttgatgtatatatatattgcctagttcttgctttaatcttcaaattcctactatctaaaaaaaatgaagaaaaaaattttcaactgctacaaattttgcaaattcatactattcanaattaaataaaa

SEQ ID NO: 285850 - DNA, 377 bp, Glycine max
atcattatacatagtccgcctttgcttgaccttctttatgcttaaaaacagaaacattaagcaaaagatcaagaggaattagtgggttaaaaccataaacaacttctaaaggagaacaattagtggtgctatgaacaactctattgtaagcaaattcaacatggggtaaacaagcttcccaagtttttaagttattcctcaaaactgtcctaagcaaagttcccaaagtcctattaacaacttccgtttgcccatcggtttgtgggtgacaagtggttgaaaataacaatttagtgcccaacttgcttcacaaagtcctccaaaaacgcagatcatgaagcctaggtataggatgcgtatacttaatggcgatgtta

SEQ ID NO: 285851 - DNA, 283 bp, Glycine max
aagcaggagggccacaataaacaaatataaaaagaggccaaacaaatcaggaaaaccgaagaaactgacaagccagaaatcatggtcaaaggagagcaacagagcgacagcgaaagccccaaaccccaaaacgaagatggcacagacggaactactgcacgcgaggcgaggaacaacaacatctgactctgcgtgaggctccgaaggcagaaatccaccaacgggggacaaacgaatccctcaagcatcagacaccggaaaagaactcgatactcagcgacag

SEQ ID NO: 285852 - DNA, 381 bp, Glycine max
  unsure (1)..(381): unsure at all n locations
attccagcagccaaggacccctttggtctctttgttaggactngaaatggtttgggcacatgaattaacaaatataatggttgttttaaatttcataaaaactctagtgcgattttttaatattctgtctttcacattaaagatctatagggtctggtttgataaacttcttcactccataataaatgttaaaaggataaatttcttctaggagaaaaaattacaagaaaaaaaatgaaataagttgttcaatcgttttaatgttttattgatattgtaaaatgacaatcaaaatggaacaaaagaatttactaaaacgtcaaacaaaacaagacggaggagggagtacatataaaatggaatattacatgatgcagaatg

SEQ ID NO: 285853 - DNA, 342 bp, Glycine max
tcaggatttcaaaagactgctctaacagcctactggtatgacttatcaccatatattgcatgatcgatcatgttttgatttttgactcccttccatgtgaagatgcctttgctattgaaggaggagaagctacagagcttaagttctcactgcttatgagaaactgctgaggggcaccggaatatttacttgaaagctgccaagaattacttggaaaagacaccaaatgaatcttatgtagaattcttatgacttctgcaggtgctatttaattttcagatgatgcatttgtgacgatgctagcacgcatgatcgcaatgttggttctattgatatagagat

SEQ ID NO: 285854 - DNA, 298 bp, Glycine max
tcaagctggacagtgtaggtgacatagcgaacaacatcatcttttaggttcattttttggcagcgaaggcgcggggaggtcaatcatgcacacgcgtgaacgacgtggtgtcgcacgcctgactttattcctcctcgagagtgacttgggatggtttgcacccacctattgttgaagcatactcctcacaccctatccatgccaccatgactctgggaagcataccctcattattaatgacattatgaccgtggattggagggcctacgtccttagcttgaacaacatcatactattg

SEQ ID NO: 285855 - DNA, 532 bp, Glycine max
  unsure (1)..(532): unsure at all n locations
caccccaacgccancacacagaacgagacaaccgaatgactagcgcacgaaacacatcnnnnnnnnncnaaggcagagnngaatgatgcgtcgctagacnccgcgannnanacnagnncccggggagncganagacgagacccgaccgcacgcaatcattttgagcgagacgagggcagcacagggagagaggagaccaccngccaccacaacaagggcggcccacaaaaccgcaaagagaacaaggcaaaaacgaacggggacgagaaagacagggaggacacccaaaacagaaggaccaacaaggaaagcacgaccaccagcctgaaatgccagcccaccagaagagaccaaaaccagagacagcccaagggagaccgtagatgangaacaagccgagcaaacatacagagacgcgcccaaaacggtagcactaggacgccagtcaagaaggcacggcacaaccaagactgggaaaactcgagccaccgaaaccgcacaactcgcaaaaacaaggcagagcaggccgacg

SEQ ID NO: 285856 - DNA, 295 bp, Glycine max
tttctttctatattatgcctatgaagaaattgagttgtggtgctgagttgtggccggactgtggaattacaataagtacttacgcgctcctttatttttttacttcagacaattgagcataagaaaacctaccttgtaagtatccatgccttaagcaacatacacactactttcgatttctaggttgaaatacaggctgctgatagctttggcacactgtcttcttatctccaccgtgtcttgtatactctgaatttttcactgaaatgttaactggataaaatagacatctgga

SEQ ID NO: 285857 - DNA, 606 bp, Glycine max
  unsure (1)..(606): unsure at all n locations
cgannaacgcnggggttttnnaactagaataccgtgagntacagattccngtctagcactantaccanagtagctncacagntcattatantagcatgcaaagacgtntatggtgggtagccntagagggggatacgaggacngattgctcncactngtatgattactcataggaanagaagagaccgtgtcgagtgcatcgnagacacttgatgtcgtcgatcgtatagtagtctcttcgacanagccgtgatcttatagtatgctctactctcctcatatancatgtatgctagagacagaatgctatgcgagaatcattatgtcgatgatgagcatagcggtgtgatattacttgagacttgaaactgctgtcaatatgtacaaagctgttaacgatggtggagtactgtactaaataataatatagttctagtaagatatgggtgtttgcgtgtgtcagtaactgtaccgactctcacaagtatggtaacaccgttcgaccgactattcggtcttcagagaatatgctcacctagaccatgtacattcgatatgcgagcacttatacggattaaaataaggcaaatagtgagttctgtactt

SEQ ID NO: 285858 - DNA, 376 bp, Glycine max
  unsure (1)..(376): unsure at all n locations
ttatcttcttaangaagttttcttaagaaagcttctcaaggaagctacctagtctataaatagaagcatgtgtaacacttgttgtaactttgatgaatgagagtcttgtgagacatacttcaaagttccacttctctacctcttttattccttcaatttcgtgctcccccctctctctttctctccctctttcttttcctccattgaagcatcctctccaagcttcttatccaaggctcatcttggtggtgaagctccttcttccatggcttattccctagtggatggtgcctcctctcacctcttctcctttgtcttccgctgcatctccatggtggaaaatcaccattaaaggacctcattgaagctcaaagat

SEQ ID NO: 285859 - DNA, 384 bp, Glycine max
attcttggaaggtagtcatacctcacaaaatatatatatatatatatatatatatatatatatatatatatatatatacatatatatatatatatatatatatatatatatgtttagggagagagataccttggatatgcgtgtgtgtagcaaaaaaaatctcacaaaatatatatatgtgtgtttaggtagcgagacaccgtggatatgcgtgtatatagcaaaaatatctcacaaaacatatatacgtgtgtgtgggtagcgagatacgtgagacacacatgtatatagcaaaatacctcacaaagatatacgtgtgtgtaggtagaaaaacgcctcgtgaaaaaaaagagagcgcgctagaagagaattagaagaaaaagt

SEQ ID NO: 285860 - DNA, 403 bp, Glycine max
  unsure (1)..(403): unsure at all n locations
ctaagcttaacaagttagcctccatcctcatttgattttatcctgaacggaccattcaatccctggaggaccgtttgaggtcatgtgtcttatagcaaaaggggagagctttctttcattgatagagttcacttacaacaacagttatcactctaccataggcatggctccctatgaagctctgtatggtaaaaggtgtaggacacctctatgttggctaaagccctgagaagacctcaccttaggacttgaagtggtacaacaaaccaccganaaagtcaagttgatccatgaaaggatgaggactgctcagagtatgtagataagttatcacgattagaggatgaaagacttggaattcgaggatggcgatcatgtattctagaaagtcactctgtggact

SEQ ID NO: 285861 - DNA, 383 bp, Glycine max
ttaatcttgaaagttactttcaagttaaaatttcttaggtagtgtgttcttagatcttgagatttgaaataaagaagaaaaaggaggaatagatgggttttgctcttgaaactagctttttaaaaggatattttttcaaagtgttctttttttttttgaagggccacaaaatattatatatatataatttcaaagaaacatagcagcaccagaggtactgctggtggttgatacatctgagaacataggaaaataaaaagcccaaaaaacaaaactgagaaactcagatacacctttcccatacataacagaagaaattcagttagccaaagtatcgcactatattggacgaccagtagtttaaggagtcactatagtgcctg

SEQ ID NO: 285862 - DNA, 409 bp, Glycine max
  unsure (1)..(409): unsure at all n locations
ctggtattggcacagtcgagaaaatttaaatctttcgtctctaccccttgtctctcactatccctttgtgtgtgagatattaagatctaagggagcataagatgcaaggttgaatgtgattatactattcttatgatccatcataaagagaaaagtttattccatatgaagtgaaaagttgaatatcccatgaaaccccatataaactgcatccaaatgaattgcagaaaggaaatcagtatgcaaacaaaattccccaaaagcactggttctattatcagtaataaacacaagtaaaaccaactttctaaaatcaaaacttgaaagataaaccaaaatcccaattgcaagatagcgcctataaacacnacctcaaagtccatagataaatgcctagaccttgccacat

SEQ ID NO: 285863 - DNA, 384 bp, Glycine max
ttcttaaaaccccttgttcattactaaacaagttgaaattaatcacaaacacaagcaaggtatcctaactacacacaagagataagaatgaaaaatagaaaagggaaagaaaaagctgggttgcctcccagtaagcgctcttttaacatcaatagcttgacgcattatcctgttatccaggataaaaaaaagttcctacttcaaggaccttcttctcaggtctcctttcctccatcacatgcactttaagacagacattttggcttggtggatctttgtcctcatggaacaattcaaagctgatcttctatgcccatctacagcatcttctttcctatgtctaccacacagcttgcagtagacatgaatgggtggccaagaatg

SEQ ID NO: 285864 - DNA, 431 bp, Glycine max
gacctataaaactaagctatgctgcaacattataatagaccccctcagcttctaaaccaacaacagcagaataattatgatctttcaagcaacacatacaatccagcttggagaaatcatccaaatctgagatggacaagtcctccacaacaacaacagcatgttccttcttttcagaatgctattggtccaagcaagctgtatgttcctcctccaatacaacaacaacagtcacaacaaagacaacaagcaactgaggctcctcctcaaccttccatagaagagttagtgaggcaaatgactatccagaacatgcaattttagcaagagacaagagcctccattcagagtttgacaaatcaaatggggtagatggctactcagatgaaccaagctcagtcccaaaattctaaaaaattgccttcacaaac

SEQ ID NO: 285865 - DNA, 380 bp, Glycine max
ttcttcacgatctcacacgtcgaactacatgtatccttcattggaagaactaagaggggacatgcaaaataaataactctgacactcaaataagtacatgaatgagttgagtatgaaattgaaaagggtgaaataagatctgatctttataacgtgagataggagtttcgagtccttgattgtaagagagttattacagtgatgtaacaactctagataattcctaacttgtaaataatatatagtagaaaaatcatagcttgtaaataatagttaatagataattcatcacttatagattatccaatggattatagataatccatttattatagataattcattactagtagataagtaagtacctgtaacttgataaa

SEQ ID NO: 285866 - DNA, 413 bp, Glycine max
  unsure (1)..(413): unsure at all n locations
tatgaaacctaaagaaaacaagaaataatatgtcttaatattacaatngatatgatttttgaaaagaaaatattataaaaaaacaaaactaaccatgttggatggcatgtgcttaaatctgtaataacagtagtaaaaacaatcttctttaaaagacccttagacctcaaaattcgaagtggaacgtgctgcatcagtggatgcacactgattattatatctggctgatatttcattaggcctttagcaacctcgctgtaaaaagagaaaaagatattttaactgtgacatttgatgttacatcatatttgagaagagatacacatgcacaagaaagtatttttctgaaacatggaatgcagaaaaagtcaataagttttgtctaatattaacacaatgcacaacatacattg

SEQ ID NO: 285867 - DNA, 377 bp, Glycine max
atcttatatctaatctggctaggaaccgttgacagtgatgtggaagtcctccttttacggacctagttatatatatgcttcaattcatactttcaaagtcaaaacagtaacattaaagaatacattctccttaagcccagttgcaccaaataataggtagacaggcaaaaagtttcttaaattacacaatatatagcagttttggccatatgtatcttttatctctatactccataaataaaggcacgccaatagttaatataacaaagagatcaaaaattaaaatctaacaactaagaggtaaataagtgaggtttagttatgaaggtgaaattagttcacgccaaaattctaataattagaaaaacaagacaagg

SEQ ID NO: 285868 - DNA, 406 bp, Glycine max
tagtgacataagccaaacacatggtattggctaatgtccctatgaaagcccatccatgtcccaggttccaagcaaacacagccattccccaccaccacacctgctctccaaagtaatttggatgccgagaataataccacaaccctttgtcaagaatagggacctccttgttctttctactcacaaagttgtaaagctgagtatcagcaatgtatgccgtgacaatgccagatacacacacaactatggctaccaagtcccacatgctcagaggctggttcaccgagtggatgacatagaacggaagagacaatccaatcagaaacacctgcaaggttgtcttgatgtaaattaaaagtaaaagcaagggaaaatgatgactaagagtaaccttaattacctgctg

SEQ ID NO: 285869 - DNA, 381 bp, Glycine max
tgtttgcaagcttctgaaatcttggaatttaacataggagcattttgattacaaatttacaatctcgaggaatttactgaggtgaggatgatatatgcagtacgattcacttgcaaaataatctagatgaaaacaaaacatattggtcctaaaaactaaaccatattgattttctgttgtgaatgcaatcaattgtttaaatatcattcttcttaatttttttttatcttaaaattgcatggttactagtctatttttttgaaaggctaaggaaaatggttactagtctatttaagattaggagtttaggactgtcatattttctagaataacattttgcaattgctaaattccctgaagcaaaataggtgtttgaacttt

SEQ ID NO: 285870 - DNA, 421 bp, Glycine max
gctatcaggacctatgaaactcagctgcccccactaccaggcaagttaggtttctttctccagaagcaaccgccttctggaggaagaatctggaaagcccaagtgggcttgattgctatttgtacccccctttttactaaatgtacccctctttaccttttgtggtgattctttttccgtaacgttacgaaactttatgaattttgtaacgatacttattttctttccgtaaggttacgaatccttacggatcatgtattgactcttttttagctttcgaagaagttacggaaactcacggattgcgcaacaacacctccttttggttttcgccacattacagaatttcacggatcccgtaaccctgtttccttttgatttccggcgcgtctcacgacttacatattgtgcaacaaaaggg

SEQ ID NO: 285871 - DNA, 383 bp, Glycine max
atcttatcttgacatacttagtcacacaagtgtattttttaaaaacctttgtgaaaatattattttatcaatcaccggacaacaatgtttttgttctcatcaaaactactttttattcattgaacgacattgttggtaacttggtttgtgcacatctgcttgtgaaaaagttttcatttttatctaacccccttctagtgtgatatctattatttcataaagcctctatcaagatccttgaattttaagttggacagcttgctaataatttggctgaaaggattaccaaaaacatttcaaccttaactcaagaaatccaaaaagtggtaactctaaggtggtgggagatccttgaatctcctatcacacgtcaaactaatgac

SEQ ID NO: 285872 - DNA, 411 bp, Glycine max
  unsure (1)..(411): unsure at all n locations
cacaaattaaaatctatgaccttagagactttcggttgtttttggagactngaatcacacacgtgtcatcttcatgttggtgaatgcacaatcaccttggaagatgttgctcttcaactgggtttacgcgttgatggaaaatcaattactagcccaacatattatgattaggaacatatgtgcacataatatataggtgttgttccccccatagaatgcattaatgggatcaacacttaaactaaaatggttgaaagaaaacatgtttactttccaagaagaacccacaccacaataatgagaaacccattattgagcatatattttatgatcgatcggtagggtgtcgatgcctgacaagtcagcgaatagaattcacctaatgtatctacctctgttagcagatcttga

SEQ ID NO: 285873 - DNA, 381 bp, Glycine max
  unsure (1)..(381): unsure at all n locations
agctttttccagggccaaattctcgtgcatgcagaggcttcttcaagaaaaactccaaactccctttgcaaatctgatttcaggcttaaataggtggccttgttcgtgctcgtgcgcatagcgcacgtatggaccgcttagtgcacgttagtaatttttggcttagcgcacttctctcgcttagcggatgagctaaagcagcgcgcttgatgacctggagcgatgcgctcagctaacctgatagctcatcttcttctggattcttcctcgcgcttagccactgagtgtcacgcttagcgaatgctcactaagccagcatattggcttagcgagaaggtganaacaacacttttgccaatttgcctaattaacctaaaattg

SEQ ID NO: 285874 - DNA, 419 bp, Glycine max
  unsure (1)..(419): unsure at all n locations
agcttaaatgttggttntgtatatcgattcttccataattacacgtctttgttgtaaatnntgatacagataccatgatacttgatattttaagtaaattaacatttggattcaatcatgcatgtgtattttgttgtttgaaagttaacgattgcttcgaatagagaggcaaaaattaaattaatttgttaatttatggtatattatgtttaatttgatttgttgaggtgtaaagtttaactaaaatgatatttaaggatggtaaagtgccttttaacgtgcgattcgcattcatatttttaatcttaacatctataggcaaaaattaaattaatttgtgccctattactatcctaaggcctaaatatgctgctcacccagaacaccgggtcccttgctttcaagtttcaagagtcaag

SEQ ID NO: 285875 - DNA, 356 bp, Glycine max
tgcttttatcctaagagaagggtctttgatattgcattgctatgactttctaataaacttggtgaatgaccaaaatgcccctgttctttgttactgaaaagagtcaatgcaatgaaagcacgcgcagtatgctaggggtgttgtcgacatgaaaagtcaaacctcgccgaggcactcaattggctttgatggaacagcaagcaacgaggggcatgcggcattgaaataatgctgctatctaattaatcaaatagaattaaaataataaacatgttgaaagggatcatatactacattactagttattaaggttatacacatacacacctccataaggtaggttaagtagatccgta

SEQ ID NO: 285876 - DNA, 414 bp, Glycine max
tacatcaataggaataataataaaaaagaaggcatatattttctgccctctatagctctacgattgtataattggcccctcaaaaaattagttacacatttatcttataaaatttaataattttgaccttttgttattttgccatcaaatttttaacataaaggactaatgtgatatttaagtgataaaataacacgaatacattaatattataaatgacatgatattttaaatatagactaatatgacatggattgttcaaattgtgatcattgttactacgtcactaaactattagtgcaagtagcatatatattagattactagtttattttttatatcgcgtcaatgctatattattacttaaatatcatgtcaataattgttaaaaatcactaacgtaaaaaaatgtgg

SEQ ID NO: 285877 - DNA, 385 bp, Glycine max
ttgtatgattatggggtacccatcacatgtggtactaggtggcggtcgggcgatgatgcacaacaagctttccacatccacaatgcgcgcataaacccaccatccccttttgcccacctccaactgagctcacgtactcccacgtagcccatatcctcgtttctctcaacaccgggtacccatcaatcctcccaagcttccacaacatccaagcaaaacaacattcaaacagcacaagctatcacagccaagcaaaacagagcaaaggcagaaaactctgctcaacacatcaaccaaaatcacagcttttctcacttaaagaccacagtaacaattccttcgatccaattcgttaaccgttggatcgactccaaaattttactgg

SEQ ID NO: 285878 - DNA, 313 bp, Glycine max
  unsure (1)..(313): unsure at all n locations
tgattagagaaattggtgcggcagcttccatgtttatgttttcattctaacantgncgagggccaccttttcgtggctttgggtactcaatttcaacttncattgaaatgtaatgtaattggatctatcttgatgtaattacaacataaaaatgaatgtcatggattcaagtgacgctcggtcaagaaataaaagttgcattcagtttactaaagaggtttccctttatgagtatttaagttataacataagcacgaaatggaggatatttagagtgtacgctacaaatttatcgatgacactacaacttatg

SEQ ID NO: 285879 - DNA, 383 bp, Glycine max
ttcttccatcaatcatgaaagtagttgcttgtaacaacaattacaaaaagattgatcatatcgggttctttattctttatttgtctatttagtaggatttctttgtaattaataaattatcccttttaatttatttgtctaccaacattgaaatccttcattcatggttacactttgtttagagattaagaaagagtttagatttagaaatcttttgtgcaaaaagttaaactattttaataaagtgttcattcttcatttgttttgacctcttaattattttttatcactgcttaatattagtttgggtagcaatgaccatgttggaatagaccacgactatggatccggggtggacccacattcctaagccttagcctact

SEQ ID NO: 285880 - DNA, 368 bp, Glycine max
aaactcaagctaaaaaaggcatgcgaagtgggtggaattcctagtgcaattcctcttagtcatcaaacataggaagggaaaaggtaatattgtatccagtgctctttctcggcgtgatgcatcactttctatgcttgaaacaaaatggattggtctagaatgtttgaaaagcatgtctgaaaatgatgaaactattggagaaatttgtaaaaattgtgaaaaatcctcacataatggtttctgtaaacatgatcgcttacttgtcaaagacaacaaattgagtgtgccttaatgatatagtagaaatacgctcgtttgtgaagcacatgatagatgtttaatggggcatcttggggtccaaaggactc

SEQ ID NO: 285881 - DNA, 372 bp, Glycine max
  unsure (1)..(372): unsure at all n locations
atcttcttaanagcacttgactcgatttgcctaattctctccctactcacacccaacatctcccctatctcttgcagggtcttcgtccttccatcatccataccaaatctccatcttaccacctgcctctctcttgcattgagactgtccagagcctcttctaggtccttcttcatgaactgcttaaggagctgttcttcagctgtttcggcatcaggatcagaaattacttcctggtaaaaaacacacaagtatcagcaaaatgaacatcaaatgaaagcaaagagttttttttttttttttctggagcaaaaatttgaacgagattaggacagactgagggtttaagattctggttgatcccaatctttt

SEQ ID NO: 285882 - DNA, 413 bp, Glycine max
acccagcttacataaaacataaaagagatcgagtttgtatgttgacctcccaacatgattcaacgaatgatttgcatattgatcctctcaaagacttataatttattattaatccttccttgccaagacctggttagtacgaactttgggcttccttgccaatatgagtatgttcctctcaaagacttatgatttattaattaataacttgttttattaaaaatgattatagttataaaactataaacaattgtatagaaaaggttattctaaagacttaattcggtccctgattataaatataacttggttttattaaaaatgagtttctcagttattaaaaaatgtaagtaagttattcaattgaatccctcaatgattgaaaaattgaaaaagtagttggtttattattt

SEQ ID NO: 285883 - DNA, 381 bp, Glycine max
ttcttgtgtaaagaattaatgtcaatttctcttcaattttaggcaaaaaggagttattttgaagaagtgctaaagttgacgtctcactaagcgagctcaatgcgcttagcgagtgtcatccgcaaagagaggcatcaacgcgcatagctgataggaggaatcaagaagggaatctgtcatgctggcatgcactcagggcgtcattagcttgctccgtgagtcgtttgtcaccttccaggcttagcgcgagtttcgcgctgagcgattattcacttactcgcaccaagcgcgagaatggcattaagtgtgacgtcgaggtcagtgagcccttttttatgcctgacttgtggagaatgtaaggggggtgaagagagtggtgac

SEQ ID NO: 285884 - DNA, 413 bp, Glycine max
  unsure (1)..(413): unsure at all n locations
ntccctcttagacaacctccacattttctcttttgttaaaaggcacttgctagcattgccacacctcttgggcttgagtttattcctcaagtaaagaagttgttggatgagggtttggttcgcaagagcttaaatccttgtgcttttttggtgcccaaaatacgtattattaggcaccaagtccctaaaataggtggtatgatgaatgttttgagtggtgcaacactcttttgtaaaatcactcatgcacccaacatcttcatgatttgtgtacataaggacccattaggtaggtttgttcttatttttggttttaatacaaacttaagtgctcatatgggacaccttatgtttgtcatatttttttgtaggaataatcaacacanaaatatagaaaaaggtatgctttcttg

SEQ ID NO: 285885 - DNA, 384 bp, Glycine max
  unsure (1)..(384): unsure at all n locations
tattcttcattaagaggcttcctctagaagcttcctcgtggcttctttgagaagttttctcaagaggcttctttgagaagctacatccttatctatccatccctctattaactaaattaacttccttaaaaataattacggatgaaaataacgcaacaaataatcaaacatcaaacataattactaataatatatagatatatatatcagggtgttacacatcatatattgagacgctcgaaattgaacaatggaagctctcgagaaattaaaattgtcataaattttcacacggatgtccgatcaggcacatcagatatcgagacgctcgaaattaaaaaaacggatctcgagaaattcaaatggtcataattntcacacgga

SEQ ID NO: 285886 - DNA, 412 bp, Glycine max
tcaccggatgatgccgatcgaacatttcttaatctatcttttccaattgttattcagggattgaacagaataaacaatggccagtgtcggtcgttatatggccccgactgatatctttcagccgacattgcgcaatttcttttacaaacgctggccgataatgttcttttatttacggtagaggaagttttttgttttggtgttgcctaaaaaatttacaacgtaggacggctaggtttttccgtgcgagctcaaccgagggttcgttccgaccgacactggcatgttgttcttctcatttatgaggcccataaaacgttggcctaccccggcaaaaacaaaaaaaaacattattcacggaaattgatcgagaaaattgatagctaacgtctgcatggagagttgaccgatc

SEQ ID NO: 285887 - DNA, 380 bp, Glycine max
tattttttattatccggaatcatatcatactgtttcctataattctaatgtatatgggcatggctacgccatggtttggtctcgctgaagcatacatgacacggaagatatacaacgaaaaaatgaaaaagatgcacatgaagaacacgagggagagaaaaactccaacatgaagatttctactatcaaaacgggtttcgaggataaaacatcaagtgggtgtttctcatgggtctccaaacagcaacacaagaaaaattctcgaatttcagattacaacgaaaccctatctgctgccaattcatgattgacgatgttgggcttttatacatcttaagtactaattaatgtttctttacatgtgtcatctgtactagaga

SEQ ID NO: 285888 - DNA, 352 bp, Glycine max
acagaaaggcactggctgtttttgtcagacacagtgttaccagattcgctatcacttatttaactgtgcacaagattgcttcagctaaaggccaatcttagaatgatgtttacttcggaagaatggtagaagactaaggcagctaaagagcccaaagggaaaaagtaacggatgtgggtcttatgccatcattttggaatgatactaggtacactataacggccctaacctttcgtaagtgagttgaggtttgtggataaagaataaaacaaacttctcgaggagtttcacctctgaagcattggaggaaaatataaggatatctctgcaatcattgataaacgatgggatt

SEQ ID NO: 285889 - DNA, 412 bp, Glycine max
cagctccacccgggatccttagagtcacctgcggcaatcttcttttcgattcattctatgcacccgtagtggtccacattgtgtttcgtgcatttttattctcgttttgcttactttttataccccctgttgacgtgcttaagccattttacttaagtcatttctcgcttaacttaaaaataaaataaatttccaccgaacgtttgaattgtattatccattaacttcggttaaaataaattccgaccgttcggtcgtgccgtaaccacgttggaaatcaaaaagaggtaaaaaataatataataatcaaaaagacatcttttagtaaaataaagcggaaaatcaatcggacgttttctctttgggatttctcattcttaatcgaattgattaataactaaagtgaaactaa

SEQ ID NO: 285890 - DNA, 415 bp, Glycine max
tcttatccaaggctcatcttggtggtgatgctccttcttccaaggcttattccctagtggatggcgccgcctcttacctcttctcctttgtcttccgctgcatctccatggtggaaaatcaccattaaaggacctcattgaagatcaaagatccagcctccatagaagctccacaagcaagcttccatcaaagaccgttgtcctttaccacctctagcattgttgtggtctaggaattgtcatcctcaggaaaagcagtggctaacttcatatattagtagaatgtattagtacaaaaacttgatgatgttgaaaagagactatgttgatataactaaaactgaacatgtagcttctaatgactttgtaatgtcctacattaatatataattgttaggctgcatattcacataat

SEQ ID NO: 285891 - DNA, 371 bp, Glycine max
ttctttcacatggatgtccgattcggggacataatatatcgagacgctcgaaatcgaacaacggaagctctcgataaattcgaatggtcataacatttcactcggatgtccgattcggggacataatatatcgagacactcgaaattgaacaacggaagctctcatgatattcgaatgctcataacatttcacacggatgtccgattcggggacataactcatctagacgctcgaaattgaacaacggaagctctcgagaaattcgaatggtcataagatttcacacgaatgttcgattcggggacataatatatcgatacgctcgaaattgaacaaccgaagctctctagaaattcgaatggtcataaca

SEQ ID NO: 285892 - DNA, 358 bp, Glycine max
  unsure (1)..(358): unsure at all n locations
tcagctntgtccccaaagcttcatgtagactcgttttaaatcgcgaagtgaacctcggatccctgtcagatacaatactacaaggaattccatgcaaccttactacttccttgatgtacaactacactagctttgccattctatacttcatccgaatgaaatgttatgaccattcgaatatctcgagagcttccgttgctcgacttctagcgtctcgatatattatgtccctgaatcgaacatccgagtgaaatgttatgactattcgaatttctcgagagcttccggtgttcaatatcaagcggctagatgagttatgtccccgaatctaacatctgtgtgaaaagatatgaccatt

SEQ ID NO: 285893 - DNA, 375 bp, Glycine max
tgcttgcagcgcatttctgatgaactttaccagaaattgcggtaggaggtcccaggactgggaagctcccagtgaagggttctgcctttcttacagctgaaggatcatccagatcaagccttgctataagttcaccagcctgcaaaaggtgatacaattttattatctttttcaatttcaacaattgtacttcctatgtggaatagaatgctatatacctgcattgcttgaccttcagacattttgaaatgaataatcccagaagcaggcgaaagaagaggcatgcacattttcatgacctcaacttcagcatacggtgtgtcagcatcaacatgactgtcatctgcaaccaaatatctcagaagcttgcatggt

SEQ ID NO: 285894 - DNA, 409 bp, Glycine max
ttgaagtgaaaggatgtgactcttcacatttgaatttgaatttcagcgttcaagggcactggtaatcgattaccaaaacattgtaatcgattacagctttttgaaaataattggaacgttgtaaattcagtttgaaaactttttcaaactcattttgctactggtaatcgattacaacaatctggtaatcgattaccagagagtaaaaattctttggtaaagggttttttcaaaaactcatgtgctattcaaagttttgaaaaactttttaatacttatcttgattgagtcttctctttattcttgaatcttgatcttgatttttgagatcttgaaccttgaatcttgattcttgtctctagactttcttcttgagtcttgaattgttcttgatttttatcttgaactc

SEQ ID NO: 285895 - DNA, 381 bp, Glycine max
ttgtaagttatatattcaatatattttatatgttttatttatgtacatgtttatattttgataaatgaataattttaggtagtataagtcaatatatttgatatcttttatttatgtacatgtttatattttgataaatgaataattttaggtagtataagataataattttgtatagggctctttgtattgttaatgttatatatgctagattatattttgataaataaatagttttaggtagtataagattatagtttgaattgttaatgttatatggtagattagatttaggtttatatgataaattaagaatacttttacatactctaagttattaattttatatggtagattaggaatatttttaattttgatatg

SEQ ID NO: 285896 - DNA, 419 bp, Glycine max
  unsure (1)..(419): unsure at all n locations
tgtgtctaagctgactatgtagctgctcaatatcttagttgttaatgctttcatggggagcaagagcaattgatggagctgaggtagaagctgaagcacagttgatgattggaatgattatctgcctaatgtcaaagtcatcagagacacacacccacatctntaattggaaaagttcatcaatcctcttatcattgaacaccaactttgcaagtgtagtcttccccatgcctccaagacccactatgggaataacacacacacttttatctccatcaccatccccatgagggtgaggttgcatcaaaagcttgataatttcttccctatcattatcccttccaatcactgctgaagcatcaatatgtgaataagtcatttctcttctttgcacaagtctgtggtcaacagaaatcctc

SEQ ID NO: 285897 - DNA, 340 bp, Glycine max
atctttgatcattaatcctgactcgccataagccttgatccatggcgaaaatgccacttcttatcctcggaaccctacaaaataacgagatggagggagaccactctactgacaatggaggtggaatactcacaatccaaggagatgagacccctatcctttggtggtgcagagcttctcgatgagagccatgtttctccgtcggccaatggaactatgagggagagagtgttacctttgaggactgcgcctaggccaataaaccacactagatgtgctgataggctgttggactatactatatctcaccgggactgatgtggagcaaatgaaccaaaca

SEQ ID NO: 285898 - DNA, 375 bp, Glycine max
tcgtcagccactgtgcagcgcagcgataaaatgctttacgctgtcgaacatccaacctaaaagcgagagccggatgagatgcctcggaggttcaacacttgaggaaaagcgtgacggactgtgtctggactaaagcagacaccccatgagcaagcttctgctattcagtcgggcgatatgtccggggagacgcctgagcgtgcctatactgtacgactctgatgaggacactcaaagtgaagacaatggagccttgaagttgctcaaggctcaaacggatccctatggatggtttggcatattacgggactcaaggctacgttcgatctgcacagcataagagatataatgcgctatgaccaacagcatgcacca

SEQ ID NO: 285899 - DNA, 386 bp, Glycine max
tgtcttatgatgatgaatcaagttgattcaagtagttttgatgataacaaagatgatgacaaaaagcccaagagaatgatttcaagattgagtcaacaagtttcaagaatcaagagaagtttgattttaagattcaagagaagatgaattcaagattcaagagaagaaatcaagaagacttcacaagggaagtattgaaaagatttttcaaaaaacaaacatagcacagttttgtttttcaaaagagtttttctcaaaattttctaagttaccagagtttttactctctagtaatcaattaccagtttcctgtaatcgattaccagtggcaaagtttgatttcaaaagctttcaactaaatttgcaacgttccaattgatttcaaa

SEQ ID NO: 285900 - DNA, 413 bp, Glycine max
tgtaaaagtccttctgattctatttatgcatttcttactttatggcttgagatgaagttcaaagattggacctcttgctagtttttattgatgaatagcttaaacacttgtgcttgaatgaaacaaaagttttgagactgtggtttaagctgctttccttgatatatgtcttatgcctaacttcatctaattgtacaggttacattttattcttctctttgaacaactgcatgctttgtgaaagacaagtgatgagggcattttggttcatccttttatcatgcaatcaatcaaaactgtaaatttgggggagttcttagtcgatgaatacgactaacttttgtgtataaaacctgtgtaaattgtatcaaaatcctccaatttatggttattttgtagtgttgtaattactt

SEQ ID NO: 285901 - DNA, 386 bp, Glycine max
  unsure (1)..(386): unsure at all n locations
ttcttttccctatacatctcttttataagacttaatatagactacaatttattacttttggttcaacgttcgtttgagagctttccaataaaataacaaacacacacttaatcacaataaacccaaaaaccttgaatgcaggaaattaagactaaaagtatcatcaaggtcaaccgaggatttccaagttgttttgcttgaccaaaagatacactttcaagacaaaaagaacatttttaaattaatgaaattcaaataggatgttttttttaagggagaaatcaaactccgatattaaaaaatttataataactcacttgttacttaacaaattgagttaaatctctttaatatattntttaaaaaaaaaactaaaactaaaaccg

SEQ ID NO: 285902 - DNA, 422 bp, Glycine max
ttcaactgaatttacaacgttccaatcaatttcatattggtgttattgattacaatattttggtaatcgattaccagtgtgtttgaacgttgaaattcaaattcaaatgtgaagagtcacatcctttcacaaaaatgctttgtgtaatcgattacaatgatttggtaatcgattaccagtgataagttttgaataaaaatcaaaagatgtaactcttccaatggttttcaagtttttctaaaagtgataactcttctaatgtttttcttgaccagacatgaagagtcaataaaagcaagaccttaacttgcattttgaattacattttgaatacattgatttcaatcctttacaacccttgagtctctttgaacatcttcttgaattttcttcttcttcttcctttgccaaaagctttctaa

SEQ ID NO: 285903 - DNA, 383 bp, Glycine max
  unsure (1)..(383): unsure at all n locations
ttattcttcttcaactgcacaaggctcttaatatttgaagagtatccttgtggaaccttcacccgacgaagacactgacaaaaacttatctattccttcttggacaaagtatggcaggctgggggcaagtaaattttcttcccatcagaccttggatgcaactgtgatcgtatacccatatcagctagatcttgacgggtattcaagccatccttcgtcttgccttgaatgttaaggagcgtcccaatcacactgtcacaaacatttttctccacatggataacatcaatacaatgtctaacgtcaagatcacactagtatggaagatcaacgaaaatggacctcttcttccatatgcaactctgactnttatccttcttttg

SEQ ID NO: 285904 - DNA, 417 bp, Glycine max
  unsure (1)..(417): unsure at all n locations
tgcctntggtttagacatgattgatacatgatttggtacttgtatgaattgatttgggcaagattggatgagaggaagtgggattttcgaaatctgcacttatgcagaattttgctgtcaaaataggtgcagcagaattttggctttgtgcagaaaaatgcttgtgtgtggttggctgtggaaagtctagtgcagaatgagttctggatgtttgctagtagatcccaacggtcaaaatgtaggcttatgcactatagacttccagtaaaattttggagtcgatccaacggttaacgaattggatcgaaggaattgttactggggtctttaagtgagaaaagctgtgattttggttagtgtgttgagcagagtttttctgcctttgccctggtttgcttggttgtgatagcttgtgct

SEQ ID NO: 285905 - DNA, 383 bp, Glycine max
tttatctttgaacaatatacttggccttcatttaattgtctttgggcttggcggccacgctcaacaaagtactttcgacacctactgtacgttgatttcaccaatgttgttatgggaatgttgcgacaatcctttaaaaccttattgatacattctgagaggttcgttgtcatgtggccatatcgacgtccttctctatcgtgagtcatcgtccatttttcctttgagatgcgatcaatccatgttgctatggctagactcagttcacgaaatttttctaaattttgataaaaaaatgtgcttgcatggagtgtaggctacataaaattagttatgaataaaaattttaagtataaatgaaagtaaaataaacgtgaccatca

SEQ ID NO: 285906 - DNA, 381 bp, Glycine max
tctataatatttttgcttgattctctgcatattcttctacattctaagtttctcgtacttgaaacctttaacctttgatgttattttctccttctccactatgagggaaggtttctggttccaattttttccttaacttctttgtgtgtgtgggtgttttgggtttggacttacttagatggaagtttacatgtgggtttttttataattatttttaaaactttttgagagaaatgagggtgggtttacaaagagagtgagtgagagaagattaattaataatagggaagttataactttctcctttatctgatgggattcaaataacacctttttaaactggtgttagtgcagtaaacatccatatatggtacatgctcc

SEQ ID NO: 285907 - DNA, 380 bp, Glycine max
  unsure (1)..(380): unsure at all n locations
tttatcttgaatggtggcttanggagttgaggctgacaagcccaaattttgggctttgtgatgaactcgctaagcaagcttacctcgctaagcgagttcatacgttttgatgaatttctgggtttcaggatgaactcgctaagcgcgccttgttccgctaagtgatatcatcaaatttgtttaaatttcgtcattttgtatgaactcgctaagccattgcactacggcttagcgagtctttgaattttgcttttatatttctgggttcgtatgaactcgctaagccgatcatccgtgcttagcaaacacacttagatagttctgaaacttagaggctntttgcattccctttgtggctcgctaagcccaaatacgtctct

SEQ ID NO: 285908 - DNA, 409 bp, Glycine max
  unsure (1)..(409): unsure at all n locations
tgttcttgattnttcctcagttctttaactagctttgaacaatatacatgtccttcatttaactgtctttgggcttggcggccacgctcaacaaagtactttcgacacctactgtacattgattcaccaatgctgttatgggaatgttgcgacaatcctttaaaaccttattgatacattctgagaggttggttgccatgtggccatatcgatgtccttctctatcataagccatcgtccatttttcctttgaaatgcgatcaatccatgttgctatggctggactcagttgacgaaatgtttctaaattttgataaaaaaaaaagtgcttgcaaggagtgtaggctgcataaaattagttatgaataacaattctaagtatatatgaaagttaaataaatgttaccat

SEQ ID NO: 285909 - DNA, 381 bp, Glycine max
tattcttccatcagcagactcacaactgactagccgaaagtctcaacctgctctgataccactaatgtaacgacctgactcatcgctacaatatcaccattctaaatcgcgatcatttcaaattttaaatgaaaaatccattaattttcttatataaaaaaatgaaagtcatttttgtgttgacatacattcaccaaacaacacacattacttttcttatataaaaaaatgaaagttatttttgtcttgacatacattcaccaaacaacacacattacttaagtggatacgtatatattagtatagtaacttagtacacatcattcacataatggaaattaaacttgttcatacatataattcaaatatgcgatttacatc

SEQ ID NO: 285910 - DNA, 405 bp, Glycine max
ttgatggagagatatggcctcctctagtttctcattcttatacaagaatacaacagatttatgaacatttattttttgtcccgagccactacaaaagcatacataatagatctgataacctaagcttgatgtacagaagcctcaaccacgaattatgtcatcgatgaagaatacatgcaccactgtgactcctgtactattcccaaaccagaagggtttgcaattaccctcattgactgacttttaaatgagatatgctaggctctccatgtgcaagacaaagaggtacgggggtgaagggtccccttgcctcagtccccatgtaggagcaagagaattgcaattgatagctaacgaagtgctcatacaattagagagaatatcagtcatccaagagggaatctt

SEQ ID NO: 285911 - DNA, 384 bp, Glycine max
tcttctttcatggtcatcatatacaagattaatctatgttacttatattttatctattaattcttttttatcaaagttagtttttcacaacaatttcaaaatattctttatttaaaaaatatgaaaaaaactttaattatttgtaagaatatcctcataatttagtatcttacttaagtacataaatgaatttataactatatttttcctctttcaataaaaatatattttcttgaatgttaattttcatcatcataataataatttataggattaattaagttcttactcattcgactttttcatattataatcttgtgtcccttacaatattgttaacagcttttatccttcattaagttttcgtcactcacttttagtccc

SEQ ID NO: 285912 - DNA, 415 bp, Glycine max
tggtcttaattataccaagatagatgtttgccctatgagttgcatgttgtattgggaagaagatgaaaatttgcagatttgcaaacattgcagaaaatctagatggaaagcaaaaggtaataatggtaaaaagaatgtactagcagatactttcctttgaaaccaaggttgcagaggttatttgtgtgttccaaaatagcaaagtccatgagatgacattttttaaatagcaacccaaatggattgttgaggcatccaagagttgctaatgcatggaaaagttttgatcaaattcaacctgaatttgctttagaacctagaaatgttcgccttggccttgcaagtgatggcttcagcacatgccgaaccatgaataataagcatactatatggtcggtgcttctaattccataca

SEQ ID NO: 285913 - DNA, 382 bp, Glycine max
  unsure (1)..(382): unsure at all n locations
attctttacattgggttacaaagatgaacgaggatggaattgaaatgactatagtcacatacagtataattgtagggggattcgctaaaatgggcaatgctgagtaagtaaaccagataaatattcctcattactgcatctttgtattggatgttcgtacttgttagatattcttttgatcatataccgactctcctgaaagattaagctattaagtgaagctatataaatggattttgtctctaactcgtcccattaacttgggctcgatgcacagctaatatacatgcccactttaattgtgctgttntttttttgtaaaaaaaattataataattntataaagaatgtagccagcaagggttcaatttggactacttgg

SEQ ID NO: 285914 - DNA, 399 bp, Glycine max
  unsure (1)..(399): unsure at all n locations
ntgtgctccaactcaacaggtaggtgatttgatttattatagaccaattggaagggaccaatcctttgtatgctattttgtatgcccacaaagcttcatctagtttttgggaccaatccttccttgactgagcaattgttttctctaggatctcctagaattccctattagagacttcagcttgcccattggtctgggggtggtaaagtgaagctaccatgtgtttgacagtatagtgttggaggactttcttgagttgggaattacataaagaagatcctccgtcacttatcaatacccttggtgatgcaatcctaccccgcaagggcattggatagaaaactccaagtagattgggccagatatgcaagagaaggccctatggttcttatgagcctt

SEQ ID NO: 285915 - DNA, 366 bp, Glycine max
  unsure (1)..(366): unsure at all n locations
atctntgagccaaaatcctgactcaccataaaccttgacccagggtgagaatgtcaatccttaccctcggaagcaaaaaaagaatagaggggaaatttccaatcaaagaaaaagagaaggaaaatttccaatgaaagccaaaaaagaaaagaaggaaaattccccaatcaaagagtgggagaaagcaaaaagaaaagaaaggaaaattcccaatcaaagaatgggagaaagtaaaaaaaggaagaagaagactgaaagaaagctcctgatcaaggatcgaaagataacataagatatgtgcagagaggtctttggaccggacaatatctgaacaatacagaattgccaccaaatgaacgataaaag

SEQ ID NO: 285916 - DNA, 404 bp, Glycine max
  unsure (1)..(404): unsure at all n locations
gtgcggacttggactccgccagttttggttctatgtgggaccaaaaagaggctaatctgagcattctactcggacgactgacaaaactgnggcaaatgatgatggtgagaaaaaaggagaaacccatgctgtgactgccattgctatactgcctagtttaccaccaacccaacaatgtcattactcagccaaattcgaacctactccttactcaccacccatctatccagaaaggccatccctcaatcaaccacacagcctgcataccgcacttccaatgacgataaccacctttagcacagaccaatacaaataacaccaacagataggaatgttgctgcacaagcctatagggttcaccccaaattcctgtgtcatatgcgaaacttgatcccatatccact

SEQ ID NO: 285917 - DNA, 385 bp, Glycine max
tgcatgcattctttgaattctagtaaaaaaaactccacaaacatattctaatactcatgcaccttttacattcaaaaccggaaagttagattcctaggcatgagtcatccttttggcactttagtctagcttctacaaactacccacacactcacaatgcgcacaatttatttcgcaagctaagttcctcaaaatcatgcgcaaatgcaattgaggcatttcaccgaacacttggtgggcgcatgtttaagcatgaaaatcaagggaatgggggcaatgtggcatgccccattatctcataacgcaccctaggccgaaggccatcccctacaacccctcaattcaacaaaaacaagcaataattcaaggataaatccctcacgtt

SEQ ID NO: 285918 - DNA, 378 bp, Glycine max
  unsure (1)..(378): unsure at all n locations
tctcccctatnttgctataaataggggaagttgttataagaaaagggttcagccccttaggcacttctctctctttcgaatttgcttggaaaaattatttccgcgaagaaaatccaagtcgaggcgcttccgaaacgttttcgtaacgttttcgtaaggaatttcgcgaaggtttcgaccgttcttcgatcttcaacgggtaagtacctcgaaccaagcttttcaattcattctatgtacccgtggtggtccacattgtgtttcgggtatttatattctcgattcatttgctttttatacttccttttgacgtgcttaagccattctatttaagtcatttctcgcttaacctaaaaataaaataaatatccaccgatc

SEQ ID NO: 285919 - DNA, 364 bp, Glycine max
tgtttctaaaggcgtaagaagcaattatggagatgcaggaagcaattgtctctaaataagggtgaaatccaaatacaccttcaaaattcaaggtggattgacatgcctcttttttgccccagttgcacgtcaaaaacaaaaggcaagttcaatgagggtgttactaggtgcacccaacaccattgcttgtacatccaacaattcaagtgaagtggcaaaaatatccttcacttaaattttaaaacccctccctcctaccttgcatttgtatgccgcaccagctccgttcttgcccttcttccttcgttttgcgttttgagccatgctgccacagttaaggccagctccaccactgttatgtcat

SEQ ID NO: 285920 - DNA, 418 bp, Glycine max
ttgtggcactctgttacacacgtcagccctccatgtcagttctggcacaggagcacatatatcatgcccttagcaattggactctcaactgacaggttatctctaaccatttatattatttgaatatattgcaatctccttatcacgtggcaggtattcaattatctctaagctacacattatctataagccataattatttacttgtcattacctacaagtcggtaattatctgtaagggttgttacaacaccgtaatagcccctacaaacaatatcctgcaacttctactctactctataagtatcaggtttcatctcactcttttcatactcattcatactctcctaattaacatacttacttgagcgtcagagtcctttgttttgtaggccccccctcttgtcctcttcacaaa

SEQ ID NO: 285921 - DNA, 382 bp, Glycine max
  unsure (1)..(382): unsure at all n locations
ttgtgactcttggcaatttctttaaaactagtcacttaaaaagttgtgacttttgaaaaaatctttagaaacaagtcacttgaagaattgtgacttttggaaatttatttttcgaaatcagtcactggtaatcgattatgtgactctttattttaaattttgaaaattaaaatgtttagaagctatggtaatcgattacaagtattgtgtaatcgattacaaaagttgaaaatgtttaaacacaagttgtaactcttgaaatttgaaatcttaacgttttaaaacactggtaatcgattactaccttctggtaatcgattaccagagagtaaaactctttggtaatgattntgtgaaaacttcttgtgctactcaatatttt

SEQ ID NO: 285922 - DNA, 419 bp, Glycine max
  unsure (1)..(419): unsure at all n locations
gctacaaggattntgcgagactccttngagggaaatttaatttgtataattgctactatttccccgtctgcttgttgtatggaagaaacacttactacattagactatgctagccgtgcaaaaagcataaagaataagcctgaggtcagttaccactgctattgttccttacaagttacaattcttctaaaagcagttttaaagctttgtgtgttttttaaaaggcaaaccaaaaggtttcgaaggttgttttgttgaaggacttgtacagggaaattgatagggtgaaagaaggtacactcaccaccactattagttttggaatgtagagaagattttgtatcttatcttttgtataatatgaatattgcagatattcgagcaacaagggaaaagaatggtgtatatatttctcatga

SEQ ID NO: 285923 - DNA, 371 bp, Glycine max
atcttttttcttcagagcttattatagaagatctttgttttgcacgatagagtgaattgctcttctaaaaagaaatatatgtgatagactgcaatttaccatacttatttccagtgctcgatacaacttcagtgagaataaaatctctcgcagattatatgatagagctcctgattgcatgggtatgcaatctgaattgcgttacccaagaaatatcgcataccaataccagtaaccgtctatcaagcttatacgtcttgcatgtgagtattaatacatatattaaaaataatcggctccttttatacttaaagagaatcgttataatagctaattgagtaatacggtatacacatgcacatcttcacgag

SEQ ID NO: 285924 - DNA, 352 bp, Glycine max
  unsure (1)..(352): unsure at all n locations
tctcttcttatctactatccgtgtaccattanatttatgcttttttttactgataggggatcgactcctgaagcccgcggcaatattcggtggagaacagcgggcttgaaatatgaaaaaatatcccttttttgattcttatttttacccccattaaagctcttgactctcttatatcccatttccagcattgtgtgaggatactaacataaggtatgatagtgtaatgacatttcaacgacaacaaaagcatgtttaaagcatgctagtataatacaggaattaagatgttctctcccgacaagtagttttttaatgtaccatatggccccgacacagtcataagaacatt

SEQ ID NO: 285925 - DNA, 382 bp, Glycine max
ttcttgtgccaataaagatggtgaaaaaattcaagaatagttcaataccatttcatctcttgaaaatctacacccttgtggagtggatcccacctcaagagttccaatcttacatacggagagaagatcagtggaagactcaatgacatataagcatctttataggttgatgagtactctcttttccattcttccattctacttttgaccaaggatagttgaccatattcctcagaagcatcactgaaaatctcatcagcagcctgcagcaccaaatcactttgtgactgatatgcttggctctcactatcactctcatcagtgcttgattcaccttctattttatgatcatcccattccatggatgtgaccttattataac

SEQ ID NO: 285926 - DNA, 418 bp, Glycine max
tgaagaggatgctttaatggaggaaaagaaagagttatatggttgagcacgaaattgaaggaataaaagagggagagaaatgtgtctcataagactttcattcatcaaagttacaacaagtgtaacacatgtttctatttatagactaggtagcttccttgagaagcttctttgagaaaacttccttaagaagttagagcttggctacacacacccctctaataactaagttcacctccttgagaagcttgcttgagaaaattcctaaagaagctagagcttagctacacacctcctataatagctaagctcacccccattccaataatacatgaaaataaaaaagaaaaagtatctactacaaagattactcaaaatgccctaaaatacaaggctaaaaccctatactactagaatg

SEQ ID NO: 285927 - DNA, 376 bp, Glycine max
agcttgccttatgtctaaaagaaatttgtcccaacagttaaagtgagactgaagggaatatgtgggccatcatcgatgagtgcaaagagaagctaaatctagcggcaactcacgagcaaaggctagaggatgagtacgccaagatatcagaagaaagggaagcaagggaaagggtaattgattcattgcaccaagaggcagcaatgaggatggaccgatttgctcttactttgaaaaggagtcaagaacttccccgattgttagccaaggccaaggcattggcggacacctactccgcccccgaggagatccacagacttctcagctattgtcagcatatgatagacttaatggactatatgattagaaaccacta

SEQ ID NO: 285928 - DNA, 416 bp, Glycine max
tgtgtggcggctggccaactatgtatcttgggtgtgtatctggaaattatcctctggtaatcgattaccattcgtgggtaatcggttacaggggttaaaaatggagacaggatgttaaatggcctctggtaatcgattaccaattgtgtgtaatcgattacacagggtgatagggcactggtaatcgattaccagttgggtgtaatcgattacacagggtgatagggcactggtaatcgattaccatttatgtgtaatcgattacacagtgtaatttttaatttccaatgtgcaaaggctgtgtaattcgtttttgggcactggtaatcgattacatactttggtaatcgattaccagagaggaaatcccttgagaaagacattttgactatgcgtagccgttatgggacgcattg

SEQ ID NO: 285929 - DNA, 381 bp, Glycine max
tttatcttgatgcaatcctaccccgcaagggcattggatagaagagtccaagaacattggaccaaagatgcaagagaaggccctagggttctcatgagtcttaaggtagatttcgggcccatgggctaagtacgagcccacttatctttgtaaatattagattaaggtttcattatttttgggccttgtagttagggctccataatgtaggtagggtgccttagaaatataggatttttcagcccttgtattttagggcacctagactagtttttgtattaggggtagttttgtaatttcatatgcactaagtgaatatttgatcgtgtggttggaaataaatttaattgaattggtagaagcccaatccaattaaatttt

SEQ ID NO: 285930 - DNA, 413 bp, Glycine max
tgtgaatcccaagataatcaaatggtactttagatcttggttacctgaagaaatagagcccaaagtgaaatacatgaacctcaacagttgcttccacaaagaagtcaacgggtggcatctgatattatttttatacttgtaaaggataaatattaattttatacttataaattcaatgttaccgctatgagacagcatcgactcacgcgcaactgctttggggtaaatattaattttatacttgtaaagtggacattgcctctatgagacaatatcaactcgaggggaactatttcaaggtaaatattaaacaccttaaatgcttgtaaagccaacgttcctctacgagacattgttgaatggggggaaattgcttcagggttaatatttaagtcttgtaagcacaccttaaa

SEQ ID NO: 285931 - DNA, 383 bp, Glycine max
tctgctttgttgtgaaaaccaaaagtggcaatgaaaaatacttatatgtttgtaaatgttagtggaaatttgtcggttgccaagaattataggtagtctcaattgtagagacgaaccatgtaacaccccaattgggctatgaagggttttcactaaattttaatttaaaggaaattgttatttaatttatttatgaaaatacgatttagattttcacgatataattgtatatcaaagacatacattaatttacaaataattccaacaagtcatacactagatatagataatgactatgatcatagaaatatctcaaaagaaaagttaggtgaaatatgtgcgagcatcaacaatgtaaccactacctactgtattacatctaa

SEQ ID NO: 285932 - DNA, 410 bp, Glycine max
tttctatctagtgctactgcttagatggtttgttttatggaaacaacgggctttgaccacaatagttgtgttcgactaaattcgagtttcttaattgctctactcgtagtattaaactatgttgagtttatctcatcttttatgaaccatcttgaatagagtaaatgtcatgttttgtttgtatttcattgttgttgatgatttagtttggtgacagataattccttaatgaagcattgtctttaaacttttagtgtggctgaaatatctccttgcgagacaccaaaattcaaatttcaaccacttcattaatctttggcctattatgctatttcctaaattacttgcacctacgtctttaaactaattcgatgttcacacaagatgccatcattttcctccttatattc

SEQ ID NO: 285933 - DNA, 379 bp, Glycine max
  unsure (1)..(379): unsure at all n locations
tctttcttgtgaagttctctgtgaaatgagataatcaattacacgtttttgaaaatgcagaacaaaaatggattttaatgaattaatcaattaccctcacttgttatttctcattaatgactcttgatatgatcttatcttttataaaaacacattttaaagtcatccaagggaattactttgcatttctttaagagattcaagttgatcaagattcattcactcttcatcatgagttgataatcaaaggaagagcttgaagatgttgtgatctacacatcaagatgtattccatccaattntgatttctctctactttcttaatcttggttagggttaccaagggtttttcgagttgataggatttcaactcttggaa

SEQ ID NO: 285934 - DNA, 413 bp, Glycine max
tttagagaagaggaataagcagaaaaatattgctttgactaaggcatagaagattgaaagttcctatgatgatgaagatagcaaggaagctaggttgactaagattgttgagaaatgtcacaatcaggcaacatctttttacctgttcttatctctctttgactaagtctttgtatacttgtcattgtctgttactgactacttcggctttttcgtccagttgacagcttttggtgaagaacaataaattccatcttggggagtaaaagtttttggagataaggttattattctaagacaaagtttctcagtcattctctatacatggtttgctgcttttatctcttaattgtttggatgctggaagttattaatgttttcattttgtgaattgcagaaagcctttccccctc

SEQ ID NO: 285935 - DNA, 383 bp, Glycine max
tcattcttctacattcaatttcgagcttttcgatatattacgggactcaatcggacatccgagtaaaaagttattgtagtttgaatttgctcagggcttcggtattccatttcgagcgtctcgatatattacgggactcaatcagacatccgagtaaaaagttattgtcgtttgaatttgctcagagcttctacattccatttcgagcgtttcgatatattacgggactcaatcagacatccgagtaaaaagttattgttgtttgaatttgctcagagcttcggtattccatttcgagcgtctcgatatattacgggactcaatcagacatccgagtaaaaagttattgtcgtttgaattggctcagagcttctacattcaat

SEQ ID NO: 285936 - DNA, 411 bp, Glycine max
gtgagaaaattcaaacgacaataactttttactcttatgtctgattgagtcccgtaatatatcgagacgctcgaaattgaataccgaagcgctgagcaaattcaaacgacaataactttttactcggatgtctgattgagtcccgtaatatatcgaaaagctcgaatgtgaatgtagaagctcagagcaaattcaaacgacaataactttttactcggatgtctgattgagtcccgtaatatatcgagatgctcgaaatggaataccgaagctctgagcaaattcaaacaataataactttttactcggatgtccgattgagtcccgtaatatatcggaacgctcgaaattgaatgttgaagctctgagcaaattcaaacgacaataaacttttactcggatgtctgattg

SEQ ID NO: 285937 - DNA, 378 bp, Glycine max
tattcttgaaatcatctattcagatgtttgtagccctatacaagtagagtcccttggaggaaataggtactttgtaacctttatagatgatttcactagaaagacttggatttatatgatcaaaagaaagagtgatgtgtttaatatatttaagaagtacaaagcttatattgaaaatcaaagttctaggaagattaaagtgttgagaactgatggaggtggtgaatacacctcaaaagaattcctagaattttgtgatgaagcaggaattgtacatgagttcacaccaccctacactccacaacacaatgggttagcagaaaggaagaatagaaaaattatgaatgcggttaggagaatactcaaatgcaaggatct

SEQ ID NO: 285938 - DNA, 414 bp, Glycine max
tgttgttcttttggatgacgtgagtattatgtatattctttccctttcatcctccatttatagctactatatactccattaaaacatttcaaacaattgtggggaatatttaattcggttccatgtatcatatgttgtcttgataaaaactaaaaatcaagtagtgatactgatattagttacttttgtgggattcacacagtaggtacagcctgttctacaaaataatgtgttaactgattggagtttcccctagacttgaatgtaaaaggctgacaatttgttactaaatcctaatttgtacctttgtttaaccaaaactgttgatgcatgtttggtttaaaattatatcggagaaataaatgcttatttatttcagcattctaagagcttctgattaagagaagctactag

SEQ ID NO: 285939 - DNA, 370 bp, Glycine max
  unsure (1)..(370): unsure at all n locations
atcttctcattcatggttccaaaatttcattttcattcttagaagtttgaggcatcaagaacctgagctctttgttcatttgagtcattttgggtaacttcattcaaggtaaggggggtctttccacttcttgaatcataaccttgttgtatttagaagttaggcttcattgcatgttgttttgatgttcaaatattcgtagctactgccttgtttggaactagaggatatgctgttttttatggaaattttaaggttagaaatgagttctttgggtgttaaaacttangattagccttaaatttcacttaaattggagttttctagcaaaagttatgaataaaataagttgacagacattctgtagaat

SEQ ID NO: 285940 - DNA, 412 bp, Glycine max
ctgcctatttgcagcccattttcttcccattctcaatttgcaataccgttttgcaccagcttcattaatcttaaaataaaatcgaggctaaaaaaaaaagacaaatttatcaaatatcatatgcaaaataatatatatatatatatatatatatatatatatatatatatatatatatatatatatatatatgaaaaatagtaaagatagggtttctaagtggtgtagatataaaaagttatatataactaactgacatacctttaaaattgttgcagagcaatcatcaaaataagctttaagtacgcctgaaggtgcagaccatctatcataatccataagaaataatctgcaatcagctactagtgttccaagatatcctgcaagcaaggcttgtgcttcaccaattgcg

SEQ ID NO: 285941 - DNA, 369 bp, Glycine max
tttctttatgtcttttgttcctgaatttataatataaagatctttcttcatctgttcctacgtctctacccattctcattcatttgcatgtttatttctttacgtttaaaatgccagatccgacgacgagtccctcgaaggtactaatacctgtgacccgaccatcgatttcaagcaagaaacgaatcagacggagagtgaagaggacgaggatgtgggacttcccccggagttggaaaagatagtcgcccatgaggaccaagagatggggcctcatcaagaagagacaacactagtggacttagaaaccggcagtgggaaaaaggaattaaatataggcatgggtatgaccgcacccatccaagaaga

SEQ ID NO: 285942 - DNA, 365 bp, Glycine max
  unsure (1)..(365): unsure at all n locations
gttcaaaaccaactaatatcaaaatttactattacttttaangcgggaatatgcctaacagcactggatatgcattgaatctgcactacttcagttacaagtgcaatcaattatctaaacctatagttatttaaaagtctaaaaaactatattgggatagtctaaacagaacccaagatatgcatatgcacacgtatgcatagcaataaacaatcagtcatattctcatcacaggcataacactctcaattgtcatagtaatatgccatccttatataataattatagacataattcacaggctattagaacaatgcaaaccacaaccattctacaatagatactcctgtaatatagccttcaat

SEQ ID NO: 285943 - DNA, 350 bp, Glycine max
agaagtccctgtcaggcagacccaaagcacttgaatcactcggactcgagcgccaacgtattcctaggagaaaggacggcaatcccagcactccaagggacaacgactacctagactcaccacaaccaatcgccaaccggatgccgagggaagagccctcctcagagcgggaatccctcaaagtcggtgtaccgagaccagaaagcaaatgtagccaacggaacagaaccctcccaaatcgggaaccgccctaagcaacgaaatacagaaatgagcgccacaaactacgaagggagggcagtgccgtcctacccacgagcaggaccccccagaacaacccgacctccccg

SEQ ID NO: 285944 - DNA, 332 bp, Glycine max
ctccataccagtggcaacagttgggaagaacataatttctctaccaaagcctattggaaggatctatgagattattcttaaacttcataagtgtctcacgctcacttgggatgcacacactctctctgcatggtaagctcagcaaccaaagctggacaaagactaaaatataaatggaggaggaattcatgatcatgctacgcaaatatagaaaacaagtgtgtttttataaagctgatcgtaacaagtgtagttgttggttctgcatatcaatctatcaacttctattaatgatacatgcagcctacctgtattttctcgacattgatatt

SEQ ID NO: 285945 - DNA, 373 bp, Glycine max
ttcttctttgttttctaaaaggtttaattacattttttaccctaattttaattgattgtcactagcactacaaacagtttttggtcatcacatagaataatttttgttcaaattttaatttaatatctgtcttctgttgaaaatggacgaaaaatatgatgcttatgttatagcggactaaactagagtcattttttataccacaagcaaataaagcaatccagtcaaatatcatacggagtaaccatgattaacaggtatacggtataccaactctttttgacttgcaacctttcatacaaattctaaataactgtcgatctccttataatattatataatgtacacacaatcccacctttttcttgaaata

SEQ ID NO: 285946 - DNA, 338 bp, Glycine max
taacatggaacaaatagagcatcttacctgagccttatcatttattgttcgcaagattctagcataatctgtgcccagcatttgaatgacaagatcagcccaaaacgttccccaaagcctgttccacaaaccaaataaaatgtttagaaatactcactaagtgtgcctcagatatgacccaaatctgatatgtaaggtagttgaaatggcgctgaaaaggcctaatggtgcattgcataaaaaaagatatagctagtagaattgactaatcacttcctaaaaagttggctaatgagtcgggagacccctggacaaaaaacttgctatattgtacactg

SEQ ID NO: 285947 - DNA, 365 bp, Glycine max
  unsure (1)..(365): unsure at all n locations
atctttaacaaaacantcttcgtgaggaaggacccatgtatggttaacatagccaaaaaacattggccatggggagcaaacaacttcatactgcttaaagcaggcatcaaactattgctcaagaagacaatccactaaactctcccaggcttccattacataatccaatgcatttatttgaccaacaagggttctacactttgccttcacatccttatcaatgtgaaactgacacaacaaattcatggacttaaggaatacaactttcaccgcattcatcaatgctagatctctgtcggagacaataactctagggagtgcatcacgtataaagaaaagacgacgacacctatctagagcccaaa

SEQ ID NO: 285948 - DNA, 420 bp, Glycine max
  unsure (1)..(420): unsure at all n locations
ntaaataggcattcctatctgcaaaagaataaattttctggtagaaaataaactcaacccaagtgtgagatggttgatgcatccaataaaaaggtgagacttcataaatcataaaaatgatggtttactcaaataaattacattttatttttcaagaacaatttaaattgtgttgagattttttttggtaaatcataaaatgatgtagaaattaaatttaaagatagaaatgaaagagattgacaaggagaagtaattgaattaagacatgaaccatcaatgagttgtatatggggtttgtagtcaagaactaatctttatgtgttaattattaaatcatttaatttatatatgaaaatactagaaattttaaagacaattatttataagaaacttataatatgactatacttgattcac

SEQ ID NO: 285949 - DNA, 377 bp, Glycine max
atcatattataaattcgaatggccattgcttttcactcgaaggtccgatcaggcgcatcacatatagagacgctcgaaattgaacaacggaagctctcgagatatgcaaatggtcataacttttaactcggaggtcggattcatgcacattatatatcgagacgcccgatattgaacaacggaagctcttgagaaattcaaacggtcattactttttactcggaggttcgattcaagcgcgtcacatatagagacgctcgcaattgaacaacggaagctctcgagatattcaaattgtcataactttcaactcggaggtccgattcatgcacatataatatcgagacgctcgaaattgaacaatggaatccctcgag

SEQ ID NO: 285950 - DNA, 429 bp, Glycine max
tactcaagcttaaaggagaagttggttttctgaactctaaactttttactttacttattcaataaagatgctgaatgagagctcatatatgcttgatgaggtgctacagcttgggaagaatgttggaaaccagagaggacttgggtttaatcataaacctgctggcagaataaccatgacagaatttgttcctgccaaaaacagcactggagccacgatgtcacaacatcggtctcgacatcatggaacgcagcataaaaagagtaaaagaaagaagtggaggtgtcactactgtggcaagtatggtcacataaagcccttttgctatcatctacatggccatccacatcatggaactcaaagtagcagcagcagaaggaagatgatgtgggttccaaaacacaagattgtcagtcttgttgttcatac

SEQ ID NO: 285951 - DNA, 378 bp, Glycine max
tgagccaaaatcctaactcaccatataccttgacccaggtgagaatgacaatccttaccctcggaagcaaaaaaaaagagaaggaaaatttccaatcaaagaaaaaaaaagagaaggaaaatctccaatcaaaaagaaaaaagaaagagagaaggaaaatttccaatcaaaggaaaaaagagaagacaggaaattcccaatcaaagagtgggagaaagcgaaaagaaaagaaaggaaattcccaaccaaagaatgggagaaaggaagaagaacaaggaaagaaagctcctggtcaacgatcaacagaaaacagaagaaatgtgcagaaaggtctttggaccggacaatatctgaacaatacagaggtgccactaaatg

SEQ ID NO: 285952 - DNA, 400 bp, Glycine max
tgcctcatagaggtccaggaaggacaagtcagccttagggactagttccgctccggagtatgatagtcaccgctttaagagtgctgtacaccagcagcgcttcgaggccatcaagggatggtcgtttctctgggagcgacgcgtccagctcaaggacgacgagtatactgatttccaggaagaaatagggcgccggcggtgggcaccactggttactcctatggccaagtttgatccataaatagtccttgagttttatgccaatgcttggccaacagaggagggcgtgcgtgacatgagatcctgggtaaggggtcagtggatcccgtttgatgccgacgctatcagccaactcctaagatatcccgtggtgttggaagagggccatgattgtgagtat

SEQ ID NO: 285953 - DNA, 378 bp, Glycine max
atcttgttatttgaggcttagcgtaccatcaagcttcaacttacagagagtagttcatgcttagcgccacaggtggtaagcgtacttccaagagttcaaaaaccgtaagagattggtgcttagtgcctcctggccagcttagcccagcttaaaagctcaagttacagaatggatatggggcttagtgcaggatagcacgcttagcgctgctacaatgaaatgtatacagagaagaagtggcgcttatcgcatcatccacgctaagcccacaggttaaagttcaattaccacaaagatatggggcttatcgcagtgatgtgcacttagctgaactattcagccaaccaatcatgggtctctatgcttagcacgagcaag

SEQ ID NO: 285954 - DNA, 407 bp, Glycine max
tgcacacaagattctccttacctggcacttcaatttcttctgggtgggacatatagatgtcttcctctaaatccccatgtaagaaagtagttttaacgtgtaactgctctaagtgaagattctctacagctacaatatttagactaactctgatgatagtcatctttacaactggagagaagatctctttgaaatcaattccttgtttctgctgaaaccctttcaccataagtctcgccttgtattttcttctaccatcatattctccctttagcctataaacccacttattctgtaacactttctttccttctgacaattcaattaaagaccacgtcttattcttctgaacggatgtcatctcatctatcattgctagctcccactcaatagaatcattccccttc

SEQ ID NO: 285955 - DNA, 377 bp, Glycine max
tctttctttttagtctcagctgatgaagatgaattcgtggctacttcatgcactcctctaatgacaataacatcatttctggcactaaattgctgggagtttgaagccgtcttctcaattaaatttctggcttgagcaggggtcatgtctccaagggctccaccactggcagcatctatcatacttctctcaatgttactgagtccttcataaaaatattggagaagaagctgctcagaaatctggtggtgaaggcaactggcacatagttttttaaatctctcccagtattcatataggctctctccactgagttgcctaatgcctgaaatatcctttctgatggcagtggtcctagatgtagggaagaatttctc

SEQ ID NO: 285956 - DNA, 409 bp, Glycine max
tggagcagacaatctatatactcaaggtgtagggttagtgttaggtttactgttgtattttatcctagtgacaacaataaagttgttttagttgtatctactttggcatagtagatttaggcttttcccctatgtaatcttgtttttgtctctctgtaaccaaacatcacatatatataaatcagttgagtgtggttagtgaagtgaacaaaataaaacaaagaagggagttgaattgtgttttcaaataaacttctcagtataattttctcaaccagtttctagatgaattacttataaaagcattatttaataaatgattatagaataagcaataatagtgaaataggaagaaaatggcatagcagatttatactggttcatcccaagtcataaggctacgtccagt

SEQ ID NO: 285957 - DNA, 544 bp, Glycine max
  unsure (1)..(544): unsure at all n locations
gcacccgcgatactcntactacgacggcgcgcagaagaacacaggagacgacatggcggcgtaacaatattactannnnnnnnagaagaggggtctttgatgacgtggtagaacancccanggcnaaancgagctcgggaccgggggagccacnagagccgaacagcaagcaagcaatatcttgcaagcacccaccagccggagaaacgaggcggccaaaaacggagccccacccaaccacccgcacaaagaacaagctcaggacaacaccaacgccagaagacgaacacaccagagagcggcacactaaacggaccagaaccctcgcaagcagccacaggacaaaccccgacccagaaccccgcacgcgaagcataaaagaagagaccagagggaggggaacgagggccaacggcgacaagggacaaaccccaacacaaccccaaaggggaccgcccgcggctcaccaacccccagcagaggcaaaaccacacaagaagtacccacccagaccgagggcggcaacagaagaccccaaaaggcc

SEQ ID NO: 285958 - DNA, 325 bp, Glycine max
tgagtcatgtgcccttgtatgcaatgcttgagcctatgttattgcgcctggcattggatgtacgtggtgcatgccgactgtgcatgaatgcatggaccgaagacccccgagaaaaggagccccacagagcttaattgctgtcgttaaatatgtactggaatcagcttgaatactatgtttgtggactgagtgcgtgaagttcatgaaaagcatggccaagtgacaattggatatctcatgtcccacgctagagattgaatatgctttgcacctaagttaacagattggatatagatcgaagaaccctgagctagtgagtgataac

SEQ ID NO: 285959 - DNA, 382 bp, Glycine max
  unsure (1)..(382): unsure at all n locations
taatcttattttgcaaatattnacaatagacctcctgaacctcagcagcaaaatcaaccacagcagagcaattatgacctttccagcaacagatacaaccctggatggaggaatcaccctaaccttagatggtccagccctcagcaacaacaacaacagcctgctccttccttccaaaatgctgctggcccaagcagaccatacattcctccaccaatccaacaacagcaacaaccccagatacaaccaacagttgaggcccctccacaaccttccctcgaagaacttgtgaggcaactgactatgcataacctgcagtttcagcaagagaccagagccttcattcagagcttaaccaatcagatgggacaattagctaccc

SEQ ID NO: 285960 - DNA, 367 bp, Glycine max
tctgctcaatgtgcaatatgaacacatctctccattcattattggaatgagaatagatagtggtgcaacagatgtagctgctctcatacccatggtttttggataccgtttattggcatatctctctctaatgcgaatgaatcttctatctcgagcttaaatactacttgatcactcttgcatgtggggtgataatattaattaaacatagactcacatgtacggaggaccaataattgacgtacctagcacattacatattgaggcttcatattatgtgtcgacaatatcgtataccatttaatcagcatgttgaattaccactcagctagcgctttgttatgatcatcatacgctcgaccctatc

SEQ ID NO: 285961 - DNA, 294 bp, Glycine max
gatacccagcaggcacagaatcacaaaccaatacctgatgcaagggtccgcgggttgtgcaccactactgaccacaatacagaccggtgcccttccatgcagcaaccaggaacaatagagcagccagaagcataagctgcaaatataaacaatagacctgctcaacctcagcagcaaaagcaaccacagcaaagcaattatgacctctgcagcaacagatacaaccctggacggaggaatcacctcaacctcagaagggcagccctcagcaacaacaacaacagcctgcaccat

SEQ ID NO: 285962 - DNA, 397 bp, Glycine max
  unsure (1)..(397): unsure at all n locations
tactcagcggaccaatttgaagaaaattctgtttcttgctaaatnaagcaggagagctctgatacaatagactcaactcacgacaactcgtagacataactaataagtgcaaatgatcttgtatgctgagaatgatggctctgaacttagtagttggatatattaacttatcaatggaggaaaagactaccgtaatgctaagaactattgccctttggatgatctcgtttctaaactgactcttatttcctctataatgaatgtagactctcctctattcatacagttcattctttgctatcataataaatagaattttcctttgtggaattttctaatatatatcaccgagaatgaattttttgctttgacctattataaatcatactaccatttc

SEQ ID NO: 285963 - DNA, 375 bp, Glycine max
agcttcttatccaaggctcatcttggtggtgaagctccttcttccatggcttattccctagtggatgacgcctcctgtcacctcttctcctttgtcttccgctgcatctccatggtggataatcaccattaaaggacctcattgaagctcaaagatccagcctccatagaagccccacaagcaagcttccatcaaagtgtatgaattttaaaatccaatcctacagtttcttgaattaattaaattcgttattattgtttctgtaattttatgtatttttgacacactaaattcgattatatttgttatttcattcctttagttattttcgtcaattaaacaaacccatgatatttcgattaaacttgtacttaa

SEQ ID NO: 285964 - DNA, 409 bp, Glycine max
  unsure (1)..(409): unsure at all n locations
tgttgccattagaagagaatgagtatgtgattggtattatgactggaattgttagtcagtttgccagattgattgtgaaggaatgcattgaccgtatcccggtgagagtgtgatccttaaattttgagagaaatgactatcatttaatactgatttttgcatgaatctttgaagtatggactgaatgcatgaaattgaggatgatgaaggccatgtttgattgggatagccacttagccacgtgtttgaatgatttatcctttgcacctaatttgagctgaatgaattattgattgattgaaccctgagtctatagagtgttatctcttgctaccttgacttaggttgtaggagagcatcatccacagaaagtgtggttcanagcanatttgtcccanatnttggggag

SEQ ID NO: 285965 - DNA, 383 bp, Glycine max
ttcttgggtgatatggaatctctgtaatttggagaataaaattatatcagtagaaagaatacttcaatatactagtattccttgcgagcctccccttgttgtagaagacaatcggccagatccttcttggcccttgtatggtgaggttgacatacaagatttgcaggtagattgagttcttatattttttaaagttttgtacttttattttctttcattttgtggataattgatttataaaattcatgctaaggtttttttttcctaaatggttacaagctagtatctgaaacagaataattgtgccaacatatttaatagcataatttttacactatgtttgtaatgatgtgttgccatgatgaaggttcgttatgctccac

SEQ ID NO: 285966 - DNA, 418 bp, Glycine max
tttatgtgaaaggatgtgactcttcatatttgaatttgaatttcaacgttcaaaagcactggtaatcgattaccaaaacattgtaatcgattacaactttttgaaattaattggaacgttgtaaattcaatttgaaaactttttcaaaacaattttgctgctggtaatcgattacaacaatccggtaatcgattaccagagagtaaaaactctttggtaaacacgttttgaggaaaatcatgtgctactcaatttttgagaaaaacttttcatacttatcttgattaagccttctcttgattcttgaatctttagtctagaatcttgatcttgattcttgagatcttgagccttgaatcttgattcttgactctaaactttcttcttgagtcttgaattcttcttgattcttatcttg

SEQ ID NO: 285967 - DNA, 384 bp, Glycine max
  unsure (1)..(384): unsure at all n locations
tttctattactttggcttggctcatttccacccctagtggttatgattctactctacttatattttactgctgtctattttaaaagttaaccatacaaaacttgttgttagttatctactgacatcctagtacagaaatgtccgtacaatgaatatataatatttttttctaataatattctaaggtgacaataaattaatatacatgtgtttgaaaagtcacataaccaatatttaattgaaattatttgcatatattcacttttntgcatataataagtatatttaactacttatctcaaatgtcaacgtaacgaacattctacccattgatagagatttgtattcattactagtaaataattttaaaaatgacatatacaa

SEQ ID NO: 285968 - DNA, 420 bp, Glycine max
  unsure (1)..(420): unsure at all n locations
ttgtgtaatcaattagcactgatttggtaatcgatttccagttatagttnctgaacaaaagcaaaagatgtaactcttccaatagttttcaagcttttctaaaagttataacttttccaaatggtttttaaattcttctaaaggttataactcttctaatagttttcttgactagacttgaagagtctataaaaacaaggctatgatttgcaaaaaataacaattcttttgacaacaaacttttgccaattgatttctaatatctttgaacttttgcttcttcttcctttgccaaaaagaattcaccaaggactaaccgcctgaattctttttgtgtctctcttctcccttttccaaaagaacaaaggactaaccgcctgaattctnttgagtctcccttctcccttgtcaaagaattca

SEQ ID NO: 285969 - DNA, 53 bp, Glycine max
ttcttttcttgccccgtgctgtataccacggactcatgtccaccttcaaaaag

SEQ ID NO: 285970 - DNA, 151 bp, Glycine max
tgtctaggcagcgtggcatgagcaaacgaaggatatgtgcataggttccccaaacgatggcggttgggagaggttcaagaattcatcgcactaactcctcttcaggattcctgtcagcctgttgtctacagcttcctccccaattgacgtc

SEQ ID NO: 285971 - DNA, 379 bp, Glycine max
agcttgccacccagctcgcccaggcaagctaggttgcttcctccataagcaactgccttctggaggaattctctgtaaggccaagtatgcctgattgctatttgcacccccatttttactaaatacacctcttgctcttttatggtgattttcttccgtaatattacgaaactttacgaatttctgaacgatgcttgtttcttttccgtaatgttatgaaaccttacacattacataatcatcccttctttgcctttcggaatgttacggaactgtacatagcactaacacctccttttaatatctggcatgtcacggaacttcactgattgtgctacaatgcttaatttgacttctggcatgtctacagaactacacg

SEQ ID NO: 285972 - DNA, 420 bp, Glycine max
  unsure (1)..(420): unsure at all n locations
tgactaatcaaacttccattagtcaacaatggttttctcattaggtgcaccttgactaggtaactgggttaataaaaagaagacagattcatcaataatcatagggataccgtgcacctcagaaatcaaagttccatccagaattttcaaatttgagtaaaagactcgtacaagttcaggatagtaaggtagtttcaaagacataaagggaatcaacctagtgttttgaaacaattgataacaatcaaaatgtttcaccataaaaaaatttaagtctaggtacttgggatcaagaatttgcctagaggaaaagagagatgagtactgtagacgttgttcgttggataagaatagtgtggatgatgacaatcatggtggaattggtgtcggnggtgctccggtggctccgtgacgtcgatg

SEQ ID NO: 285973 - DNA, 383 bp, Glycine max
tttaatataataattgcattaatagaattaatatatatatatatatatatatatatatatacacacacatttttttctttatttactaatataacaaattgcacaatttattaaaatttaagaataattatttgtaagagacagaaaggaacaatttacaattgattaaaatttaaaatttaacgcgtcggagtcaatagcaatcagaacaccactctaaattttaacaaaataagtcgtgccttttctttacgggtcaaaataaatcaagtctatatacaattttctataaatataattgacatatagccaatcaatagtagtaattatgacaaacaagaataataacaaataaagttattttaaacaggttaagagacata

SEQ ID NO: 285974 - DNA, 420 bp, Glycine max
tctctcagcaactttgactgcaaaacttcacaggagctacatggcttctttgcaagtgacaagacaagctttggcatctgagtctcagagaacaccaccctcagtgcaaaatgcaacaacctccacaaccacaccaattagcaacaacttcagtgtgaagagtgagcaaactcatgcagtgttgccacataagagaccagaggaggagcaagagtcagaggcaaataggggtgtgaaaagggttaaggctgtggaaaatgttcctctgcaattcaagcctcttgaggaagatcacatagagcaaatgattgaggagcttcttgattatggatctattgaactctgctctgtcatttcaccccaggccctctaattgaatgtgcatgtttttgagctgaatttaaagtcacaattgtaggt

SEQ ID NO: 285975 - DNA, 384 bp, Glycine max
  unsure (1)..(384): unsure at all n locations
ttctttaaccgatcgtttaagtcgttatctcgcctaataaatgataaaatgaatttcaaccgatcatttgcattgtaatctcgtctaatcactgttaaaacaaaatctaaccgatcgttcacactgtaatcacggttaaacaaaaaaagggaaaaataataataaaaaaatcaaaatatcttgaaaaaaataataataaaataatcaaaaaaatcaatcggacgtttttctctgaaagtttccttggatgaattgactaataaccaaagtgaaactaaggctaaaatcaactcacaaatcaagctntgtccacaaaaatcactaaaaaccgttttaaggtccaacgccttaaatggtcctctttgcttttatcggttatcatgg

SEQ ID NO: 285976 - DNA, 411 bp, Glycine max
  unsure (1)..(411): unsure at all n locations
tgactaggcgagttgattntagccttattttcactttatttattagtcaattcgggtaagaatgagaaatcccaaagagaaaatgtccggttgattttccgctttattttactaaaaggtatatttttgttattatattattttttacctctttttttgatttccaacatggttacggcacgaccgaacggtcggaatttattttaaccgaagttaacggataatacaattcaaacgatcggtggaaatttattttatttttaagttaagcgagaaatgacttacgtaaaatggcttaagcacgtcaaaagggggtataaaaagtaaatgagatgagaataaaacttcacgaaacacaatgtggaccaccatgggtgcatagaatgaatcgtaaagcttggtttgacgtac

SEQ ID NO: 285977 - DNA, 380 bp, Glycine max
  unsure (1)..(380): unsure at all n locations
ttcttctcaagaaagttttctcaagaaagcttctcaaggaagctacctagtctataaatagaagcatgtgtaacacttgttgtaacattgatgaatgagagtcttgtgagacacaactcaaagttcaaattctctccctttttcttccttgaatttcgtgctccccccctctctctttctcttcctctttcttttcctccattgaagcatcctctccaagctttttatccaaggctcatcttggtggtgaagctccttattccatggcttattccctagtggatggcgcctcctctcacctcttctcctttgtcttccgctacatctccatggtgaaaaatcaccattaaaggacctcattgaagctcanagattcagcc

SEQ ID NO: 285978 - DNA, 415 bp, Glycine max
  unsure (1)..(415): unsure at all n locations
tggaaggatgcatcaatggaggaaaagatagaggttatanttagagagaggagggagcacaaaattgaaggaataaaagagggagagaagtggaactttgaagtgtgtctcataagactttcattcatcaaagttacaacaagtgttacacatgcatctatttatagactaggtagcttccttgagaaactttcttgagaaaacttccttgagaagcttctttgagaaaacttccttgagaagctagagcttagctacacacactcctctcctaactaagctcacgtccttaagaatcttccttaagaagattcctaaagaagctagaacttagctacacacacctctctaatagctaagcttaactccttgagatgagaagttagagcttagctacacaccccctataatagct

SEQ ID NO: 285979 - DNA, 383 bp, Glycine max
ttatcttctaacaagcttagaacatcttcaaattttgtctaaatattattacaactcataaccaatccatattcaaaacgacaaaagcttccaaagagctcataacattttaagtttgttctcaatatcattctagctcggaaccaatacatattcaaaacaacaaagtatttcaaatcatcaaaacagaaaaaagttccaaatgaaccaagtttaataaaaatcatcatcttcaaggcgggagattgcaacagaagtaacgtcagttatcaatggttctgtcggttcacctatattgaaaaataaaagttagaatataaatatttaacttgacaaatttaattcaatctttaaaaagaataccttcatcatcagactccatt

SEQ ID NO: 285980 - DNA, 413 bp, Glycine max
  unsure (1)..(413): unsure at all n locations
ntgtataatcacatcagcccacaatttgtatgtttatgctctctcaatgatgttagaggaagttcagccaaatatgggttagcatatctgcaagagggaattctttctgatatagctggtgagaatatcaaagtggataatgagcacaaaggaattccaatcctgattaggaagttgcacggcaaaagggttcttttgatacttgataatgtggacaagctggagcaattggagtatttagcaggagaatgcaattggtttggtttgggcagtagaattatcataactagcaggtgtaaagatgttctagctgctcatggagttgaaaatatatatgatgtacctacgttaggatattatgaagctgtgcaacttttaagttccaaggtaaccacgggacctgtacctgatta

SEQ ID NO: 285981 - DNA, 177 bp, Glycine max
ttcttgctcctataacgagtccacagaggaaatgcttaccacctcacaagactggaaagcggtctataatgactcctctacggcttccacataacgcatagaggatgggcagctcaccaagatgtcttccttgcctgatacgatgaccagatgcccttccactaccaatttcaactt

SEQ ID NO: 285982 - DNA, 413 bp, Glycine max
tggatcatcttttaaaaaaaaaagatattctctttgttttattaatatgggagacaaaaaataacagtatgcaatgataaaagaaagaaaaaactttcttgatttaaatcgatagtgcattcataccatatataacaaaagtactctatccactttatgaaagaatttaattcctttgaacattgaatctcccatgcaactggtgtcaaactaaggcacaattataaatatatggagaagatctggtctttgattatttgtattttttttatgaattatacgccatgactttctgctcatttcataaattaagttgcttattaaatctaacaactcaggcaaaattagattcctttccctgtataaacttaaaacatgatacgactcatttttatcaatagtcctaatcctaa

SEQ ID NO: 285983 - DNA, 378 bp, Glycine max
ttttcttttatgcttatcagaggcatccagcctatcccttacacgattcctcttacttgccatgtctgaatcagtattaacaggagaaatgctacgactactctctgtataggacattcgatttgtaggactaaccataactctcttggtttgaattacattgcaacaagagggactagcctccccattacatgttgcaacaagagaaatcttaggatgggatacatatgagcattgggtaacaatagatccttgagtctgtgatttgttgggggcaaaattcccatatgatgattgaattggagaatggggccgagaaattactttattattgattgtattacttgatggcaacaatgtgttttgacctgagagaat

SEQ ID NO: 285984 - DNA, 400 bp, Glycine max
tttaaaatttgaattaaaacgttcagattctgctgtttatcgattaccatatatgtgtaatcgattacatagtgcaaattttgaattcaaattttaatagctgttgtaaattacttttggccactagtaatcgattacatcctctggtaatcgattaccagagagtaaatttgtttgaaaaagactttttaacttaaatttcttggccaaaccttttgctacttcaattggaattcccttcctatttaatataccctttctaagactctagagactgtcttgatcatccatcttgaatatctttaatttctttgtcttgaataaagctttgagacgcatgtgaacctttggcatcatcaaaacattcagcttgatcctttgtctacaattacttagacac

SEQ ID NO: 285985 - DNA, 371 bp, Glycine max
cttgcattctttatgtttgagtgtccacatagatgtgtgttatgatcagttttgcataaatttctaatcatcatcgtgatatgcatgtcatggaaatgatttggggcattccttttattcctgagccacctgctaagcaaatatcccgacatccatcatgtctcgccatttgtaggccttttgagccaaatgtcaaactttttggtcagaaccttggcctaagatggaaatttccaacctcacccttgggagggagcacaaaaagatcttctgagagaagctccctttaccttaggttacaagtgtgagtcaagagaaaagacaagaatatgataaaaatcaatcaatcaaagattgaggaaaagcaagag

SEQ ID NO: 285986 - DNA, 389 bp, Glycine max
tgagatgaggaagtgttgaagggtgaaacttcctttttttattgttgaccacagagtggtacctggagatatgtcgcgggggtcaggagaccttggggacgtcaggtggggtgctattgcccaaaaccaagcttgaccaatcccgacccaacccgggcatagtcggtcagtgagaacctgtgatgtacctaagcaggcgagctcctggcagtcaacagataaaaggaacaaagaccacaaagcaaggaggcttgtggtggctggccagctgtgaaacttgactgatatgtgagatatgatctctggtaatcgattaccaagggtgggtaatcgattacaaggcttaaaaatgaagacaggaggctaagatggtctctggtaatcgatta

SEQ ID NO: 285987 - DNA, 371 bp, Glycine max
atctttgcctttaaggcttgtacctcatgactttcttccgaagctttaacctcattgtctctcacagtctttagatttgggagccaatccaatccttgtgtccggactctcatccacttatgatagccgccgatgatcccattactgcttcccctaagctctctgtcctttcttcacgccgcatcccatgccttgcgaactccttggagtaccctcgcgttgtggtcactgaaaccccgtgcgatgaaaggcgtgatgctttcgtctgatggcactcctctcatggggtagccaagctgtcttatggcgaggacgggattataattaatacaaccccttgttcccatcagggaacatttggacatccttcg

SEQ ID NO: 285988 - DNA, 407 bp, Glycine max
tctagccaaatggacttaccttgtattaattcctttgatagcccttttgagccttgtgtccctttccttgttttgaagctcactacaagccttaagtgaaaaaccatgatattaccatatccttaaggaattttggagctttggaattgttttgggaataagtgtggggggtttttgtttcattggacaacttgttttgttggctatgcttcatgatgtattttgggccatacttgatgtacattgtatattggttaaatgttggacatgctgaatgaaatgttgtttctcaaaggctaaagagtaaaaaaaaaaaaaaaattcgaaaaaagaaaaagaaaagcaataaagttgagtgaataagatcttaaatggcacaagaatgatgaaactcttggttctactct

SEQ ID NO: 285989 - DNA, 332 bp, Glycine max
ttcttgtatagttccccaatttatggtcattttggagtaaattttgtaaataaatcttgttttatgattaatgctgtctctagaacatttccattggatttaatgatgaaatctgtgcatttttaggtgaaaaagagactacgttttgaattgcaaaaagtagtagatgggttaagctcagcagttgggctaagcgcatatccaccgctaggcgcagcttcagcgtgcttaacgcaaaggagaatatggcagagcatcagcatcaaggttgcgcgctaagcgcgagatcaatgagctaagtgcatcccgttcctcttgccactcataccgct

SEQ ID NO: 285990 - DNA, 421 bp, Glycine max
tgtctcagcgtttacgcgagacagagaccagcatgtcagccatcgctagcaagtaccaagaagaattaaatctagccacggcccacgagcacaatgtggcggacgagtatgcccgagtttacgcggaaaatgaggctagaggaagggtgatcgactcgttacaccaagaggcaacaatgtggatggaccgatttgctcttactttgaacgggagtcaagaacttccccgattgctagccaaggccaaagcaatggtggacacctactccgcccccgaggagatccacggacttctcagctattgtcaacatatgatagacttaatggtctatataattagaaaccgctaggaagtttgtattgtcgctcagatcttgactagttataactttctgaataaaatgagtttatcccacgtttt

SEQ ID NO: 285991 - DNA, 385 bp, Glycine max
atcttgcatttggaattgcgaaagccccactccatcattaagattagtacctgacatctcaaacaaacaaatcaaacgtaacaagacaattatagttgctgtttgaatacctcacccactcaagtgtatcacacaattatggcttttctctaatgaaacactcttgccttttaccactctaattccccttgagttcttaggcaattcaagagattatggccacaacaaagaacaattcaccaatatgtgtaaggtaaggctagacaaggaaaaggttaaccaagaaaaaggctaacaatgtttttaggcacaaatgaaggaaataaaattcagaatttaagaattcaagtaacaatccttcatgcaaccaatatattaccttaaa

SEQ ID NO: 285992 - DNA, 418 bp, Glycine max
  unsure (1)..(418): unsure at all n locations
ntaacattcaatttcgagcgtctcgatatattacgttcctctatcagacatccgagtaaaaagttatggtcgtttgtatttgctcagagcttccacgttcaatttcgagcgtctcgatatgttacgggactcaatcagacatccgggaaaaaagttattgtcgtttgagttggctcagagattcaacattcaatttcgagcgtctcgatatattacgggactcaatcagacatccgagtaaaaagttattgtcgtttgaattggcttagagcttcaacagtcaatttcgagcgtcttgatatgttactgctcctgaatcagacatgcgagtgaaaagttatgaccattttaatttcttgagagcttccgttgttcaatttctagcgtctcgatatgttatgtgtctgaatcggacatg

SEQ ID NO: 285993 - DNA, 381 bp, Glycine max
atcttgcgttttatttcagacattcctttatttgcgcagcccaagtcagtatctagctcctctcgcatctctgatagaagtgtcttctgtagatcttccaggccattgattttgtttgatttttctctaacattggaaagaaaacttgcggcatcaaagtggttcacaatgttgttatacaaagctgtggcaagttctgtttttccgactccagggagtccccatacacccaacatgcgtacagtttcatcataaggcttcatgtctaggagtgacattacctcttccatgcggggccaaagtccaatagggttctgaccagtatgtaaaggattatgagctatgtgtttatagaccttgtcagctatcttttcaataaat

SEQ ID NO: 285994 - DNA, 421 bp, Glycine max
tgcaagttggtaggggatgagaagaataggctgttgataatgatgtatggaatccgtaaattgaaggggattatggaggtggagaagagaaagaatgattctgagaggaaggaagacactgaagcatgcaagttacttggagaagagaagaaaaaggttgctgaaaaggaaaaggaaattggtagattgaaggggtgtatagaggagaagaagagaagggttgattctgagaggaagaaagctactgaagcttgcaagttactagaagaagagaagaataaggctgccgtaaagggggagattgccagaattgaagcagagaaggcagtgaagtatagttttcagattggtcaattagagaaacaggttaatgaagcaaaaacaaagttggtgtctgagatttctacgtttagagaggcaa

SEQ ID NO: 285995 - DNA, 381 bp, Glycine max
tgtcttttgcagtttgaaagtcagacacattatccaattgtgattattttatctcattttttgttatttacttattaatttatttaatgtttttaatcaacacttttaagttttaattatagtgtctatggattcgctcactaattgttattttctaggcttttgcaatttcttatactctttgcacttgcaatttgatatctataatctatatgtatatagtatatacatacgaaatctatatttatagtatatacatatgaaaataatttataaaaggaatttatacacgtggtattttttaagagttttaatcaataaatttaattataatttaaaaataacaaaatgtcacagattaccttcttaacatcagaatag

SEQ ID NO: 285996 - DNA, 420 bp, Glycine max
  unsure (1)..(420): unsure at all n locations
ttgtatgggtccatttacaaggagtttgagggttatgtnttatttccgacgttagagaaacctcaaatcaaaagggcctacaacatcttcaacaagagcttctatcagagatacttgggcgcaacgatattaagctaaaaaaaatgaagaaatcaataaaaaaatagacttgggttaaaaagagttctaatatttctagacgatgttgataacatcgaacagatggagaatttggcaaaggaatgtgattagtttggtcctagaagcatgataatcataacaacaagagatacacatttgctagatcttgttggggtcgaaaagagatatgaagtgaaagtgctaaacgaccaagaatctctggagttcttttgtaagagtgcctttagaaagagttgtcctgaaacaaactacaaagat

SEQ ID NO: 285997 - DNA, 383 bp, Glycine max
ttcttattatccaaggcacattcttggtggtgaagctccttcttccatggcttattccctaatggatggtgcctcccctctcctcttctcctttgccttctgttgcatctccatggtggaaaatcaccattgaaggacctcaatgaagctcaaagatccagcctccatagaagctccacaagcaagcttccatcaagtggtatcaaagcacaagagcttcaagtaggtgctccttaaacctctattaattttttgctttaccttctcttccattggtgtttcatcatttttctccatgtatctcctcacatgtcttgtgctaaatgtttttaacatgattctttagagtttccaccaattaaacttgctatagaagctagatt

SEQ ID NO: 285998 - DNA, 420 bp, Glycine max
tacagtatgcccgagtcattcatccctatgagatgttgttgtattattggcgatcagaattgccattccttggattatagggttgaaccaagctcatgcttttacaaaaaggttcatcaagtcaagttgaaatatggaagtaaccgtcttgcaaaattggggcaaaagatgaatcgagtcacatcactgcttcgtctactgccaaacatatttaggattattgatgtccttgttacttccagtttcaccttgacaaagatgtcatggaccatgttgaaaatctaaattgattcaaccccatatcctgcgtaaaaattcgcaatacttcaactgtacatcattcgcatacatccatgcttttcattggttgcattgctcattgcattctttccttgaaaaataaaataaaatgaacttaat

SEQ ID NO: 285999 - DNA, 272 bp, Glycine max
tattcttgttaatggaggcacgttcgtcacgcttagttaccttacaggacgagaactcttcttacaccttgagaccaccgttagctctacaaatggggcgttgggcgtatgatgttgcggatacacgcacctgcaatctgacgatttgcatgtaagataacggggccctgtatcacaccttacgagcgatagatggctatctctacatgcgcatgggcaagtggtatgactatgaacatctagtatcgcactccctcttgagagacttgact

SEQ ID NO: 286000 - DNA, 412 bp, Glycine max
  unsure (1)..(412): unsure at all n locations
acacagctgccgcgacagatcccgtgtttatttattatttcagacggtagagcggctattgcctcctctcatagtcgaatagcagacactcgtactgcgttatatgataaagtacgcgcattaagcgttcttaataacctcgaggtgctttacccctgctatagtgcgaccctgatataggatctcatcacaccagcttgacggatgtcagtgtctttatatagcgccgcatgctgccatatagcctgtttcacgagagcctcgctcatcgtatatggctggctgatagtaggtactctcaacagctctatccagtcgttcatgtacaggttgatccatttaccatctgctgctgctgtggcggaatagacgtatacgcgcatcgttggaacatgattgggtaatgatctgn

SEQ ID NO: 286001 - DNA, 376 bp, Glycine max
ttattcttgtatgattatggggtacccatcacatgtggtactaagtggcggtcgggcgatggtgcacaacaagtttctccacatccacaatgcgcgcataaacccaccatcccctgttgcccacctccaactgagctcacgtactcccacgtagcccatatcctcgtttctctcaacaccgggtccccatcaatcctcccaagcttccacaacatccaagcaaaacaacattcacacagcacaagctatcacagccaagcaaaacagagcaaaggcagaaaactctgccaaaacaccaaccaaaagtcacagcttttaccactcaaagaccccagtaacaattccttcgttccaattcgttaaccgttggatcgac

SEQ ID NO: 286002 - DNA, 404 bp, Glycine max
tgtgtgtatgcacagttattagttaagttattcctttagttattttgaatttccaatatagttataaaatgcaattcaatgttgaagcataaaaaaactggatattaataactaaataatggtgaaaacaacaaaattagcgaagctaaaaggctaaatatttaaaagtaaatgattgttcaacatgtaaattaacaaaccatcattttaaaacccagaaaatacaaattaaaattcagtcactattgttgtcgccccaattttttttgtcttctaataacaatttcccaaattttgtcatgaagcctctggtagaatgagagttcgtatccactattgttgggtgagttcaacaatccatacatgcattctagatgttagtaggggtctatcgcatgattgtt

SEQ ID NO: 286003 - DNA, 423 bp, Glycine max
  unsure (1)..(423): unsure at all n locations
aggcaatcactcgaccgggatctctaagcacctgcagcattcttcttgatcctctgggctgtatatattagcatataactcattcaccatagctacatctatgcttccatcttggaggttggcaaggcgtttgtgtagattattgtttgaactcggaaagtgcaccggatcgcgcaagtagtataaaatggtaagaaccgagtatcaaactctcaggtaacttgtgttgcttggtaaagctatattcagtgaataggtgtctagtatgaaaatatatgtgtaaactatgatcaggtatgtaaactaactattaaaaagaaatatcacgtgagtaatgatgtgtatagacaagaagacaacgtgtnggttctcttattaggtgcctgattntataaggatattctttacttaacaatgctcatg

SEQ ID NO: 286004 - DNA, 412 bp, Glycine max
tgtgtggttagagggattgctaggaatatcttttattgatgaaaccgaagtatttgtattttagggttgacaataacaaatgctttttatattgaatttgagttgaaaatgaattaaaatgaaatatcaattttacttttactattactctatatttattgcttgattcatgtattatgtttataaatgccattcatatggataagacaacaattaggagtataatacgtgactttattttattttatatttagattcatactaaaccatactaatagtgaaagaggtgtggaactcacactaatagtgaaaatttctatacaattcctctccccttcttagaaaccaaacctacccttaaggaactacatctaccaagtcttgtccaggtgataactgttaaaatgagata

SEQ ID NO: 286005 - DNA, 382 bp, Glycine max
atctttagtcaaacaaaataatccgaaaatgtcaaagaattgagtgttgaaaaagcataacaagactttgtgtgattggtttaaagatacaatctttgcagatgagaatgcttcagaaacattaagaaatctagcagatgggcctaaaagaaatgttataacctggcaaggatacgacataaacaggtattcattttacacaaaagcacaagatgacaaaagtacaatgcagaacagcggggtcaccctaagggctgaatctcaacactttgcaagtgtcaatgacgccaatccctgtgtagcttccatcccttactttgggttcattgatgaaatttgggagcttaattatgtgaaatttacagtatgtgttttcaaatgt

SEQ ID NO: 286006 - DNA, 290 bp, Glycine max
ctcataagtgaaatcaggtgtagccattttcttatatttcttgatcgaggccgtacccgaatcaaataaacattaaaaatgcagtatctaggaagtgatcctaggtcgtctcccaatgagcaatggttaaccaaacattcataacagatagtaataaaatagttacgaattgggggggggggggggtgtctaactatgttgaaagaaatgatgtaatgggctatgcgggaaacgaccctgcctaatcaggcactacattgattacaatcacatcagacatgatattgcat

SEQ ID NO: 286007 - DNA, 383 bp, Glycine max
tctcttgcattcttctcaaggaggtgagcttagcttttatatcggtgtgtgtagctcatctctagctcttcaaggaagcttctcaaggaggtgagcatagtttttaaatggatgtgtgtagctaaactctagcttctcaaggaagctttctcaaagaagcttctcacggaagctttcttaagaaagcttctcaaggaagttttcttaaaaaagcttctcacggaagctacctactctataaatagaagcatgtgtaacacttgttgtaactttgatgaatgaaagtcttatgagatacacttcaaagttccacttctttccctcttttattacttcaatatcatgctcccggcttctgtctatcttttcctacattaaagcat

SEQ ID NO: 286008 - DNA, 403 bp, Glycine max
  unsure (1)..(403): unsure at all n locations
ntgcctttagggcttgtacctcatcactttcttctatgctttaacctcattgtctctcacagtctttagatttgggagccaatccaatccttgtgttcggactctcaaccacttatgatagccgccgatgatcccattacggcttcccctaagctctctgtccttcacgccgcatcccatgccttgcgaactccttggagtaccctcgcgttgtggtcactgaaaccccgtgcaatgaaaggcgtgatgctttcgtctgatggcactcctctcatgaggtagccaagctgtcttatggcgaggacgggattataattaatacaaccccttgttccatcaagggaacctttagacatccttcgtatgaagatagaatcccgattcttccttccttcttggagaa

SEQ ID NO: 286009 - DNA, 367 bp, Glycine max
ttcttgcatccagctcacgaatggatgattaacttgaagaagtctaagaaccaattatatgtttgttgaggaaacatcatccagagtcttgaatcattggtgatcataaggaaaaagtccagacaaggaactctttcaagcatacaactctacttttcgagatcgggccgaaacgcatagatgatgctatgtctaatgaatactgggtcaaagcaatgaaagataagttggaccagtttcagaagaatgatgtctagaagcttgtagaacttcccaaaggcatatatgctattggagcaaagtgggtgttcagaaacaagctcgatgaaatatgtaaggttgtgagtggaacaaagctaggcttgtg

SEQ ID NO: 286010 - DNA, 395 bp, Glycine max
  unsure (1)..(395): unsure at all n locations
ntaaaatttgaattaaaacattcataaactgctgtttatcgattaccatatatgtgtaatcgattacacagtgcaaactttgaattcaaattttaatagctattgtaaatcagttttggccactggtaatcgattaccaaagagtaaatttgttgaaaaagactttttaacttaaaattcttggccaaaccttttgctacttcaattggaattcccttcctatttaatataccctttctaaaactctaaagattgtcttgatcatccatcttgaatatcattaatttctttgtcttgaataaagctttgagacgcatgtgatcctttggcatcatcaaaacatcagcttaatcctttgtctacaatctccccctttttgatgatgacaatccctg

SEQ ID NO: 286011 - DNA, 385 bp, Glycine max
ttgtcttgcaatcttcatggtgaatcaaaggtgttttgatgataacaatgatgataacaaaagatgatgactaaggtgatgacaaaaagctcaaagatcaatcaaataacaactcaagtgaatcaaagatcaatcaaagcacaactcaagtgaatcaagaacaattcaagagttcaagataagaatcaagaagaattcaagacacaagaagaaagtttagagtcaagaatcaagaatcaaggtttaagatctcaagaatcaagagaagacttaatcaagataagtatgaaatttttttctcaaaacatgttaaccaaagagttattactctctggtaatcgattaccacattgctgtaatcgattaccactagctaaattgtttt

SEQ ID NO: 286012 - DNA, 410 bp, Glycine max
  unsure (1)..(410): unsure at all n locations
tgtctcanaatccttctctaagttacgaagtcatgttcataataaaaatagtgcatcatccatgattttgttagcattgaatatgtcgttagtcaagataatgttgttccgctgctgccaaatagaccatgtcaacgctagccaccaacacttccacctgttgacctttacagcctcagccaccccaaatatatgttgaaggaaatgatgttttgggttttgcgggagaggacccacgcaattcacccaagacatcgattcccaccacagcggactgattttgctgcaatgaaaaaacgcatgacctgtattctcctccagattactgcaaaacacgcaactcgtatcatttaattccacctgtcgtctgtgaaggtttgcccttgtaggtagtcgatctctaagtaacc

SEQ ID NO: 286013 - DNA, 380 bp, Glycine max
agcttatcgataaaattaacttgacagtgcaccctggattgataattgaccattttgttgtcaccttacccgtatgaccaacatttttacttactcaacataaaagcttcttggaaccatggataaccagattgtgtaaccatattgttcaccttatccgtataaccggcttaatcaacataaaagtaactcatccgtggcaatgtgtgaccagcttctttaactcacctagagggatctgtggaaatgtctaccacaaatgttactaaaagattgaccggtagaagtaaaactacatacgtagcattcaccgtcatacaaattttgcacacattcttccatcattagcaaaagataataaaaaaaaggttccagaaatt

SEQ ID NO: 286014 - DNA, 421 bp, Glycine max
tattagcaggctaaagaccaaatgtcatgtacgagtactctctgtgtcattgccaaacttttcaaactgaaaattttaatacttgcatgtttcggcacgagtccattgtaaaaataaaaataaaaaacttaactttaatactggaatcagttgattttatattatgattttaaaaatattaacaaaagaagacaaacaacttgttgatgtcaaaacctgggtctggtcttgactcgttgtaacagaagtgccggcatgactgagtcaaagaaaaacgaagtcaattaagtgggaaatcagaaaactttgtattcattcacatcttacatgatgaaatcctccgcatcattctttgaattgacctcaaattaatatgcattgtaaataccattctagacgcatgcagttcaagggttttgtg

SEQ ID NO: 286015 - DNA, 382 bp, Glycine max
ttctttgttttggaattgcgaaagccccactccatcattaggattagtacctgacatctcaaacaaacaaatcaaacgtaacaagacaattatagttgctgtttgaatacctcacccactcaagtgtatcacacaattatggcttttctctaatgaaacactcttgccttttaccactctaattccccttgagttcttaggcaattcaagagattatggccacaacaaagaacaattcaccaatatgtgtaaggtaaggctagacaaggaaaaggttaaccaagacaaaggctaacaatgtttttacgcacaaatgaaggaaataaaattcagaatttatgaattcaagtaacaatccttcatgcaaccaatatattacctt

SEQ ID NO: 286016 - DNA, 420 bp, Glycine max
  unsure (1)..(420): unsure at all n locations
ntaacattcaatttcgagcgtctcgatatattacgttcctctatcagacatccgagtaaaaagttatggtcgtttgtatttgctcagagcttccacgttcaatttcgagcgtctcgatatgttacgggactcaatcagacatccgggaaaaaagttattgtcgtttgagttggctcagagattcaacattcaatttcgagcgtctcgatatattacgggactcaatcagacatccgagtaaaaagttattgtcgtttgaattggcttanagcttcaacagtcaatttcgagcgtcttgatatgttactgctcctgaatcagacatgcgagtgaaaagttatgaccattttaatttcttgagagcttccgttgttcaatttctagcgtctcgatatgttatgtgtctgaatcggacatgcg

SEQ ID NO: 286017 - DNA, 408 bp, Glycine max
ccgtgatactctgagtcacctgcagcatgcattctttgagctaagtatctcttggaaataaatttagattgtattcattcttgtctgacaaaatcacaactgcaaacttaaccatcttggattttatcaaacactgaaatgaaggaacatctttcagattattggttatggagagattatgatggaattgaatcattatttggttttgatgtgggtttgccaagcatttctattttcaccaaagtcgtgatctaatttcaattaattgttataggattgaggccccttgggtaccgatcatagaaaaggagaagacatattggagaggaaaaaaatcatgtgcagagggtgtaccatattaacttgtggactagatgaatgcaaggatgtacaaaaatgatccaccat

SEQ ID NO: 286018 - DNA, 417 bp, Glycine max
  unsure (1)..(417): unsure at all n locations
ngaaagacgagacttttccaatgaggaagagaatgttcagaactgcttgccagggaaggtagtgatgatggtatgctggctgaggtctttgctgatgcacccctgctgtaatgtgccacttttcaacccctatagaattctgtaattttaggatttatcatattttttttccagagctgttctattatttcccttattccacgtgaaaaatattttgtgacttgtgattgaaacaaaaaaggatattggaagacacctgactgttatgtcatcttttattcaaatgaatcatctccattttccccatcttttatttggattgcttaggtttgtaaaggaggaacaattgctcgttaattagcataacaacaattcanggaagaggatggcataaagcctctacttgaataatttgta

SEQ ID NO: 286019 - DNA, 385 bp, Glycine max
  unsure (1)..(385): unsure at all n locations
attctttatatatatcgaggcgctcgaaattgaacaacggaagctcttgagaaattcaaatggtcataacttttaactcggatgtgcaattcatgcgcatcacatatagagacgctaaaaaatgaacaacggaagctctccaaaagttaaaatggtcataagctttcacactgatgtccgattcaggcttatattatatcgagacgctcaaaattaaacatcgaatgctctcgagaaattcaaatggtcataactcttcactcggatgtacgaatcaagcgcatcacatataccgacgctcgaaagtgaacaacggaagctcccgaaaaattcaaatggtcataactntacacactgaggtccgattcaagcatataatatatcg

SEQ ID NO: 286020 - DNA, 416 bp, Glycine max
tcttttggaccttgaacaggcaactaactcctctttcaaaaccatgctatgtgctcgcgactggtccctttcttcctttcgcaacttgagttcactattgctaccccatagagctccgcgaaatttgttccggccatactcttccttgcgagccctcttggtctcttgttcaagggctcttgcggtaattgcattctcttcccgtaacccggcacactccttccgaacgtgtgtagcggccaacttgaacttctccttggcaagttttgcctttcctaactcgcttttgagagcttggacttcttcgtcctcttccggtgcttcaaaactctctttgctgacgacttttaacttggcgagccaatctaaacctcgtatatgaactttcagccattcgtggtacccaccaatgatgc

SEQ ID NO: 286021 - DNA, 374 bp, Glycine max
  unsure (1)..(374): unsure at all n locations
ttcttcttatccaaggctcatcttggtggtgaagctccttcttccatggcttattccctagtggatgacgcctcctgtcacctcttctcctttgtcttccgctgcatctccatggtggataatcaccattaaaggacctcattgaagctcaaagatccagcctccatagaagccccacaagcaagcttccatcaaagtgtatgaattttaaaatccaatcctacagtttcttgaattaattaaattcgttattattgtttctgtaattntatgtatttttgacacactaaattcgattatatttgttatttcattcctttagttattttcgtcaattaaacaaacccatgatatttcgattaaacttgtactta

SEQ ID NO: 286022 - DNA, 394 bp, Glycine max
  unsure (1)..(394): unsure at all n locations
tgttgccattagaagagaatgagcatgtgattggtattatgactggaattgttagtcagtttgccagattgattgtgaaggaatgcattgaccgtatcccggtgagagtgtgatccttaaattttgagagaaatgactatcatttaatactgatttttgcatgaatctttgaagtatggactgaatgcatgaaattgaggatgatgaaggccatgtttgattgggatagccacttagccacgtgtttgaatgatttatcctttgcacctaatttgagctgaatgaattattgattgattgaaccctgagtctatagagtgttatctcttgctaccttgacttaggttgtaggagagcatcatccacagaaagtgtggttcanagcanatttgtc

SEQ ID NO: 286023 - DNA, 380 bp, Glycine max
cttgccatgatgcttggaatagtttatcctttgaagataaccataaccatgatctgatttttaccaactccatcaccttttcatggcctttactgccattattaaagataatggagtttctatgaagccaaataatccaactcattgtgcaccacacaacttcccatctttgatttgcaattgatccaactctcagtatatagtgctatagatagtgatcctgcggttggttatgttgagctcccatgactcccaaccatctaaaacacaaagaccacacttcctgtgaaaaagtgcaaccgaggaagagatgttgtacactttccaaatgctgagagcacaaggggcacaaatagttgttgtttggtcgtgccactttt

SEQ ID NO: 286024 - DNA, 413 bp, Glycine max
tgagatgaggaagtgttgaagggtgaatcttcctgcttttattgttgaccacagagtggtacctggagatatgtcgcgggggtcaggagaccttggggacgtcaggtggggtgctattgcccaaaaccaagcttgaccaatcccgacccaacccgggcatagtcggtcagtgagaacctgtgatgtacctaagcaggcgagctcctggcagtcaacagataaaaggaaaacaagaccacaaagcaaggaggcttgtggtggctggccagctgtgaaacttgattgatatgtgagatatggtctctggtaatcgattaccaagggtgggtaatcgattacaaggcttaaaaatgaaaacagggggctaagatggtctctggtaatcgattaccaggggatgtaatcgattacca

SEQ ID NO: 286025 - DNA, 381 bp, Glycine max
  unsure (1)..(381): unsure at all n locations
ttcttctcccccaattttctataaatagggggagaagtgaagtgaataagggttcagccccttaggcacttctctctctttcgaatttgcttggaaaaattgtttccgtgaagaaaatccaagccgagacgcttccgaatcgtttccgtaacgtttccgtgaggaatttcgcgaaggtttcgactgttcttcgacgttcttcattcgttcttcatcgttcttcaatcttcaacgggtaagtacctcgaaccaagcttttcgattcattctatgtacccgtggtggtccacattgtgtttcatgtatttttattctcgtttcatttactttntatacccccttttgacgtgcttaagccattntatttaagtcatttctcgc

SEQ ID NO: 286026 - DNA, 412 bp, Glycine max
tgctccagagattgaaggcttagtggctgccatattattatgtcttctgatcgcatgttcgttggacactagtgatcggagacttatatctacttttgcggagaggtaacataaggaaactagtagtttccatcttccagtaggagaagtgaccatcaccctggatgatgtggcatcgttgctacatttgcccattataggcgcattccatagctttgaggattttcttgtggatgaagtcgttttcctgttagtggaatttcttgaagttagttcagaagaagctagagctgagacagtacaatgtcatgggacatatgttaggatatcctgggttgagacatttatcgtagcaaatgtggcgcaggacagtggattgtaatagctcgagcatatttgttgtatctagtag

SEQ ID NO: 286027 - DNA, 381 bp, Glycine max
tatcttctcctttcatggcttatcctctagtagatggcgcctcatctcacctcttatcctttatctttcgctgcaactccatggccgaaaatcaccattgaaggaccttattgaagctcaaagacccaaactccatagaagcttcacaagaaagcttccatcaatattatacttagactatcctaaaaaatgatagctttttcaattggaaacccaagattgctaaccagacctttaagtcagatcccatcctttattgcttctattagagcatgcattctacctttgtagtggataaaaccacaatgggctaaagagtttccttcacactatcaagagagttgccaatgatgaatgcataccttgtcatagttctccttg

SEQ ID NO: 286028 - DNA, 413 bp, Glycine max
ttgaaagctattacggtggaaataagtttatctatttgatgttatcagcgagactagcaggattgtgtgttttgtaatccgtgtctttccaaagcagccaatggggacatcattatacatttagtacattacccacttttaattttaaattgggtccagatgtggataagaacaactaaactaagtcatttaatgtattgcttttatttaatgtatttaaattattagttattgatttgagaaaaaatattatatcttactaacaaatttaatgtggatagcatagactgccagtttaaaagtttttacattgtcaatgatcaattaaaaatattctttcgcatgactttcaaggtagttatcatcaaaacaaacaaacttatcatatatatatatatatatatatatatata

SEQ ID NO: 286029 - DNA, 381 bp, Glycine max
ttcttaaatgagtattttcagatctgtctttctttttgctctcttcttcttgcacacaatgaggtgtaaactcattgatggaccatttgtccttctgagtgttataactcactttgaattgcccaaagtgtgtagaaagtgagatcaaaactaaatacacgagcaggtcttcaccaagctctagcttaagtgctttcagttttgatgccaagttagacattttcattgtgtactcccttatataactttcccccctcttttttaacaaaaaaaataacataaaaaaaacaaaaactgcatgcacaaaaacttccctatatatattatgaacattagccatgaagagaagtgattcacaaatccaaataacgattccaaaaa

SEQ ID NO: 286030 - DNA, 411 bp, Glycine max
tgagaaagtccttttgattcagtttatacttttctgactttatggcatgagatgaaattcaaagattggacctcttgctagttgttattaatgaatagcttaaacacttgtgcttgagtgaaacagtagccgtgagactgtggtttaagctaattttcttgatatctgtcttatgattagctccatctaattgttcaaattacattttattcttctctttggataactgcataccttgtgaaaggcaagtgatgagggcattttactccattctcttatcatgcaatcagtaacttttgtagcatacacctttgtacatagtcactgcatgttgttgtcacttgaggacaagtgaattgttctctttttgcttgaggacaagcaaacctgtaaatattggggagttgttag

SEQ ID NO: 286031 - DNA, 377 bp, Glycine max
ttcttttcctctagctgttctgataaggtttccaaacgttagagaaggagaagagattgaagccttcattctactgcctgcatgcaatgaatatttctccctaacaagatcaattttcaaatcgcaacggtgaaaatatgcagaaatgaatttcgaaccaggtgtcccaatttcacaatgatccaacggttaatgagtctgggattatagttttactaggacaggttttgggtctctgcaggaaaagaaaaagttaagatgagaagggaatttctctcacctccaactctgattcgcaatttccatcggtgagaatacttgaatatgagctgcaaacttggtgctcaaatttcacaacaatccaacgattaacgagt

SEQ ID NO: 286032 - DNA, 409 bp, Glycine max
  unsure (1)..(409): unsure at all n locations
tcatgcaacccaataaattagcatgtcttttcctctgttgngtatataatgaccatttgtgctgatatgaaaacacttccaagtacaaaattgattgatttataaagaaagaattaacacatgtactataatttccatacattcatgctacctcgagtcatgtttttttctataaccacttgaaataaattgtaacttttctttttaaatatcaaagtcttcaattaagtagttttccaaataaagcagaagttatgtaaaagtatcatattaatgtcctacgttggtctgaacttatgtacaaattaattttttacacactcaaataatgcacaatcaacacaaaatcaccattgacccatacgaatngcaaatctataatgactntacggattcataatatgtatca

SEQ ID NO: 286033 - DNA, 370 bp, Glycine max
  unsure (1)..(370): unsure at all n locations
ttcttagcccaagagaggatggaccttttcaggtcttggagaggatcaataataatgcctataggttggacctcccaagagagtatggagtcagcaccacttttaatatttctgatttaattccttttgcaggtggagctgatatagaggaggaggaaccaacagatttgaggtcaaatcctcttcaagggggaggggatgatgcaatcctccctaggaaaggaccagttaccagagccatgagcaagaggctccaagaggattgggttagagttgataaagaaggccttanggttctcatgaaccttanggtagatttttgagcccatgggccaagattgngtccactcttctttgtaaatagtagaat

SEQ ID NO: 286034 - DNA, 454 bp, Glycine max
  unsure (1)..(454): unsure at all n locations
ntgattgaatgatccttgcattcgngacctatgaatactcaccttaccaaagaaaaactctagggctaaggccaacttatatagcttttaaaaccggaaagggttaccttattctcggtgccgaaatgccaaggccgtcctccacttaccaatttcccaacttgaaatcaagaaggcatgggcgtaccaaatcccatgtactcggaacatcatcttcgtatatcgcgaccacttgaccttcgtctcccagacccgcgcttataaagcttctacttatgtggcagggcgggcttccttcacttccttgtctcaaacgcgagctttgaccaccgctcttccttcccgcgatgcttctctttatatctgcctgagtgggcttatagcctaaagcatacttcccacgatttcctttggcatttatcaagctagttatgccggccntggcttttgctan

SEQ ID NO: 286035 - DNA, 375 bp, Glycine max
  unsure (1)..(375): unsure at all n locations
ttcttttccaaagtggtcttcggcattacatttaaactcgatcaattgtcgataagtacctttgcgacaacgtggtccatacatctcaccgacacatgtagagccttgttgtgtcctctcccctcaacgggaatctcttcttccgcaaacgcgatataattgttggtggttatatgattaacgatgccttcaaaaccctccactgagatatcatgtgctacatgggcatcgttaaggaccttcatcaacaacgcacgatgaggctcggagtttatgagtagttcaagcaaagagatccttgctggagtcttattcagttgctcaactaccttanactcgctttgttggatgaggcggaggaactcatgggcctct

SEQ ID NO: 286036 - DNA, 409 bp, Glycine max
tagtttaacataaggatcagaagttcccagcaaattcatgtttaaaagcttttgtgcacgaacctcattcgcatgttatatcctcacaagcttctttattgccaccctataaaagatgtgaacaaagcatcagacatcttcatagagcaaacattgttattttaaacttaaactttgtcaattcatagtaaatttttaacaatagtgaagttatgttttaaataataatatagttctagtaagatatgggtgtttgcgtgtgtcggtaagtgtaccgattcgcacaagtagtataaaacggtaagaccgactatcgtatcttcagagaatttgtttcacctagaccatgtacattcgatatgcaagcacttatacggattaaaataaggcaaatagtgagttctgtact

SEQ ID NO: 286037 - DNA, 356 bp, Glycine max
agcttgagtgagcgaaagagagagaggcacaggcttgttgctcgtgtgctgaagtgtgtgtaagctctacatgtgagcgaatatgttgaggatttgatggaacctgctatttataggagtggagcgtagctgtgggtccctgtttgtaggggttgttatagtctttgcagataattaccgacttatagataatacccgagagcttgtacataatgttagagataaattgtagcttatagataaaagctagaagataattgtaccttgtagatagtgtgtggctttatagataattaactacctaccaatagataaagatattcaaatattaatatgttagagataaccttgtagtt

SEQ ID NO: 286038 - DNA, 418 bp, Glycine max
taatcatgctaaaagatcaagaaactaggggatttttgttctttttttttacatcatatggtgaaactaaaaagatactaggagatgctaaagaccaataaaaataaaaaataaaaaacaaaaaacaattcaacaaagcaagattcatgattgatgaatgaaacttatatactcaattgttggatattataacatacaatatatcctacaaaatttgtaatatcttaggttaaaagtaattatggagatgcaagtcaagagtttgtaggggacgactaccatcttggcaagatacaatctcagagataaattcaaataaaagatggttgctgaaatcaatggaatgtaaagtaagattatagaagaatttcataaatccttccattgttttgacaagacgcatctctaagaaattttt

SEQ ID NO: 286039 - DNA, 365 bp, Glycine max
tgcttgtagaaaatactcttaaccagagcatccaactgttaaaagcaaattttcacagagagagtttcaataaaatcttatgcatccaaagataagatagaagcaactaaaaataaacaagttataatagaaattagagtaaaaacacaatgtttatactagttcactcaacttgagctacatctagttctcctttatgacaccatcaagtgttccactaatcaaattgattacaaatgagtttttactttgccactcttggttacaacaagtattttctatgccacttctagcttacccttaatctcttcccgagattaagaacacccaagtattctttgatcactaaggaacttctgactttt

SEQ ID NO: 286040 - DNA, 416 bp, Glycine max
ttgagccaaaatcctgactcaccataaaccttgttccatggtgagaatgtcaatccttaccctcggaagcaaaaaagaaaagaaggaaaatttccaatcaaagagaaagcaaaaagaaaagaagggaaattcccaatcaaagaatgggagaaaaaagaaaaaaaaaagaagaagaagaaggaaagaaagctcctgatcaaggatcgaaagaaaacataagaaatgtgcagagaggtctttggaccagacgatatctgaacaatacagaattgtcaccaaatgaacaaaagatagaaaaggaaaccatgacctaaaagtggtcttctccctttcattatcaaccaaaatcctgtgcgctagcgactttttcgccccgcactatacaaaaatagaaaaggaaaaagccaaccaaaaat

SEQ ID NO: 286041 - DNA, 367 bp, Glycine max
ttctttactatatccaagcaattcaattgccaaacatcatgaactaccctaaaccaacaaaacagggcagaggcagaaaactctgcccaaaacacattcacatattatcaactttccttactcaaataccccagtaacattctcttcattccgatttgttaaccgttggatcgacttgaaacttttactggatgttcctagtacataaatatacattttgaccgttgggatctgctagaaaatgtccagaacccaatatgtactacctttcccataaccaacaatacacatgcattttctgcacatgaacaaaaattctgctatacaaatttgacagcaattttcagcataatagggcagatttcga

SEQ ID NO: 286042 - DNA, 390 bp, Glycine max
acttgtgctattcatcttttcattctcttctccctttgccaaaaagaattctccaaggactaaccgcctgaattctttttgtatctctcttctcccttttccaaaagaacaaaggactaaccgcctgaattcttttgtgtctcccttctcccttgtcaaagaattcaaaatgacacagtctaagaattcttttgatacttcccattcccttatacaaaagtgttcaaaggactaaccgcctgagaattcttttgtatccctattcacaaagtatcaaaggtttaacagcctgagatatttgtcttaacacattggagggtacgtcctttatggtacaagtaatgggtacatctacttgggtttgactgagaacaagagagggtacatctc

SEQ ID NO: 286043 - DNA, 379 bp, Glycine max
  unsure (1)..(379): unsure at all n locations
ttcttgtacataacaagaggacttgcaaaaattgccccattcattcagaaccaacagagactcgtgcctaaggtgagggagcacccantgaagaacaacaaagtcatgttcaagttgaaccaaatggaacacaagtgctaactgaagtgaacaccgaacatgataattgaacacatgaaatggaaattgatgcagtgattaatctgctaacacaagctagccaaacaaatccaaacaaggtaaaatctataccattctgaggtaaaagctattgtgtatttcactttcattttcagtctttaatggtccctttaccagaaataatcaaaccttgtctcaaagaaaactggtcctgcatttgcatctactaataattctg

SEQ ID NO: 286044 - DNA, 400 bp, Glycine max
tagcgagacaacaacttttgcaccttcataattttcttctttttacctgaaattgaggtgaaatgtacattatattcataaggaaggcttctaccgagcacatatgaaaactaaactagaaatatttacaatcctaccaaaaataaccataaatttggagatttatatacattgtgtaaaagttctctatacaaaagttagttgtataagacgactaacaaacttccccaaatttacagttttgcttgtcctcaagcaaagaaagaatagctcacttgtcctcaagtgacaaaatcacagtggttattcacaaagtgtttgctccaaagaatttaattacatgaaatgaatggcatacgattcttcaatcatagctactcacaagacatgcagcttttca

SEQ ID NO: 286045 - DNA, 318 bp, Glycine max
  unsure (1)..(318): unsure at all n locations
ttcttttatttttgataagaagcttgntgcataattgaatctttattgaaatcactgctcttaaactttctaatttttcttctttcccgctatcactgatggattttcctgtgattattgtgtagattatgataatatgttttttcaaatgtattttgttatttggcatcaatttgtggaaaaattagggcctgattgcatactaaatactctgataataattctctccagtctctagtctctacaacttgctttgtcttttgaaatgattcttgtgattggaggtttatatggagtgggggcacatgatgaaatgct

SEQ ID NO: 286046 - DNA, 408 bp, Glycine max
  unsure (1)..(408): unsure at all n locations
tgcatgagatgcagggtattttctcacaaatattattcattactccaaggttttccatagttatgactttggcaagtattatttggtactccaaggtgttttttaccaagcaatatacacacacaacttaccttgcaagaataacctatgagcaactgaagttataaaaatagcatgagctctctgccaatttgcacactgaagaaattggtcaagggcttttgagtgatccccattataattataataaattgcctgcaccgccataacaaaatcattcaaacaacaataagagtcatttaaagaataatacaatactttgcaacnattccagcattagcaagcccattaatcagtaaagaacaccatgacaacaatttaattcagtttagtcataaattgatcata

SEQ ID NO: 286047 - DNA, 383 bp, Glycine max
ttcttttttttcccactcatacaatagcgtccggaccattcataccaccctaaccccaaaaaccaacaaaaaccacatcaaaatcatgataatgaaaatggaagatgataggggaaatataagagtttcttaccactaaactagccctccaactcaaatatagttttgctacatggtcccttgagcaaaggaattcaaggtctcaatctctctcgtgaaacgttgtcattgagaggaagaatatcgtacaatgaaagggttcaccatcatcttaattatgtcaaattaattaaaatcacttaatctgacattatgaaaaatagagtgttacatgaaaatatatttaaatttaaaattccaagatcacattttgactgttaaaa

SEQ ID NO: 286048 - DNA, 337 bp, Glycine max
gtgtgatcttttttgtgagtgaacgactagctgtgagtaatgatctttgcatgaatctctaaattttagaacgatatgtataatgaggacatgatgaaggccatgattgcacatacacaagctcttttgaccatataacttaccttcaataatacttgcatcttttgctcccttacatcagcacacacaacaaataagttgtatgttaaaataaaatacaaagaaagaatagaataagtgtgttgtttcaataaggtcaaaagcaacttgagaaaaaaaatattgagaaggctacgtgtataatacaagataagaccattcggataagtcaaggatt

SEQ ID NO: 286049 - DNA, 382 bp, Glycine max
  unsure (1)..(382): unsure at all n locations
ttctngttcataacagaatctatacattgcagtccactcaattcatacaatttctcattcaaatcaatcacaacacttcatttcatacaaaacaaaccactgaatatcatattcaatcaattcactgctcaaacatgcttttgtacaagctactactactaacaaaatactgaaatttaaagactgaaaattaaataattgaaacataatgcataaaataaataaactaataaaaataaattgctcataacgcaaaaagataaagatcctgtcaatcctcttgtggttgatcctttgcatgctcattaagatccaacactggagcaacttgtggatcctgtgagatgggctactcttgctccaatgctggtgcatatggctg

SEQ ID NO: 286050 - DNA, 411 bp, Glycine max
tccttttagtgcgtcatgtctaaaaccaagttcattggtggtacgagcctttgaccgtagtgggcgggaagtgatgggggaaatccacatccccattcagataggcccttacacttgcaatgtggtttttcaagtgatggacataaatcccgcctacagttgcctcttggggagaccttggattcatgcactgggagtggtccctttgacgcttcaccagaaattgaagttcgcggatggtggacttttggtgatagtgtcacgcgaagaggatatgttggtgagctgcccctcctccgcaccatatgtagaagcaccaaaagaatcattggaaacagctttccaatccttcgaggtggtgagttgtgcctctgtggaaacgagcccgttgctaccttctctctctaatgc

SEQ ID NO: 286051 - DNA, 335 bp, Glycine max
tctttcttctgcaagccctgttctatatgctagattgaatagtggggagcttgctcttcgacttggtgctgatcatcctgctggagatatgacattgttggaaactggcgaacctgtgtattctccaatcactcaggtttgataaatatttttttttctgtataatcactatttaaaaatactcttgtacttgagaactttgggactgtttcatgtatgaaggacctttgcttacagaaaatctaatcatggaaacagaggagtctgtgctgcggacagggaggtctgtatgctaactgagattcatccatgacacaatctgttatcttaaatct

SEQ ID NO: 286052 - DNA, 391 bp, Glycine max
agcttattaatcaattgcataagaaagccttgataatattataatagtaagcaattgagcatatatcctggaccagaattcacatcactgaatatgtacttttgcatctctttccctttgcaggttagattgcatgtggaggtgccatcattggtatgtgaggattgttacaagagggtcatagcatagtttatgaagcaagcaaaggtgctagctatggggttacacttgctttatataattatataatattataattgaatgtctttctcatattctggctcaaagaaaatatatgcatcaaattattgttgtctgtgaatatggtacactttatattttcagtcatgaggatttccagtttctaaatttgaaactataacctctcaat

SEQ ID NO: 286053 - DNA, 357 bp, Glycine max
ttcttgtagaactccccaaagtaagatctactcttggagcaaagtgggtgttcaaaagctagacaaaataggtaaggttgtgaggaacaatgctagacttgtgaccaaaggttactcacaataggaaggtatacattatattgaaacttttgctcctgttgctcatctagaggcaatatgcattatactatcctttgttgctcatcatggtatgatgtggtatcaaatagacgtaaaaagcactttcttcaatggacttatcaagaagtttatgtggaacaaccccctgcgtttgagagttctatctaccctcatcatgttttcaaaattaataaagctttgtatgtgttaaagcaa

SEQ ID NO: 286054 - DNA, 390 bp, Glycine max
  unsure (1)..(390): unsure at all n locations
tncacagcatgtactcaattattcttattaattattattttgaaataaactaaaaagttaccggggggtcaagatatgtaataataatagttttttgttatacatgcctatgcttctagatgttgaatatttaatggctaatcacttgagtgttgagtgtgttcacttggaggcatgtggtggataccgtgatgtgtcatctgtcagtacttgagcccacatgtactgatattaataggagggatttcatggaatcttgaaaaacaaaattcctcattttttaatattgtcgtactaattaaattctgactcaaaatacaagtatctaaaattaactcttttttatgataactattttggacagtgaaaaatatgataacctaaccgttt

SEQ ID NO: 286055 - DNA, 375 bp, Glycine max
tcaatcttatcatgtctagttttcaatgatggtcatcaaaatgacatatcatttccatatcattcccagtttacaaaatagatagtaaaggtcaaaacagaacatctagcaaaagggtcattatgtaggaattatttcaaattcatttctcactcaaattgaacgtatttaaatggattcatatgcctcaaatataatttcataatataattttacttttagcatgcaaagtctcagacattcctagcattcaatttcatgagacatgtcacaaccgagattttcacaaacaccttgtgtgcatgatttttaatatcaaacaacaaatcaatcatcacacacacacacacacacacacacacacacatacacaca

SEQ ID NO: 286056 - DNA, 400 bp, Glycine max
aactcagcttaccctatatggttaaaaggtgctattgttagcctatctctatgttcccaacctagaagtgatattctccaaaaagctataaacttcggctgagtgctcttgatggaggtgaagcataacatccatcttctgaatcataaaagactcaaaaagactccattgaggtgcaaactcatgttgagcttcagcttcaacatcttcttccatctttttagtgtttctagcaacaggctctctaggctcatcttgataatcaggtatcaagatgctataacataaggaaactcataatccaccagacggtgacacttcaacataatgctacaatcgaaaatacccaattcatcttgatacctgatttcaaaccataaacaatctacatatcatcatc

SEQ ID NO: 286057 - DNA, 337 bp, Glycine max
agtatagcttatagatcaacctttgtcattttattccatagatcaacctttttcattttattccaactctattacttgcctttccgcacttagcttttctttttcttaaatagcaacacacacacttttatattatacttatagtttttttttaaatacttgttgcttattagatgactgtgtgtagctcttttcttaccattacaagctttgaccccataattacccccaatttgggcaaatttgctttgaaccaaaattccttttatgaatgatgctttcctacaacctaagacaaaggtaaaggatataaactatacagaacttatgttcaatc

SEQ ID NO: 286058 - DNA, 408 bp, Glycine max
  unsure (1)..(408): unsure at all n locations
tattacaccaaattcaataagatattcatatatttatagttatcctaaaattagtgtgcacaataattacatgtcatttntaacagatcaagcattgactaaatgacttactttaactggagtccatttagcagtttccttggacttacatccttgattattgttcaatcccttcaaagcattggttaagagaaacatgcatgcatattgtacaattaanatattgatgtcaaatactaatgataaagtaaatgtctaacaaattacaactaacatgttaataattcctttcaagtagttggtgggcttattgtgcaaggaaccataccagacgacaagattgtccttatgacatataatgacaaactgccaatgttcactgcattggagagcattaagttattatat

SEQ ID NO: 286059 - DNA, 325 bp, Glycine max
ttacaatacactggccgtcagtttacaacgttatgactgggaaaaccctagcggtactccaacataatactccttgcagacacataccctctatcgacaaactggctgtaatatgcgaataggccccgacaagatcgcccttcccaacagttgcgcatcctgaatggtgaatggagcctgatgctgtattacatccttacgcatgtgtgcgagatttcacactgaatatggtgcactatcagtacaatctgatctgagccgcaagttaatccacccctaaatccgcaaccccgctgacgcaactcttcggtcagctgaatcatca

SEQ ID NO: 286060 - DNA, 385 bp, Glycine max
agctttgagtgaaaaacatactagaagttgtcactgccaaagagagactgacaacgagagtgagacctagattgagagcaagagttagaccaagagtgacagtgtcgacagtagttttagcaccacaagagtgatgagagtgagagtgagagtgatagtgagaaagggttcgagggagtaaggttgcaaagtgagggagctcgagggtgtagacaccagatcaatttttataaaaagacccaacaacatcaatttttaaaccaaaccaatgttatcaatgcattccaaaacatcaattttacgaaaactgatgttgcgaacaaaaactcaacattggtttttagaaaaccgacgttaacattatactagcaacatcgattttcgt

SEQ ID NO: 286061 - DNA, 412 bp, Glycine max
tattaagaggaatggctaatcagatcacagacattgaagttgacctatgtgttgatatccttaaatggcaaaaaagaagagctgttttagtctggtgaagaggtcttatatgggacaaacattccacacaagataaggtgagtctttaactcttgagccttttcaaattaagtctttaacttggattttgtttcttatgagacaatttttttttattcaaaaggagaaaagaatgaaatggatatttgcaaggctaaagagcaagagatttccttcaattaaatatcccctaccctcaaaaggaacaacactaagtgaggcagagcaagaacagagcaagcatgctttaacagtggtcattgcctcagcagcagttgctgaagctgctgttactgctgctcatcgcctcact

SEQ ID NO: 286062 - DNA, 376 bp, Glycine max
atcttgtaatcgattacacaagtcttgtaatcgattaccagaggggatttttagaaaataatttccaagagtcacatctattcaaatgttttatgaatggccatcaaaagtgacttggaaacacgaatttaaagagagttttcattgcccaaacagttttatgctctcaaaagattaagagtttttctgaactgaaatgtcttatcctctcaaaaagattccttggtcaaccacttgcatattcaataaggaattttgattgatcttcattgtacaatctatctcttttaagagagatttcttcttctcttcttcttatttctgacacaagatttaagagaccgtgggtctcttgttgtagagaattcttgaacac

SEQ ID NO: 286063 - DNA, 412 bp, Glycine max
  unsure (1)..(412): unsure at all n locations
tgcccgttagaaagccaccgctcatgcacagagaatggtaggggcaaattgggaccgactcttagcaaacaaagaaggagtgtctgtcaactggttcccttgatggaaagaaggaagaaccggggttcttatttcgtgcggaggatttctgaatgttcccttgatggggacaaggggttgcatcagttacaatcccgttcttgctataaggcaacttggctaccccatgagaggggcaccactagaggaagagctcgcgcctgtcatttcacaaggtttaaataagaccaacatggagacacttcagaagtttcgcaaggtatgagaggtggtgcaaaagaaggacaaagaactcaagggcagtaacaatatgcccatcggtggctaccgtaagtggtngaaagcccacatg

SEQ ID NO: 286064 - DNA, 364 bp, Glycine max
ttctttcattgttcaattcccagcgtcacgatatattatgcccctgaatcggacctccgagtgaaaagatatgaccatttgaattgctcaagagcttccattgatcaatttcgagcgtctcgatatattatgcgccataatccgacctgcgagtaagaatttatgaccctttgaattgctcgagagcattcgttgatcaatttcaagcgtctagatatattatgtgcctgaatcggacctccgagtgggaacgtatgaccatttgaatttctcgagagcttccattacttagtctctagcatctcgatgtattatgtgctctaatcggactttcgagtgaaacgttttgacgcattcgaatttc

SEQ ID NO: 286065 - DNA, 372 bp, Glycine max
tctagagagagctacatgaagctgtctcggtaatttcgctgcccagccttcatcaattgtgggatcttctcgaaattcggccttaaacttcacaagacacttgtcaatcatctgatcattgggatctttgagaagatgtctggagtgtgctagaagcctcttaatgaagcttctagagaaaactacatgaagctgcctcggtataaacgctgcccagccttcgttaaccgttggatcttctcgaaatttggtttgcaacttcacaagacactttaccatgatttaaccgttggtatctttgacacaatatctggagtgtgctagaagcttccgtacccgagagcatctcttatttaagcatgtcagcctttg

SEQ ID NO: 286066 - DNA, 350 bp, Glycine max
atcttctcgatatattatgcacatgaatcggacctccgagtgacaagttatggccatttgaatttttctagagcttccgctgctcaatttcgagcgtctcgatatattatactcctgaatcggacctccgagtgaaaagttaagaccatttgaatttctcgagagcttccgttgttcaatcttgagcgtctcgatatattatgcgcctgagtcggacctccgagtggcgagttatgaacatttgaatctctcgagagcttccgttgctcattttcgaccgtcttcatatattatactcctgaatcggacctccattgaaaagtttgaccatttgaattctccagagcttc

SEQ ID NO: 286067 - DNA, 385 bp, Glycine max
taaagtatgcccgagtcattcatccctatgagatgttgttgaagtattggcgatcagaattgccattccttggattataaggttgaaccaagctcatgcttttacaaaaaggttcatcaagtcaagttgaaatatggaagtaaccgtcttgcaaaattggggcaaaagatgaatcgagtcacatcactgcttcatctactgccaaacatatttaggattgttgatgtccttgttacttccagattcactttgacaaagatgtcatggaccatgttgaaaatctaaactgattcaaccccatatcctgtgtaaaaattcgcaatacttcaactgtacaccattcgcatacatccatgcttttattggttgcatagtcattgcattc

SEQ ID NO: 286068 - DNA, 290 bp, Glycine max
gtgctgatgctgtctcgcccctagtagaacgctcacaatcacgcagatctttttttttttatacaagggggagggtattttcaccacctctatcagttggataggtaatagatcatatagcaattgaagccggtacaaataactgtcgaaagagaccggatagaagaccacgacaacctaccggcggtgaaccctacgggaagatggatcctttccaacaacctatgtgatggaattagaaaagaggagaaaactgtggggttacggtaaaggcaacacccttgaccctc

SEQ ID NO: 286069 - DNA, 302 bp, Glycine max
tattctgtaaaagccggcgaaacactggaacggaacgacagagatcgacagagaggctgagagcgatagcgaaagattgaggaacagagctatcgaccttgcacacgagaaagtgacctgctagatcgccacaaaagagacaatcccgaggcacataaacaagagaggcagggaatactactctcaaacagcggagctaattgtgtggacatgcaccaatacacaccccatagacatgctattgctcattcaacagcccacgcaatcagtgcctaacaagcagcaaatttactgaaacggac

SEQ ID NO: 286070 - DNA, 375 bp, Glycine max
cttccccgtgttaccgtctttgagatatatttagttagcggtcaaccacattgcaattataagcgtatttttggaagaagaaaaaatgtttttctaaataaaaatattatctctcatacacgagtgataaataacacaagttcttgttcccctttttatttatattgcgtgactgcgacttagccgcacatgcaacagataaggaagagcaacgtcgtgccttctcttttcaatactgcttggattcagaaaacacttagagtgcaaatacttcctgtgttggagggagtggaggtttcacctgattagcagtgtaggttcggagaaacagccagaaatgaaacacagtgaatggaaatatgacaaagaaaaata

SEQ ID NO: 286071 - DNA, 370 bp, Glycine max
ttcttgctctaaatttacattgatgtttgtatttatgggaggaggttatatgccatttttgctttaagagtaacgtcccactggtaaaactaactttccaaatgtttgccttcgcatgaatggccccgaggaagcttgcctcaaagaggtccaggaaggacaaggcggccgaaggaactagttccgccccggagtacgacagtcaccgctttatgagcgttgtacaccagcagcgcttcgaagccatcaagggatggtcgtttctccgggagcgacgcgttcagcttatggacgacgagtatactgatttcccgaggaaatatggcgccggctgtgggcaccacttgttactcccatggccaagtttgat

SEQ ID NO: 286072 - DNA, 401 bp, Glycine max
  unsure (1)..(401): unsure at all n locations
tgtcggccgcgattgacgaagggcgcagaagactatgtttgtctctgcatgctatcaggcttttcgtcttacagacagcaaaaaagaatgtttatacggataaccactcgggtttttccgcccgtcagcgtgactcaaatgtcagtatgacaaatcttgtgagcgcggaagatgacgtaaatctccgcgtgtcaaagggcttgtcggccgcgattgacgaaggacgtagaagacgtcgttagtctctgcgtgctatcaggctttacgtcttactgacaccaaaaaagaatgtttatacggataaccactcgggtatttccgcccgttagcgtgactcaaatgtcagtatgacagatcttgtgagcgcggantatgacgtaaatctctgcgtgtcaacgggc

SEQ ID NO: 286073 - DNA, 375 bp, Glycine max
tcaattttgcagcgcatttctgatgaactttaccagaaattgcggtaggaggtcccaggactgggaaactcccagtgaacggttctgcctttcttacaactgaacgatcatccatatcaagccttgctataagttcaccagcctgcaaaaggtgatacaattttattatctttttcaatttcaacaattgtacttactatgtggaatagaatgctatatacctgcattgcttgaccttcagacattttgaaatgaataatcccataaacatgcgaaagaagaggcatgcacattttcatgacctcaacttcatcatacggtgtgtcatcatcaacatgactgtcatctgcaaccaaatatttcataagcttgcat

SEQ ID NO: 286074 - DNA, 378 bp, Glycine max
  unsure (1)..(378): unsure at all n locations
ntgaagtgaaaggatgtgactcttcacatttgtaattgaatttcagcgttcaagggcactggtaatcgattaccaaaacattgtaatcgattacagctttttgaaaataattggaacgttgtaaattcagtttgaaaactttttcaaactcattttgctactggtaatcgattacaacaatctggtaatcgattaccagagagtaaaaattctttggtaaagggttttttcaaaaactcatgtgctattcaaagttttgaaaaactttttaatacttatcttgatagagtcttctctttattctagaatcttgatcttgatttttgagactctgaaccttgaatcttgatacttgtctctagactttcttcttgagtc

SEQ ID NO: 286075 - DNA, 557 bp, Glycine max
  unsure (1)..(557): unsure at all n locations
accgtaccgnttcgcgctgcnactgaacactcggtcgcacataggactgagcaccnctnaaaannnaaaaaaanaaggagtanacttgaggcatggntgcaanancnncccntaancnagctcgcgccccggacgaccacgagagacaaacagcaagcatgcatttctgttctattcaaaaatccgcgagcgaaggcgggctagaccttgaactgcggacacgaaaactgcacacaacaagcgcgggccagaagaggaagaccaccaccgcaagaacacactcaagacacggatactcgaagtagaagacgaatagatcaccggcccatgacacaaagaaaggaccacaacgcaatgttgagacgcagccagagtggaaagcggccaatcagaccgcaaccaccacaccaacacagcaaggagactcctgcaggaaacgcccgtacgcccacgcacgaaaacaaacaggacagcccccatgaagccgaatacaccggaacaacgaccacccccaagactgcgcagacaaccaaatacccaagggccaccccacagcc

SEQ ID NO: 286076 - DNA, 465 bp, Glycine max
  unsure (1)..(465): unsure at all n locations
accccaaacatatattcgatggatacgaatgcacagactgacacaaaacccagggaaatgtgatctcgactcaggaaataaaaaccagctncatcagatccatcgataccactggtgtgattttaaatgttagaaccagaagacagtgaccctatagctaaccgaccacgcaactgtcggatgaaattcactacaggcagccctggaacgttacaagtaatcaattacggtatcaatgtatgcaaccgaaagatgatgctgatgctaacccattgataaggagataagatgagtcggcggttgttggtcaactgacttattagtaacattgctagaaccctacgaggctgcgaaacttaactgaagctcacacgacccctactcagaaaccccgctatagacaatgggcaggaacatgtcaaccaaaagactgagtgggggcatcgcctaggagacagctcatcg

SEQ ID NO: 286077 - DNA, 376 bp, Glycine max
tctttttttttgttccataagagaactactatcatttcatccaaagatgatagtataccacggaatggtttcaccatgatggatgcagaggaaatcaagaataccactggtgattgtcattttctaatctgaatattatattttatgttcttatccactctttttactatgttattttctttagtcctattgttaacaattatttttgagataagaaggaaagaaaatcaggcttattcaattggaagttgctgaaaagaagtacttcccacttagttcataatttaatttttgttgctaaaaaggaattggaccaatctgtgtgcatatgtatttatctatatacacttttaatgctatatgtaacgaggaattc

SEQ ID NO: 286078 - DNA, 380 bp, Glycine max
ttgatgatgttttacataaacaagatatggtttgcttatctagagtaggagcaatctcttatgtttcaagacgatctttggcgacaaaaaacgtgtattaatatgcattgttattgtgattgaaggacggagtttatccataatcttacaaaagattgatgtgctcctcatcaaattggatacttggtgcataaaggccaaagatatgacaagcatgaggacattgaatccatcatgactaatttttttttctagaatttatgcttatgagaataattgttgtgagaataatcttattcatgatcatatcatgactagaaaacccgtttcctacatcggtcgaaatgggattctacatagatgctcaaccgtttttattg

SEQ ID NO: 286079 - DNA, 290 bp, Glycine max
tctatcttgtaagattatggggtacccatcacatgtggcactatgcggcggccagccgatggtgcacaacaagattatttctcacatccacaaatcgcgcataaacccaccattcgctgatgcccacctccaactgagctcacgtactcccacgtagcccatattctcggttatctcatcaccgggtacacatcaatcctctcaagcttccccaacatccaagtaaaacaccattccaaccgcacaaactatcacagacatgacaacagagcacatgcagataactctgc

SEQ ID NO: 286080 - DNA, 407 bp, Glycine max
gtgaacaatatacttggccttcatttatctgtctttgtgcttggcggccacgctcaacaaagtactttcgacacctactgtacgtggatttcaccaatgctgttatgggaatgttgcaacaatcctttaaaaccttattgatacattctgagaggttcgttgtcatgttttcgtatcgacgtccttctctatcgtaagccatcgtccatttttcctttgagatgcgatcaatccatgttgctatggctggactcagatcacgaaatttttctaaattttgatcaaaaatgtgcttgcatggagtgtacgctgcataaaattagttatgaataacaattttaagtataaatgataagtaaaataaacgtgaccatcatatatgaaatcttacccaatttcttcaacat

SEQ ID NO: 286081 - DNA, 467 bp, Glycine max
  unsure (1)..(467): unsure at all n locations
gagtnaatgagctttantctttgaanncacaaaataggagaagcccaggggatataacaagaatttacgcgatttaatctattaattccanaaacnaacacacacgaggggggtgttttgtaacatacatacctcatcttcacnaacnacaacattacaattgaaacttggatgtatacggacgatatgctactagtgctgtacgtgagcatcaaatgtagtctcgcgctctctaactctgagatgacgagtcatgacgtaccgatcatatgtcgtgcggacacgctacgcataaccccgccgcggtaacgatgattatctcgaagactgataaacgataataaggatttgctgcacatgtagttaaagctggtttatgcggagtatctcagggaagggttgcacgcggccacgtagaatcgtactgaagagggaatcaccaaacggtgggcgccaaccggcgaacc

SEQ ID NO: 286082 - DNA, 252 bp, Glycine max
  unsure (1)..(252): unsure at all n locations
acgacaacacaaaaagggcaagcaaannaggggtgactgaccctaaanccacacaaaaacaacaatatcccaacaaaggggacacgaaccacccgcacagaccgcccaaaaagcgaaaccaagaaacgaccaacccaaaccagacgaaagaagagcaacaaaaaccaaaaacgagaccggaaaggaagcccacccgaaaccagacccaaaacgcaaaagcacccaaccaagaaagacgcgacccgccacaac

SEQ ID NO: 286083 - DNA, 377 bp, Glycine max
tgcttttctaattaacctgaaattgagagaactaagtatttattacctatattcaacataaaatacttataacactacaaaataaccataaattgggagagtttgatacaatttatacaagttgtatacacaaaagttagtcgttttcaccaactaacatctgggcatgcggtacttctcaatgaaggccctgttaatagggggccaaatgagctttgtgggtgagactgataccttgtaaaactggcagaggcctgtgatcaacgctggaaatcctagtgccctgttgaacttctctgggtccactgggtgtcttggaggtgcaatacctacaaactggtagatgacattcgagataagctatgctacatgaacac

SEQ ID NO: 286084 - DNA, 410 bp, Glycine max
ttgtatgcaacaatgcaatgcaatggaaatttgttcaatgttcatgaaattcttccctatttttgtgattttgatttgattttttttttctttttttcttgtggaaaacacaaatggactgtctcttttcgaaagatgcgacaactcatgcaaccttatcctatccttttttgcaaatctcctgggggagttgcctcagagtgtatgttctgtttgacttaattgacaaatcttagagtgatgacaatggagccattcggtatttaaacaatcaattgaaaccctagggtttgtctccccccttttttgtttaaaggcattgattattctgcacaacaagagaaatataaggctttatgaccaatcgcatgcaccattgaatgatggcaatggattgttacactttggta

SEQ ID NO: 286085 - DNA, 773 bp, Glycine max
  unsure (1)..(773): unsure at all n locations
accgacacgtgcacgcacacgcagacaacaaacatcgcgcgcgacnagtganaatttggacaaanacgcnnnnnaaaaaannnnanaaaggaganntnnatcgatcgcgntcgcatagccccnncnnnnnnnnatnnnannnnnacnnnnngagannacacacgacaacangaaaaaacacgncagcggaagaccaaacgacgatatacacaccgattatcagcagacacaccacnacacacnnggcggngngcaagggtgagagatagacataacaacacacaccacatcccaccncacanaccaccacctcaagaaaaaattcgacacacacacgagcaaccacaaccacgaacagttcccatgcaaacaaccaccacacacacagtcgacaagatgaanaaccaaacgatgatcgaccgncaccacaccaacaacataacacaatacacacaccatngacacacatcaacacacacgacaaganacacatagtcagcacaacaccacaaccaacaagatgacactgaccacagagcagaagacaagacacaacgcgacacacgtccacccacacgacgaccagaatgccgaagcacacaacacgcgnggcgcctcataacacacacggacaacacaaccacgctagagacaacatagagacaccgcagacacacaaacgcgagacaacaccagcaccagcagaacctaacaagccaccacaatactgaggagcaaaacacaacagacaacacgcaccacagcacgaccan

SEQ ID NO: 286086 - DNA, 455 bp, Glycine max
  unsure (1)..(455): unsure at all n locations
ccaatngcccgggcaaactactcccacccaaaggaccaaccaaannacanaaagggngtgatgatcgtgacacncnnatnannaggcgagcaacacgaccacaaccgacagatcattaaaccccacaaaacagggggggcgggaacacaccacccacaccacaaccacaaagcaagcaaaaaagaatagcaccacccacaacaccaccaggccacaacaaacaccacgaagaaccagaacaaccacccgcccgaagccacaacaacccgccccacaagaacacagcaacaacgagcacaaaaacgaaaaaacacgcacaaaacacggacaagacacaacagcacgaccaagaaaaacacgccaaagcgccacccaaacccacagcgaaacacaaacaccgaaccgaaaaacaacatcaaccccaacgaaaagaccacacaacggacgaaacaaag

SEQ ID NO: 286087 - DNA, 418 bp, Glycine max
  unsure (1)..(418): unsure at all n locations
gggggactgacgtcgatgacancaatcnntaattagacaagactcccctcntcctaacacactatgtgaaatttatttatttttgtaggagcacccgcgggggggtggggtttttttatactgattcccccctccaaccaatagaagggggaaacagcgaagaggactgcccggggtgcacaatctggacgcaagttgggtggggagcgaggagttgtagggcacttttagcgtgcgaggagtaagcatcaggcgaggcgcgccgacgtgcaggcatgagatatggaggggtttaggtgagcattatggtaccactgcacaaatatctgaggagagggtggctgactcaggagtatcctggcggtgtgcagtaagcccgagcccaaaccggctgagacccttgttccgccgcggctct

SEQ ID NO: 286088 - DNA, 515 bp, Glycine max
  unsure (1)..(515): unsure at all n locations
ggaaaacccgagaagagacagaagaagaaagaagaaaaggaacgagtagannaaaaannnnaaagagaaatgagactcgtagacancnnnanananannncannnggnggcgataataaaggcaagaaggagaacgaagttattttaaaaggaaacaaaagaggagggggcaacgataaaaaaatagaggaacaaaagaagaaaacgaaaagggaagataaaataaaagaacgggagaagagagaaaggaagagagaaaggacaaaaaaaaaagaagagaaaagagagagagaagagaggaaaaggagaaggagagaatagaaagaaaaagagaaaggcaaaaaaagaaacagagaaaaagaaaaagacgaaaaaagaagcaggagggaaaggggggagataaacgaagggaagaaagggggagaacaaagaagagaggagacggaagaaagggggaaaaaaaagaaagagaaaaaagggacaaaagaaagcagagggagaagaaagaacgagan

SEQ ID NO: 286089 - DNA, 65 bp, Glycine max
  unsure (1)..(65): unsure at all n locations
aaaaaaaannagacaannaaaccagacaaatttttttttgaatttccaaggggatttttatattc

SEQ ID NO: 286090 - DNA, 451 bp, Glycine max
  unsure (1)..(451): unsure at all n locations
cacgaacccgctatactaaaacgaggcgacggaaataacgaggaaannannnnaaagggggtgtgatcatgacgccnacnntnnnnnanagcgagcnagaacatacacacaccgacgcatttattattattgccggaaaaaaagggggggaggaagtacacaacacaaaaaaccccaagacagcgacaagaacgagaaaagagcgaagccaacaggccggaaagcacgcaagaactgaaggacgaaaccaagcaaaacgcccgagaaaacggccacaaacgacaaacctaaacgggaaacacacggcaacaaaggcgacgcagagaccaacaaaaagcagaagagggacacacacaaaggagcgagcactgagaaaggctcgaccaagacaaaaaaatgagcgaaacagccccaaaaggacccaagcaacggaagccacgcacccaccaag

SEQ ID NO: 286091 - DNA, 291 bp, Glycine max
  unsure (1)..(291): unsure at all n locations
accccacacgccgaaaaccggcccccannnnanaggattggctgagcacaaanaaacacganaacaaccaaacccaattttgggcaaaacccggggggaccaaaaacaccacaccggcaagggaaaccgggaaaacgcgcacggcgcagcgggaaagggcaaccccaaaaggaaccgccacaacggcaagggcaacacgaagagagggaaggaaacagccgcacgcgaccaggccaaacacggcgggcgacagagcagacggcacgaggagaggcaaacgcggaggggggc

SEQ ID NO: 286092 - DNA, 374 bp, Glycine max
  unsure (1)..(374): unsure at all n locations
cgcaccctcgaacagaacaaacacgggcacaatcacannnnnaaagaaaatatgtcatcacgcancanaanaacaacaggacgaaaaggacaaacgacaaaattgtagcaacagcagagcggggaggaaagagaacccgccacgacagacataagagaacgaacacgcgagcaacggacaaagcggagaggaggggagaacaaggcagacaaagcagaaaaaggaaagaaaacaagaaagacggaaacgaaagaagaaaaaacgagacacgaaacaacaacgaacagaaacaacagcaaagcgagaaaaagagaagaacaagaaacacgacaacgaagcaccgccgggcaaaaagaagagccgacgacagacac

SEQ ID NO: 286093 - DNA, 398 bp, Glycine max
  unsure (1)..(398): unsure at all n locations
aaaacaccagaagaaggcgagacaaaaacaaaaaaaanaannnaagagaggatgagctcgagacacantnntaatacnacgaccnacaaaacaaaccaaaaaaaatttaaacacaaaaaacaaggggggagaaaaagcgaacacccccaacccagacaaaccacagcacaaaagaaaaagcagacgacaaccacaaacacaaaaaccgaaaaacaacacacagagcaaaccaaaaaccaacaagaacagaacaagccaagaacaaaaacaaagaaacaaaaaacaggaagaaaccacaaaaacaaaacacaccacaaacacagcaaacacaaaaagagcgcgaaaacaaacaaagacaaaacaacaagcaaaaccaccaacacaaaaacccaaaaacc

SEQ ID NO: 286094 - DNA, 59 bp, Glycine max
agcacaaaaaaagccaaaaaaacaccgaataaataaaaaaccaaagagaggggaaaaaa

SEQ ID NO: 286095 - DNA, 344 bp, Glycine max
ttctttgtgattccttaatacatccttattaattgtataattcttacttcctaaatctacgttatatacttgttataggaaccttataattctaagtatatatagttgtagtatggtgttctgccttaattgcacagatagtagggttgattgtgatttcttgttcttagtaatgctaatactctatagttggatgactcatatcaagttatatttcataaggaatactcttttgatcgtactctttatgttaattgtatgatgttaggctattttatttcacctcgctgattgaacagaatattattgtaaatttgacggccttaatttgagccgatatattt

SEQ ID NO: 286096 - DNA, 378 bp, Glycine max
tctatagaaggttcgttcctaatttctctactatttcatcacctctcaatgagctggtgaagaagaatgtggcatttacctgcggtgaaaaacaagatcaagcctttgctttgctcagagaaaagcttactaaggcacctgttctagctcttcctgacttttctaaaacttttgagctagaatgtgatgcctctggagtgggagttggagctgtattgttacaaggtgggcaccctattgcttattttagtgaaaaacttcatagtgccaccctcaactaccccacctatgataaagagctttatgccttaataagagcccttcatacttgggaacattaccttgttttcaaagaatttgtcattcatagagatcatc

SEQ ID NO: 286097 - DNA, 587 bp, Glycine max
  unsure (1)..(587): unsure at all n locations
ataacccgcacctcattcggtctgtaccaagatgntgtaacaaaaatgcaaactggaaacaaaannnaaagagggatgagactcgtagacaacnanataaanaannnacnnccggnnggacctaaagagaccaccggcacgcacgcattcactaaagaaaaccacatgcatcagagagcggggggaaccacagctggcacccgaacacacaaaacacaagcaccatggccgcaaagaagacaagcgcgtaatgcagcgacctcctgcgacacacactcaccaccaagacgccatggcaccctaccgaagccagcgaacccgaggaagcaaaacagagccagacccggaagacaaacgggagcgacacaagacacaacaagacacttgctcaaaccagacgcagcgagaaatccaccacagacaaagacaacaagcgaacaccggcaggaacacataccagcccagaacacgagaaacacccaaatcgagaaacggcccaaacatacgcaaagacaacagcagcgactcaccgcaccacaaaaacgcgaagcaccgcgaccaacactagcacacccaggaacaaaacc

SEQ ID NO: 286098 - DNA, 142 bp, Glycine max
aactcaagatctgaatggaggaggggggacttttttgtatgaaccagggcacagaagggcgtgttgattctctatatacccaccccgcccccaaataaatattacatgatctccaaacctctccacgtcgatcatcgtacat

SEQ ID NO: 286099 - DNA, 479 bp, Glycine max
  unsure (1)..(479): unsure at all n locations
gaaagaaccagacagaacgaaacagagcggacatagatacnaacannaanaannnaagagaggnatgagactcgagacaacgctattnagcacaccgcgggaacacagaacccccgcgacaccaattctattaaacacaccaccaaaggggggagagagagacgaaaaccccacccacaccaacctaaaagaggcaaaagcacacacctacaaggggacaaaaaaacccaaacacaaaaacaggcaaacaccaccaacagacgaagacaacaactacgaacgcaggcaacaatcagaccacacaacaaccacaaagcaccgaccaaaacgcaaaaagacactacacaacaccgaaacagataaaacagcaaacactacaaaaacaacacaccacaacaaaccgcactaaacccgaacagcacacgcagcagaacaccaaacaagacaacaaacacaagaggacaagcacacacggaacc

SEQ ID NO: 286100 - DNA, 424 bp, Glycine max
  unsure (1)..(424): unsure at all n locations
gataatacgatgtgtcgtactgtacaattagnanaanacangnaanaaaaaaatggtacaacaaaacaaaattttctttatgaaaaacgagcaacacggcgggagttttaaatggaaagggccaccactcactggaataccagaatgccattgtaaactgaggcgagacagtaaggaaatccggaagccatccaaatacggccttatatacccaccacactaaacgaaaactatatagggtatcccacctatggcacgcgtgcaaaagaaataccaaagatcaatggcgcgaagaggataaagacgacgacaaccaaccacaagccaaaactaaaaccacagtcctggaaggatgaaatgacagagccaacaggagaggtccagaaagtaaaactttaaaacacatctgagggcagcgacgtcc

SEQ ID NO: 286101 - DNA, 380 bp, Glycine max
  unsure (1)..(380): unsure at all n locations
ggccaatgatcctcgacctcacaatngaaaaaaccacgnnattgaaataattttcgaataatattttttttttttgacgaacacgagggggtggggtttctgtcccaccttactcagatgactagggaaactacgagagacgttcgcgaaagattagcccaagtcgggcgatacggctcatggcctggcgcatagtatggacacatgttcccagacggacaaacaattcaataaagagtgaacgcaaccatcgatagaaaaccgtttaacgtactcttgagtaattgtaagaggccagcatctaatcgcccgctggttacagatatttggcgaaagacggcatttagaggccaatatgctgagagtactcggcatgaacg

SEQ ID NO: 286102 - DNA, 294 bp, Glycine max
cacaaaaaaaaaggcaaaccccaaataaaacaaaggaatgagccgagaccctataaacacaacaaagccacaggagcctataaaccgaccggaagggggggaaaaaacccaacacccacgcgcaaaaaccaaccacagcaacccccacaccacagggcaaaaaaagaaggaaaggacaaccgacagcaccaacaaaccaacaacccgcgcacgcgccaaccagacagaaaacaaacaacaccagaacaacaaaaaccaaaaagcagagcaaacaggcacccaaaaacacaacac

SEQ ID NO: 286103 - DNA, 430 bp, Glycine max
  unsure (1)..(430): unsure at all n locations
gggatggcctgagcctgaaatctgcaattgtaagncccattataatggacaaaaaagattttttttttatcgaaaaaaacggggggaggtggaggtattaaactccttacaccgatgtataatggatctagggatatgtatgtaaagacttgaatggagatatgtgggattgttaacggaagtcatttgggtgaatagatagacgaaagttagaagtcggattataaaatgatatgtatgagagaaatagggtctactgatcgggatggaaatcaagacgacatcagatagacttgttgtcttgcactaagtcgatgataaaagaaaagtatgagcgtgtgctgaacacaagtgagataggggaatataaccagtaagtacgggattggacaatgtgaatgctgctaatcttagataactacttgatacc

SEQ ID NO: 286104 - DNA, 231 bp, Glycine max
  unsure (1)..(231): unsure at all n locations
acaccaaaagaagcaaaagacaaaaaaagataccaaccntataancggaaacaaaaaacatattacaacccagcgcaaaaaaccccacaaaaaaacaaaaaaggaaaaaaaaaacccaaaaagaaaaccaaacacaaaacacacaaacaaaaacccaaaaaacccaaaaacagaacaaaaccaagagaacaccagaacacaaaaacacccaaaccgcaaacacaaacaaac

SEQ ID NO: 286105 - DNA, 414 bp, Glycine max
  unsure (1)..(414): unsure at all n locations
caccacccccaaacacaatacgcaaagcacccaacaannnnnnnaaggaattgatcacgatgcacctaatagaacnccaaaaaaanacacaaacaatattcttacacaaacaaagggggggggagagaaaacagacaacgacacaaccaaaaaccgaaccaaaccacagagaaacaaccaacaaacaccacaaccagacccaccaaacaaacaccaccccacaacacaacacaaaacgaacaaaacaaacacacaaaaacaaccgcaaaagacaaaaacacacagcaacaccagaccaacaccccacaaaacagcaaaaaaacacgaaaaaaacgacaaaaaaaaagacaacagcacacaaaccacagaatcaccaccacaaacacaaaaaaaccaacacacaaaacaccagcg

SEQ ID NO: 286106 - DNA, 301 bp, Glycine max
  unsure (1)..(301): unsure at all n locations
gtgcatgtgctgtgacncnttataaaccncggggacaaggttataaatcagttatttttggaaaattgagggggtgttaaaattaactgcacagaaggaaataagggaaaggggagagtaatggaatagttggaagtagggaaggtgaaggacattagtgaataggtatgggtgtggaaggttaatggagatgatgggtgagtgttgggttgagaaatttgggtattgacaatacgggagaattagtcatgtcaatgtaaagttatgttgattaaggaaaagagaaaatggagagcgagtg

SEQ ID NO: 286107 - DNA, 702 bp, Glycine max
  unsure (1)..(702): unsure at all n locations
gatctaacagtaacaanntactcaacganatcngtcaccggttgntacacggaccncgaattnttcaattaactctcctccccnccaaaaannnnnccncaggagangannattgatcgcgatcgatangnacanacnnanttcanntnaanannnaccngccaaaaccanaaaacacaanaangncgcacgcacacacgcggcacagcttatttgccatttcgatatgacacgacgaacaaacggacggaggaagcgcgagcatactataaagcacactantaacgcccaacaccanacacgaagtganatgacaacacgacacacgcaggcgangnagcacactacacagacagagcagagacactgaacacaacacaantgcgaggcaacacgaagacaagaacccacccaccacgagagacaggcgcatagccacaccaacacacacatgaaacaagagggataccacccacgaggatgtaaccacacggacaacactcaccgaangtcacacaaacaaatgacgaacacgacagacagaacgagactgcgaaatgcgacacgcaacatgaaccgcgacacanaacacaatcaacgcgctgaacgcaacacgagacgacgccacacacgaaacagaaanccaaacgaganaccgatccgcacgacacaccaaaagagacacacggacgaaaagaacag

SEQ ID NO: 286108 - DNA, 468 bp, Glycine max
  unsure (1)..(468): unsure at all n locations
cccaccaacccatagacatagagacacaagcgcactccctaanaannanaaagaggatgtaatcgatgagncantcnttngattacaaccngcgatcaaanaaaaatcccaagagaacacttttttacacaacagccccccagggggggggtacataatagacaccccacaaaacacacaggaacgaaacaaacgcgagaacgcctatcaacagcaaaagacacgggaaccccactcaacgaagtgagacaactagaagaaaaagaggagacccacacaaaggcgagaaaaagaaaatgacacgaaaaaaacacccgccaaaaatgggaacaagcacaccggaaaacgaaacgaagagcaaagtccaacataagaagaaagaaagattaaaagggcctgtgaccaaaatacgcgacaaacagagcgcgcacagaccaaaaaaggaaggaacccgaacacacggccgcc

SEQ ID NO: 286109 - DNA, 456 bp, Glycine max
  unsure (1)..(456): unsure at all n locations
atgggattgatgctgatgtcttgannacccaaatatagaaaacccccggagataaattcgcgngtacaaaactttatttgatgattcatcaccaagacactggagagatgggggtgttgtggaattatacacctcccccttatctacttctggggtaatattatcggcgtgaactgatcacgtgtatatatcactgcctgaaagtaagtaattatagtgtgtagtaattagactggatgcatgagcctggaatcacctagatgttccacattactatcatgtgacttggaactatccaaatatcatgtaaaaactaaggacaatataaggatagtggtttaagagatcacacatatgtgacctgagcaccatagatgtctaaacatctgaagaatcacggatacgatcgtaagaaccatgtgaattaatcgtctatgagaatccgcctgatgatcg

SEQ ID NO: 286110 - DNA, 350 bp, Glycine max
  unsure (1)..(350): unsure at all n locations
ggataatatgaatgtctctgaaacacnaattggaaaacccgggtcttcaaaaattacgaattattttttttacgancacccgggggggggcttttgatccatcccccgcgagttaatactggaattacttgacaccaaccaaagttagggactcaacaggggacgaataagtactgtcgcgccaatcatgcgacagacggtcacccgcgctgcgggttagcacccccggaaaacgacatccgcacatactccgcgaagggcgacggacagagtaacgtcgaacggggggcacactgcattgaccgctgtagtgtcatatactcagtgatgtgagcaaaggagggtcagtg

SEQ ID NO: 286111 - DNA, 217 bp, Glycine max
ttctttcgttttcaattacttgtgtctcgatatcctacgggacacaatcggacatccgagtcaaaagttattatcgtttgacttttcttagagctcccgagttcaatttctagcgtctcgatatattaaagggctcaatcggacatccgagttaaaagttattgtcgttagacttttcttagagctttcgttgtcaatttcgagcgtcttgatatat

SEQ ID NO: 286112 - DNA, 390 bp, Glycine max
  unsure (1)..(390): unsure at all n locations
ntggagtttccaagtgccaattcgtcctcttctttagtccattcttcttctggcttcaattcatcagtgggctttccttctgtgtccagcatcttgggatgttcccagcctttgatgacagctttccaggttctgctatccagtgatttgaggaaggccaccattcttgctttccagtattcatagttgcttccatcaagaattggtggtctgttcactggtcctccttctttctccatgttcatcagaatttatctccccagatctcactctgtgatttcgagtgttggctctgataccaattgaaattctgataccagtggacagatgtcgtacaggatgtcacgacatcacgcttcaaacatgcagtttatgtgtgtccgtatgaac

SEQ ID NO: 286113 - DNA, 350 bp, Glycine max
atctttgatcggtaatttgcgaccagaggtcgttaagctcgtctctgctgatcttttcaaccttcagtctacgtctacgactcagcgcgtcaaatagttccagagcgaactccttagagtccttcatcccttcaaaaaattaaacaaagcatacaaaactcttcaaacaaggagtgaaaatgacaaaccgattaaatgcacatgcgaaacgcaagaatctgaactgaaatttgaaaaggaatcgtacctatgcattgcgcaaaatcagtgcgagaaagataaccgtccttggcaagactatagaaattgctgtgcacctcgttccacgcgttagcgccattggatttact

SEQ ID NO: 286114 - DNA, 409 bp, Glycine max
tcatatatatatatattaccttgcctacatccgttcttatactatgtaaaaatgatctatatatcaaattctatctatcctttcgtttgttatcaatcttatacacacaatgacatatcaaattataccatggtaattttgataattattatactatttttatatacgagggaagatcaaattataccagtataattttgataattattacactatttttatatacgagaataaatcaaatcataccgatataactttgataactattgcattatttttataacttgatatataatgtaatttttattgatataactgttaagttatattcacatattatcaagattgtccgtattatattttgtcaaaattgaacaacaagaaagtaatcacattatctatatgttaa

SEQ ID NO: 286115 - DNA, 314 bp, Glycine max
atcttgtcttttcccttgatatattagagggactcatgctcactatgaatgacaaatcacttgggataaaagtaatgttgccatgataccaaagcccgtactaaggcatacaacaccttatcataagtataatagttaagggtaggaccacttaacttttcactaatataagcaattggatgaccttcttgcatcacaacagccccaatcccaacatttgaagcatcacactcaatttcaaactatattgaaagttcggcaaagcaagtatgggggcattatctaactcttgcttataaacattgaaagcttct

SEQ ID NO: 286116 - DNA, 332 bp, Glycine max
taggtcatggctcagtagatagaccccttgaaccttagtctttacacaatgctatggatagacatgtagaatgttcacattacatcgaagcatgggtcaatgagtcacaacgacaagtgtacttacgagcttactagaatcagtatgtcaaaagtatgtagcacactcaaaatattttcattatacatacctaataataattgtcgaccttaaggcaccgtgacaactatgatgttctgtgtccatgggacaacattgttgcttggcttcgcgccttgaagcctgatatcaacatataaggctcaattcacagattttttcaaaatttataa

SEQ ID NO: 286117 - DNA, 157 bp, Glycine max
ttctttctttgcggtggtgctatgaccaacgatgatcattaatatgaagagaacggaatatcgtggtggtgtgaaaagcttgagctgtgaagagaagtgactgagtgaggttatttaaggttattctaaatgatgacgtctatttgggttaatttac

SEQ ID NO: 286118 - DNA, 298 bp, Glycine max
tgggttaaaaaccacccctcaccctatgccttttattttgcaatggtcgaatgacaatggtgaattggttgtggataaacaagcatcacttacattcttcataggaaaatatgttgacgatgtgcttcgtgatatggttcccattgaagactaacatgtgttgcttgtacgaccttgtcattatgatagagatgctgttcacaatggggtcaccaatcaatattctgtcttccataaatgtaaaaaggttgttctctcacctttgcctccaatgaggtgtgtgaggatcatctaaccc

SEQ ID NO: 286119 - DNA, 387 bp, Glycine max
ttctatgatccaaaatcctaactcaccataaaccttgacccagggcgagaatgtcaatccttaccctcggaagcaaaaaaaaaaaaaaagcaaaaaaaagaaaagaaaggaaattcccaatcaaagagtgggagagagcaaaaagaaaagaatggaaattcccaatctaagagtgggagaaagcataacgaacagaaagaaaattcccaaccaaagaatgggagaaagtaaaaaaggaagaaagacaaggaaggagagaaagttcctgatcaatgaagcataaaatatgtgcagaaaggtcttttgaccatacaatatctgaacaatacagatttggcaccaaatgaacaaaatgaatgaaaggaaaccatgacctaaagtggtctt

SEQ ID NO: 286120 - DNA, 407 bp, Glycine max
  unsure (1)..(407): unsure at all n locations
tgaagaggatgctntaatggaggaaaagaaagagataatgggggagcacgaaattgaaggaataaaagagggagagaagtggaactttgaagtgtgtctcataagactttcattcatcaaagttacaacaagtgttacacatgcttctatttatagactangtagcttccttgaaaagctttcttgagaaaaattccttgagaagcttctttgagaaaacttccttgagaagctagagcttagccacacacacctctctaatagctaagctcacctccttgagatgagaagctagagcttagctacacacccnctataatagctaagctcacccccattccaaaaatacatgataatacanaanaaagtctctactacaaagactattcaaaatgccttgaaatata

SEQ ID NO: 286121 - DNA, 128 bp, Glycine max
tctatcttttacatgcatgtgcacacagtgttgactaattttagatcaactgatgcaatctatttgaattaaaagataattcatgctactcttataatgtggtgtacaactaacaaaattaattttat

SEQ ID NO: 286122 - DNA, 408 bp, Glycine max
agcttttacatgcatgttcacaccatacatactattctttatcaactgatgcaatctattggatggaaaagatagtttatattactcttctaatgtagtcgacaactaataaaaatgtaacagacagtagtgcttaagccattcaaatcaagtcattgtgaatctcatcattactatcatgcatctcaaagagaatgagaatcatgcatcgtaatgcatagcacaacaaaacattaaaagaaaacatgtcttctaaagccaaccaaggtaaaaatgtatttatatttgtgaactttttcacaattataacacatatataaaaacatggtggaacatctgaccacatgcacaacacattccacacattattattgaaaatgagtcggaagggaatataataacgcattg

SEQ ID NO: 286123 - DNA, 361 bp, Glycine max
ttctttaacctcatcgactctcacaatcgttagatttgggagccaatccaatccttgtgtccggactctcagccacttatgatagccgccgatgctcccattactgcttcccctaagctctttgtcctttcttcacgccgcatcccatgccttgggaactccttggagtaccctcgcgttgtggtcactaaaaccccgtgcgatgaaaggcgtgatgctttcgtctaatggcgctcctctcatggggtagccaagagttggtgcacaacaaacaatacttgcgccgctcttttcacatccccggtcgaacgtgtcatacatggccaaaatggcgacgacctgggctttcttgccatgatga

SEQ ID NO: 286124 - DNA, 407 bp, Glycine max
tcaagccaaatggacttaccttgaattaatttctttgataacccctttgagcctatgttcccctttctttgttttgaagctcattacaagccttaagtgaaaaaccatgataacaccttacccttaaagaattttggagctttggaattgttttgggaataagtgtgggggggtatgtttcattggaagatatgatttttggccatgattaatgttttattttggccatggttgatgtatatatatattgcctagatcttgctttaatcttcaaattcgtactgtctaaaaaaaagagaaaaaaaatgaaaaaaaaaatcaattgctgcaaattctgcagattctgtctgttcaaaaaatacaaaaagagaagaagaagagatgcgaagttgaataaatgatgtctt

SEQ ID NO: 286125 - DNA, 349 bp, Glycine max
ttcttctcaatcctttttcctattgttttgcctgtcttatttgttgggttgtatgtaacaaaaactattatttgtgattatatatttatatatttattgcaatgtgttatctaatatatctaatgtaaaggagtagtatatggagaaaagatgtacatttgaccgctctgagagagagaaaacaaattaaaaactctctctggtattttttgattattataaagatttgggacttgaaaaaaaatctaaacacaaaataacatgtagatcttattgctttgagagagagaataaaataacgaactctttctatacccaacgatataagactatactatgaaagttacac

SEQ ID NO: 286126 - DNA, 393 bp, Glycine max
tgattcatgattcaattcatgtatctttccattatccaccgaaatatcactaccaccaacagctctcttgatggagcttgggtatttcattaactgaccaataccaaaaccagaatttattttaacaccagagtctttagcaaagttcacccctttatcattgttcaaacatttattggtccttatgcccgaattggttgattgtcttcctgtgtggccgtaatcagaatacagtttcttgggcatgatagggctgccatcattccacaaattttcactagtttttgtctttcccccatattgattatcaaattgcagaaatggtgaaaaggataaacccttggccacatttttagtttctgatctagctctagcagaagcattaaccacagc

SEQ ID NO: 286127 - DNA, 335 bp, Glycine max
  unsure (1)..(335): unsure at all n locations
tttctntttctgaaagatagaaatttgaaatttgaaatttgaaagctgttatcgattaccacttgtatgtaaatgattaccagtaacggaactaaaaaaattcaaattgaaaaggcatgacttctcattacataactgtgtaatcgattaccaaagaagtgtaatcgattaccagtgaggaaattataaaagttactctgaaaagtcacatcccttcataagttttcgaaaaaccaccaagggcctattaatatgtgacttatctatgatagttttgagaagtttttcaaaaccttattgtcttatcctctcaaaaacaaatcattggccaaaca

SEQ ID NO: 286128 - DNA, 392 bp, Glycine max
tgtatccctcttgaggggttttctattgggtagctcttcttgtgtctcctttgaatgttcaccatgatataattggcaagttttcttggaagtaattggcactgaagtggaatcctcaaaagacagaatgcaagactttggtttctgtggagaagcatgttgtttgagacttgtcatatcaaagctagtgttgatctcttccaaagatgaagaattgctcaaaagggtggttctttcttttgtgagatatgaattaggggagtgattttcccatgagagttctccaggatccactgaattctctccctccaatggttcttcaacagagttcatgtcacattcagtggataaatgataatcattattgtcctgcaaacatttcaggaataaag

SEQ ID NO: 286129 - DNA, 377 bp, Glycine max
tgtttttatccaaatggacttaccttgaattaatttctttgttaacccttttgagccttgattccctttccttgttcttatatgctttactttgcaatgaatatccaagaaatatgccttcatcagattttgcatcaaattttcctagattatctttaccattgatgtgccatcattttcttctatttcttaaaccctttttgcaccattttaattactgattagtcttaattgtcaaattaattaggcaattttattatttgggctcatttagctaatttgatgtgtttaatctaatttcaggaattaatgaaacattgtgcttaatccggattttggttgtggacttgatgagggaaaataaagcaatgcttacc

SEQ ID NO: 286130 - DNA, 412 bp, Glycine max
  unsure (1)..(412): unsure at all n locations
ctcagctttcataagtgaaatcaggtgtagccatctccttttagtcctctcacgaggtggaggttgagccatgttctcagtatgaaaattagtagttgaatgctcaaaattagaatattcagaatcaccagcaacagaatacttagaatgctcaaaatgctcaaaatgcacaaaatgaccaggatgcacactatgcctaactaatctatcaatggttctatctatttcaagatcaaagggttgtaaatcacctacattgcccctagtcatgcactctatgcagcanatcatgtgtttctcacacaagcacaaggggagggttaaaactacaactatagtcaaagatatccaaatgagctgaaattntgtgagcaacacccttaaatcatgaatagatagcacanaaattttc

SEQ ID NO: 286131 - DNA, 329 bp, Glycine max
ttcttaaacattcaatttcgagcgtctcgatatattatgggactcaatcatacatccgagtaaaaagttatcgtcgtttgaatttgctcagagcataaacattctatttcgaatgtctcgatatattacgggactcaatcaaacatacgagaaaaatgttattgtcgtttgaatttgctctgagcttcaacattcaatctcgagcgtgtcgttatatcacgggacttaatcagacatccgagtaaaaagttgttgtcgtgtgaatttgctcaaagcttaaacatttttatttcaatgtctcgatatattacgggactcaatctaacata

SEQ ID NO: 286132 - DNA, 405 bp, Glycine max
ttgagccaaaatcctgactcaccatataccttgttcatggtgagaatgccaatccttaccctcggaatcaaaaaataagaagagaaggaaaatttccaatcaaaggaaaaaggagaaggaaaatttccaatcaaaggaaaggaaattcccaatcaaagagtgggagaaagcaaacagaaaagaaagaaaattcccaatctaagaatgggagaaagaaataaagagaagtaaaaaagaagaaagctcctggtcaaagaaaccaaaagaaatgtgccgagaggtccttggactacacgatatctgaacaatacagaattgtcaccaaatgaacaaaagacagataatgaaaccatgacctaaaagtggtcttctccctttgattaccaaccaaaatcctgtgcgcta

SEQ ID NO: 286133 - DNA, 303 bp, Glycine max
  unsure (1)..(303): unsure at all n locations
tttcttccaagtanttaactgcttgctgggaactgtcctaagcaaagcccccaaagacctattaacaaacgaccgtttgcccatcggtatgagggtgaccactggttgaaaataacaatttagtgcccaacttgctccacaaagtcctccataaatggctgacgaacttagagtccctataactaacaatgctccttggcaaaccatggagtctcacaatctccgtgaaaacaaatcaggcacatgggaagccataataacttgtttacatggaataaaatgagccaattctaaaaacctatc

SEQ ID NO: 286134 - DNA, 315 bp, Glycine max
ctcagcttgagtaattaaacgacaataactttttttttttgtccgattgagtcccgtgatatattgagacgctcgcaattgaaaacagaaactttgagcttattggaacgacaataacttttgactcaaatgtccgcttgtgtaccttagtatatcgtgacgctcgcaatacaaaagggaagctttaagaaaatcaaacgacaataacttttaactcggatgctggatagagccccgtaatgtatcgatacgctcgatattgaaacagaaccttgagcaattcaaacgacataacttttgattcggatgtctgat

SEQ ID NO: 286135 - DNA, 367 bp, Glycine max
atcttgtaatcgattacacaagtcttgtgatcgattactagaggagattttcaaaaaataatttccaagagtcacatctgttcaaatggtttttgaatggccatcaaaggtctatttgtatgtgacttggaacacaaatctgcttagattttttcagaacaaaaaggtcttatcctctcaaaagcaaaattatcttatcctcttaaaaattccttggacaatacacttgcgattcaataaggaattattttgagttctccattgttcaatctatctctttcaagagagatttcttcttctcttcatcttatttctaaaaagggattaagagatcgaggatctcttattgtaaagcaatctgaacaca

SEQ ID NO: 286136 - DNA, 407 bp, Glycine max
tgactctggttttaatagctttgtctaaagaggtgaagaaacttgaatcccttgccatgttgtttgtgcatccactatcaacataccatacatcctttgaacctaaactatttgcttgggtagccataaagaagtgttttcaagctttagattgctcattagtgaggttgacttgatgagcaaggttgtgggtgagattgatttttcttaaatcggtggtacctctctttatatctgcagttctagcaattgttacattgaatttgaggcttccccttatgtcaacaatctttagacaagtcgtttgtccttttgcatgtagtgcaaggaggaaaattgtcccttgatataaattaggttgaactcccatcttgtttgccttttccttttgatcacctcctctttta

SEQ ID NO: 286137 - DNA, 374 bp, Glycine max
ttctttgcggatttggtcttcgctggggaaaggatcgaagcgggtctgaaaagaggcaaatttgatcatcctgttttgatgaatgagaaaactggggcaaatgaagaggatgagaatgaggaaggtgtgaatgtatgtttacatgattttgatgatgtcaaaagaagaatcaaaacaaggctcatttgcttcaagattaatacaagattgtttcaacaaacaaagccttgatttaagatttcttcaagatcaagccttgcctcaaaataaaaggtttcaagtcatccaaggcacatgtaatcgattaccaaggcacatgaaagtgtgtaatcgattacacatcatatgtaatcgattactagagactctgaaca

SEQ ID NO: 286138 - DNA, 371 bp, Glycine max
tgctgttaggatcaccgatctttggttcgttgggtctctctaacaagtctgagcaagcggaaatggtttttgttgattctgaggtatattttgtgctctctatttgattgttggattgttgttgatgtcatttattgattatatagtttgcatatttcagggtgatcaaattcatgctatttgtaaatcggaccacctcaagtcttggaaagctgatttgaaagagaatttcacttatgttatgcataatttcaaagttgttaagaatgatggtcaatttagattgtgcgaacatgagtacaagttattttttattggagtgacggttgttagagaagctgatttgcatgaactgtcttttaaggaattta

SEQ ID NO: 286139 - DNA, 252 bp, Glycine max
ttctttcttgtattatggggtacccatcacatgtggtactatgtggcggtctgtccatggtgcacaactaggttctccacatgcacaatgcgcgcattaacccaccatcccctggtgccaaccttcaactgagctgacgtgctcacacatagaccatatcctcgtttatctcaacacctgttccccatcaatccttccatgctttcacaacattcaagccaaacaacattgaccctgcacaagctatcacag

SEQ ID NO: 286140 - DNA, 384 bp, Glycine max
ctgggatgccgtattgaaagtgaatcttttttcattttgaatctccaatataggtataaaatgcaattcaatgttgaagcataaaaaaactggatattaataactaaataatggtgaaaacaacacaattagcgaagctaaaaggctaaatatttaaaagtaaatgattgttcaacatgtaaattaacaaaccatcattttaaaacccagaaaatacaaattaaaattcagtcactattgttgtcgccccaattttttttgtgttctaataacaatttcccaaattgtgtcatgaggcctctggtaaaatgagagttcgtatccactattgttgggtgagatcaacaattcatacatgcattctagatgttaataggggtctat

SEQ ID NO: 286141 - DNA, 339 bp, Glycine max
ttctatccttgccccttgatatatgagagggagctttgtgaactatgaatgacccattccttgtgatataggaaatgtggccatgctcacaaagcccgaactaatgcgtacaacttcttatcataagttaaataggtgagggtgggaccactcaactctccactaaaatgagcaattggatgggctctctgcatcaacacaaccccaatcccgacatttgaagcatcgaactcgattacgaaaaatccttgaaagattcgcgacgcaagtatgggggcaataattaacatgttgcttaacaacattgaaagcttcttcctgtttatctccccatttgaa

SEQ ID NO: 286142 - DNA, 401 bp, Glycine max
gggtaccccatgttgaatatgctgaccaaagatctgtttatagcaccactaactgtcctccgttggaagttgtttatggatctaacccactaactcctactgataattcgtctatgcctaatgtctctattattaatcataaagaaggtcaatcaaaggcgaactatgtgataaagacttatgaaaaaagccgagatcatattcggaggaaaaattaaagctatgctaaacaagctcacagagggagaaagacagttgtcttcgaacccaaatattgagattgggcgcacatgaagaaagcaaggtttccggaacaaacgaaatcatcacattaacctaagggagatggaccatttctagtgcttgacacagtccaagacaatgcctacaacagtcgaccg

SEQ ID NO: 286143 - DNA, 352 bp, Glycine max
ttcttgtctcagcgtgtatgcgagacggagaccaacatgctagctatcatcgccaagtaccaagaagagttatgtctagccgcggtccacgagcataggattgcggacgaatatgcccaagtatacgcggaaaaagaggctagaggaagggtgatcgactctttacaccaagaggcaaccatgtggatggatcggtttgctcttaccttgaacgggagtcaagaacttccccgattgttatccaaggccaaggcgatggcagacacctactccgtccccgaagagagtcatgggcttttcggctattgtcagcatatgatagacttattggccacataattagaaatcggta

SEQ ID NO: 286144 - DNA, 423 bp, Glycine max
  unsure (1)..(423): unsure at all n locations
cctatgatactcagctgtttatgccctctcccctcggcggagatttcttcttctgcgaaggcgagatagttgttggcagtgatattattgaccagccctccgaaaccttctaccgagatgtcttgggccacatgggcctcattcagaacttttactagcagagcccgatgaggctcggagctcatgagtaactccaacagcgagaccctggctggagttttgttgagctgttcgataaccttgaattcgctctgctgaattatacggaggaactcactggcttcctctagcgacacctcctttttgccatcccttntctccggaagacctttcgccggaatatctttattcgaagcgaggggtgcttcgtcatcttgttcctccaccacttttccttaccctagacgttcgcgggttggactg

SEQ ID NO: 286145 - DNA, 368 bp, Glycine max
tcatttcttaagaataatggcctcatcgaacgatttatttcctgaagggaattcaataaatatacctcctattttcaatggagtgggttaccattactggaaaacccgtatgcaaatttttatagatgcaatagatttaaatgtttgggatgcaatagaagtatggccctatattcccactatggtggctggaatttaaaccatagaaaagcctaaggaagaatggactgaagatgaaaagagattactgcaatacaacatagaagacacaaatataattacgtatgccttacgaatggatgagtactctaaggtatcaaattgtaaaagtgctaaagaaatgtgggataccctacaacgtacacatg

SEQ ID NO: 286146 - DNA, 402 bp, Glycine max
tgtgtgtccggtgtgcatgaagtcatggactctattatcaatggtgtttaacctggttaatatgaatgccaaatatggatggagtgacaaaagcttcactatattgcttaatgtaatgcaacgtatgcttccagaataaaacagatcgccaaatagttactatggggcaaagaagatactgtgtccgatgagtatggagtattagaaaattcatgcatgccttaatgattgcatgctgtacaaagatgagtttgaagatatgcataaatgccctatgtgtgctgtatcacagtacaaagtgatagatgatacaaatatagcagtgatgaaagcatatacgaagacccccctatgaagatgtgatggtatcttcctatcattccaaggtgtaagcatctattt

SEQ ID NO: 286147 - DNA, 377 bp, Glycine max
tcattcttgttcactaaagaaaaagtatcagagaaatcgattccatcttgatgagtatatcctttggcaaccaatgagctatgtatctatccacagagccatccattttatatttaaccttatacatccagctacaacctatacaatgcttatcaggtggtaagggaacaagtgtccaggtggaatttgcctcaagagctttgatttcctcattcattgcctgacgccactcaggatagggggcagcttgatgataaaattgaggttcatatacaactaaaatctggttaatgagagctctgtaaggggagctaagagccaataatgaacaatgatgctggatcggatatgcaatcttagatattggtgtaacatag

SEQ ID NO: 286148 - DNA, 380 bp, Glycine max
tgtgcattcaatatcctaatgagggtgttccatatgttctcaagactggactaatacatttgctgcccaagtttcacggtcttgtaggtgaagatcctcataagcatcttaaggagttccttattatctgttccaccatgaagccccctgatgtccaggaagatcatatctttctaaaagattttcctcattctctggagggagtggcaaaagattggttgtactacctttctcccagatccatctccaactgggatgaccttaagagggtgttcttggagaaattcttccctacatctaggaccacgaccatcagaaaaaacatttcaggcatcatgcaacttattggagagagcttgtatgagtactgtgaaagattc

SEQ ID NO: 286149 - DNA, 367 bp, Glycine max
atcttgtatttcaaatattatggtgtgcgcttgttgtaacatgttatgtttgctactgatttttaattctttgaccctttgaatgaccaaattggctttcgatgtcttcatgagacttgtagagaattttatcctttacattcaagcactggtatcatgttatttggaccattacaacataatcaatccttatagcattgcagttttgttatattgtgaggacaaactgacatctctatcttcatggtcagtttcttccaagatccaagccttatttgcccatgacttctccataaaagatatatatatctttctcttagctttctacaaccactgagatcatcccaaattcactcttgtagctcaa

SEQ ID NO: 286150 - DNA, 393 bp, Glycine max
tcttatccaaggcaattcttggtggtgaagctccttcttccttggcttattccctagtggatggtgcctcccctctcctcttctcctttgccttccgctgcatctccatggtgaaaaatcaccattgaaggacctcattggagctcaaagatccagcctccatagaatcttcacaagcaagcttccatcacctcttttcctgtacatgactgtgttagacgagtctatgggatgcgtgttgggtcaacatgatgactctgggaaaaaggaacaagccatttactacctaagcaagaagtttaccgcatgtgagatgaattacacaatgctggaaaggacgtgctgcgccctgttatatgcgtcacatcgtcttatgcagtacatgctcagtca

SEQ ID NO: 286151 - DNA, 380 bp, Glycine max
ttatgtttctacttatgtggcagggcgggctgccttgaccttcttgtctccaacgcgaactttgaccattgttcttccttcccgcgatgcttcttttcatgtctgcctgagtgggcttatagcctaaaccatacttcccacgattaccttgggtatttatcagtctagttatgccgccgttgtattttcctaaacccatcccgggctcataaccgttccccaacataactcgggccatcattaccgttgcatcggacaaactgtgctgcccaaagagggagtccacggaggaaatgttgaccacctcaatagactggaaagcagtttctaacgattcttctgcggcttccacataatgcatggaggatgcgcagcttacc

SEQ ID NO: 286152 - DNA, 284 bp, Glycine max
tcaagaaccaccttggctgtatcaaaggactttcacaacctttgtgtgttgccctcgctggacagagtgattctttccttcctttcatcatcactcttgttctttcaaaccacaattccagaaaatccacctctgcccagaattatctcgtggccataactcccattttacgcactcaaattaagtgattcttgagcctaaattgaattcaaaacgagacctttcaccttgttatggatcacctcatttggagccctgtagcttcagttattgccatttctata

SEQ ID NO: 286153 - DNA, 372 bp, Glycine max
tatcttaaccttggttaactaactaaaccataaatagtccctcccactcaataccactaccactttcaaatttcactttttgcattcccatccttgcactcttctaattcctaacttatataatataactttatttagaaaacgacaagattagatattgtttggtaaattatttgtggtaaataaatgtatatgtttgataatgacaacacagactatgttctcattataacatttaaaatactataacataacatctaaatattgtcatttaaaatcataattgacaaatgtttatctttggtaaaatttaattaatagagatatcaatctcttaaaatacataatcaaaaatacaattgacatgaaatg

SEQ ID NO: 286154 - DNA, 399 bp, Glycine max
  unsure (1)..(399): unsure at all n locations
ntaactaatatctttttctaaagctcccatttatctttatcagtatttgattccaagtgagctatttgtgaataactttttcaaatcatataatataaccttcagtatccatatccgtgcatgtctttcggaaaagagaaataatatgcgcgcggacacattcatatatgaataaatcgtcaactttgtccccgtgtgaaatatcgacgaattagttctaaattttaaatttaattattaaatatgaaaaatgtaataaattaattatacaggtcatttaatgataaattaatctggttaaattaatcttaaaaaatattacttattctcaaattggtctttaaatattataacaaaataataaaattatctaacaaaattaacaataaaattaatttt

SEQ ID NO: 286155 - DNA, 367 bp, Glycine max
tctattttgtaaagtatgaatcacctttattgtttcttctagggaccgtatcttttcggtgatatccatgtctcctgttgagttgatactgtgagcataacaaatgcatgtatcttcaattgacaaatgaacttgtataacataatgtaattacttggttaaaactcattttttagtcatatattgataaaaaaatggagacaacaaggttagtgttggcgtacacgtattgtgcatgattttcctccgaagctctggcttctttggaagcattcttctgtccccttacagctttagctatttcaagattgtgaggccaattaaatgttgaatacgcgaattatagcctatttgagtctaacatgtg

SEQ ID NO: 286156 - DNA, 356 bp, Glycine max
ggttagatagaagtaactactggtctattttgtgtgaatatatgtattagacacaaagcattttatctgctgtatgaatgaattacacttgcacttgttctcttttgagtgcatttttctgatttctgggtttgtgaatctcttgtgccaacaattggtatctagagttgatttgatcatgagggactgtgagagaaccttgagtgtacagagaaattggaaatcacaaatagagtttgagagaacccaatcctcttttagaatacccaactttttaaatggcttccaacaatgttccattactagcacctcctgtattcacaggaaagaacaacgaaatgtgggttgtgaagatg

SEQ ID NO: 286157 - DNA, 378 bp, Glycine max
agcttaacttatatatttttattgttagactaaaccttttaacctgtgatgttgcaaactacaaaagaaacacaagtcattaacaaaatgcggaaaataaaaattaaatcatatctccagccattgccatgaagtgttgtcttgttttggttcttccaagctctctctctttctctctctagatggtgtatcaaaatgaattcaaagagatgatctcaaggaccaaatacatgtgctatatatggtattctaccatcaaggatgcatttagtagccattaccactcattattggttgttataattcattagtggccattaccacccattaattcaatttggcttccaaaattgacgagcgttcaatttttcaaatgtt

SEQ ID NO: 286158 - DNA, 407 bp, Glycine max
  unsure (1)..(407): unsure at all n locations
ntgccatgctgaattatattcctttttgctagtgcaatattgtagtttggcttggctttttcttttgcttttgattttggcagtaggtcacatggatcttctttaggagagagagagagaaagaaatcaaaggcttataaaataatcactctaaaaatcctacaacacagtttatagttttatttgtgtgatttaattccagacaattgcatttaattcttaatgctcatgacatgacttacattgcaataaatatgtgtttatggtagttaaaaataaactgaagggtttaatatccatattgttttatttacatgtataagtgagaaaatntccagaaattaattctagagtgatatattaatcaaataatttgataaagggttaattaattagattataatgat

SEQ ID NO: 286159 - DNA, 405 bp, Glycine max
  unsure (1)..(405): unsure at all n locations
ggagancatgatgagtcgatagcangnccntnggtagaatacaacgcgcctatttaactatatatccactccatttattttttatgcacacgcacgcagggggggtggatataagataacacccacaaagggagcacgaaaatagacaaagatatgagtataaacagggatgtcacgtgcgggatgggagggaaatgttgtggaatgatctgcgaatagaacgggaggaaagtgatgacaatttgagctaaatacgcacatataagaaagggagataagaagataaatagaaatagtgagcgaaaaagaagtgaagcaggaaacatgaaatggatgtttagagaagataaaagtcatataggaacatgcaaatatagaagaagaatagtggacactaaacttagg

SEQ ID NO: 286160 - DNA, 435 bp, Glycine max
  unsure (1)..(435): unsure at all n locations
gagtgattgtgatgagtcgatgacgactggtaaataacccccgccaatccccnaagatttactagtgaatgagttttattttttttgnaagtaatataacggggggggtgtgttgtaaaaatcccgccccccataatcagtgaagagataatggacgtgagttatgcagagatgtctagaagtagttgcgataaggagagactatgagtcggatagcgcgtatgaaagagagcagaagttaagaaatgatggggaagaaaaagaaagtatatgttggcagttgagatagttttcagcagtgacataaaggtaaatcattaggggacaaaagaagaaggaattggagcgacaagcggtgagtagtgtagtgtaagcgagtgtgatcagggcaaaaacaacaggtaatattggttaagactgatgaacaaagataag

SEQ ID NO: 286161 - DNA, 666 bp, Glycine max
  unsure (1)..(666): unsure at all n locations
agggggcatgatgacaggctcgnacanncacaatttggttnagangancannncgcgcgngnattanttananactatatcataagggaccaccaatattatgttagtcgtttaagaagatagacgatcaaagtggaggagggtgtgttagtattataatatatcctcgcacctaataacgcatgaagtgaagtagatgagaaatagataggagaaaagcacgtgtcataattgacggatatcagatgcatcgtgtactatgaaatacgagaacagntacacgagtgtagcgatgagactacgatacattatatgaagtaagtacacatactacaagaatatagtcagcgacatatatcagatgtggtagataaactgatgttacagagtaaatgtagtcatgaggttntacaagatatacggacaatgatgtgtgtaaatcgatatcatgtgtntacgacgatagtatangngtatgnagaatgtatctatagaggtactaacatttgtgtagagagactaatcggatgtgaagttaactatacgcagagatgatagtatctacgttggatacgacgagtgacgcggtacgagtactgtactgtgcnttgacatacacatgagtgatgactagaagacgagtatactatagcaaaattacatatg

SEQ ID NO: 286162 - DNA, 533 bp, Glycine max
  unsure (1)..(533): unsure at all n locations
gcgtanattgatgcatggatcgnactannccnttnggtaaggnaaccccncccgcgnctcnnnnatnnngagtaaactaatctaacagagagtctctttctntgtngtngaccnacacgctcctgagggaagggtgtttatataactaaataactcgccacaacgaatatcggtcggaaatgtaaatgggatcaaacataagtgaaacgatgaacgacgtatgctgacatcgggcatagatggtatgagtaagtaccgtcgagcagctcaagggctgcactcatagataccgagactaaatatctgagaccgaacaacgtcgagcgagacggcgcaccgcgacaatatgacactacaagtatacgaccattatgctacgagatgccaaatggcaaaaaatgaccctgaaagagtaacttcgaaactaagaatggagaagacagtacgcgagaatcatgttataaatactcggagagacacgactgtacaacgaacctcggagagagacacagtctcaatattaggcgacagtg

SEQ ID NO: 286163 - DNA, 455 bp, Glycine max
  unsure (1)..(455): unsure at all n locations
gaggggatgatgcatcgatgacnnccntnagtaagaaaccnccgcggatcctatgagtacacattgatgcctgccattattttttaatcccagaacggcccgaggagggttttttactaatgaatacaccaaatcaccaagtaaaacatgtcattaataatatgcggaaaatacaaattaactcatacttcatatcgtcgccaacatgagaacggttgtttcggacaattttatcaataaatatcctgtaggatacagcggggtcccagcgatgctaactagatgagtgaacggaataaataacaggactaaatatggaaacataccatctgtgaagcatgtagtaaacattaggagtctacattggatgagataatgcattagaggccattaccacccatcaattcaatatagcttacaaatatgcgagcgtgtaatttacaaaatgtaagacg

SEQ ID NO: 286164 - DNA, 236 bp, Glycine max
  unsure (1)..(236): unsure at all n locations
gcatgctgatgtgaacctgtgacnccgcaatattataaattttttttttttaaagggggggtttgtaaccccaaaaaaggaaaaggattggatgatagagaaaattgagaattggaaagggaagtatgtaggggggttgggccagggatgaagaaaagaggacgggtatagtgataagtgaaggtaaaatgatagtggaattagatgatatttgaatggaaaatgagaaaggatag

SEQ ID NO: 286165 - DNA, 338 bp, Glycine max
  unsure (1)..(338): unsure at all n locations
gaggatgtgctcgtgacnncntagtagnaccgcgcaggaanattactaatagggagatataattttgcaccaagaaacggggggtttttataattcctccccaatccagtaataagacaaatgtaaaatgtgaaatgagtcaagaagaatgtaaatgaacgtattgacgaggatgatatgtagggtggaatgttttggtaaagaatatgaagagaaacagtattagggaatataaaaaggaatagaagagaaaagtgcagagttagaaaattagtaagaagaaataaggaatggaatagagttaatgggaagaaagcaagagtagagagcgaaagaaa

SEQ ID NO: 286166 - DNA, 483 bp, Glycine max
  unsure (1)..(483): unsure at all n locations
aaccggaccccaccccaacatgaagccgcacagggacaagcaaccacaaaacaaacnacaaacaaagaggacnntttgagcgtcgtagnacaccnccannaaaannaaanaccgcgggnanananagagccaccaacagaccgaaatcttaagaccacaacaaaccacggggggggcaacccacgaaccaccccccccaccgaacaaaaaaaacgcaaagacaaaccaccagcgaacacacaaagaacaaccacacacaaaaaaacacaacaacaaccggcaaaacccgaaacacaagacaaaccaaaccacgagcacaaccaaacacagagaccaacaaacgcaagccaccaacaacaacaaacgacaccaacgcagaaccaacacacaaacccaaccaaccgcaaaacaacgccaagacccgacgacagcaccacccccacaccagacaacacacccaccaccacccaaccacaacccccg

SEQ ID NO: 286167 - DNA, 243 bp, Glycine max
  unsure (1)..(243): unsure at all n locations
gggtgtgtgtgtgcatgtgtacacncctcttgatcattggcattttttttcgaggaggggggttttaatccaacatcgggggaggataatagggaaacggatcgtgggtagcgataagaggtcagggacatggtaaatcggactatgatgaggctaagggtgtgagagagataaatagaaatgagacgttgtgtgacatgttggtatcggagtagttatgaggaaaggttaatgttaattaag

SEQ ID NO: 286168 - DNA, 766 bp, Glycine max
  unsure (1)..(766): unsure at all n locations
tgtgaggaancgntgnattggacttcggcagtaccgattaggaacnannnccncnatnnanaatttttgtnganacgnanccncncnnntgtnnntnntantcntgacgataccgcatcattgcgagacatctttttttttcttatatattaccaacgcatacgtanacncgccgtggagatgggcgtgagtgctagcaatacatgancatatntgcctctacactcgtcgatctacatcatctgcgtactcgtatgacgttatntacacgcatagtatgatattatgcgatcgcaatgtatacgcacggacgcatcagatatgctcatgatgtatgtgatatctggatatgagtgacgccatataacgccagctccaacacgcgcgtgtgtctacagacgtgatcatctagttgtagtaggtcggctntacnaactgagttgacagtctcgagntgacatcacatgtcgcaactcgtgcggtaggtagacgcgcgacatacgtcgatgacgtgtgatgacagtctacgacggcacgtcactagtgaacttagtgangngtctactactgactcactaactctccctcgcacattaacggagtacntagtcatangacagatcctgatcgctgtgagacagggagacgatngagttctactggnagnttacgagctagtcacgccaccgatcttatactaggnagccgccgaactgtgacacggtatactataactggctcgcctcgtctcgcgatattacgccgt

SEQ ID NO: 286169 - DNA, 432 bp, Glycine max
  unsure (1)..(432): unsure at all n locations
ggggnatgtgcatgatcatcganactcagaaattgtaacanccacccgggatcctcagagttacctgctttgttgaattantttcaccgccgccccgggagacgggtgttaattggacccaattctcacatgatgcacctaaaacgtttgaattggttcgaccatgactctctgaattacggccgggaaatcagtgggaggagggacgcccctgcaatttgcacaacatgcatattggaaccctttatggtactaaagagttatcccgggcgtagtctgaagaaactacataagtaatagaaaagtgattttgggtaagtaacgtgataacacatcgatcctaatttacaccgaactaatcatacacatatataggcaggagtgagctttatctggcccgcgaggcgtgagaagctcctaagtctcctcccc

SEQ ID NO: 286170 - DNA, 120 bp, Glycine max
tttatcatcctctgcatcatcatggaggaaaatcaccatataaggaccccattgaacctcagagatccaacctccagatagctctccaagcgagctttcatcaatatttgcgtgctatct

SEQ ID NO: 286171 - DNA, 375 bp, Glycine max
ttctttcttgtactgatcaagacagttggaatgacgaaagctagttccacacatatagggacggcaacccttgtcatgagaagaacaaagaagaagaacagcattgtgtggatattccatgcacacagaacatgtaacatcttcccactctttcttttccaaagccttagaacatttgttttggcagaggtcctcacaaatgtcccttttgcaagaagccagtgggtatggagtcactctgaattgacgagaagcaatcctgtgtcttcccctgctaccttttgccatttccgatattccaacagaatctggaatttaaactgtcaaaatgttatcaaggaatctaaatgaaatgcattcatatattttttatgt

SEQ ID NO: 286172 - DNA, 377 bp, Glycine max
tcgacgacgccatgccgcgtttatagttgtttttgttcgacttcaactgtcaccaaacaacactcgcatgagttagctccattgttccgcttctttatcttctttttttattattatttctagttgagttcacactataactgttgtataatattagttttggttcaccaactattatacatcaaattcttttataaaaattacataataataaaatcaataaaataaaatatgaaaccatccatcaccaagtaccaaccaagcaactcatctaccacgtcacaatacttaaactagaacctttggctttttctagttactcattcatgttcctatacttgctttcactctatatataaggttaattattaatttga

SEQ ID NO: 286173 - DNA, 239 bp, Glycine max
gttggtgttttatacccaccgcacccaaaaatgctaaagttgctgtatgataaaaaaaaattatggatatgctataaaacggatagtataatcgcccggagacataaaagcatatgtactaataacaatggacatatcctcaaatagtacaggtaagcatgataacagaaaatataatattaacatgaaaaaattttggttcaaaagtaaaagatagaacctcttggaatacaatttaa

SEQ ID NO: 286174 - DNA, 754 bp, Glycine max
  unsure (1)..(754): unsure at all n locations
aggantgcnannnanttnggattggangttngcccgataggnnacnacnnccnacnnatannggatttatgtntganncananngccngnnancgcaanantananananagaaattatacttctangcgatgngantgagagatngtttttgtatgtgtgtatagtnangataaatagaagcgtaaaggagggcgggtgggtgtatatatatagtagattcatcatccactattcgcgagtaagagtacgaagataggtatgtggaacaatttacgtgtctgtgagagatatatagtcgttatatatggacgtatggcaggatactctatagtgtangtgcgataccgttgtagtagaagtagagatgtatagaggaatgagaatatatatatggagngtgataatgtgtnaagaggctgagaatgatagaagtgtagagttagaggatgtanatataaggatgtagtgtggtgagttatagaagtgagagacgtagtgtgatatatagatgtccggaagtacgtgtaagcggtagtagattcacgactactaacangctcgaatatatggcggtcagatagttacgtgctgagtatngtgtaagatgatntgaactcgagctatngagatcgataatgtgtatangatgatgatcagagnggtagaaacatgctgtgtagtaagaagtgactgtatgcgcaggaagataagaagtaacttgactgtcgatgcgacgatacggcgtatatagg

SEQ ID NO: 286175 - DNA, 436 bp, Glycine max
  unsure (1)..(436): unsure at all n locations
gagatttgatgcttgatcactgcaatcgtaagtacaccgcccccnacggttctctacgacgaacgctttatttatttcttccattctcccggggggggtggtatgcataaaaccccccctcncatccacggacattaaagactattgataatacgatcacttaaggagaacattcttatgtgaatgattgttggtaacgaataattgccacatcatctcactattatgtttcaatgagcttgaacaaattgctaggcagaggagcttcgaaagtgccttttgcaaaaaaacacgggtatggagcatattagtattgacgaacagcacagtgagttattctcatctaacatttcgcatttgcgaagtccaccgacattcggaaatgacttgttactgattttaatgtatcgtaagaaacggctatattattttattc

SEQ ID NO: 286176 - DNA, 287 bp, Glycine max
ggaatgtgctgatgcaccttgtagacacccgccacatattctacaccactttttttgtgaccctatggggggttttattaatccccctaactagataataaaagaaggggtggtaggagaaataatcattgtgaactaggagaaatttgaaggaaataagtgaaaagtgtgagtgattaacataggtttcacgaaacgtctatacatgtaaaaggaactttttgaatgctatatattctatttatttcaatgtatttagatcaaaacagaaaaaaaagagaattgac

SEQ ID NO: 286177 - DNA, 448 bp, Glycine max
  unsure (1)..(448): unsure at all n locations
aataatgaacatgatcactgacnncnnttatttagnacccccacctnanntnttaatatattaaaagaattattttttttttgactcacancacgggcgggttggattttatataaccaacaacaacttttgtcactagtatggcttacagccatgcatcattacatgtctgcctaaatgggcttatagcctaaaccatacttcccacaataaccttgggtatttatcatggctagattgccacccgagtattttcctaacccatcccgggctcataacctgtccccaacataactcgggccatcattatcgctgcatcagacacactgggctgaccaaaaatggaattctcggaagaaatgttgaccacctctaatgacttgaaagcagttataaccattgttatgcggcttccaaatatagcatggaggataggccacctatcacg

SEQ ID NO: 286178 - DNA, 314 bp, Glycine max
aatcagagggtgtctcttttatcttaccgagagcgatactcctatattcttgagtgattcaagaacaccttggctgtatcagaggactctcacaacctatgtgtgtcgccctcgctggaaagagtgattctttccttcctttcatcatcactcttgatctttcaaaccacaattccagaaaatccacctctgcccagaattatctcgtggccataactcccatgttacgcactcaaatgaagtgattcttgagcctaaattgaatatcaaacgagacctttcaccttgttcgcgaccacctcactcggagccct

SEQ ID NO: 286179 - DNA, 250 bp, Glycine max
ggatgtgctgtgcacatgtagaccccgctttagtcttaaggaatttttttctaaacaggggggtttttaacccccacaccgaaatcgaaagaggaagccaataggaaggatatatggatatggagctaataatgagatttattaacggagtagaacgaggaaaaataaattagctgtagccccatggaatttaaagtggtattgggtaatgctcaccgagctgtattcaaatatatttcgatgaaaatcg

SEQ ID NO: 286180 - DNA, 249 bp, Glycine max
  unsure (1)..(249): unsure at all n locations
gaatgatctctgtgcccttgtagaccccantgtaaatataaattttttttggagaggggggggggtatggccccacacaaataataataagatatatgagatataaagttatttaaagcgtgaaaggagtaaataagttgggtttgggaggagagagaggagaagtaaaaaggaattgatgagggaagataaggaatgaaactagaattaattaattaatagtaaatgggataggagaaaagatgaacg

SEQ ID NO: 286181 - DNA, 527 bp, Glycine max
  unsure (1)..(527): unsure at all n locations
gatgcnattgatgcatcgatagacanncnntttggttagatancacnccgncgacnnanttngcatactctcagcatgatagagatattaatcttatatcacacactagtcagacagagggaggggtgtgtgttaatatttgcacacccacacatcacacagagataatagtgataattcatgtctcagtcgcagaatatatgattagaagtgaacaagggaatgacggcgtagtagacagatttgtacgaatggaggagctcgagcacataatcgttatatagtgtgactatgtaggcgctctcagatagtacactatttgctaagtcgcaatatacctgatatgtggacaaataatagttatgaacgtagtgaggtaagtacgtctgatgtgcacatggggtgaacttattatacagttatatgaggtagttacactgaccgactaggtactagggtataaacatatactccagtgcgcacactgatcatctggttaggatcatgttatcggtctctacgatccg

SEQ ID NO: 286182 - DNA, 461 bp, Glycine max
  unsure (1)..(461): unsure at all n locations
caccaccccaaccagccgccacaagcgaaaacaacagaacataaacaaacaacaccaaaggatcgtgtgctcgtagacaccaaaannaaaaccncgcggcaaccaaaaanccaacgaacaaaacttttttaaacaacccccacacaaggggggcaaaaaaaccaaccccccccaccccccccacaacaaacaacacctccccaccaccaccacaacaaccccccaacccaacaacaaacaaccaacgaccgacaacacacacacacagcccaccaaccaaaaagacccgcacaaaaaccgacaaaacacacccacacaacccaaaaaaaacacacacacacaaacccgcacaacccaccaaccaaccacaaacaaccacaaccacaaacccacaaaacacaacaaccaacacccacacaacacaaaccaaaacacacacaaccacccacaacgcaacaccg

SEQ ID NO: 286183 - DNA, 540 bp, Glycine max
  unsure (1)..(540): unsure at all n locations
gagagcantgatcgattgcattcgatcgganancctcttaggttagcngagcaacccaccnnannntnananngtatatgtaactgtaaagaanaatttatttcattagtttgcacacgaagangacagggaggggggagaggtgttatatagaatgtaacactccccgtcgaggctgagattgaagataggtactaaaattaggtgtggaaacgatattatgatatacactaaggtgagtgaaaagatgatgaaagtatgaggtataggtgagtgtggagggggcgaggtatagtgaggggagaagggaagtgaggagatgtatagagagtcagctaatagaggtcgggaagagagagaggaggagggatggtgagatacgaggaacggaaggggaagggaaacgaggtggtgagaatacgggagaggaatgaaaaatgtggggtaaatgatcgaagaggaatggtgagtataagataaagagaagtgggggtatgatagagtaggaaagagtgaggcgcgagaggtatggtgatgaag

SEQ ID NO: 286184 - DNA, 422 bp, Glycine max
  unsure (1)..(422): unsure at all n locations
ggcatgtgcttgatcactgacanccanaaatagntaggnncnacgganaaanaaaatgatttaaagaatttattnatattagaaggggacaaacgggggggggggattttgtataccataaccaatcatgcagctaagttgatgatataagggatatagtgaatgaagtgtttagaaggcgaatgagttggagttgggataagagtgaatatagtatatgtaagttgtaggggagattgatgagaaatgtgttaaatgagtttgggaatttgtatggagaataggagtaaggtgaaaatgttagggatattaatatggatggaggttgaggtaataaatagggtaagaaggagagggaagtagggaatgagggtatatacagatatgtattgtgtggatagggaagataagagtggttgtag

SEQ ID NO: 286185 - DNA, 228 bp, Glycine max
  unsure (1)..(228): unsure at all n locations
ggttgtctgactgggcgtatgacccccnnnnaaatgtgatttttttacagcagggggggtttttgaacaaatgcgataggatatggaaaattgggaagaggaagtatgtagtaagtcaaggagtgaatgtggattgagaataggagaacagtgtttaagttaagaaaaaaagtttgattatgttagtattgaaagagttgatagagcataaattgtaattgaaatgga

SEQ ID NO: 286186 - DNA, 162 bp, Glycine max
ggtatgctgactatgaccccttagtaaattttttgctaggggattaatccccgatattaaaagagagtatggagtggaagagaggaaaagggaattataataggaatgagaaatatgaggatgaaaaagagtaatggaggaaagtagatagaaaaataaaag

SEQ ID NO: 286187 - DNA, 377 bp, Glycine max
agcttggagaagggaaaccagaaaatcagaatcatgccataatctttacacggggtgatgcagttcagaccattgatatgaatcaagacaattattttgaggaggctctcaaaatgcggaatctgttggaggagttcaatatgtcctacggtattaagaaaccaaccattttgggggtccgagaaaatatcttcacgggatctgtttcctcacttgcatggttcatgtcagctcaagagacaagttttgtgacactgggtcagcgagttctggcaaaccctttgaaagtacgaatgcactatggtcatccggacgtgtttgacagattctggttcttgggtcggggtggagtcagcaaggcctctagagtgattaat

SEQ ID NO: 286188 - DNA, 447 bp, Glycine max
  unsure (1)..(447): unsure at all n locations
gtgggacntttgaaccatcgagagcccccatttggaagnagctccccattancaaaaggaatagaaatcacacattattgttcgttgagcgacgccttagagggcggatattaattagtagtacccattatatcatagaggaatattgtgacgagatagtatatgatgtggtaatatattagcgaatcctttctaggatattaaatcttgcatgtagactgtctcggaagataataagagctagtagatttaagctatgaagagggtcagttataaatgcacaataactcttctaataaaatagtggtgcagtataatcggtgatcaattcttcatctttagcgttgaataagaaaccctcgatatgagagagaataatgtgccgtgagttatagaatatgaattgttgaggatattatcatagggggaatcggaatggagatgacg

SEQ ID NO: 286189 - DNA, 377 bp, Glycine max
agcttatgctacaaacatttataatagaccccctcaacaacaaaaccaacaacaacagaataattatgatctttcaagcaatagatacaatccaggttggagaaatcatccaaatctgagatgggcaagtcctccacaactacaacatcctgcccctcctttccaaaatgttgttggtccaagcaagccatatgttcctcctccaatacagcaacaacaacaacagtagcagcagtcacaacaaagacaacaagcaacgaggctcctcctcaaccttccttataagagttagtgaggcaaatgaccatccagaatatgcaattttatcaagagacaagatcctccattcagagtttgacaaatcagatggggcagat

SEQ ID NO: 286190 - DNA, 415 bp, Glycine max
tgccatgtcgtcgtcgttctgacctaaaccccttcctggcttgtacccaagcctcaacattacacgggctaccatcaatgcagcactggatgaacggggttacactgggggagactcgatgtcgcaacctacccttcagcgggagggcgacgcgagactcacgggtgcatcttccaaggaaggaaaacacgcggagttgccaccaacgtttattcgaggaaaacgtcggaaaaaaccagaaaaggcgtggtctacgaactttaagtgtgaaaggttcgggagttgtatttatgcacggggaaggtactagcaccccacgcgtccgtcacaaggtacgacagcctttaatcaagtgtgcaaatatgacttcaatttgttttatttcccctttataggtttttatgtctttgtatgc

SEQ ID NO: 286191 - DNA, 393 bp, Glycine max
tttcttttgaatatggttgaaactcttgtgggctgtgaacactactcttcgataaccaccgaataacttcggacagcgcagttgaggcaccgctctcttgaacatttcaaacacttactgtgtagcctagaaatatatgcactacaaaatatgcggtcttagctacgctgctcctatacgtagcaggagtacacctgtgccttaggggattctttctatattcttcaaatggtaagcgcccaaatccctcacatagaaaagagacttgcctattatcagccgggctgcccaaatggtgtactctatgagtcgattagcaagcacgcgatctgtattgaccgcgtgaaacattgttataatggagtatgcgatttccggacgtgacctaggagt

SEQ ID NO: 286192 - DNA, 550 bp, Glycine max
  unsure (1)..(550): unsure at all n locations
gacacgccacaactaancactnctcacaaatatgacaataaggtgaanatgaactgcgaccgaccnccaccaccccccccccccaggggngggnntttgatgcctcgacgtacgaccaccananaaactcaagctcgccaagaacgcgnaacggacgacaagcacgaaagtatttatgcccacacacggcaacgcaacgagaggaggacaggaacgaacagctcaagaaacacgaccaacaaggaacgccaagagaaacaaaacagacaacacacacgcgaggagacacccagagagaaccacagacgacgagaacagaaccaagaacactgagcgagaggccacacacactccaacggacacaagcaacaagacgcagaaacgggagaggaaaacgatgaacaaagaaacagcacaaagacaaagaaacaaacgacacgacgcgaacccagagggagagacacggcggacccgagcgggacaccgccgcagaccaaaaagacggaggacaagcacgacgacacaccgcggagaagaacgacggagagcg

SEQ ID NO: 286193 - DNA, 377 bp, Glycine max
agcttgttattgcatttgggcacctattttgaatctcctatgttgtacctacatataagaaacagtcccactctcccaattttacaaaatcatattcatacatcattggggcatttcaccgagcacttggtgagcgcatgtttggacataaattgcaagaggatggggacaatgtggcatgccccattgcttcagaatacagcataggcctaaggccttctcattcaaatcctcaactcatgaaaaccatcataaaaacaaaccaaaactgccccacaaatataagcacattctcataatttggagcaccaaaagatgaagaaaatataccaatgggaagctaaaaacattaaggattgaatacttacttgtgggag

SEQ ID NO: 286194 - DNA, 431 bp, Glycine max
gtggagtttccaagtgccaattcgtcctcttcttttttctattcttcttctggcttcaattcatcagtgggctttccttctgtgtccagcatcttgggatgttcctagcctttgatgacagctttccaggttctgctatccagtgatttgaggaaggccaccattcttgctttccaatattcatagttgcttccatcaagaattggtggtctgttcactggtccgtcttctttctccatgttcatcagaatttatctccctagatctcactctgtgatttcgagtgttggctctgataccaattgaaattctgataccaggggacagatgtcgtaccggatgtcacgacatcacgcttcataacatgcatattgtatgtgtccgtatgaacagattgaacaagtttataacacaacgagaattgtttaccc

SEQ ID NO: 286195 - DNA, 382 bp, Glycine max
agcttcatgatgatgaaccaagcaattttgatgatgccaaaagcccaagtgcttgattcaatattgattcaagacttcaagatcaagcatcaagaatccaatccaagattcaagagaagaaatcaagaagcaacaagtcaagacttcatataggataaatattaaaagaatttttcaaaaaccaaatagcacagttttgttttacaaaagaattttctcaaattttctaggttaccagagtgattactctctggtaatcgattaccaattggcattaatcgattaccagtgaccagtttggttttcaaaatgttttcaaatgatttataattttccaaaatgattttcaaatagtgtaatcgattactatattagtaatcga

SEQ ID NO: 286196 - DNA, 426 bp, Glycine max
  unsure (1)..(426): unsure at all n locations
tagtgcttgattaattgtctctgcgcttaatttacgttcatgcttaatgatcatttatgagtaattggtgtatgtgttgcttaatcacataacgaatgtcttatgttaaatttctcttaataatttaatttagggttggattaagtggttaaactgataaaggataaattctcgcaacctaggataagagacttgcttgtgaatcaaggggaagcaatgcattttaattctaatattttctagttcaattttactcgttgtgtaatttacaaaagcaaacaccccccccccccaatttgttgccatttcctactatctgttatgaacatttgatttatcattgctcattgggaaacgacctangatcacttcctagttactacattttaatgtttatttgattcgggtatggtctcgatcaatcat

SEQ ID NO: 286197 - DNA, 374 bp, Glycine max
ttgtcttcagaattcaatttctagcgtctcaatagattacgggactcaatcagacatccgagcaaaacgttattgtcgtttggattagttcagagcttcagaattcaatttcgatcgtctcgatatattacgggtctcaatcaaacatctgaggaaaaaagttattgtcgtttgaatttgctgagagcttcaacattcaattttgagcgtctcgatgtattacgggactttatcagacatccgagttaaaagttattggtggttgaatttactgagagcttcaacattcaatttcgagcgtctcgatattttacgggactcaatcagacatccgagtgaaaagttattgtccgttgaattagctcagagattca

SEQ ID NO: 286198 - DNA, 425 bp, Glycine max
tcagcttgagctattcaacgacaatacgtttgctctgtgtatgattgagtcccgtaatgtgttgagacgcttgaaattgaattttgaagctgagagctaattcaaacgacaataactttttactcggatgtctgattgagtcccgtaatacatcgagacgctcgaaattgaatgttgaagctctcagcaaattcaaacgacaataacttttttcctcagatgtctgattgagacccgtaatatatcgagatgatcgaaattgaattctgaagctctgagctaattcaaacgacaataatgatttgctcggatgtctgattgagtcccgtaatacatcgagacgctcgaaattgaatgtcgaagctctcagcaaattcaaacgacaataactttttgctcggatgtctgattgaggctcgtaatct

SEQ ID NO: 286199 - DNA, 368 bp, Glycine max
  unsure (1)..(368): unsure at all n locations
ttgcttgtcaagatcactgaggtgcatattttcatttaatttattttttgcataacttatcaatattacttactgttacgaaaattaatttaagtctttatggttatttattcaaactaaggcgttatacgagtggtttttgaacgaatttatgatagatttgtcattatcatttatgaagcattcagtcattcggtaggattatgcacttgcttaaatttatttatctgttgactactatacaccgcaattaattgagatgaattatatacttggttttagctggcacgattgcaagaggaccttcggcgcatgaatgcatagaaccaanagctgaacgagatgctcatccatgtcaacagtaacta

SEQ ID NO: 286200 - DNA, 383 bp, Glycine max
cggaactcggccttcattgccttaacccagctgtcttggctagaggcttcggcatatgatgaaggttctgtggctggtgagatggtcatcacgaagttcctatgggcaggtgagaggcgcgagtatgaaagtactgagcttagtggataacgaacaatcactgaagcttctggtgtagatgaaccaaggactctgtggtaatcctgaaggtatgtcggggaatgtcttgatcgtgttgaacgcctacggtgtgaaaggtcttgcttggttgaatgttcatcacaagagtgtattggtattatgggtcgtgatgagtggctttcttctggtgggtcaagctctttgccggaaaagggttccggacatggagatgggattgagtt

SEQ ID NO: 286201 - DNA, 376 bp, Glycine max
ttgttagaacctataagttcaagagccaaaggaatgccggaagcaaaagtgattgcacggtttaatttattaatgaaatctggatgaactctgtcggttctgaaggccttccaacaaagcaattcgagagcttcaccattggccaaaacttccacctcgtataccttgtcaaccccatgggctttaagcaaatgtctgtctctagtggtaatgatgactctgctgccagggccaaaccaatcaagacttccaacaagagctcgcaagtcatctatctcacagacatcgtcaagaaccaaaagaagcctcttcctggggagcatcttctttattagtgaaactccttgctcgacacttgtcagacgaatattgttct

SEQ ID NO: 286202 - DNA, 424 bp, Glycine max
  unsure (1)..(424): unsure at all n locations
ntaaatgtttagactaatccaagctacttaattattttaattgtatatatgctatgcaagtgaagttgacatcaaccaataaccataaaaacgtgacacacatgtgtatgctaattaattaaacataaacacactatattgatacatatactcatgattaacaggaagatgggttaggaactaagtcatctgatcaagtatctagcaagaatccattggacacagatagcagcacgccagcactttatagccagaaggaggagttaagaagcaacaagaggaagaagaaaacaattgatcacaacacaggacgaataatgaaagaatatgtggagatagcagacaagttaagatggctagctgaagctatgataaggtcataacaagcaagaatggactcaatgaatgacatagagaggatgat

SEQ ID NO: 286203 - DNA, 367 bp, Glycine max
tttcttgatggcgtgttacccaccatcttctcatagaataacaccagtaacgtgtctactatcattgttatcatctccctctccatcattggaggtgcttcttcagctgtcagatccctccacctttaggcatattctttgaaagattcatgctccttcttacacatgttctgtagctgccttctatccggagccatatcataattgtactaatactgcctaatggaggcaaccattatgtccttccaagaatggactcagataggtttcagattagtatactaagtgacggctgccccaataagactttcctgttagaaatgcatcaataatattgcatctttcatgtatgcacccatgatcctgt

SEQ ID NO: 286204 - DNA, 425 bp, Glycine max
  unsure (1)..(425): unsure at all n locations
tcganatcaaatactaaccagtcgaaggacgattatctatgaagaacggacgaagaatggcaaagaacattcacggttttggttacggaagcattatggaagcaccttggccctgattttcttcttctttctccttcttttcactaattttaagtgaaatatgcttccccagggtgttgaaccccttctttcagcctcccacacccttttatagccaaaataggggaggagcttgccgcccagctcgcccaggcaagctggtggcttaagcctgaagtaacatactcgcccaggcgagctggttgcttcatgtagaagcttcctgatgggcctaactgggcccatggctgaagaacaccccctaaattgattagctcacccccattttgagtgtttggcttttttacttccgaaacgtcgcgaat

SEQ ID NO: 286205 - DNA, 377 bp, Glycine max
tttcttggtatgatgcttcaatggaggaatagaaagagggagagaaagagagaggggggagctcgaaattgatggaagaaaaaaagggagagaagttgaactttgagttgtgtctcacaagactctcattcatcaaagttacaacaagtgttactcatgcttctatttatagactaagtagcttccttgagaagctttcttgagaaaacttccttgagatagctctttgagaaaacttccttgagaagctagagcttagctacacacacccctctcataactaagctcacctccttgagaagcttccttatgaagattcgtatagaagctagagcttatctacacatacctctctaatatctaagctcacctccttg

SEQ ID NO: 286206 - DNA, 422 bp, Glycine max
tggtggagttcaaagagaatcgtagaaggttcttgtctatgatataagcctacacgcaccgacatgaagagaaacaccctagaaaggagaggcagaagtgtgggccagcagcaaggattgcaagtaaaaggaactcccttatgtcacatcaacaagagttttgtcagcgcacgctggatgtgtgaggggtgggttgccatgatccatgatgaagtccctcaagagcaatcaaactgggtgcggccatgccctcctatgttcgagttgggaaattggcaaattatcaaacaacccataatttttgtggcaaacataatgtaatatgtgaatccaaaccctatagctgagcctcggctcgcgttagctattagatatatataaaatataatctgtcttcattttttcttgcactatcatcccta

SEQ ID NO: 286207 - DNA, 368 bp, Glycine max
ttgcttgtagaatggctagacatgatacatgtcatggtttggtttggttcaaggataaaagggatgccccacattttccatgacacaaaatgcaaaaatgatgatttggaaattttatgcaaaactggtcatgcatgcacctatgcggacactcaagtgtcaaatttttatggtcatgtgatgctagggttcaggattcatttcctctattttagtcaacccaatgtttccaaaatatgttcttttatcaatatgtgcattcctccgattccatttctggcgtccggggaaatttacagcattcacccttcaagtgtagacacgtttttttcttctaaatcggttatgatcaatgaatgaattctttt

SEQ ID NO: 286208 - DNA, 386 bp, Glycine max
  unsure (1)..(386): unsure at all n locations
tgtccgcanaaaatcactagaaatggattttattgtttaacacctcagtttttctcaccaagtaaaaatggatcattttaaggtccaacgccttaaaatggccaccttccaagtaaaaagaatcgcttgattcccgcttaaaaaaaaaaaagaaaagaaagaactacataggtctgatttcctcttcgatggagggtatgtaggagcaagagccccacttttgtcgacctcaaaaaataaaaagaaataaaagtttagatacactattctaatttaaggctgttgtcctttgggacaaacgtgagaggtgctaataccttcctcaaacgtaaatacaactcccgaatctggaatattctttatgaccggtttccttccgtctttcc

SEQ ID NO: 286209 - DNA, 325 bp, Glycine max
tgctttgaatgctctattcaatggagttgacaagaatatcttcagactgatcaacacatgcacaatggccaaggatgcatgggagatcctgaaaaccactcatgaaggaacctccaaagtgaagatgtccatattgcagctattggccacataattccaaaatctgaagatgaaggacgaagagtgtattcatgacttccacatgaacattcttgaaattgccaatgcttgcactgccttgggagaaaggatgacatatgaatagctggcgagaaagatcctcagatgcttgcctaagagatttgacatgaaagtcactgcaatc

SEQ ID NO: 286210 - DNA, 416 bp, Glycine max
gtaaaagattggctaagattttgttaaaacataagcacttagacaatgaaggaaagctggagttgctgcacaagatgtccaacgttatgtctaagaataagatcgggctgcacaatgcacaaggcaagataaagtgtcaaatgaagaattgaagctgcaggattcacgatgtctgatacaatgtccaggacatcctgcctgaaaatactggaattgctaaaagcattgaagctgcaggatccacgatgtcagatacaatgtccaggacatcttgcccgaaaatactggagttgctaaaagcattgaagttgcaggatccacgatgtcggatacgatgtccattacatcttgcccgaaaatactgtacatataaatctgttatatctttaacagattattgtgcagttagcaagaga

SEQ ID NO: 286211 - DNA, 377 bp, Glycine max
agctttgtgaatatcaaatttgaaagataggggatatatttttcgtatagtaccctttgaaaactaaggatcacattataaataaaggatctacatttgataaagtcactgtatacaagactaatcaaatcagaagagcctctcatagtatagtagaaaggattttagtgatgattttgtagattacaagctattggtctgcggtatgggattttagtaggatgaaattcacaactgtatccttgatttaggatagattgcaacttgttttgaagtatacttgcactgtgggtattacatttcctcaaatgattcccaactcattttgtagaaaaggcaactattcaattatgtttggaagttacagctcaggtttt

SEQ ID NO: 286212 - DNA, 430 bp, Glycine max
tcctcgacacgggacaacctctttcacccacaaatcgtctcagagcttagggggcttatgtactgtccaggacccaccaatcctacccacaaatcatcccttacccactcatagccagcgacggtaggggtggacgacggtgacccaacactcatgctaggtcgaacggggggagacgacctcacgtctccacctccaccaacctacacccctgaaagcagaaggatggagggtcacagtaatggagactggctccctggaagtagcaaaaggtcatgcccttccgtgaaggcgagaagtgcctctactatttttgtgtgaagtcttcaccttgaagaggactccccatgagaagcacctcggtgagtatccttaaacgacaaatcgtctattgagatgatctcttgatccatgatgggttgctcaatgt

SEQ ID NO: 286213 - DNA, 114 bp, Glycine max
  unsure (1)..(114): unsure at all n locations
acaaattatcgtgtttgaagacatatcatcgtatctctgtctttctttcgcctacgatcaattactcaagcgtgacagccacacgtttaagggcaccattctttgacataacan

SEQ ID NO: 286214 - DNA, 380 bp, Glycine max
agcttcgttcactccaagctcagttcctcgccaatcaccacaatcacatgttgctttttcttccttcaaatttctctctctctcttgtctcttctttcgatttattccaattgcgcaaatctggttggttgcagttatagcaaggaagcgttagatgtgagcgcgaagcttctagaagtgaatccagagtgctacacagcttggaattacagaaagctcgccgttcaacatcttctctctaactccgattccgatcctcactctatcttcgatgacgagctcaaactcgtgtgttctgactctcgtcggctaatttaattcaatataatactttcgataaataattactttgttttgttttttctatgaattgaatgaat

SEQ ID NO: 286215 - DNA, 433 bp, Glycine max
tgtcaaatggataaaaggctcacattcactttcttctacatcatattcaaacttgtccaaataaataataaagtcatctcgactcaaagaaaatcatataagtctcatacaattaatatagaacctatatcctaatgtcacatcctatcagagcgtggtgttcccgtgtcctctagcatgaggttcttcatagtcatccacctattcatctgctcccccgaacacaagttcaagatcatcacaggatccaaacataacaacacacagggagtgagttatcacattcctagctaatagagaaacaagacaatcaaatatacatattatataaatgagataccacttgcttaaacatagctcacgtaacttcaccacttcatcattcagaattcactttttaattatcaatcacattacacaagaatcccacact

SEQ ID NO: 286216 - DNA, 378 bp, Glycine max
  unsure (1)..(378): unsure at all n locations
agcttttgcatgtttagatatatatagagagagaaaggtctaagttccagagatttttgagagctttttctatgagaagactagcaaagaactgagcaagaagaggaagctatcataagagcaggagatgagtctatgagtgattgtgaggttttagaggtggaggagacatccccactacttgtatttcttcaatccttcatttttctcttctatttgttgtaaaggaagcttcccagttatggagagctaaatcctttgttggttcttccttgtacgtacttgatgtaaatacatgtatatctatntaatgatgttttatgtgttctctgtgctatcagtacatcatttcaatgtgcttttgccttgatcatgtag

SEQ ID NO: 286217 - DNA, 432 bp, Glycine max
  unsure (1)..(432): unsure at all n locations
ntgccttgtttggaacttttaatatccacagtaacttgaagctctccactggttcttctactccccctaactgagacaacattgaatatgccgactttgtagtgtactacctagtaggaccctccaatcagacccattgatcttccccagacttttggatttgcaccccttccaaagtaagatgaagttgttgtatcaattgagtttctcatacaaatggttccctcctccacttggcctcccaagttcacacatcatccctccacaactccattataccggataggtattcagttcaaatgagaaccccagaaccatccccactgaagaggtacccgacctcacaaataggtgagtaatccaccataaagcaaagcagatgattaatgggaaaagggaaggtttaggccactgaaacctcgattaaagaat

SEQ ID NO: 286218 - DNA, 381 bp, Glycine max
agcttgctaacccatggaagctcctaatatctcccacactttttggggtgggccattcttggatgcccttgattttctcagggtccacttgtaacgacccgcctcgtcgctacggtatccacactttaatatttgataatttcaatttttttataaaaagaactcccttaatttttgcttatgaaaatagaagtgattttgttacaacataaattcatccaacaacacgccattacttaagtgaatatacataattacatagaaacaataattcggtacttgtcatacacataacgaaaattaaatatgttcatatatatatataattaaaattccagttttacatctttaactcaacaaaataaaacttaaaaaccaact

SEQ ID NO: 286219 - DNA, 430 bp, Glycine max
ctttcctttggttgttctattagggtttccaagcgttagagagaatgagaatagattgtagtcttaatatcactgtcttcgtgcgaggggaatttctctctctacagacattattttgcaaatcccaacagtgagaatctgcgaaaatgagtttcgaaggtggtacccaaattttaggacaatctaacggttaatgagtttgagatcgtaattttactgggataaatttgggtgtatgcgagaaaaagggagggttttgggagaggatagagagaatgaatttgggaggaaggaggagtgtaaagacatatcgtaattgtaaaaattgacctaatctgtctctatttatagctagggtattctgagacgattatttttttttttttttataaaaatgaactctattttactctttcataaaataaataac

SEQ ID NO: 286220 - DNA, 355 bp, Glycine max
ttcttccatcaagtgggattataacacaagagcttcaagtaagtgctccttacacctccttgaattatcaactttaccttctactacattgcagtttattcatttctctccatgtatatcctaacatgtctaggactaaatgttggtaacatgaatctttagaatttccaccgattaatcttgctataaaagctaaatttgattttctatggttcaaaattcttgttcatgttcttgaaccatgattagtgttgagtttacgtgtctttgagttatgtcttgctattttttgtggctgaaacctaaaccattaaattctctcataaacattaaaggataatatatcctctcaaag

SEQ ID NO: 286221 - DNA, 407 bp, Glycine max
tataaaactcagctgagcaataaatcctcctacatccatcgtagtcttcattacttgcttacccacgcctacgtttggtttattagggaaaaacaccatacctaaccccgtcctaagggatccctatcgcaccatatccaaatctagaacgatgggtgatcaagaggagacgcaggaacaaatgaaagccgacatgtctgctctgaacgaacaaatggcctccatgatggaggccatgctaaatatgaagcagctcatatagaagaacgcggccaccgccgccgctgtcaattcggctgccgaagcagacccgactctcttggcgactacgcaccatcctccctcaaatatagtaggaccgggaagggacacgctggggcacgatggcagccctcacctgagataca

SEQ ID NO: 286222 - DNA, 378 bp, Glycine max
ttcttataagaacaaaattgcctcaatcatttccaaatatgcatgtgaattaggacgcataaacaagaatcaagccaaggctattgtgcaagcaatcaatggggcaaaacacaccaaatgattatgatgatggatggctcaaattctcacaaaggtaaaatcatcactttcaaattgagctttcaaaactatcatgacatgtagagaagaatcaaagatttcaagtcacaaaatgtcaagaacttttattttcaaaacaattacccatttcttgaacatatcctataattcaaagaaaaacatgcaaagtcgtacgtgcacacaaaattgacccaaaatattaaactaaaaatctgacgaaactaacaacattaacaa

SEQ ID NO: 286223 - DNA, 429 bp, Glycine max
tcttatccaaggctcatcttggtggtgaagcttcttcttccatggcttattccctagtggatggcgcctcctctcacctcttctcctttgtcttgcgctgcatctccatggtggaaaatcaccattaaaggacctcattgaagctcaaagatccagcctccatagaagccccacaatcaagcttccatcaactcctcctaagaataaattggagttgcaaagcttaatagggaaaataaacttccttaggtgattcatagaaaactcggctggaaagttgaaagctttttcaccattactatagctaaagaagcaagaagatttcgtctaggaaaggaacaacaagaagtttttgacaagattaaacaagtcttggtgtcgcaacgtgcccttttgcgggcgagcgaaagcgaagctcacgggtgcgct

SEQ ID NO: 286224 - DNA, 376 bp, Glycine max
tttctttagcctttcatttcttggaagccatctacatcaaaaaaatcaaagacacaaaattagacaggtatttattcaaattagaaagcaaaaaaaaatctgaaatttaaactaggcgcttagcgagatggattcgcttagcacgacttatgaaaattaactcatacacttagcgcgatcgaggtgcgtttagcgagttaacacagaaaactactctactgcataattggctcgctaagcccaattccaaaacagaaaacaatttgcgcttagcgcatacggtgcccttagcgcgacaacaatactagagaataattggcttagcgagcaggctcgataagcccaattccaaaaattacaaaacaggatagaaatt

SEQ ID NO: 286225 - DNA, 445 bp, Glycine max
  unsure (1)..(445): unsure at all n locations
gacctataaaactcagcttgcataggctcattcaatcacttagtgcaccatatgttnttggatccattccttaaaagcccgagggagttatgaaacaaagtattaatattttgcttaataccatatcaaagagaagaagtaatatgtgcccaagtgaaatgatgattgtttgcaactctagctcacaacgttaaagcccattgcacatctgtagaaactagctcccaatcaagttgccttgttgatatccaagaccaatgataaacctgaatttgactatattttgatgtgaattttcatgtcatatccatgcatattgatatattttattttggcaaaactcatggttgggtattaatttgtgaaagacatgtgcttaagacgctaaatgtggaaaagaactaaaaatcatgaactttttcacctaattagaagatcatagtca

SEQ ID NO: 286226 - DNA, 367 bp, Glycine max
tgcttgatattcacatcaaagatgcagttaacaggttaagtattaaattatacaccatttagtctattttgaactgttaatatgattataaattgatgatcatatttacattgatgttttttcccaaccagtgaaatgaagacattaaacagtacttctgttggtaaatttcaacaacctacacctcactcgattgaagtaaaggttagtcatttaaacaatgctactttaggacttctgacattttgtaactttgtaattgtctattgttaaatatatttcatattcaatttagagtcatgttcataccataggctatgagtgtggctattatgtcatgcattggatattgaacatagtcagtggc

SEQ ID NO: 286227 - DNA, 428 bp, Glycine max
  unsure (1)..(428): unsure at all n locations
gtngaaaatagtgttttcattataatgcttcttatgctttttccctcaaaaactactttgttttaacttctgacaaaagcactagaagaaacttttatgcttttattgctttcctcaaaacacttatccaattataataaaaatcttaaacaagtttttcaaatcatcaaaacacttttttcttttcttttaaaaagacacaaacaaacaggccttaaaatgagaattctttagttcatttccactagctttctggtcctcatgaacatctaactcaaattcaatggttttatgaaggaaaaatgccagaatcatctcatattatcagacacgatcccaacaggctagcactgcaattcataaataagtgctataatactgcagctattgacaagctcgctagtcttccttaacatgtacgtcttctg

SEQ ID NO: 286228 - DNA, 380 bp, Glycine max
  unsure (1)..(380): unsure at all n locations
tttctttaagttgngataattctgagaagtggttaaatgccatgaaagaagagataaattccatggaacataatggtgtttaggaccttgtagaattaccaaagggttgtaagagagttggttgtaagtgggtcttcaagactaaacgtaactctcatggcaaccttgaacattacaaggctagacttgttgctaagggatttactcagaaagatgacattgattataaagagaccttttcaccggcctcacaaaaggattctttcatgattatcatggcattaatagcccattatgacttggagctacatcagatggatgtgaaaactgcctttcttaatggagatttaaagaatgtttgtatggaccaaccaatgggg

SEQ ID NO: 286229 - DNA, 430 bp, Glycine max
aaaagttgattatatattgtgagaccatgtgttttggacattatcttttaataaatcagtcaagggagtaatgatagtagcatagtgtcaaataaattgacagtaaaatattgtgaggcccaagaagcttcgaagggtcgagagagtttttggatggtggtcacgcacaaatagtgacaacttattagggtttggctgcacactttgagttgtaatgacatgcccaaatagtcaacagagtgaacaactaacaaacatttactcatttttgcataaaaagaattatcagacaataactgcaaaataatgcataaataagtgagatgttctgaataattagcactataaattatgatatcaccaaagaataccaacacaaaatgcctcatataaggatgtagttgtcgcaacctacctcacgacgggactt

SEQ ID NO: 286230 - DNA, 354 bp, Glycine max
  unsure (1)..(354): unsure at all n locations
tgcttcttccccgaagcacataacctatcaaagatatttagtagcttagctatgttctcatctgggtatatatatatatatgtatctatacatatataaaataatcatatttgcttgattctaatatccatttcctttttcctcaattagaaaataacatacttaaaattaacatttttcttacagacactaccaatgtactcatccgcaccgacggaggcctactgataagcctacaggggccttctacaaaaactaattaatcctacagatacattttcattaaagtttcagcacataataatcatcatagcgctttttaaacagttaanaatatatagtagaacatatact

SEQ ID NO: 286231 - DNA, 424 bp, Glycine max
tggatactttattttatgtttgatgcattttgctcttaagcaaaaatttatatttaaactactcattactaccattagatttaataaaaatacaaagtaactcaaaaaaattaatccttagagagtaacttaatcttcacaaatgatttctccccacaacctataaccaagtaaaattatagcctgagtttaactgtcacaatataaaataattttccagttattcaatcacaaaccatatttattatgattttttaaataattttataaaaataaataaatatatcatccacatgatgcagttgaatgtcagcataaaactacttctcttattgtctctattgcatttcattttacaagcattaatgaaatacaaccaaaaacgatacgaaaataaaattcttgatgctcattgaacgcttta

SEQ ID NO: 286232 - DNA, 377 bp, Glycine max
agctttgagccaaaatcctaactcaccataaaccttgacccagggtgagaatgtcaatccttaccctcggaagcaaaaaagaagagaaggaaaatttccaatcaaagaaaaaataagaaggaaaattcccaatcaaagagtgggagaaagcaaaaagaaaagaaagaaaattcccaatcaaagaatgggagaaaaaaaaaaggagaagaagaagaaggaaagaaagctcctgatcaaggatcgaaagaaaacagaagaaatgtgcagagaggtctttggaccagacaatatctgaacaatacggaattgtcaccaaatgaacaaaagaaagaaaaggaaaccataacctataagtggtcttctccctttgattacca

SEQ ID NO: 286233 - DNA, 426 bp, Glycine max
  unsure (1)..(426): unsure at all n locations
cctatggactgagcaaaaaggctcaagtcatcaaatactactcatcttttaaagcacaaagcgaggattggaacctcaaccctatgttcttttaaaagactgcaatgagaaaattacagaggataggaatccctgggggaaaccaagaagaatacacaaaaataaaaacatgcagcgacttccttaattgccccaaatcttaagcgtagtatcgcttgacaacgtcggagttcacgggtgaagatagctcctcgttatccatgttggcgagcaccagggcccctctagagaaatccctttttacaatgaaaggaccttcgtagttcggggcccactttcccatatgtcttccagagcttgggagactttcttcagcaccaagtccccttcgctaaacctgcgcangcgtaccttcttgtcagaagc

SEQ ID NO: 286234 - DNA, 377 bp, Glycine max
agcttgttagaacaaggaagcagtccatttgagagagtttcgccttaggatataaatagttaatgtattagaattaaaattaaatcatttgaatattatttaaatttaagaagagttaagaaaaaaaaatcttaaagaacagatatacatgaatctacaaaccgtacggtttggtgcaaccatcagtcacgttttcaacgaaggccgaataaactatatatacataatacatggcgtgcatttgtgtcaaagctctcatccaacaaaagaaatatctttgcttttgatgtgatatttcacttgttactacctttaaggtcgttttcaagtgcatataatcatgtttatcgatttcatttcttttattttattttctt

SEQ ID NO: 286235 - DNA, 431 bp, Glycine max
tgctacacaaataacctttgattgtgtcaatctcctgtgattgtgtgtaggaactaggaagtaggaaccattagcctaggtgacatctggtaaataaccagattgagatagtttggtgtggccatgactatagttctaatagcagccatgatattaaaagtccctttttgtcaacctaaattcagtttagttaaaaaaaattcagttcccttctccctaatttttatctcctgtttcccacttttttctccaatctctcttcattatctgattttatttcaatgattcaactctctccataacttttcctgacatgttggaattttctttaacctagttagattgaagacgaggaatatcaataatgaggcataatattttgcctaaatatagttcattctatacttcaaattaaaatttgcaaacctttg

SEQ ID NO: 286236 - DNA, 380 bp, Glycine max
  unsure (1)..(380): unsure at all n locations
agcttgatcaaaacaaacatctaatcattccaatccactcaattcatacattttctcaatcaattcattcccaaaaactcatttcatgcaaaacaatccattgcataacattttcaatcagttcactgttcaaacaagctttttgtacaagcagtcaaacaactacactacaactgaaatttaaataactgaaacataaagactaaaagttaaatgattgaacataaatcataaaataactgaaataaactaaattgttcaaaatgcacaaattaaaatgtcatgctcctgtgattgcccctgtgcatgcttattgagatccaacacctgaactgtgacatcctggaaatttctacccgaaattntgtaaacgatatatt

SEQ ID NO: 286237 - DNA, 424 bp, Glycine max
tcatgcttatgatttatactggtcataaagagggagtgttatatgtagcacataggcaaataccttcaccaaccatagttatgatgaatgatttaaattagcatgggattaggctgtaacatagctacctattggctcttaatgagctccttgattaagtgtaattatactatgaagaagggatcagtgattaacctagagagtagagatatacaatttttctcaatctcaagatctctttttacattaatgatgcacaacctaataatgttttctttgggttctaagggtttgggcgagaagacccaccacttcacattacttgatggtgagatggttattgatacattgccagattcacagaagcaggagagaagataccttatatatgatatgatggcaatcaaccaagtatcaataatag

SEQ ID NO: 286238 - DNA, 379 bp, Glycine max
agcttgcctctgaagaaaatggtcgatgcgacattaaataaatgcattacatgcacatacttcttcatgttgagaaaccactctccatcactagtgtgttaaacactactatatgaagccacttccttttatgtctgagcaggtctgtgtagaagagctcttcttttgatggtgattgaggaattttagaacttagcttcatttattcttcataggattcaaaaattcctaggagaatgtgtctgcaaaatagatttcaaacacatggtattaaatgatctttaatttgtatcaaatcataattttatcttgctatcatctgaaacatcagacatcgacttcacaaatcatgttccgatagtgcatgagacataactct

SEQ ID NO: 286239 - DNA, 112 bp, Glycine max
  unsure (1)..(112): unsure at all n locations
tctaaactttatacaagaatgaagctctgataccacttgttggacaagtggcctcacatatcttaagaaggggggggggggggtgaatcacnatcttacgacttatttcccc

SEQ ID NO: 286240 - DNA, 379 bp, Glycine max
agcttgactaggcgagttgattttagccttagtttcactttagttattagtcaattcgattaagaatgagaaatcccaaagagaaaacgtccgattgattttccgctttattttactaaaaaaagatgttttttgattattatattttttttatctctttttgttttccaacgttgttacggcatgaccgaacggtcagaattcattttaaccgaagttaacggataatacaattcaaacgatcggtggaaatttattttatttttaagttaagcgagaaatgacttaagtaaaatggcttaagcacgtcaaaagggggtataaaaagtaaatgaaatgagaataaaaatatacgaaacacaatgtggaccactatggg

SEQ ID NO: 286241 - DNA, 433 bp, Glycine max
  unsure (1)..(433): unsure at all n locations
taacaaacttacaaatcaagtgatcatgtattccgaaatatagggggagaaaacggatgcacattttatctatatacaattgtttgttgcttgcttgaatcttgatttcaggtattgtattgtcatcatcaaaaagggggagattgtagatgcaattggctttgatgttttgatgatgatcatgatgatgtgttgcaattgatgcaaatgggcttttcaagattaaaattcaagacaatacttcaagattacaagtcacaacatcaagatgatcactagaagattaggaagggaattcctaattgaattagcaaaggtttggccaagtgatttaaaataaaaagtgtttttcaaagcttttactctctggtaatcgattaccagaggatgtaatcgattaccagtggccaaatacgtnttataacagctataa

SEQ ID NO: 286242 - DNA, 383 bp, Glycine max
agctttggtcctattcaaatagccataacttttgacatgggggtacgattgaggcccatgatatatcgagaggctcgaaattgaaaaatggaagttctcgagaaattcaaatggtcataacttttaacttggatgtccgattcacgcacataatatatcgagacacacaaaattgaaaaatggaattctcgagaaattcaaatgttcataacttttgcctcgaatgtcagatttaggcacataatatatcgagacgctcgaaattaaacaagaaagctctggtccaattcaaacggccataacttttgacatgagtgtatgattgaggcccatgatatatagagacgctcgaaattgaataatggaagttctcgagaaattaa

SEQ ID NO: 286243 - DNA, 414 bp, Glycine max
agcttcaaccaggggagatggaccatttcaagtgcttgaaagaatctttgacaatgcttacaaagttgagctgcccggtgagtataatgttagttccaccttcaatgtctctgatttacctgtttttgatgcacatggagaattcgatttgaggacaaatccttctcatgagggagagaatgatgaggacatgaccaacagcaagggcaaggatccacttgaaggacttggaggacctatgacaagggctagagcaaggaaagccaaggaagctcttcaacaagtgctgtccatactatttgaatacaagcccaagtttcaaggagaaaagtccaaggttgtgagttgtatcatggcccaaatggaggaggactaaatgacaccactttggttcaattttagagtgtttactta

SEQ ID NO: 286244 - DNA, 367 bp, Glycine max
ttcttctcaaggaagttttcttaataaagcttctcaaggaagctacctagtctataaatagaagcatgtgtaacacttgttgtaactttgatgaatgggagtcttgtgagacacaactcaaagttcaacttctctccctttttcttccttcaatttcatgctcccccctctctctttctctccctctttcttttcctccattgaagcatcctctccaagcttcttttccaaggctcatcttggtggtgaggctccttcttccatggcttattccctattggatggcgcctcttctcacctcttctcctttgtcttctgctgcatctgcatggtggaaaatcaccattaaaggacctcattgtagctc

SEQ ID NO: 286245 - DNA, 425 bp, Glycine max
tatgctgcaaacatctacaatagacctcctcatcctttcagcaaaatcaaccacagtagaataattatgacctctccagcaacagatacaatcccagatggaggaatcacctgttagacaaatggcctaagttatcttaagaagggggggttgaattaagataacaagaactattccccaattaaaattttactctctctttttagattaacaatgcacccttaacatgaattactcaaaagacaattcaaaataaacttctttcaagccaaagataaatagcaataaataaaagaagtttaagggaagagagaaatgcaaacttgatttataccagttcggtcacttcctgtgcctacgtccagtcctcaagcaacccacttgagattttccactctctttgtaaaatccttttacaaagtctg

SEQ ID NO: 286246 - DNA, 322 bp, Glycine max
agctttatgatgtggatgcataaagcgcgtggcaatatggccgcaatcaccatgaactatctatggaccaactctgtcgctgaggaacatgacactggcccaataatgtcgatatatgaataaaagctctatctgggtgagtggatgcctctatggcttgatatctatgtgtgagtcagtgcatgtgtgtataagatttctctctaggcataccatacacaactctttatacaaaaatgaaaccacctgaattattagcgaggcacagcttgcccatgatcttattgatggcactagctaagagatcttgtgctagagatct

SEQ ID NO: 286247 - DNA, 429 bp, Glycine max
  unsure (1)..(429): unsure at all n locations
tgacttactcttccgtggctacaggatatattgtctcttagactacttgcggaatccactacgttcatcaatgacaatagtcactcaccatagcgtagacatcttgcgatactgcttgtgaaaaatgctatccactcatcgcagctggtgatcatgacacaatgctccatgactagagcgcaatgtccagcctctccaccgcttctaatgcgattcagaagacttgggattgatgtgaacatatcttcgttagaagcgtctccactcatcaacgctcagctgtttatgtggcacgcgttcaactcaagatgtgaatcaatacctctgtggatggcacttcattatgcttagcatataatatactcatcggagtgcattaccgatggtctctgtagatgacaactagactagctgtatgtcctatgttcn

SEQ ID NO: 286248 - DNA, 377 bp, Glycine max
tgcttgcacaacaagtaactaattctattttttacaaaatgaaataactaactaactaactaacttccactaatatatagagcgactactcagaaagaagggatgagccttaattaatcccatctaatatacctaattaaactaattacacaaaacaaagcccaaattcgcagcccaattattcaagtgcggagattctaacttccaaggttaatttgaccctctaaatggcagaattggccaaagcttattggtgaaaaaatagaatatctttttgttatctttctagggactacccacaatctccattttgagttatgtagtgtcgtctaggatctacacaaggaaaataggtcaagtaaccacaaaaatccaaa

SEQ ID NO: 286249 - DNA, 434 bp, Glycine max
  unsure (1)..(434): unsure at all n locations
nttgctacaacctttntctccccctttggcaacatctaaaagccaaagaactcggaaatcaacacagttataacaatggagtagcaagatataagtatcagagtagtaaatacaataagccaaaaccataatcaagaaataatcaaaccaaaattcaaagatcataaaatgtcaacaaccacaaaatatccaagactaaaatttaagaacacaaaataaataagcaaagtacttagcataataatgtaaattctaagaaactaaaagccaaaatacacggcttataaaagataaatattcagaatctaaaatctaagaagacggaggaggtggtggaagatcgaaactctgacgaatgtatccgacatcctcttcaagctgtgtaagacgaatgtccataccggcaaagcgtgaatctaacgagtcaaagcggg

SEQ ID NO: 286250 - DNA, 359 bp, Glycine max
ttgtctttagacaataggtaagggaaattttatcttatgttctattgcttaatctgattggatgggttgtgtatgctccaaagcatgtttgattttctatgggtttatggaatttggtgttggattgcctttagagtcctttccctttgtatgcttttgatttgagaattcttgatggaatcttgtatatgtttaattgattgctgatttatgtttttttttggacttgtgttgagttctgagtcatttatgagtgtctggaggggttgggagtgatgaaaatgcgtttatgttcacaagaaccctgaaattgcaagttgtagagtttgcatacttgctaagcaagacaagctcattgt

SEQ ID NO: 286251 - DNA, 429 bp, Glycine max
taacaatccttgtgatctattacaggatatttctattcctatcacatagcttgcatcactcatatccttcatttcaaagttactagaaagaaacttcttagtctcatgaagaagaccaagatcattagttgcaacaatatatcatcaacctacaggattagaaaataaccttactcccactgaccttcagatatatacaccgatcaacagtattttccttaaatccaaaggaaacaatggtatcattaaacttcaaataccattggcgagaagcttgcttaaaaccatatattgatttctttaatttgcacaccatatgttcctttccctcaactgagaaccccattggttgatccatataaacattctcctctaaatctccattaagaaaggcaattttcacatccatctgatgtagctccaagtcat

SEQ ID NO: 286252 - DNA, 379 bp, Glycine max
agcttaaagtatgcccgagtcattcatccgtatgagatgttgttgaagtattggcgatcagaattgacattccttggattatagggttgaaccaaactcatgcttttacaaaaaggttcatcaagtcaagttgaaatatggaagtaaccgtcctgcaaaattggggcaaaagatgaattgagtcacatcactgcttcgtctactgccaaacatatttaggattgttgatgtccttgttacttccagtttcaccttgacaaagatgtcatggatcatgttgaaaatctaaattgattcaaccccatatcctgcgtaaaaattcgcaatacttcaactatacatcattcgcatacatccatgcttttcattggttgcattg

SEQ ID NO: 286253 - DNA, 428 bp, Glycine max
  unsure (1)..(428): unsure at all n locations
tgcctcanagaggtccaggaaagacaaggcggtcgaatgaactatttccgccccggagtacgacagtcaccgctttaggagcgttgtacaccagcagcgtttcgaagccatcaagggatggtcgtttctccgagagcgacgcgtccagctcagggaggacgagtatactgatttccaggaggaaatagggcgccggcggtgggcaccactggttactcccatggccaagtttgatccagaaatagtccttgagttttacgccaatgcttggccaacagaggaaggcgtgcgtgacatgagatcctcggttaggggtcagtggatcccgttcgatgccgacgctatcagccagctcctgggatatccgatggtattggaagagggccaggaatgtgagtatggccagaggaggaaccggtctgatgggt

SEQ ID NO: 286254 - DNA, 369 bp, Glycine max
agcttgtgtatgacttgcttaaatatatgaagcttgagttcaacttgtttagtatgtatatagcttgattattttcattccctttatcaaatctctcaaagtattttttaagtttaataatttggtatttttacactagaataacgtcaaaatagaattacaattttaaaagtaaaagaagtaattaagcctataccttttgtatgcaacattttcatttcttttaaatgaaattttactatctatatgaagggaaagtagcactatgccttttgtctcaactctcaagtctaaagttgtgccgattaatccctaaactttaactaatgtcccatatattctttcatcaatatgtcattctagattctt

SEQ ID NO: 286255 - DNA, 425 bp, Glycine max
  unsure (1)..(425): unsure at all n locations
tgtgcgaatcaaatcactcctgcattntatctctagcatgcattttttctttctttacccactcctcacgtttggttttttagggaaaaacaccataactaaacgcgccacaaggcatccctatcgcaccagatccaaatctagaacgatgggtgatcaagaggagacacaggaacagatgaaagccgacatgtcgactctgaaagaacaaatggcttccatgatggaagccattgttaggaatgaggcagctcatggagaaaaacgtggccaccgctgccgctgtcagttcggctgccgaagcagacccaactctcttggcaaccgcgcaccatcctccctcaaacatagtaggacgaggaagggacacactgaggcacgatggcaaccctcatctgggatacaaccgagcggcttacccttat

SEQ ID NO: 286256 - DNA, 365 bp, Glycine max
tttcttcaagaatcaagatcaagattcaagattcaagaaccaagagaagacttaatgaagataagtatgaatcttttttttcaaaaactgagtatcacatggatttttctcaaaacatgtttaccaaagagtttttactctctattaatcgattaccagattattctaatcgattaccagtagcaaaatggatctgaaaaagttttcaaactgaatttacaacattccaattaatttcaaaaagctgtaatcgattacaatgtgttggtaatcgattaccactgcctgtgaactttgaaattcaaattcaaatgtgaagagtcacatcccttctcacaaaagctttgtgtcatcaatgacactga

SEQ ID NO: 286257 - DNA, 413 bp, Glycine max
taagttcttcatctgatgtcggagccatcttcatcattgtttgaaggaattccgggggaagctcatgtcctgatgtaatcagtcaaaaccatattgtaagtctttcatacaagcggaacaagacaactaaacaatttctcttttaaacttcaatatattatcattcctgataaataaatttcatcatgatcaatcatgtaaagttcaaagcaatcaatccactggttacagaaataatcatctcaacagcatagccaggacatgactaccacaatctatcttccccggtttttaaacatgatgatcaataataatgttaaacagcattcaaacctatcaacaacaccacagcaatctatcccctcaactgcaaagacatgacgataagagtccatattatactgcaagtctac

SEQ ID NO: 286258 - DNA, 379 bp, Glycine max
agctttcttgagaaaacttccttgagaagcttctttgagaaaacttccttgagaagctagagcttagctacacacacccctctaataactaagctcacctccttgaaaggcttccttgaaaagattcctaaagaagctagagcttagctacacacacctctctaatagctaagctcacctccttgatatgagaagctagaacttagctacacaccccctataatagctaactcacccccatgacaaaatacatgaaaatacaaaaaaagtccctactacaaagactactcaaaatgcctcgaaatacaaggctaaaaccctatactactagaatggccaaaatacaaggcctaaacgaaggagaaaacctatcctaaaa

SEQ ID NO: 286259 - DNA, 453 bp, Glycine max
taggacacttaaatctcagcttccatatatctctcccaagagaagcgggcatgtaacttatggtgacaacaacaaaggtagaaagaattcttggagttggaaaaacaggtacaaattattcaaactccattgaaaatgttctacttgttgaaggccttaagcacaacttgcttagtgttagtcaattatgtgataaaggctatctagtatcatttgattctcaaaaatgtctcattgaacataaacatgatactaatataaaacatatagggtatagagtcaacaatgtttatatgatagacataagccaaaaattagataataataaattttttcttagcaaagatgatgatccatggctatggcataaacgtattgctcacataaacatgaaacacttaaataaattaatttcaaaagatttagttgttggtttgcctaaattgaaatttg

SEQ ID NO: 286260 - DNA, 372 bp, Glycine max
agcttgttttgaaagtcagactcttgccgtgcactgtgattatgacgctagtcttatatgggagtgcagagcatcataacttcttctctttcttgttcttgagaggttggtctagagaccttgaagcgaaaaattgttgctaagcatgcacacccttcaatatatccttgggcattctcaattgtcaccggaatcttgtctcatgttcacgagacacgatgaagcttgatatctgctcgagagacctgcattcttggacgcacccttctcttgggagtcgtgactatgacacgaacaggggtcgatccaagtcttgatgcctatgcttggatttaacctctttgaacactgtgatgactcaagaaaatgtgc

SEQ ID NO: 286261 - DNA, 380 bp, Glycine max
  unsure (1)..(380): unsure at all n locations
tgtagtgcgagagaggactagggacgccaccatgattatttgtgaccagcagtgacgaggaccatgactgaggtccaacgatgatgatgccagtgatgggcaacggctttagattcataactgctgngagttttttatattaagcacaacatgaaatctcgactcgcgaggcttggactacctcatctcgataatgacgtcggttcatacactatgtaaactggcagactcctctcacacgtcagagtctaccctaactcgaactattctagtgcagtataattttacttatatcacactagttaacgtgcgattttaactagcatgcactacagtgctactcgtcactctagcacttctcattagcatagattcttgct

SEQ ID NO: 286262 - DNA, 381 bp, Glycine max
agcttgaaggcaaactggatgcgttggtcaacttggtaacccaactggccttgaatcagaaatctgtacctgtcgcaagggtttgtggtttgtgctcctctgctgaccaccatacagacctttgcccttccatgcagcaacctggagcaattgagcagcctgaaacttatgctgcaaatatttacaatagacctcctcaacctcagcagcaaaatcaaccacaggagagcaattatgacctttccagcaacagatacaaccctggatggaggaatcaccctagccttagatggtccagccctcagcaacaacaacagcagcctgctccttccttccaaaatgctgctggcccaagcagaccatacattcctccaccaatcc

SEQ ID NO: 286263 - DNA, 423 bp, Glycine max
atggccccctgcattcagaacaaaacccctaccatggatgcagagacgggaagcaaactcttgaggatcaatcctcatcctcgtaaatctggaataggtaggcagtgtctcaccctcctctaaaactattggggtttcaaagaaggtatttaggctgtcagcatcaatcttgattaagtgtcctgatgcaatcctaccccgcaagggcattggatagaaaactccaagtagattgggccaaagatgcaagagaaggccctagggttcttatgagccttaaggtagatttcgggcccatgggctaagtatgagcccacttatctttgtaaatattagattaaggtttcattatttttgggccttgtatttagggctccataatgtaagtagggtaccctagaaatataggatgtttcagccctt

SEQ ID NO: 286264 - DNA, 380 bp, Glycine max
agcttcaacttacaaagagtagtttaggcttagcgcaacaagcgcgctaagcccactgcttgaagtttaattccaatgaagatgttgggcttagcacagtgatgtgtgcttagctgaactattcagccaactagccaggggtctaagcacttagcgcgagcaagctcaggcttagcatgtgaagatatggcgcttagcgcaatggttgcgcttagcggatgggtaactgaaaattttttctgagtcttttttgtccatctcttcacctaggcttaaaaaccccccttgttcactactaaacaagctgaaaaattaatcacaatcacaagcaactatcctaactacatgcaagagatacaaaatgaagaatagaaaaggga

SEQ ID NO: 286265 - DNA, 433 bp, Glycine max
tgcatgcaaaatagacaaaaaaggttgctttagtttgcaattttcatgttctttattaattaattaattattatcatcattttttttttgagtttgcgtatcatatgtttatgccataactgtccttgatttcagcctagtcactccccttcacagtctcatgtaccagatttcgaagtcatcaacacctctttactttaattctcaccaagtcagcattctctgcatgtatagcaacaatattttaaagaagaggtaagcttactcattttttctcatttcctagttgcaattttttgctcaagaataagccattaataatttcttgcttgaactattattgaatctcttaagtgattacttaagtaataaaattatttaagtaatctatgaagtattgatcaatatttattactttaaggactaaattgaa

SEQ ID NO: 286266 - DNA, 380 bp, Glycine max
agcttgtatcaaattcaaacgacaataacgttttactcggatgtttgattgcgtctcgtaatatatcgagacgctcgaaattgaaaacggatgctcgtagcaaatgcaaaccgcaataacttttaactcggatgtatgattgagtaccataatagatcgagacgctcgaaattgaaaaaagaagttctgagcaaattcaaacgactataactttttactcggatgtctgattgagtcccgtaatatattgaggagcacgaaattgagaacagaagctctgaccataatcaaaccaaaataactttatattcggatttgcgattgagtcccgtaatatatgaagacgctccaaattgaaaacagaagctctgaacaaattc

SEQ ID NO: 286267 - DNA, 430 bp, Glycine max
  unsure (1)..(430): unsure at all n locations
cttgagccaattcaaacgacaataactgtntactcgaatgtctgattgagtcccataatatatcgagacggtcgaaattgaatgttgaatctctgagcaaattcaaacgacaatagctttttactcggacgtctgattgagtcccgtaacatatcgagacgctcgaaattgaatgttgaacctccgagacaattcaaacgacaataactttttacgcggatgtctgattgattcccgtaatatatcgagaccctcgaaattgaatgttgaagccctgagccaattcaaacgacaataaatttttactcggatgtctgattgagtccccgtaatatagcgagacgctcaaaatggaatgttgaacctttgagccaattcaaacgacaataaccgttttactcggatgtctgatggagtcccgtactatatc

SEQ ID NO: 286268 - DNA, 363 bp, Glycine max
ctttttatagaatatatactagaagaacagtgacgattgaacagtctatacatgtttcctttgatgagtctaatgccattcttccaacgaaggatcttttatatgatatcttccattccttaaaacatacacatattcatggaaataactctcacgaaatatatgactgaagccatgaacattctcaagataatggggctataggaaataatgaactttcaagagaatggaaagcctctagagatcatcctctcgacaacattattggtgatatatcataaggggtctcaactgcacattctcttaaagatttatgcactaatctggctattgtctctatgactgagcctaaaaatatgaaag

SEQ ID NO: 286269 - DNA, 427 bp, Glycine max
  unsure (1)..(427): unsure at all n locations
ntgcttggagcttcaatggagaatgaagaagataatggcaacgtgagggagagagagggctgtctgaaattttgtggggctgagtgaagagagagagagttgctttttggttttaaatgaaagggttttctcttttttctattattttattcaagctatgccacatgtcttcatttgagtggagcaagaagggcccactttccctttttaattgtgactcatactcaaccacaaaaagtgagaaaaacctgacctttgaaacgctaaaatcctgccttggtttgcgtgccgtttctctggttccagttcctcacgtttctctgcgtccgtcggggccagttttcgaaagcaagcaatatatatatcaaaatgctcagaataaaaccccgagcgtggttcagaggttggttttcgtaaattctaagtc

SEQ ID NO: 286270 - DNA, 374 bp, Glycine max
agcttgaagctcaagaaaaagtttgaagaagttttttggcttttacatgtccaactcctttgagtgacatttgtattggttattaacttgattattgcatcttagtacatccgatatttattttgcattgtgcatcatcatagtgtgagtgaagaaaattttctaagttagaaaaatttcttcagaggcaaaaactctattttaatcgattacaacaagttgtctgaagcttaaagagttaagtctcgtattggtttaatcaattatggtagtattttaattggttacatttttgtttgagacaatgactgatttttcaggagtctctactttaatcgattacctggtggattaatcgattacttctctctcat

SEQ ID NO: 286271 - DNA, 429 bp, Glycine max
tgtaggattatggggtacccatcacatgtggtactatgtggcggtcgggcgatggtgcacaacaagttttccacatccacaatgcacgcataaacccaccatcccctgttgcccacctccaactgagctcacgtactcccacgtagcccatatcctcgtttctctcaacaccgggtccccatcaatcctcccaagcttccacaacatccaagaaaaacaacattcaaacagcacaagctatcacagccaagcaaaacagagtaaaggcagaaaactctgctcaacacatcaaccaaaatcacagcttttctcacttaaagaccacagtaacaattccttcgatccaattcgttaaccgttggatcgactccaaaattttactggaagtctatagtgcataagcctacattgtaaccgttgggatctact

SEQ ID NO: 286272 - DNA, 379 bp, Glycine max
  unsure (1)..(379): unsure at all n locations
atctttaaagcacttctcagtactaaaaatcctaactatacatacaaatgggtgatcaagccacaaacatgcaaaaatgagcatagatagaagcaatgaacacataaaaataacattaaatagatagtaagataattttatatcaaaggttcagcagaactccccaatcaagaggtttagccttccattacaagtaatgagctttcaatacaaaggccagattttgagggaagaaaatggctaaggagggttgaggatgtctccttcaacctctagaaccctaatctcactcttcccacctagactctcttggtggcttcgtgtttgtcgctctagcttctcccttggctctgttnttcgactcctctcttagtttcca

SEQ ID NO: 286273 - DNA, 444 bp, Glycine max
  unsure (1)..(444): unsure at all n locations
ggacctatgaaactcagcttncatactggcgctcanaaggatttgacctgtgaggatattcaggtatttcaactaaattttgaatgttgttataatatgttgcactaaaaatcttaatttgtaattgactaactacaaaatgtatttattatatcatagactaaatttgatattcctgaatcatctaatttgagtacaaagaaaaagaaacttcagatcgtacgagagaagtggatgcaatctaaatcagatttgacctccaaatatgccctggcacacgacaaggagggcaaggatgacaaagtatgcaagaagtatgacataagcaaagagaagtggacccagttttgtcagagacgtagagacccttcatgggaggataattgattatcattgtgttttaaacttcatatgtacgtattattgtcgactgtattaacttac

SEQ ID NO: 286274 - DNA, 374 bp, Glycine max
agctttattctcagatccctcttgttggactagacttagcttgaatagcttatgaaagtttagactaatttagcctaagctttgtcctcagatccctcttgttggactagacttagaccaaacaacattattgtaacagcatacttaaaaccaaaacttaatccgcagatccctcttgtaagactaagtttcaattatgcttcattcaagttctaaggaaaccatacattttccaatgttaaaatcacctaagtatgcacacaaatggctgatcagacaaaagcatacaaaatttaagcacggaaagaagcattgaacacaagatacccaatcaattagatatgataataattaaatctgttgttcagtagaaa

SEQ ID NO: 286275 - DNA, 427 bp, Glycine max
taacaaattgtttctatagtttgagcttgacctttttatttataaaagctttttaaaaaacttgagtttaacctttatagtaaataagccgaaccgagccgagccttacataggccgagccaaaggcccttgacaagctgctcggctcatttccacccctattagtgactatataggttcacctgtgtatctttatctattttattcgaacatgtatggttgggttatgtatttattttactcgccgactcagagtattaacgcgttgaacagttactacattttattatgcacattttaaagatcaagtgatgttttatgaaattggataggaaagtttttaatctcccaaaaatttccgctattttttataatctttcaagttaaccttatggaacactgatgactatctttttcttaagtaaat

SEQ ID NO: 286276 - DNA, 379 bp, Glycine max
agctttatcctttgacattagcttattgtgccttctgaaacacacaacaacctttattgtgaaattgtaaaactctcatacccttgattttgtaaaacacgccaagtccttctatagttgcattattgtttgagaaatctaagaaacacattattttttgcatatttttttattggtcaaaatttattaaaaataatgaaattgattaaatgtgatagttataattcagaatataagatagtgatctaattattgttggtcattatttaatctcatttttagttgagataaattagacaaacacttttagaatagataaccatgtgaatttaataatccaaggctgactaaaacggccttccagtctcacgcagttgat

SEQ ID NO: 286277 - DNA, 430 bp, Glycine max
tgtccttggtttaaacatgatttatacatgatttatgacttgtaggattcaatttgggcaaaattggatgagggcaagtgtggtttcgaaaatctgcactttatgcagaattttgctgtcaaatatgtgcagcagaattttgtatatgtgcagaaaaatgcttgtgtatggctggtggtggaaagggtagtacatatggggttctggatatttgctagcagatcccaacggtcaaaatgtagacttatgtaatagagacttccagtaaaattttcgagtcgatccaacggttaacgaattggaacgaagagaatgttattggggtatttgagtgtgaaaagctgtgatattgatttgtgttttgggcaaagttttctgcctctgctctgttttcttggctgtgttagttcatgatgcttggatgttgaat

SEQ ID NO: 286278 - DNA, 370 bp, Glycine max
agcttcagctgacattgggaagcaaaaacccatacctctcatcatagtctttcttgtgtatgccgattgaacttgcaggtctgttgtgatgtggctttgacatgtcacattgacatatcaaacttttcctaataagtaaattcaaaaatttggagccggtgttattgctaaatgttagatgcattaattttttaaatgatgaaaataccaccaaaaaaattatttgaataagtctttcaacactgtgtcatgactacaacattttaaaaaaacagaccccgagtgtatttgttcatcactctcaccgaaattaataaacattcatgcttctagtgtcttttaactggtcagataacgtcggcgacccatg

SEQ ID NO: 286279 - DNA, 425 bp, Glycine max
agttacctctaaacagggtcttctagtcacgtggataactgacaatatcaactttttgttctctgttaggcatttcaatgttgaaatatatcttgaagcctttcttcttgccttcatcacagatgggtaaccttgagtaggttctgttacgaaccatcttcatgtcaatagctctactgatatgaagaattggtggataagatgtagcttcattaaaaaatgtacatctgttcagaattctagctatcatatccaactcaatctgtgagggatttagatcaacaggattattgcatagaaatcttgtaataggcgtacggatgttaacatttttagaccactaaacctaagaagatgagttctcttgagatggatccattttgtttcttgaggatgtaacaatggagatcttctcaaatggatca

SEQ ID NO: 286280 - DNA, 376 bp, Glycine max
agcttatggggagggtaggccacaatctcaaccatgattgatggtggaaggtacccttgaaacaacacaatgtcccaaaaaccctcctggtcaacaaggtcacccactttggactggagaaggtcctttggcaaatcatgaataaaaaaatcataaacaacattgccttcaagtcataaatctaaccaaaagtttacaaactatccatttcccactaaccttgttcttgatcaatgctggattgaggatgtcccaagcgaattagaccaaatcattttgagtgatgtaatttctcttctattcattaataaaatatccagcgtattgatcctaaaaaaaaaaaaaacactctgttgatagcacaaactaccattac

SEQ ID NO: 286281 - DNA, 425 bp, Glycine max
  unsure (1)..(425): unsure at all n locations
ntactgaaaatggatcgtgtgtctttcttttttaattggattgatgtgttgagttggggcttgaatgaatcaaatattaaattggcactttttgctgatggctcactgatagtgccgtgttgcaggaagtcagccgtttgcttactgggcttaattgtggaaaagcacttgaagcagtttctctcccagaatctgcaacttccctctctgcggaacatggttttgacatccaggtatgattcaatccactttttactatatggttttttcttgtgttgtgttgaactttttttttaatgtacttggcttatgtagtacttgtgttgtgcttaactcttttttaatgtacttggcttaaatgtatttgagctgtgttgaacttttttttgaagaaataattgattnttactattgagaaattcttg

SEQ ID NO: 286282 - DNA, 377 bp, Glycine max
agcttccgttcctgagagaaattctcatttgagcgtttcagcctttgctttcgtgtagcttaggaaaaacgccatttcttctcctctcttccttccaaaaccatttctaacgtcccaagcactttctccatcacccacaaccaccattagccaccacaaaccgccgttgttctccgttgcaaccccacactgagagaaacccttcgaccgaagcggaatcttccaacttggctcgcggtttcggtagagaatgaaatcctagtctgacctttcgttttccttcgaggtaaccatggttctacgcttgtttcttgttagtttcaacttgtctttgtatcttttctgactttggaaccgtcattgcatgttttacgttt

SEQ ID NO: 286283 - DNA, 424 bp, Glycine max
  unsure (1)..(424): unsure at all n locations
ntaaccgaaacactaagaaagttgccaactaaattgcatgttagtcaacctttaccttcatctattttgcaggttacaggttgcacactttatggtggagctcatgggtcaggcttgtgtattcccactaaagaaacgtctcatgaagttaattacatgggaaaccagcctggacaaaattttaatgcaggtggattttctggatttcaacatggccaaccttaccagcaacataatcaatggagaacttaccctggtaattagttcaataaagtccagggtgggccacctaacaggccacaacaacaagggcctagcttatctgagagaacaacaaagctggaagaaactcttgctcagtttatgcaggtgtcattgactaatcataagagcacagagtcagccataaaaaatctagaggtct

SEQ ID NO: 286284 - DNA, 375 bp, Glycine max
agcttgtttaggatgctttaatggaggaaaagaaagagagaagggggtagcatgaaattgaaggaataaaagagggagagaagtggaactctgaagtgtgtctcataatactttcattcatcaaagttacaacaagtgttacacatgcttctatttatagactaggtagcttccttgagaagctttcttgagaaaacttcattgagaagcttctttgacaaaacttccttgagaagctagagcttagctacacacacccctctaataactaagctcacctccttgagaagcttccttgagaagatttctaaagaagcttgagcttagctacacacacctttctaatagctaagttcacctccctgagatgtgaag

SEQ ID NO: 286285 - DNA, 428 bp, Glycine max
  unsure (1)..(428): unsure at all n locations
ntgacttgagtcatcaagagattataaatatgtgaccttgacatgagtttcaataatcatcaatcatctttgaatcatctatctttcaatcttttttcaacatcatctctcaaacatctttcaatcaatctttcaatatctttctaaagaattttctgattcatttctcttcttctttctaagagtttttgttcaatacattctctttcaagaaaagttcattgttcaaaaacttgtgctattctttttcttcattctcttctccctttgccaaaagaatagaaggactaaccgccagaattgttttgtgtatcccttctctctttacaaaatattcaaaggactaaccgcctgagatatcttttgtttcccctttcaaagattcaaaggactaaccgcctaagaattctttgtgccaacacattgga

SEQ ID NO: 286286 - DNA, 542 bp, Glycine max
  unsure (1)..(542): unsure at all n locations
agtggtgtagtncctgatgtcatcgcacactccacggcgatatatgaactcgtgcccccgggggatcctctatgagtcgactctgcatagcactgcatagctttgttgtatgtattgtcaccacagacatactaacgagttctgtcacctgtatcttgcaaagatttcactactcaacatatgataactttgatcgctagtaatcggttactcatctgtgttaataatagaggaatgtttctccgcatatactatccgaggaccatactacactgtacccctgacgcatattatcataccttcatcataactctaactgaactcttgaaacaaataaataagatattataatgtacctttcttaatataaatgcatactaacttgtataaacatatctttcctatattttaaatgacatcattttttaaataccttctatctttcaaatggtctaattggaactgaatatcttaattacatcattttagtgacatattttactttccaaaaatattaaatattaatatctcattatctaatc

SEQ ID NO: 286287 - DNA, 432 bp, Glycine max
ttgtcttttaagataccttgattcgtcagccatttcttatttcttaattttgcactactaccattaccaattcgccacctaacaccctccttgacatccttccagctagatcatatgcccttccagaaatttgagctattcatcttttttttccaccactggaaggaatgccattatttccacacttatacttggctctcactacatcggcccatagagaattcccgtttagtgcaaattctccaaccagatatcatacaggacttattcatagcgagagaagatcttaagcccacaccaccaatctatgttggcttacatacatccttccaagctattgcatgaactgtcattgcgttctcctcctcacacacgaacgctctacatttgtcatcaatctccttacaaatgtaagctgggatttcgacgatt

SEQ ID NO: 286288 - DNA, 352 bp, Glycine max
agcttattctgcaaacattactaatacacctcctctacagcaaaaccaataattgcataataattatgacctttcaagcaatagatacaatccaggttggaggaatcatccaaatctgagatggacaagtcctccacaacaacaacagattgtgcctcttttttagaatgctgtctagacaagcatgccatatgttgctcctccactacagcagcagtcacatcaaagacaacaagcaactgaggctcctcctcaacctttcttagaagagttagtgaggcaaatgaccatacagaatatgcagtttcagcaagagacaagagtcttcattcagagtctgacgaatcacatg

SEQ ID NO: 286289 - DNA, 424 bp, Glycine max
tgaccctgttgtaagagggtaaaaagtgaaagttaatctgttgcaccaacaaagttcttcaaggaccagaaaaaaggtaccatatgattgaaatcttgctgtagcattgatcaactcatctagaacgtttagaccgtatttccaaaaccattatattaaagtgataattgatcatcccattcaacgagtaaagagaaaatctaagcttacaagtacaatggtagcgtggatagtcgaactttttgagttcggtttgaaatttgagccaagaggtgccatcaaagggtagtacttggtcgacttcatggacgagctacttcccaatgaaggctacaacgaacgttagtggacattatacattgatggaacttctaacaacaatagtactggtgttggggttactctgataggaccagatgccatc

SEQ ID NO: 286290 - DNA, 375 bp, Glycine max
agctttttctgaattggagagtgatttgatctgcagcatatgagattcttgagacaacagttagggaagttgtccatccaagttgatgttgtcattgcacgatcaagcttctcaagaattttgttgggggaacctttgctttttgtcgtgcattgcttttttaaatccagttataagataatttgggtgagggttgagaccttacttttcatcacgagagagtatgtcgttgaagtcatccatgatacaccacgggagagtgttgtcacacgaaatggttcttataaaattccaagagttcctccgacgagttctgtaaagatagccggaataactagtatagcgccagctagggcttccaatcacagagatccc

SEQ ID NO: 286291 - DNA, 433 bp, Glycine max
tgctgtgtaacttgagttaattattagaactacaatttatccatataagcagcacaaagcgaccgagagtgctcactgtgttttcccctacatagtacagaaaagagcaagttgataaactcaaagtagccaccacttatacatggaccatacatgtcacagaagacaaagaactggtacttactgtgagcaaagaacatggttgaaaaactaaacctgtcaaataaataacaaatagaagttacaaccatatccagagctaaacgaatcaaaaatgaaaaccctaccgttggttgatatgattactgtatgtatcatcaacatgggtaggctcaatatagagagcctgagaaagggaggagggagaaaaagaccagatttccttaccacaaaattgtgaccatttgttgtttgggagggcccctaatatcat

SEQ ID NO: 286292 - DNA, 370 bp, Glycine max
tttcttcaagccagggtcagattctcgtgcatgcataggcttcttcaagaaaaactccaaactccctttgcaaatctgattttaggcttaaataggtggccttgttcgtgctcatgcgcttagcacacgtatggaccgcttaacgcacgttagggatttttggctcagcgcgcttctctcgcttatcagatgagctgaagcggtgcgctcgatgacttggagcagtgcgctcagcgaacctgacagctcatcttcttctggattcttcccaatttgcctaattaacctaaaattgagagaaattgtttattaaacacacaaaacatacgtattaatgatctattacctatatttaacaaaaggacttatt

SEQ ID NO: 286293 - DNA, 423 bp, Glycine max
  unsure (1)..(423): unsure at all n locations
ntntggagtagagacatgggaccaactcattttattttaaaaaggaagtcgtatctagtcaaggtcttagagaccatacaagtttcctaacgatttctaattatgtgggccattaagtctatcatatgctgacaatagccgagaagcccatgaatctcttcgggggcggagtaggtgtctgccatcgccttggccttggctaacaatcggggaagttcttgactcccgttcaaggtaagagcaaaccgatccatccacatggttgcctcttggtgtaaagaggcgatcacccttcctctagcctctgtgtccgcgtatacttgggcatactcatccgcgattctatgctcgtgggccgtggctagacctaactcttcttggtacttggcgatgatagctaacattgtggtctccgtctcgcat

SEQ ID NO: 286294 - DNA, 369 bp, Glycine max
  unsure (1)..(369): unsure at all n locations
tatctnttgtacagagggggccgaagccagtttgtgatatatcttaattcatgttccacaatcttaaaaatccataattctccagaccatgaccatgatcatatacaagatacatattaacctccaagcacaatttatttcatactctaagtttaaccaggattcatatcctaaatcatttgattatgagacacaagactctattacctatgtcaaccgttattgattttgaaaagctcattagattactataatgctataggataagatttgatgataatataatattcttatttattataatatgttatctgatgtatatgcaaacataactattgtttcgtatcttattcctatctaatccttata

SEQ ID NO: 286295 - DNA, 380 bp, Glycine max
tgcgagcctaaacttgtagcttcaatacacggaattatgtttatggctaggaatccaaaattaggttttaggattagaaaagtatgaaaatatggacttgtttgtaaaaatttgggctgccccatgattggcactttgcacctaagtaacatgggagatgtttttcaagggtgtgcggatatatgtgttaaaatatatggcgtaaaaaatatgttgcaaagtgtgtgaatatatggtacaaaaataccttgcaaagtgaatgaatagaaaataatgcattacacaatatgtatgtttgtggatcagtagcataaagagtctttcaaaaaatgtgtacccgtgccaaatatgggacgagaatgctctccgaatgcatatat

SEQ ID NO: 286296 - DNA, 330 bp, Glycine max
ggcaatcagctcgcccgggatcttagagcgacctgcggcatgctttctttcatataaagcgaagcaattcatggagcttgtatactcacaactataatttctaaattcggaatttgcttgtgaaacctatgttgttgtccttatagtgcgatttgcagaagatccctgtctcattcaagccttataagctatacatgaagacgtatgaatctataactcagcttaatcaccgatctttctatgatttgactctttacaaagaaataacactcttttaatttaatacgttctatggtcctgctagtaaaaatcatcaactgttaacgatcc

SEQ ID NO: 286297 - DNA, 225 bp, Glycine max
cgacgagcattgaaaaagcgaacaccccagaggtgaccaccaaaaacagcggaaaagccaatatcgcgggcaacggagaacacaaaaaaaaaaggggaaagccagaagaaaagagaaagaaagacaaacaaaacaaacaaaagaagaaaaggggagagaggagcaggaagagaaaggaaaaagaggaacggaagagaagacgaaacgagaggaaaaggggaaagg

SEQ ID NO: 286298 - DNA, 357 bp, Glycine max
tagttttcatcaagtggtaatcagaacacaagagcgtctattatgtgctccttaaacctccattaattatttactataccttctcttccattgtcgtttcttcatttttctccatgtatctcctcacacgtcttgagctaaatgttgttaacatgattctttatagtttacaccgattaaactcgctatataagctatattcgatattctatggttcaaatttcttgttcttgctcttgacccatgaattgtgtcgagtttaggatcctttgagattgtcttgctattctttgtggctgaaacctaaaccatataattcctataaaaatatttaagtataataaatcctcaaaaatc

SEQ ID NO: 286299 - DNA, 426 bp, Glycine max
  unsure (1)..(426): unsure at all n locations
gtagttcttaaatttcttgcngaatattgattagaatatataacacaaaaatctaagtgtaaatcactttattcatgtagtcttagagtcatgtatagtcataataattgtcacattatgttctaagtttatgttcaattttgattttgttgattgaattctagatacatttgttcatgtattcttgcaattcttagcctattatttgaattttgagtctaattcatgcatgttgtttagttcataacatgttctaaatcaattcctagaagtagtcttgttgaactttattttttttgttttctaagtttcctatatgatgcccatgaagaaattgagttgtggtgctgacgtgtggctggatttgtgaataaaaataatttcttaagctctcttgaggtatattattcgagacaattgagcata

SEQ ID NO: 286300 - DNA, 377 bp, Glycine max
agcttgctttaagttgatatcaatctgaaaatgtcaggaacaggacacgatatcctaaccataatatatatgattacccattctatcttgctaacttactagtggtaaaccttggtcaccataaaaactaaaaatgcttaaccttaagacatgtgtcttatatagaaggctactataagagtaaaaatacaagtaaaccagtatttttttttttgaaacatacaagcattgttgctctgctcctcaaaagatgctagacatcactttattctgtcaaaaatgcagtgtcataaaattggtactctgtccaacccagagaaatgaatatattgaagcccttatttagagactaagtttatgttgcttgatagatgcta

SEQ ID NO: 286301 - DNA, 432 bp, Glycine max
ctaagcttctcaggaggtgagcttagttttgagaggggtgtgtgtttctaagctctagcttctcaaggaagttttctcaaagaagcttctcaagaaagcttctcaagtaagctacctagtctataaatagaagcatgtgtaacacttattgtaactttgatgaatgagagtcttgtgagacacaactcaaagatcaacttctctccctttttattccttcaatttagtgctcccccctctctttctctccctctttcttttcctccattgaagcatcctctgcaagcttcttatccaaagctcatcttgatggtgaagctccttcttccatggcttattccttaatggatggcgcctcctctcacctcttttcctttgtcttccgctgcatctccatggtggaaaatcaccattaaaggacctcattgaagc

SEQ ID NO: 286302 - DNA, 369 bp, Glycine max
tgcttgtgtctacaccgctttgcactggataactttttctttaattattttttttatatagaagtgtttaactggaattagaatatttgatgtataatgtttggattttctttgtataagtattgagaactctgtttggttatgattatcaggcaagcaaaggatgttgttaaaggtataaagaagcggattggaagtaaaaattcaaaagttcaacttcttgcactaactgtaagcaagagtgttgtaatacaaccttttttctcttaaactctgttgatggcattgatctaaattctttttgtatctaagcatgtttgcttcaattgcaccattttgaccttctaaactttacattcttgactgatt

SEQ ID NO: 286303 - DNA, 424 bp, Glycine max
ttaagctagcttcaaaatgacactaataatatatttaaaaaagataataaaaaaattgaataaatattttaaggatataaaaaataaaatataaaaagctataaaaattagaagttgacgttttaaaagacattactttatgtagattttaaaaaacattagaaactactaaaaaacgttaaaaactacttaaaaatatttgtttatgaacaatcaaataaatttttgggttagtaaagaaaagtagaaactagttatacacataaacaaattaaagaattcaatttgaattgtaagcatagaaatttacataagtgaaggctcacctccaaaagcagtgctatagcatgcaacggcacaagtctgaattatggtattctcctgtctagtgaaaggttctgacacaacattagctttctcaaga

SEQ ID NO: 286304 - DNA, 374 bp, Glycine max
agcttgagtcctttaagcttagaaactatatgagacatttccatgatgtactctctaatttttttcccgttatactttatggaaatcaagtggtgtagcaatgtacttgtttttgccttatcgcttttttcaaagcatttctctagtttatcaaggaaatccttagcattggtgatcccttcggtcattgcaccccttaaggattttggaatgccacactacaatcttggtttttatattttgttgaacaaatggtctcagttatcttaagaagggggggttgaattaagataacaagaattattccccaattaaaatttcactctctctttttggattaacaatgcaccttcaacatgaattactcataagac

SEQ ID NO: 286305 - DNA, 413 bp, Glycine max
tgtagacaataggtaaggaaaactctaccttatggtctattgcttaatctgattggaagggttgtttatgcttcaaagcatgtttgatttttgtgggttggtggaatttggtgttgggtttcctttagagtccttgccccttgtatgcttttgatttgggaattcttgatgaaatcttgtatatgtttaattgatggttgatttatgtttttttggacttgtgttgagtattgggatggttttgaatcatttgtgagtgtttggagaggtagagagtaatgaagatacgtttgggtttgcgagaaccttgaaattgcgagttatacagtttgtagactcattgggtgagacaagcttgtcgtgtattagtgaattttttagagcattactcactaggtgagcctaaccttgtt

SEQ ID NO: 286306 - DNA, 310 bp, Glycine max
agcttatctgttttcccatatcctattgtaggattctggtcaatcttacccccagcttgttgtttttttgtcttttgaacatttgcttggacttgccttatcttagaaggtgtgctgtctatacaagtttggtcattcttttgatatctgcccaccccatcattatcttgggaatagcgatcttatttgtctttcttagaaccctagttgtctttataactctggccaggggctatattatttcttatcttattatgcttgtgggtatcactaccttggttctccttaggacccatgatgcgattagaac

SEQ ID NO: 286307 - DNA, 434 bp, Glycine max
tgattgcttataattctcctgaaattaaattaaaatttcatatttagtccagtaggcccaaatgataaaactgcataattaatttgacaattaaggctaatcagtaattaaaatgctgacaaaaagggttaagatataggataaaatgatgacacatcaaatcccctcacacttagccttttgcactcctgtgcaaaattaaataataaaaaaacaaagcaaggaacaattccagagacattaaagagaaacaaacagacgctaaaacaattacatatttctcaatgaatctcaaggaatgaaaagaatgggtaacatccaacacataaagagttaaagaatcaaggccgtcatgaaaatcattcaagcatttcaaacatggcaagatagtcaatcaactcatcattgaaaagtgataatagcctcacaagata

SEQ ID NO: 286308 - DNA, 370 bp, Glycine max
agcttgctctaaatttacattgatgtttgtatttatgggaggaggttatatgccatttttgctttaagagtaacgtcccactggtaaaactaactttccaaatgtttgccttcgcaggaatggccccgaggaagcttgcctcaaagaggtccaggaaggacaaggcggccgaaggaactagttccgccccggagtacgacagtcaccgctttaggagcgttgtacaccagcagcgcttcgaagccatcaagggatggtcgtttctccgggagcgacgcgtccagcttatggacgacgagtatactgatttccaggaggaaatatggcgccggcggtgggcaccactggttactcccatggccaagttgat

SEQ ID NO: 286309 - DNA, 415 bp, Glycine max
cactgacgaagggcgcacaagacgacgtttgtcactgcatgctatcatgcttatcgtcttacagacagctaaaaacaatgtttatacggataaccactcaggttatttcgcccgtcagcagtgactaacatgtcaatatgacaaaacttgtgagcgcggaagatgacgcaaatctccgcgtgtcacacggcttgtcggccgcgattgacgaaggacgtacaagacgtcgttagtctctgcgtgctatcaggctttacgtcttactgacaccaaaaaagaatgtttatacggataaccactcgggtatttccgcccgttaacgtgactcatatgtcactatgacagatcttgtgagcgcggaaaatgacgtacatctatgcgtgtcaacgggcttgtcggccgcagattgacgaat

SEQ ID NO: 286310 - DNA, 381 bp, Glycine max
  unsure (1)..(381): unsure at all n locations
agcttgcttgtggggcttctatggaagttggatcttttgagcttcaatgaggtcctttaatggtgattttccaccatggagatgcagcggaagacaaaggagaagaggtaagaggcggtgccatccactagggaataagccatggaagaaggagcttcaccaccaagatgagccttggataagaagcttggagaggatgcttcaatggaggaaaagaaagagggagagaaagaaagaggggggcgcacgaaattgaaggaataaaagagggagagaagtggaactttgaagtatgtctcacaagactctcattcatcaaagttacaactagtgttacacatgcttctatttatagactangtagcttccttgagaagcttt

SEQ ID NO: 286311 - DNA, 383 bp, Glycine max
tccttgagaatctagagtgaggctactgacattcctgcattagctaagctcacctcgatgccaaaatacatgaaaatacaatgggaaacttccttgagaagcaaggaaggtagcttccttgggaaaaaaaggaagaaagcttctttgagaagctagaggggggcgactgattgaggccgtacccgaatcaaataaacattaaaaatgcagtatctaagaagtgatcctaggtcgtctcccaatgagcaatggtcaagcaacgtttataatagatagtgataaaacagtaacgaatgggggggggtgtttgttcttgtaattcacacatcatgcatattctagtagaacatttctgaatcctaacatgttgttgccccttgatt

SEQ ID NO: 286312 - DNA, 381 bp, Glycine max
agcttgtatactgaaggaatatacaataaagaaggcatatagagatcttcatgcacttgcctttgttctgattccaagctggtatgccaatgctgaggacataaagcgactctgcaatatttgaagcccatcttccacccatctttacaacaattttagtgctccaattctattcttatgtatgttataaattagacaatgattccaccaacaaactagtttcggtatatataaaagcttaacttctattacaagaatctatttagaatacaatattccatcttttctctcatttggatataaatttaactataagaaatatgttcccggtattagtggtttgcttagcttcactttgcaaccttcatctagttagtaatg

SEQ ID NO: 286313 - DNA, 435 bp, Glycine max
tgcttaattcttttcaaaaaggagttcaagctttatattcactttcacaaacaagtttgaaaacaagtaacttgaaaaacaagacaacttgtatgtttgcaaaccaaattttctctttccaaatatgataccaacttctcttattagaatgagaatgggcagaaccaagggttgtgtttatgcagcaaatagaaacacccttgaataagtttttggcaaacaagtcttgaaaaccaattaagttttagtttctcaaggagaatgatctcaccaaaaagttttcaaaaccttttctttttggaccaaaaacaagctatatgaatatgcactttcaaacataagttaaaaataccatattcaaatacaagctaataaaaaaaatataacaatgagagaagcatcacatttatcaaaaaatgaactatattctgagca

SEQ ID NO: 286314 - DNA, 382 bp, Glycine max
agcttctatatagtgagatgttgtggaagggaggtgcttgatactattatacatgagatattagatgtcaatatatatataaaaaatcaatctccttaatttataatgttttttgtaaaatctcaatttaaataaacaataacggttggattaaaattaatagttaggataaattttaacaaaagtcactgtattaattgtacagttttactttccatattttttaggttacattaaagcatccgggagttacaagctctactcatatataaaattgaattgatcttgcaaaggagaaatagtggtatccgtaactgtgataataattacaatttaaattttaattcaattaagcacaaaaatagttacaggatggtcgtag

SEQ ID NO: 286315 - DNA, 411 bp, Glycine max
cttgatgtgcagaagaaattccgagacggattggttattatagttgtagatcgcaactttgtgcaaagttgatgagcttttgctctaattaacttctgaaaatgatcgtgaattttctcccacacttgaaacacatgaatggaccctagtacacacgataaaattgagctacaaagagatgattgaagccacgtgaggagcatttaatcttgtatctcccatgcaatgtacgcaggattcatggtgcttgaatcctgatcagcttcatttgcatatctgagaggaatgtttggatacactagatatctgtgtaattgatgcgctttgatcactggtacgtgttgcctccacagcaagaagtttgaatcagagagcttcttagtgattgagtgcacgaaagcaaaagatgaa

SEQ ID NO: 286316 - DNA, 371 bp, Glycine max
  unsure (1)..(371): unsure at all n locations
ttgcttattaaatataaaaaattaatttaatggttataaaaaatacttctagataaatctttattccaacctaacaaaataacttacaaaaaatgtgtgatactacataaatttcgaaaatcacctaacaaaataacttacataaaatatgtgatcttccaaaaccatctaacaaaataacttacaaaaaaaattgatatcccagaaattatcaaacccacgaaagcaaaaacgaaagctactgcaacagccaaaacaactgataaaaaatggtgaatgagggctgtatttaaagaccctaaaacgccaacaccatttgcgcttcctccctgctcctggtctgccaaagctgttgtgctngctgcaaacct

SEQ ID NO: 286317 - DNA, 418 bp, Glycine max
tggcggtcatctccaaagtttgagtggtcatgttattataggttcatggtgaggtggtatacagcctcttcaaggcggtttagggtggctatagtgagtgggtatggtggaaggtaagggttctggtaggtagaggcagccatgggcggcaggtcgaaccaattgttatgagcagaggggagggagaaaactacacttcttggtttcgaggaccaaggcctcctttgaaagcaaagtatcgaaaattcttctctgccttattcattctttcacattgcttttatacacaattgtacatgtacaactgaatgataattgttacaactgaatggtaactatattaacagaataataactgctctaagtatgtgatactattcttatgatagacttccatggcagagctttgtcataacta

SEQ ID NO: 286318 - DNA, 373 bp, Glycine max
ttcttctagttttagcacaaaaaaaaaaaggaaataaaaataggaatttgttgatgaagtgggcaaaggaaactcatttatttgttgcagagagagaaagaaaaggtttttgcaacccttttaatcatatttgattcatttttgacatttaagcttctggtgtttttcttctgataaacatcaacttgtaaggccaagttaaatgatttaaataataaaatcgatgataatatgtatagagacactgaatggataaactgctatacattagaattactatgcagtgtttctgtgacaaattgctagaagcatatcatttattaattgagtaaccaagcatatgtactataatatatattaaacttgtgttttt

SEQ ID NO: 286319 - DNA, 433 bp, Glycine max
cagcttgccaccataggaagccatggataagagcttgatggtatgagaagatgaattgagggagaggggaagaaggagcacgaaattttgtgcctcaaaagaggtttgaactttgaattttaattttcaaatgattaaagttcaaaaaaaggtacacacatgacctctatttatagcctaagtgtcacacaaaattcgagggatatttgaattttacttggatttgaaattaaatttgttgagccaaattttggaaccaaaatttcactaattatgattagtgaattttagttatggttcagtccactaatccaagatcaagtccaagattttccactaagtgtgcttaggtgtcatgaggcatgtaaagcatgaaggacatgcacatagtgtgactatatgatgtggcaatggggtgtagcaagcaaatgtt

SEQ ID NO: 286320 - DNA, 376 bp, Glycine max
ttcttctcaaggaagttttctcaagaaagcttctcaaggaagctacctagtctataaatagaagcatgtgtaacacttgttgtaactttgatgaatgaaagttttatgagatacacttcaaagttccacttctttccctcttttattccttcaatttcgtgctccccccttctctctttcttttcctccattaaagcatcctcttcaagcttcttatccaaggcaattcttggtggtgaagctccttcttccttggcttattccctagtggatggtgcctcccctatcctcttctcctttgccttccgctgcatctccatgatgaaaaatcaccattgaaggacctcattgaagatcatagatccatcctccatag

SEQ ID NO: 286321 - DNA, 426 bp, Glycine max
tcagctatagtatgcccgagtcattcatccctatgagatgttgttgaagtattggcgatcagaatagccattccttggattataaggttgaaccaagctcatgcttttacaaaaaggttcatcaagtcaagttgaaatatggaagtaaccgtcttgcaaaattggggcaaaagattaatcgagtcacatcactgcttcatctactgccaaacatatttaggattattgatgtccttgttacttccaatttcaccttgacaaagatgtcatggaccatgttgaaaatctaaattgattcaaccccatatcttgcgtaaaaattcgcaatacttcaattgtacatcattcgcatgcatccatgcatttcattggttgcattgctcgttgcattctttccttgaaaaataaaattaaaatgaacttaat

SEQ ID NO: 286322 - DNA, 381 bp, Glycine max
agctttgatggtgttgagaagaaatcacatgtttgtcatcatcaaaaagggggagaatgtgaatgtatgtatacatgattttgatgatgtcaaaagaagaatcaaacaaggctcattttgcttaaagattaatacaagattgtttcaacaaacaaagccttgattcaagatttcttcaagatcaagccttgcctcacaatgaaaggtttcaagtcattcaaggcacatgtaatcgaataccaatacatgtaatcgattaccaatggtttgaaagtgtgtaatcgattaccagagactctaaacgttgggaattcaaattttaaatgaagggtcacaactgttcaagaaaaacaattgtgtaatcgattacactaattatgg

SEQ ID NO: 286323 - DNA, 426 bp, Glycine max
  unsure (1)..(426): unsure at all n locations
tgtcgtgccatcaccatttctgcctaaacccattccgggttatactcatcccttaacataactcaggccacttttaaggaggcaccacatcaacgtggctgcaccagaagagcctccatataagaatttttcacaatttctagtgcttgaaaagatgtttccaatgactcttccgcagcttccacatagggtataaaagatggacatctcactagtatatcttcttcgctcaatacgataatcagctgaccctccaccacaaacttcaatttctggtgcaacattgatgggaccacaccaacagaatggatccaaggccgacctaacaagaaactgtaagcggtgtttatgtccatcactnggaaagttatttggcacatgtatggcccaatttgaatcgggagatcaatctctcctctcacgtca

SEQ ID NO: 286324 - DNA, 379 bp, Glycine max
agcttgtgagttgtcaccccactttttccctattcgatgaagtcttcattcttgtgggtttttctttaacattatttcattgtgtcatttgtttgtttaataaggatacacatagacaaaaccaaaattaattatcacaatccatccttagatcatgattgacgcataaactatgattcacttagcttgactagcttgttagaccctcattatcaacatatatgaatactttatctaagaatcaaacagttcatacataataatcttcataattttttaaaacattgtagttatataattagcattagcacatttacatggtaaaatcaccaacaactaaaaatacatagatcgtctctatctttatctttattcatat

SEQ ID NO: 286325 - DNA, 414 bp, Glycine max
tctagatctatttcattccagtgtgaattcaccgatggtcttacatgcctatcaatttttatttggttagtcttcgaaccacatcatactttgagagaggtatgctctgatacccacaaacctactcacacataatgtctggttgcttttaggattgttggttgttcccataaattaatataagactttttggtatgttttgtccacacttactaaaaaaacttctcagaaggtcacccatcccataattactttaagctaaccatgtttgactatagagttcttaagtgatggattaccgaaaaatatattcatctcgttagtataggtaatactaattaatttctaagttatcctcaattgtgcagtttcatacttacaccatctttagatctctcttattctgaggtgcat

SEQ ID NO: 286326 - DNA, 200 bp, Glycine max
aagtgcgcccaggaaactcatttatcttgttgccagagagaaagataaggcttttgccgcccttttcatcatatatgattcatttttgacatttaagcttctggagattttcttctgagaaccttcaacttgtaaggctcagtgaaatgatttaaataatagaatccctgatattatgtttatagacactgaatggataa

SEQ ID NO: 286327 - DNA, 338 bp, Glycine max
  unsure (1)..(338): unsure at all n locations
naatgaacaaggaanaacacttgacttgtttatatgttaaatcctatncttgagaaagctccttgagggtggaggatatcatgcactaattgaaaattttctccagaataggatgattgatggctgtaagttttatgagagaaagacattacaatgactctattgttacaagggatgctcatcaaaaggggaaagaataggaaatgatctctgcatcccaaagtatgtttctaacacccgatttcgcacctacactcttcttttttaacagaacatattacatcacccatgtttgaaatatatttgcttaacaaatacgtcatagagacataaattat

SEQ ID NO: 286328 - DNA, 375 bp, Glycine max
tagctttatgcatatggaatcaaaatataacaaatgacatgtatctcatgtcaaaaaattttttacacttcttcttaagaatttcctattgacaatttaaggtaatattatccattacgaaattctccattgagtcagttcaatggtcacattcatatgcacataatttatatatgtaaattaataaatgagatctattaatgttcattcaatgaatactatcacatatgtcaatctatccaaattattaatgtcatattcataataatcttaggatcaagaacaattaaaattaaaattatgagagacttttttctcattttcataatctctattatgataacaaatctttaattttaatcaaggaccttatca

SEQ ID NO: 286329 - DNA, 414 bp, Glycine max
  unsure (1)..(414): unsure at all n locations
aatgaggctaaagattctgggctcatgacaatanaatccggtggagaacaatccatctgggccttatttgtcacaagatagtgacatggagtggatggtaaatatttgtcacaacaaaggagctttatctcaacctaatttgttgcagcactctatatttatatattacaattattcatgtttggcatttgcatgtaggtccctgcaactattgttccaccaatagcaaggaataagctaaccataacaagagccaaacaaaggaaggttgctgataaagatgatgcagtataaagaaaattgaagaccaattttttgttgcattatgaaagttgctgagttagaaggttgctgatgaagacaaccgaagaagcatttttttgttgcattatgatattaagatatgcagttgta

SEQ ID NO: 286330 - DNA, 333 bp, Glycine max
agcttgatgattattcagtggagatacgactgggctatggagatggatctttgaccgacacaaacatgatgaccatggtcatgcaggcaagctctaaaaccacctcaataacaactagagccaactagaaccaattctaaggaacaactatctataaagacaagtcttgactatcgattaacgttaatatgtacgagatgatatcttaggatctaaagctacacaactctcatctcgattgaggaacccagacttattgatgatgctatggctgatgagaaataagcatgatccgtgcttgacgaactatgacaactcatgaagaatgatgta

SEQ ID NO: 286331 - DNA, 429 bp, Glycine max
tcatgatatgccttatggcgttcaatattctgcgcgttatttatgaccatatatgtgtaatatacatcgcagtgcaaataatcaatgaatatttgagtagctgatgcatatcataatggtcactgcccatctaataccttctctgcttattaattaccataaagtatacctcttgcataagaactcctgaactcagaccatatgtgataaccttgtgctactttgatactgaatcatcatcgtatgatgtataccctacataagactctatagactgtcttgaacattcatcttgactatctttaccacctcagccttgaatgaagctatgactaacatgtgatcctttagcatcatcatatcattccgcttgatccttagactactgccccaatccctcaatcctagcgactatacacatacctattg

SEQ ID NO: 286332 - DNA, 375 bp, Glycine max
agcttcaccttttggtcctcctcatagttgttgcatgagaaaacatgctctattttcatctcccactccatgtaggcctccggatcattctttcctttaaagggaggaatgttgagtttaataccatcaattcgattttgtctaggaacaccatcattccctcttctcctcctttcttcttcattatgatctctattcttcatttgatccaacctctcatagagcgcatcatcttgttgtttcattaacctctccaaatattgcatcaaagcttgcatttggaattgcgaaagccccactccatcattaggattagtacctgacatctcaaacaaacaaatcaaacgtaacaagacaattatagttgttgtctga

SEQ ID NO: 286333 - DNA, 433 bp, Glycine max
tcctcggggccatttcctgcgaaggcaaaaatttggaaagttagttttaccagtgggacactactcttaaaacaaaaatggcatacaacctcctcccataaatacaaacatcaatgtaaatttagagcaagcttatgcgcatatttccttacgaacgttcacttgcacaagacatcctatcaactaagaaaaatgcacccatatacaatcaaggtagcttcattacctagattatttacatgtacttcctaggtgtatttgttatttacatcacacacgcctccttggctgaatttacatacatacatactcaaagcattttggggtaccaaaaattgcacatgcgcccatcttggtatttctaatacccatacatatacaaacttcacgatgaatcttgactacctacacaataaggtgctacatttcatgc

SEQ ID NO: 286334 - DNA, 379 bp, Glycine max
agcttgctcataaccgtttgacatcttctttcatacctttccaaaataaattggaagtcaacctccgatatgtcctataaaaacccgaatgaccagcctgaggagtagaatgaaattcctctagtaacttctgaatccaaggagatttctcatgcaccaccaacctccctttataaagcagcactccctgattataggagaaaccggtatgggcctctttatcctgtcgcaaatcacaaataacctttttccagtgggtatcttgctgcacctcatgagtcaactgctgccaatctaaccactcaagataagagatcatattagtcaattcggcgtcctccaaactccttgacagggcatcagctcctttattctcgtt

SEQ ID NO: 286335 - DNA, 433 bp, Glycine max
  unsure (1)..(433): unsure at all n locations
tgccattnttaaaatatcacaattgcaaattgatgataccttgttgataatagccttagaagttgattatcacaagtcaaattgaaaagttgcaccattacaatgccatactatttaaccacaaaagaggatttaatagaaagtcacactaactgtaacttacaccacgcctacttaagacactaagtataaacattgcatgaaatatacatgcattcagtgtaaaactaaaacctcgtggttgaatgatcttgctacattaaaacatcagttgatttttttatcatacaatagtgatgttttaattcaatgggcaacaataaactcttacactatcaatacaatattgcacatagtaattaacaaacacatgtagtcttaaactaaaaccaagtaaataaaccatatctaaagaactcatgttgcaagctaa

SEQ ID NO: 286336 - DNA, 380 bp, Glycine max
agcttttcttttagcaaagcaaaggcttgctcttgtttttcaccccaggtaaatgccacattcttcttcactagctcattgagaggtgatgcaattgtagagaaattaggaacgaaccttctatagaagcttgccaacccatggaagctcctaatatctctcacactttttagggtgggccattcttggatggccttgattttctcagggtccacttggaccccatttctaccaactacaaaccctaagaaaaatatattatctacacaaaaagtacacttctctatatttgcatatagggtatttttcctaaggactgaaagaacttgcctgagatgtcctaagtgatcatctaggctcctactatacactaaaatatc

SEQ ID NO: 286337 - DNA, 432 bp, Glycine max
gtgagaatttcccaaactctcttttcatttctgatttaaggcttaaataggtggccttgttggtgcctgcccgcttagcgcaaatatgggccgcttagcgtacataagtgaatttcggcttagcgctcgtattctcgcttagcagatgcatgcaagcagtgtgtttagcgggatgagccctcacttagcacgtgtgtccagctcatccttcttccatattcttcctcgcgctcagccgcaagaggggtgtgctcagcggatggctcgctaagccgacagattggcttagcgagaagctaaaaattagcacttcacaaacttgcctaattatcctgaaattgaaaggaaatgattattaaatacacaaaataggagtattaagtacttattacctatatttaacaaagagtaattacaacactacaaaatgac

SEQ ID NO: 286338 - DNA, 383 bp, Glycine max
agcttatgctgcaaatatttacaatagacctcctcaacctcagcagcaaaatcaaccacagcagaacaattatgacctttccagcaacagatacaaccctggatggaggaatcaccctaacctcagatggtctagccctcagcaacaacagcagcctgctccttccttccaaaatgctgctggcccaagcagaccatacattcctccaccaatccaacaacagcaacaaccccagaaacagccaacagttgaggcccctccacaaccttccctcgaagaacttgtgaggcaaatgactatgcagaacatgcagtttcagcaagagaccagagcctccattcagagcttaaccaatcagatgggacaattggctacccaattga

SEQ ID NO: 286339 - DNA, 428 bp, Glycine max
ttgacttgagtcatcaagagattatagagatgtgaccgtggcatgagtttcaatgaatgatctctcatgtatcatctatctttcaatctatctttcaatatctgctttcatctctttcaacagatctttctaaattatttctcttcatgtttctaagagtgtttgtcaacactttctcttccaagaaaagtttttggttcaaaaacttgtgctattcatctttttcattcacttatccctttgccaaaagaaccaaggactaatcgcctgaattcttttgtgtctctcttctcccttacaaaagattcaaaggactaaccgcctaagaattctttggattcttccctttcccttaagacaaagatgaccaatgactaaccgcctgagatatcttttggttccccttacaaagattcaaaggactaact

SEQ ID NO: 286340 - DNA, 375 bp, Glycine max
tgtttaagttctctaaatacatgttcattggacatagaagacaggggacttttgtatacttttgcagacaaatggcataaggaaactagtagcttccatatgctcataagagagatcagcataaccctcaatgatgtggcatcagtattacatctacccattataggtgttttccatacctatgatgcaatagatgtagaccagattgtggagttgctagttgagttgcttggagtgactacacaaaaagaagtagatgagatacaacaatgtaaaggggcatgtgttcgccttgcctggctacaagacatttaccgtacgatatgtctcacaaggcaatggacactaccaactaaagcatatttgttgcatatt

SEQ ID NO: 286341 - DNA, 429 bp, Glycine max
  unsure (1)..(429): unsure at all n locations
ntgaatgctctattcaatggagtggacaagaatatcttcagactgatcaacacatgtacagtggccaaggatgcttgggagatcctaaaaatcactcatgaaggaacctccaaagtgaagatgtccagattgcaactattggccacaaaattcgaaaatctgaagatgaaggaggaagaatgcattcatgacttccacatgaacattcttgaaattgccaatgcttgcactgccttgggagagaagatgacagatgaaaagctggtgagaaagatcctcagatccttgcctaagagatttgacatgaaagtcactgcaatagaggaggcccaagacatttgcaacatgagagtggatgaactcattggttcccttcaaacctttgagctatgactctcggatagggctganaagaagagcatgaatctg

SEQ ID NO: 286342 - DNA, 376 bp, Glycine max
ttgtctttcaagtttttaagttcttcctcagaactgtcctaagcaaagttcccaaagtcctattaacaacttccgtttgcccatctgtttgtgggtgacaagtggttgaaaataacaatttagtgcccaacttgctccacaaagtcctccaaaaatggcttatgaacttatagtccctatcactaacaatgctccttggcaaaacatggagtctcacaatctccttgaaaaacaaatcagccacatgggaagcatcattaacttttttacatggaataaaatgagccattttatgaaacctatcaacaaccacaaaaatggaatctctaccattgcttgtttttggcagccccataacaaaatccatggattaatc

SEQ ID NO: 286343 - DNA, 428 bp, Glycine max
tgcattaatagcaacaaatacagagtaattggtgattatgaaaaactgatcagaattcaatagtaataacaaaacctcaaagagagttatgcttgatcctcaagagaaaacaacgttggagacttagccttccattaatcagttgaaaacaaaattgtagattgaagtagaaatgaaattgcagaaattgaaattttattctacgtgaacagtgtgcatgaacaataaaaactggaattctaaaattctagaattattctcctcttcgacaaactctctctaaaactaaaaccttggtgctgttatataggtcctcagccccaaagcttacaaatctgttttaagtccaagcccataaataaaataaaatctggacaagataagataagattggatgaaataaaatctagatgaaataaaatctggat

SEQ ID NO: 286344 - DNA, 371 bp, Glycine max
agctttatcctttgacattagcttattgtgcgttctgaaacacacaacaacctttattgtgaaattgtaaaactctcatccccttgattttgtaaaacacgccaagtccttctatagttgcattattgtttgagaaatctatgaaacacattattttttgcatatttttttattggtcaaaatttattaaaaataatgaaattgattaaatgtgatagttataattcaaaatataagatagttatttaatttttgttggtcattatttaatctcatttttagttgagataaattagacaaacacttttagaatagataaccaggtgaatttaataatccaaggctgactaaaacggccttccagtctcacg

SEQ ID NO: 286345 - DNA, 423 bp, Glycine max
tgtccttggtttatacatgatttatacatgatttatgacttgtaggattcaatttgggcaaaattggatgagggcaagtgtggtttcgaaaatctgcactttatgcagaattttgctgtcaaatatgtgcagcagaattttgtatatgtgcagaaaaatgcttgtgtatggctggtggtggaaagggtagtacatatggggttctggatatttgctagcagatcccaacggtcaaaatgtagacttatgtaatagagacttccagtaaaattttcgagtcgatccaacggttaacgaattgtaacgaagagaatgttatcggggtattagagtgtgaaaagctgtgatattgatttgtgttttgagcaaagtcttctgcctctgctctgtaatcttggctgtgctagtgcatgatgcttgtat

SEQ ID NO: 286346 - DNA, 379 bp, Glycine max
tttcttctttatgaagcctcttaatgaagcttctagagaaagctacatggagctgcctcggttaaaacgatgtccagcgttttgtagccgttggatcttcgcaaaatttggtttgcaactccacaagacacttttccattatctgaccgttgggatctttgagaagatgtctggagtgtgctataagtatcttaaagaagcttctggaggaagcctcttaatgaaagcttctagagaaaactacatgaagctgcctcggtagaaacgcttcccagccttcgttaaccgttggctcttctcgaaatttggtttgcaacttcacaagacactttaccatgatttagccgttgggatctttgagaaaatatctggagtgtgc

SEQ ID NO: 286347 - DNA, 415 bp, Glycine max
tcctcggagccatttcctacgagaacaaacatttagttgttagttttacaagataatgcttgtcttaacgcaaaaaaatgtcatgctaatccctccggtttagaacgaactcatgcgcacgtttaaagtaacacatttatgcacatgtgtatgtgtagaatatcctactattcatatcaacatagaggccatccaacacattctaattgtcatacatatatatgcatttgaaaagaacacacattctcacgattaaggcattgcgtcaaaatttacacttaactatgtcctagacatttgctatcacaaactaccaacacacactcgaaatatatataccatacaaactttcattgtttcactcacacttatgcatattggcaagatatttacattatgcacatacttgcattca

SEQ ID NO: 286348 - DNA, 378 bp, Glycine max
tagctttggacaaacaaaacatgcaaactagaaaatgaaatcaaaaactaaaaactgaaacataaatataaacctaaattataaaatgtactaaaagtagaataataataaaagtgttcaaaagaaaggaaaatagaagtcctgtcatgggtcctgtggtgcagaaggggcaaaatccatggctgtgacatcatcctcatcctcaaagagctccagcacaggcgtgcctactagtgatgcctatggggaagacaactccagcacaggtgtggtcactggtgatggctgtggagttgtctctggagtagcctctgcagcgtcctcctgagtagttgggtcaggctctgggatctctacgtcaacctctggatcaacatt

SEQ ID NO: 286349 - DNA, 417 bp, Glycine max
gtgagcaaattcaaacgacaataacttttaactcggatgtccgaataagtcccgtaatatatcgagacgctcgtaattgaaaactgaagctctgagcaaattcaaacgacattaacatttgactcggatgtccgattgcgtcccgtaggatatcgagacgctccaaattcaaaacggaagctttgagaaaaatctaacgataataacttttaactcggatgtctgatcgagccctgtaatatatcaagatgctcgaaattgaaaacggaggctctaagaaaagtcaaacgacaataacttttgacttggatgtccgattgtgtcccgtaggatatcgagatgctcgtaattgaaaacggaagctcggagaataatcaaacgacaataactcgaaattctgataccaggggacagatg

SEQ ID NO: 286350 - DNA, 398 bp, Glycine max
atagctctagaggcgagctgccggctttctctcttgaaattgaacaacaaaagctgtcgagatattcaaaatggtcataacttttaactcggaggtccgattcaggcgcatcacatatatatacgctcgagattgaacaacataatctctcgacatatacatatagtggtaacttttaactcggaggtcctatttatgcacatcatatgtcgagacactcgaaatcgaacaatggaatctcttgagctattcaaatggtcttaacttttgactcagaggtccgatgcaagcgtgtaatatatcgagacgctcggaattgcgcaaccgaagctactgtgaattgaaaatggccgttacttttcacttggaggtccgatatacgcgcatacatatttaga

SEQ ID NO: 286351 - DNA, 422 bp, Glycine max
tctagtcgtccatagacctcctctgtggtactgtctatcaaacgtcgcatctgtgcattcatcgcatccactaacagacgttgagcgccgtccaactgatggtactcgtcaccaccaccacctgctccagccataattcaacaggaaaaaaaatgtgcaataaaaattattaaggtttcaggacctcacaacactctactcacgtctcttagatggtagtacactcgtgtttaatgctctcaataggcttttgtgtaatgtattccctcttgccttttaccactcgtgtttcctcttaagttcctggatggaccaaattagacacacaaggtaatataaaataaaaggaaagacaatataatgatcacaaacagatttgatttgggataacaacttggacttgatttggatagtaatatatt

SEQ ID NO: 286352 - DNA, 377 bp, Glycine max
  unsure (1)..(377): unsure at all n locations
agtttgttatgcaaaatggttgactatcttacctttccagacctttggtcaggaacttgaaactaaagatgaccaggagcaggttcattaacagtgatagttatgaaaagctggaatgcacaagcattaactaacattagtgaaatggtcataggaatataaaactcatttgtagacaaaaagacattaaagaagaaaacatgaggaaacacccttcaacctcagcctacacataaccatgtccatgacagtcccattttcaatctttaaccatgtccatgagaaaactgcatagttttcaacaatgtacacttcatctaaaatattcattggactatcttcagagagtatgtttcttanatgaaaaagtcatgata

SEQ ID NO: 286353 - DNA, 428 bp, Glycine max
tcaacgactttaacacgtacctgctagttgtatttttctgtagtgtttgaatacaggttttaatacatggtttacacatatacatgtatatataaaaagtagtaacaatgtgctttacctgtacttgatataatgaaacaactaccacaagaacaccaatggacaaaccaacttcaactacaacaaagtaattcagcttcacctggagttcatataatgattaatggcattagaagaagtcaaagccaaaccaacttcaagtacaacaaactaattcaactttttatcaaccaaactatgtcaaactactttttggctattaaaagtgttagttattcatgtgacaggtatactattctagtttctattcatcattaagattcacacagcacatatagtgttctcatagcaataccacacacagacag

SEQ ID NO: 286354 - DNA, 378 bp, Glycine max
agtcacacaagttacccaggactacgtaggtctgaattcctcatttgaggatacataggagcaagagcctcgcttttgtcggccgccccacaatttctgtcatactgacactggagtcacgtgacatgcggagatacccaagtggttgtccgcactttcataaacattcttttgctatctgtaggacagaaagcctgatagcatgcagagactaacatcgtcttctgcacccttcgtcaatcgcggcccaacaagcccgttgacatgcggagatttacgtcatcttccgcgctcacaagatctgtcatactgacatttgagtcacgctgacggacggaaatacccgagtggttatccgtctaaacattcttttgctat

SEQ ID NO: 286355 - DNA, 432 bp, Glycine max
tgtcactggagctgacccatcaattgccctaactctttcagactggtgattcctaggctcttaaccttgacttgatagaacctctttttaagagaaggtgcctgactcgatcccatgttttactaaagtgaaacaaaacccagtgcgaatcaaaactccgacatctatcatgggtgggatggatgaatgcattaagaaatgcatatgacacagatgcaatttatgaatacgggagcccgggaaattgtcgccttcttagatacaacatttgggcagcatggcgctcgacatatgtatttaagaaggcgacacggaccctccgtcggtttgacaaagtgaggggttcaagacagaatccgtgcatgatgcatatgcgaaaggcacaacacgaggatgtacatagtacgacaatatccacaaaaaaatataagc

SEQ ID NO: 286356 - DNA, 378 bp, Glycine max
agcttgcctatccgatgcagccgtaatgatggcccgagttatgttggggaacggttacgaacccgggatgggtttaggcaaagacaacggcggcataactagcctgataaacgccaaaggaaatcgtgggatgtatgggttaggctataagcccactcaggcagatataaagagaagcatcgcgggaaggaagagcggtagtcaaaactcgcggttgagacaagaaggtgaaggaagcccaccctgccacataagtaggagctttataagcgcgggtctgggggacgaaggtcaagtggtcgcgatatacgaagatggtgttctgagtacattggatttggtatgaccatgccctcctgatttccagctgggaaattg

SEQ ID NO: 286357 - DNA, 430 bp, Glycine max
  unsure (1)..(430): unsure at all n locations
nttcgcanagcttacggtaaaatctgggacctagccatggtagaaatctccacagaggccattgcctccctcgcccagtattatgatcagccgttgaggtgcttcacttttggggacttccaactatcacccatggtggaagagtttgaagaaattctgggatgcccactgggaggaaggaagccatatctttcctctgggttctatccctccatgacaagagttgccaaggtagtgaaaatctcagcacaagagtttgaccgtgtaaagcaaaacaggaatggggtagtcggagtaccaaggaagtgtttggaggaaagggcaaagaccttgacaaatcaaggcgaatgggcttcttttattgacatcttggcgcttttgatctttggagttgccctctttccaaatacggaagggttagtggacctag

SEQ ID NO: 286358 - DNA, 382 bp, Glycine max
agcttgacgtttatctcaaaattgcaaagacatgaccttgtgagaggtttaccaaggatgtcatacaaagatgaaacaaattaaaacctctttttcaagcaaaaactttgtttcctcaagaccacttgaactattacatattgatctgtttggctacaatgaatgactacattagatggacatgggtaatgttccttgctcataagaatgagtcctttgaggtattctttaaattttataaaagagcttaaaatgaaaaaaaagtatgcgttacttcaattagaagtgatcatggtggagagtttgaaaatgagaactttcgtctattctatgaagaaaatggaacttttcataatttcttcatgtcataccctaatttcat

SEQ ID NO: 286359 - DNA, 420 bp, Glycine max
tgtagaatggctagacatgatacatgtcagggtttgttttggttcaaggataaaagggatgccccacattatttccatgacacaaatgcaaaaatgatgatttggaaattttatgcaaaactggtcatgcatgcacctatgtggacgctcaagtgtcaaatttttatggtcatgtgatgctagggctcaggattcatttcctctattttaaatcaacccaatgtttccaaaatatgttcttttatcaatttgtgcattcatccgagtccatttcgggcgtctaggaaaattttcacagcattcacccttcaggtgtacacacacattttccaaaaattagtgaattttttcaaagaaaagttggaaatcatctcttttcataagcatgtcggtttttcagctagacaacttatttttctt

SEQ ID NO: 286360 - DNA, 384 bp, Glycine max
agcttctcagctcgtgccgggaactcatcgaatttagcacccatacagcctagagcgcccgcctccatccaaagggaggccccccaagctctggctccaaccacgactcgcccggctggcaatgcccactttggcaccgtttccaacgcgatgaggaactttcccccgaggccaattccagaattcaccccgatcccaatgacgtacgaagacctcttgtcgtctctcatcgccaaccagatggtcgtgatatctcccgggaagatctaccaacctcctttcccaaagtggtatgaccctaacgcaacttgcgcgtaccatgggaaaaccccgggccactccatcgaaaaatgcctggcccttaaatacaaggtccaacatttg

SEQ ID NO: 286361 - DNA, 436 bp, Glycine max
ctcagctctgatttataggtccgcttcaatcaagtatccattgtttctaaacagacatattgcctttcttaagcttgtgtctgaaaaatgtggttgttggggcattaaatgcgtgcattcaatgcacatacttcttcatgctagaaaaccactctttgtcactcgtgtcttgaacactacaataggaaaccacttccttttgtgttagaacatgtttgggcaatagaactcttcttttgatggaaattgaaaaattttagaacttgacttcatttattcttcatatgattcgataaatcataggagaatgtctttgcaaaatagatcttaaacacagagtattaaatgaagtctaatgaaaactctaatattgtatcagatcatgattccatcttgctactatctggaacatcagatgcaaacttcgcggaacatg

SEQ ID NO: 286362 - DNA, 377 bp, Glycine max
agctttcataagtgaaatcaagtgcaaccatttcccttagagtcctctcacgaggtggaggttgagccatattttcagaatgttcaaaatcagaatgctcaaagtcagaatgctcaaaatcaccaaccacagaatgctcagactcaccaataacaaaatgctcaggatgctcaaaaggtacaaaatgttcagggtaatcaagatgcacactatgcctaactaatctatgaaatgtcctatccatttcaggatcaaagggttgtaaatcagatggattgcctctagtcatacactacattcaacatgcacaattagttgccttctcatgcaagtaacagtgtaggtttgaactacaactatcatcaaatgatatccaa

SEQ ID NO: 286363 - DNA, 420 bp, Glycine max
tgcttgtggagcttctatggaggctggatctttgagcttcaatgaggtcctttaatggtgattttccaccatggagatgcagcggaagacaaaggagaagaggtaagaggcggcgccatccactagagaataagccttggaagaaggagcttcaccaccaagatgagccttggataagaagcttggagaggatgcttcaatggaggaaaagaaagagggagagaaagagaaacgggggagcacgaaattgaaggaagaaaaagggagagaagttaaactttgagttgtgtctcacaagactctcattcatcaaagttacaacaagtgttacacatgtttctatttatagactaggtagcttccttgagaagttttcttgagaaaacttccttgagaagcttctttgagaaaacttccttg

SEQ ID NO: 286364 - DNA, 375 bp, Glycine max
tttcttctcccccaattttctataaatagggggagaagtgaagtgaaaaagggttcagccccttaggcacttctctctctttcgaatttgcttggaaaaattgtttccgtgaagaaaatctaagccgaggcgcttccgaaatgtttccgtaacgtttccataaggaatttggcgaaggtttcgaccgttcttcgacgttcttcattcgttcttcatcgttcttcgatcttcaacgggtaagtacctcgaaccaagcttttcaattcattctatgtacccgtggtggtcaacattgtgtttcgtgtatttttattctcgtttcatttactttttatacccccttttgacgtgcttaagccattttatttaagtcat

SEQ ID NO: 286365 - DNA, 425 bp, Glycine max
  unsure (1)..(425): unsure at all n locations
nttgcaagctgactagttctaggctcttgactttgacatgatagaaccgttttttaaaagagagcgcttggttcgacccctatgtttgctagaatgaaaattgtgatgatgaatacaacagggaatatttatgctatgcatgacaaaacacgcttacctacggacgcaagagtccggaagaccagcccttcttatccacaatgcattaggcatcatggttcatccgcagacattaccatggtgcccaaatgcatgcaattaagaaggtgatgcggaccttctagctccccgtgacaatgatgatgagacaaatgcgaagcgtgagtgatgacactgtgggagtatgcatgcacgagagcatgtggtttgtagcacanagagaaacatactagacgaacgagcatgacaacataataaaataatgc

SEQ ID NO: 286366 - DNA, 376 bp, Glycine max
agctttatgtgtgtattagagtgctctcaaactcggtgtgtcttttctccttggcttgactccctttttatagctgctggagtggactcgggcttgactccctttctatagttgctggagtggacttgggcctgatgccaaaaaatcttccttatttatatttttgatcatttctggattatttttttttgcttttaatccctcattttcatatctgtaagtcataaataagaaaaatatcaattcctaacatttaagtcaaaaataactgctaaataaatatttttaaagatattttcaatatatttttatcataaaaaatagctcatatttaacagttataattttttttgtcgatgttggtttggactatttt

SEQ ID NO: 286367 - DNA, 429 bp, Glycine max
tatatattaactattgataatttcttttgaaaatattattcaattcgattttgaaatgaaaataaaaaatataaactattcaatgatatatatatcaaattcaatgatgtggaaaaaaaatgaaagaaaagttattttatatgtacaaaaaggtaacataagaacacgggtctacattaagcatcatggcctatagtgtcgtgtccctacattaaattgaatagagttgtcaattccgtttagactgacccatttgagctaatccatcacggatcaacacatttttgtgcgaatcacgttatgtcaagccaattaagtgacaagctaaaattttgctaatccagtacagttattaacaaactgtaagccaaattaatgaactggctcatgaaccatccatttaatttttaaaaatgtataaactattaa

SEQ ID NO: 286368 - DNA, 336 bp, Glycine max
cataaattgcaagagaatgggagcaatgtggcatgccccattgcttcagaatacaacctatgcctaaggccttttcattcaaatcctcaattcaagaaaacaagcaccaaagcaaaacaaaactgccttacaaatataagcatgttctcacaatttaaggcaccaaaggatgaagaaagcacatcaatggaaagcaaaaacatcaaggatggaatacttacttgttggagtgaattgaaataccaaaaacgaaagcaaaatgcgatcaaaaggcttaggggagcaagaaaccgcaagcctttgtgttctctatctttgaatgaggcggggggggag

SEQ ID NO: 286369 - DNA, 422 bp, Glycine max
tgtctcagcatctatgcgagacagaaaccaatatgttatctatcatcgccaagtaccaagaagagttgggtctagccacggcccacgagcatagaatcgcggatgagtatgcccaagtatatgcggaaaaagaggctagaggaagggtgatcgactctttacaccaagaggcaaccatgtggatggatcggtttgctcttaccttgaacgggagtcaagaacttccccgattgttagccaaggccaaggcgatggcagacacctactccgcccccgaagagattcatgggcttctcggctattgtcagcatatgatagacttaatggcccacataattagaaatcgttaggaaacttgtatggtctctcagaccttgactagatatgatttctttttttgaaataaaatgagttggtcccat

SEQ ID NO: 286370 - DNA, 378 bp, Glycine max
agcttatcgtaatcgattacataattctttttgagacaatgactaatttttcaggagtccctactttaatctattaccaggtgatataattgattacttttctcttaaatgtatttcagaagtgatcaagaacactttaatcagttacattgagaatctaattgattacattgttcttgaaagttttccaattttttggaagaacactttaaaattacttctttgaaataatcgattgcattgtataaatagccaccttgtatcctcacttaaaacaacttctaaatgagctagaattaggagctaatattagtaagataaagaagaggaaaaaaaagtgttgaaatatagtgtgactcataacttctaaccgctcat

SEQ ID NO: 286371 - DNA, 427 bp, Glycine max
  unsure (1)..(427): unsure at all n locations
ntgtatggtagaaggtgtaggacacccctatgttggttatagcccggagaaggcctcaccttatgaccagaagtggtacagcaaaccactgagaaagttaagttaattcaggaaaggatgaaaactgttcagagtagccagaaaagttatcatgataagaagaggaaagatctggaattcaaggttggtgatcatgtattcttgaaagtcactccgtggactggggttggtcgagcattgaaatctcgaaaactcacacctcgcttaattggtcctttccaaattcttaagagagttggccctgtggcataccaaattgcattacccctgtctctttctaatcttcacaatgtctttcatatgtctcaactccataagtatatctgtgatccatcccatgtgattgaattggatgatgtacaagtga

SEQ ID NO: 286372 - DNA, 375 bp, Glycine max
agcttccatcaacaaccataacaagaaataaatatccatcgcccccccccccctcaaaacatcacacaatatcaccaaaaggttttatacaacaaaatattacgtcacagagtatagaaatcttcccaccccaaatatacatcaaaaagggaaaactatcctacactcagagcagtcagtacccaaggcccacaactacctcctgaggaatcgtgttactcgtcggttgaaagcatctctccctcaagtatctcttcaccaataacatccatgtagtaggcaatctcagacggtgtgagattgtcatcatcactgaaatctccaacatcctcgtaaactttaatggtcctgtcctggcaaaaggtagatctagta

SEQ ID NO: 286373 - DNA, 429 bp, Glycine max
ttatggttgtccaaattggccaccattgtcaaggatttatttcaaaaagctaagaaaaaggataaaaagaaggccaatgatgatgatgaagactatgtacctgaatatgaagggggacttagatcaaattcttcaagtgaaaattacgagaacgacaaacatgatgagtttgctattacaaatgatcttgagtcacgaaaaaggaaggtaagtcttgaaattttttcaatataatgctaatatacattattttgttaataaatgagtggggtggttttgtgagtgagattaagatatatattgtgtttattgatgatctacacaagttttcaatgcaagaaacaattcagttaaaaacaatgtacccatgtaatagatataaaattgcagtgctctatgttatgcaatgcaatcaatatgcaatatgcg

SEQ ID NO: 286374 - DNA, 373 bp, Glycine max
agcttggacttctttgtcctcctccggtgcctcaaaactctcttcgctgacgacttttaacttggcgagccaatctaaacctcgtatatgaactttcagccattcatggtagccaccaatgatgccattatgaatgcctctaagttcttgatctttccttaacggggtttcccatgccttatggattctttgtatagtcttagaattttgtgcgccaaaatccctcacaaggaaaggagacatgccttcttccgttggtgctcccctcatggggtaccctagttgtcttatagcgagcgcgggattgtagttaatacaacccctcgttcctatcagcggaatgtttgggtatcctccacatgagaaaaggact

SEQ ID NO: 286375 - DNA, 428 bp, Glycine max
  unsure (1)..(428): unsure at all n locations
ntagccttaggttgttcaccatgttgctccccctatctctaccaatctcccccttttgggctttgatgatgccaaacatgaatacaacattaagtgcatttggagtcttaagattggattggagacttgatcacttagtcttatcctaaaaaattattaacacttgagaagagattaattcatcatcatcatatatgtcaatacatcatatatatatatatatatatatatatatatatatatatatatatatatatatatatatatatatatatatatatatcaatgcatcatcatgtatatcaatcaagaatgcagtcaatatcttcttctccctcttgtggcattaacacgggaaaaaagttaattattcacaaaacacaaacacacatgtaagaagagatataaaaccttatttcattaaactg

SEQ ID NO: 286376 - DNA, 375 bp, Glycine max
ttgtttgtggaagaatgtgaaaacctctgaaatattctagagatgtatggaaccttctggaactttataaaagaatagagaagagagtagaagagtataaagactcctaaaatgtgtggaacattctagagaattaatctccaacctaggatacaagtaatcttcaccatccattatagaggtggagtaatataaataagagtaggagcttatattcctaactatccaaaaaagagtgaattcatttcttagagtgagaaagttagaaagttaaatagtctctttgatagagaaaataaatagctgggaaaatctttattctcaagcttgagtaagtcaccgtagaatgagtgcaatttataattacatccttat

SEQ ID NO: 286377 - DNA, 365 bp, Glycine max
tgtcattctccatggtgtgaagcgaccggtgagctcttcgccggagaatagaatcgatcctcgccgcgagcgcgcccgaagttcaacccagaacccaacattcctatgcccaatgaaagagaaggagaaaaaaaggggacccaggaatcaaaaaacggtgcttttatggataaaaactcgggtgtgtgtggtcaacggtgtttcagatagaaagaaattgtggggaattggattgggaacgatgaggatctgtctgtggcgattctagggtttgggggaaaggggtttctgattttgttgttatgaggaagaaaggtttgagtagagaggagttgcttctgtgaatcggaaagaatgaaagaaaa

SEQ ID NO: 286378 - DNA, 380 bp, Glycine max
tagcttgttgaatctaaaatcaaagattctaaaccaaaacccaaccgtccattttgcatcatacttctactactcaactttcatccccaccccttcccaagttacaatccctaaaccagccaccccctaacttcccatacctacaatgaaatcaacctaaatgcaagaccataaaacactaagtttattctacaactgcgatgaaaagtatgtgcttggccataggtgtagtgcgaagcattttctcctgttgttggtcgaggatgatgctgattctaaaaccattgacccagcaactcctaacccaccccccttgatgaccagtcagaacctatacatttccatttttccccataagcctttactggatccccttcccc

SEQ ID NO: 286379 - DNA, 350 bp, Glycine max
  unsure (1)..(350): unsure at all n locations
cggctttggtttagacatgattgatacatgattttggacttgtaggatttgatttgggaaagattggatgaggggaagtgtggttttcgaaatctgcactttgtgcagatttttgctgtgaaattgtgcagcagaattttgcacaagtgcaaaaaaatacttgtgtgtgattggctgtggaaagagtagtgcagaatgagttctggatgtttgctagtagatcccaacgggcaaaatgtaggcttatgtactagagacttccagtaaaatnttggagtcgatccaacggttaacgaattggaacgaaggaattgttactggggtctttaagtgagaaaagctcgtgattt

SEQ ID NO: 286380 - DNA, 376 bp, Glycine max
tgcttctaaactttgtacaagaatgaagctctgataccacttgttagacaagtggcctcagatatcttaagaagggggggttgaattaagatattccaaactttttttccctaattaaaaatctatcttactttttacttaagttatgaattcccttaatgacaatcttcttaaatattaattcaaatgaagcaacttgaatatgaatataaagcaataataaataaaggagattaagggaagagaaaatgcaaactcagttttatactggttcggccacacccttgtgcctacgtccagtccccaagcaacccgcttgagagttccactaacttgtaaattccttttacaagttctaaacacacaaggacaaccc

SEQ ID NO: 286381 - DNA, 431 bp, Glycine max
tatgagcatgaaacctttctccaccaaccgagatagtaacatctaatgattcctcatcctctaacaacatcccaaaatgttcaccaatatcagattcaggaacctgtattgtgtttaactgagaagaatctatggacgacactaaaaccgcaatagtgcaatttatcttcaagcagtcatccttgagaaaatttgacgtctcaaggtgtctccgtttgaaaaaccgcgtatagcccctattacgcaacaagtgcatcattgatcactatatacgtaatgtacaccacaaaaaatggatacaagagctaataaatcatgatgatatccaaatcatatcaccaaaatcacaaggttctctagttcctttggaaatttaatttttatgtcttatattctaataaaagagctatctctttaacccctgacaatag

SEQ ID NO: 286382 - DNA, 379 bp, Glycine max
tgcttggctcaagaaggactggtaagtagaaggccaccatactcttagagcaagcaactccatggcagaccatttagcggctaagggcaatactttatctattagcttacacgtctattcacactcttattactgactgtaatctccaaatgtggagtgattgtataggggttactctacctagaaacgttcctgcgtaatggcttttagcctcctttgaataacaataaaattgtgcaaaattttattaaaaatatttctgtgaatttttatttttataacttgaaccatgcataccacttatacaaactgcacgtgattcgcattattgatgcatacaattaaattagtatgaaactcattcaactaacaaaagtca

SEQ ID NO: 286383 - DNA, 405 bp, Glycine max
gaaactcaagcttgtataagtgaaaggccccagggaccgactctcttatcagcttagagcatggctattgctgcgtttggattatggattgacgattgatgttcgtaaagagaaacctttgtagatctacacaaatgattacaagttgcttaaaagttctatacattgaagtttattgctctggctcattcttcatcgcgagaggaaattcactttgatcgcactttttcatttacgagcattactcttgtaaagaagaggaactgctctataccatgaatgaactactctacatcgaaagtagctcctcccgaacagaagtataccacgatagagtcaatgaactaatgacgtattggagcccaagtcaaaacacattcatgctagcatgctttcacttgctga

SEQ ID NO: 286384 - DNA, 548 bp, Glycine max
  unsure (1)..(548): unsure at all n locations
ccacacatactaactacataaccgaatagttaactaatctaatatagaatgaatagtatatgaaatataaaaaaannaaaaagagatggtgactcatggacatacgaanacanatggcgatatnaccgcgggaacctctagagccgacaagcaggcatgctagctcagtttgttaattagagaaacagcactcctagaaataatatgtaatattcactcctccccaatcatatacatcacccaacctttaatacttgtgcaaacatcaacaggcaccttctcgtaccaaactagacatgaccacacaaactatcgctgcattgtacataagtacactaataacctcagtaaatactcgctaccaaggactgtcaatgaaacatacaattcgaaaccgcacaacctgcatgttacatgtgacgacagagatataaatcctgtcacaaagaacacgaaccacaaacgaggtgtgactacgatgaatcaacacacaaaaagttaataaatcctaaaacgatcaaaactgctattatgattccacacacccg

SEQ ID NO: 286385 - DNA, 512 bp, Glycine max
  unsure (1)..(512): unsure at all n locations
cccgccctcccacacacggggcggcaataatatcagctatatcgccacncccncnncagagagaatgacctgaaccctgaaactaagaactcagcatctcaggcgctctatatatagacggcttttcaccagtggtcacaggactctgcgagtgaagagagagactaccgcaaactgtcagagacaaccgagccgccgtggatgatggagaaccatcgacgcacgcacaacttggctgctggtgctaggaaataatggaaaaacatcatctggcgtggcctgaaggagaccgaaaggaggacaccatctatagcccataagggtgctacaacggccaacggacctgagaaaggagcattcgcaaacaagccgttgtgggaagaagacatataagccaaggagcatagagctctgaatcatgaacactgacatattactcatgcatgtccactcgggccccaaataaaacggcacgctattggccgaaataaagtgcaaatgcacgaggctcg

SEQ ID NO: 286386 - DNA, 382 bp, Glycine max
tgcttggagaggatgcttcaatggaggaaaagatagagggagagaaagagagaggggggagcacgaaattgaaggaagaaagagggagagaagttgaactttgagttgtgtctcacaagactctcattcatcaaagttaccacaagtggtacacatgcttctatttacacactaggtagcttccttgagaagctttcttgagaaatcttccatgagaagcttctttcacaaaacttccttgagaagctagagcttagctacacacacgcctctcataactaagctcacctccttgagaagcttccttaagaagattcctaaagaagctagagcttagctacacatacctctctaatagctaagctcacctccttatgatgag

SEQ ID NO: 286387 - DNA, 417 bp, Glycine max
ctgaatggaggctctgatctcttgttgaaactgcttagtcattgtcctcacaagttcttcaagggaaggttgtggaggggcctcaactgtttgatgtttctggggctgttgatgttgttgctgtcggattgctggaggaacgtatggtctgctcgggctatcagcattttgacaataagtctgctgttgatgctgctgctgctgtgaaggatccgaccatctaaggttgggatgattcctccatccgggattgtacctgttgctggagaggtcataattattctgttgtggtctgtgtggttgccagcataggagcataaaccacagagtctggcgacaggcgcagattattgattcatggccatttgggttaccaggttaaccaaggcatctagtttaccttcaagcttcttagtc

SEQ ID NO: 286388 - DNA, 180 bp, Glycine max
  unsure (1)..(180): unsure at all n locations
aagcaannaaagaagggaccataagcacgcggcagctttgttaacaaaaaaaagggagaggcatagcagcatggctagaacaaacagggggatcaccacaatccaaactaacccaacaaaaccccaaagtcaacacaaaaacacaaaagacagaccgaaacaaacacgaccacgaaaaag

SEQ ID NO: 286389 - DNA, 83 bp, Glycine max
gaaacccatcatcaacaaccgatatatttcatttaatgatgcctcatcctctgacaacatcacaaaatgctcaccaatatcaa

SEQ ID NO: 286390 - DNA, 360 bp, Glycine max
acacataaacatgtatagaaagttaaataaattaagaagtaataggtcaaataataaattgaaattgagacgaaaattaagtatcatttcagaattcaacacataaaatacttttatatgcactctttagtttaattatttattaacccttttaaattgaaaataatagtaggttaattgtaatattatacaacattattgtgtcaatgtaaatattaatattgggggaagtgtatatgattcatgaggtgtgataacatgttgcgctaagattataacactgtgattgagaatgagtgaatgtgataaacgaataatgtttgaatcggaagatatatgtgtactgagattttatatgca

SEQ ID NO: 286391 - DNA, 245 bp, Glycine max
gcattatttaatcatggacatgagactcttgtttaatctatagcatattgacacgtggatgaagcattgcccacacttggataaactcttcatctgggtgagtatattgttagacaacccttaactaattaacaatacctactcatgtgattgtaaaatcctatccatcgactattagcagctacggttatactcacaccgacaaacagcgtcttcaagacgaggcacctcttcataaacatggc

SEQ ID NO: 286392 - DNA, 371 bp, Glycine max
ttttttgaggtggaagccatgtggccaatggctaacttggagctgtaggtgagttcctgctgggataagaggggaagagtccaggatttggatctgcacctgtccctaccacttgctctaaacttgtatatatttgaagctgatcatttgtctgtaaaataagtgaaagattgaaagaggattctaaaattatcaaaagtgaattttaaaaccacatcagtggatcagaaattaaccaaaacacgaagtccttacagttcctatattcaatctcttgttgtcccaatcataaaccaactcttttgaagctaaccgctttgtcccaagtgcttcacacctataaagtggaacaacggttagttaaacgtaat

SEQ ID NO: 286393 - DNA, 422 bp, Glycine max
tgtacgaatgtgagaaacatcttcttctaccttggtgagcctggacttcatctcattgaagcgcatgtccacttgtaactccaaagtatcaaacctttcaccaacaaaggtttgaagaccatcgaacctatccaaaatcttttgaagaagagaggaatcttctccaccatgtaaatgtccttcttcatcaacgggtcgagcaccatttttcacccaagagccatcatgctctttttgataaccaaaggatccaatgacagcaaagcctattacaaaggatctcttgattggaacataaggttcagaatcaagagggatgttaaagtgtcgaaagaaaagggtgactaagtgtggatatggcaatggagcatttaattgcaatgccttatgcatgcgatatcgaactaagtatgcccaatcaa

SEQ ID NO: 286394 - DNA, 372 bp, Glycine max
  unsure (1)..(372): unsure at all n locations
ttctttaatataataattgcattaatagaattaatatatatatatatatatatatatatatatacacacacatttttttctttatttactaatataacaaattgcacaatttattaaaatttaagaataattatttgtaagagacagaaaggaacaatttacaattgattaaaatttaaaatttaacgcgtcggagtcaatagcaatcagaacaccactctaaattttaacaaaataagtcgtgccttttctttacgggtcanaataaatcaagtctatatacaattttctatatatataattgacatatagccaatcaatagtagtaattatgacaaacaagaataataacatataaagttattttaaaca

SEQ ID NO: 286395 - DNA, 412 bp, Glycine max
  unsure (1)..(412): unsure at all n locations
tctctcagcaactntgactgcaaaacttcacaggtgctacatggcttctttgcaagtgacaagacaagctttggcatctgagtctcagagaacaccaccctcagtgcaaaatgcaacaacctccacaaccacaccaattagcaacaacttcagtgtgaagagtgagcaaactcatgcagtgttgccacataagagaccagaggaggagcaagagtcagaggcaaatacgggtgtgaaaagggttaaggctgtggaaaatgttcctctgcaattcaagcctcttgaggaagatcacatagagcaaatgattgaggagcttcttgattatggatctattgaactctgctctgtcatttcaccccangccctctaattgaatgtgcatgtttttgagctgaatctaaagtcacaa

SEQ ID NO: 286396 - DNA, 340 bp, Glycine max
ttcatgctattctgtacggttaaagtctcacgattgtcacatgtcgatgcaacaatggttattcgtggctatacaagacatcttgccaaacaaagtcaagttagccataactcgcctgtgcttcttcttccatgccatatgtagcaaagtcgttgatcctgtcaagcctgatgaattggaaaatgataccgcaattatactatgccatgtggagatgtattttccccctgctttctttgacatcatgattcacttgattgtgcatttggtcatagaaatcaaatgttgaggtcctgttcatttgcggaggatgtacccggttgagcgatacttgaagatc

SEQ ID NO: 286397 - DNA, 424 bp, Glycine max
taaataagtgtactaggagtagttgtctatccgctcgtccattctcaaccaattgttactcgacctcaatttgcaccttcactaccaccaagctaaccaccaccgccaccatctcaacagtgatgatgatgtccttcaaacattatggctcggttcgaaccctgtcttttctttaatgacaaaagaaagagaaaatataacgagaattttgatgtaaaacaaaagatgtattaatatatgagtagtttggtattcatgtgttttcacgtccatatatatatatatatatatatatatatatatatatatatatatgcctatttatctttggtctactcatttttacatgcattaagattgttggactcacggagagttcttacagaacctatgtacatatatactctgatatagctcctgcaca

SEQ ID NO: 286398 - DNA, 362 bp, Glycine max
ttgcttgagctgtgaagagttacttaatcatttagtgctaatttctctacctttgattgaagcaagaaatgactgaaagtgcccatgttgtgagtatctctaaagacaagggttaaaggaaaagaatcgaggagcccaagaatgaaataagcctgaacatgtaaagaagaaatgtaccaaatatcatgcctggagtgcaaagaaaggtatgtttgttactttggtatgttctgaggtcaatttaactttagtacctagaaacacttggtggttagattttggtgccactactaatatcaagggttccatgcaaggttgcctaagctatcaaaagccaattgattctaacagatggatctatg

SEQ ID NO: 286399 - DNA, 412 bp, Glycine max
tcgtcctcagatccctcttgttggactgagcccagtttagacagccttcctaggtttagactaacttaaactaagcttcatcctcatatccctcttgttggactagacttagcttaaatagcttacgaaagtttagcctaatttaccctaagcttcgtccttagatccctcttgttggattagacttagaccaaacaacattattgtaacaacatacttaaaaccaaaacttcatccgcagatccctcttgtaggactaagtttcaattctgtttcattcaagttctaaggcaacaatacatttctcaatgctaaagtcacctaactatgcatacaaatggatgatcagaccaagagcatacataatttaagcactaaaagaagcattgaacacacgaaacataatcaatta

SEQ ID NO: 286400 - DNA, 357 bp, Glycine max
tgcttgcctgtccgatgcagcagtaatgatggcccgagttatgttggggaacggttacgaacccgtaatgggtttatgcaaagacaacggtggcataactagcctgataaatgccaaaggaaatcgtgggaagtatgttttaggctataagcccactcatgcagatgtaaagggaagcatcgtgggaaggaagggcggtggtcaaagctcgcggttgagacaagatagtgaaagaagcccgccctgccacataagtagaagctttataagctgcggtctgggagacgaacgtcaagtggtcgcaatatacgaagatgatgttcctagtacattggatttggtactaccttgcccttc

SEQ ID NO: 286401 - DNA, 413 bp, Glycine max
tcgcacttgataatggatacacatgaacagcgctaatcaatgacattcatggtgctccgaataaaggtggagtatggaggattgccttgagggtcctctcttatgcaatcatggaacacagctccaaactcgaaagtggaggacacatgaacaaccctaagcaataacattcatgtggctctggaacacgatgagaatggaagattgccttgacggtcctctcttaggcaatcatggaacacagctccaaactcgaaagtggaggacacatgaacagccctaagcaataacattcatgtggctccggaaccggatgagaatggaagattgccttcagggtcctctcttacgcaatcatggaacacagctccaaactcgaaagtggaggacacatgaatgacaacgcaattcaa

SEQ ID NO: 286402 - DNA, 382 bp, Glycine max
agcttagccgccacaaattactttagaccaaaccatttcataggtcacaaaatcaacatcaaacgttgtctattaagatgcaaacatactagtctaacgtcttatagatacacaatattaagctcattgtctttttctctcaggatttacaagatattttgaaagctttttacaacttaaaaattttgaattcagagacttaaaagatgaaaaatgaatttgacaaaaaaaaaatactaataatttcatcgcaacaaaattcacaacaaaggttgtttgagggaattgtcaaacaagtatggaaaggtagaacttgcaaaagtctttgacagtcatcgtttttaaacttttatgttatactttccaaagtcattcattatgt

SEQ ID NO: 286403 - DNA, 412 bp, Glycine max
tgaaggtaggagaagatgagtgaaaggagagggatagaaggagcacgaaattttgtgcctcaaatgaggtttgaactttgaagtgtaattctcaaatgaccaaagttgaaaaatgcacacacatggcctctatttatagcctaagggtcacacaaaattggagggaaatttgaatttctattcaaatttcacttgaatttgaaattgaatttgtggagccaaatttaggagccaaaatttcactaattatgattagtgaattttagctatggttcagcccactaatccaagatcaagttcaaaattctctactaagtgtgcttaggtgtcatgaggcatgtaaaacatgaaggacatgcacaaagtgtgattatatgatgtgacaatgaggtgtaacaagcaaatgctcacc

SEQ ID NO: 286404 - DNA, 363 bp, Glycine max
tgcttggtttgtgagtggatgttagccttagtttcacttggttatttatcaactcattcaaaagaactttcaaagtaaaatgttcgattggagcttatttaccccctttttgctaaccgaggttatagtgtgaatgatccggtgaattttattttaacagtgattagatgagattacaacacaaatgatctgttgaaattcattttatcattttattacgtgagataacggcttaaaggatcggttgaagctcgttgaaaacggaagaaaaggataccaacagtaaatgagatgaagatgaaagcatacaaagcaagaatggaccactaatggtgcatagaatgaatagaaagctttgagatc

SEQ ID NO: 286405 - DNA, 220 bp, Glycine max
ggggggggtggccgaatgaagattgggcctactagtcccccaactcagaagcgctatcgctgtgtattcaagttatcattgtctcttaatgacgatcttattgaatgtgaagccaaatacaccagtgcttatatgagtattaaagtgtcaccaatacgggagattacgggaggagagactgcaagctcagattcatactaggaatgcctcgcgcttgtgc

SEQ ID NO: 286406 - DNA, 377 bp, Glycine max
tgctttacaaccaattcgttaagtacaaattattataagggcttaggccttttttctactctcaaaacttgtggccataaaatagtataattattggaagttggctctcccaataacacaaggcagccaatcacactttacacacaaccaaccaaatttgaacatctcgtttgcattttcaaaatgggacaatctattctaaattcagattccaagccttaggttgcactggtgcaagctcaaaaatgatatgcctaaggcactgctcactaataaaaataaaaataacagctagataattctgtctacaaatcttcttaattttatctgcccattttaagctcaaccaagtaaacgtacattcgacatcttttatt

SEQ ID NO: 286407 - DNA, 377 bp, Glycine max
aagcatagcctacatcattgaagaaaaaatggtaaaattccacataaaacatcagaggatccagacatacaaggtcttatttaccttgcattactcaaagaagttttaactaaaaatttcctataagccttatcattttgatccaaggtgcctggagatgagaagcagatagtgtaaacagatatctcaaagaaggcatggtgactttttttgtattaataatcgaaatgaatgtgaacagagtacatacccatcactctttaagattgctagcaaacacaatataaggtaaatgcaaatgcgatgccctctacattgtaaacgaaactggttatacacattataggagcataaataatattgggaagcactgaatt

SEQ ID NO: 286408 - DNA, 379 bp, Glycine max
ttgcttatatgcaacataaagtaactaacatatactctaattaagagggtcaattacctggcttctaggctctttgttggtctgagattaattggtttcttccttgctttaatgcctaatccgcttgaaacggtgattggtttaggtatatgtgctggccaatgtaagtctgattctgcagaatcactagttgcaatctcaagctcatcagattcatatgtggtggccatatcaaacaattcttggttatcctttctatgcaaggagtggtccatgcatattttagaaggctctgagagaaaggttggacttgacattggagaagattgttgctttctgcttccactgccccacgagactatcatcactaggtaagctg

SEQ ID NO: 286409 - DNA, 399 bp, Glycine max
tgggaggtcacgacgaatcagatacactgaatatcttggataactgacacgtgagtgtcatgcatgactttattataccgttctaagaacatactaagaccttgagcatccattgctgcataatccttcatatataccataggccaaagccgtaatatctgcgtcagcaatgctatttgcatccacaatccgcttcgggctcctacaagtaaccaagtttaccctcacgtgatatactatgggcgaaacaccaatagacacatgctcactgacgaaggacgtactcaaatgtgccgctagactactaggatgtgactactaatactactttactatgctcatacgttaagatatattcatgattcacataaacatattccccaccccccacccccgaag

SEQ ID NO: 286410 - DNA, 377 bp, Glycine max
tgcttgtaaatatttattggtataattcgcctgttccattatgctcttgatgtctttagaggttacttcctcgttgacatcttttgtcttgaatggaattgccatgacaggtttattgttactgtctttgatatttggtagttgatattgtgttgcgggaggtaattccgattggattaactcaccatccttaacttgccaatttgttatgacatttgttgttggatcacctatgatgtcttgtttccaagggtaatctatattctttctgatggcataagcatgaaaccaatcaaagaacaggacattaattttgactcgttcgacaaattcgtacaacttgtcttggatttgctttctgtttgacacctgtaatg

SEQ ID NO: 286411 - DNA, 435 bp, Glycine max
ttggttgtcatgatgaattagattcattgcatagtaatgataacagaaactttattgtcatacaagactttcttagtacattagaagaaattcctagttccttgagcatccattgcaacaaaatccttcatatataccattggccaaagccctaaattctgcttcagcaatgcttctagctaccacaatctgcttcttgcttctccaagtaaccaagtttcccctcacgtgatataatatggatgaaacaccaagatacacaagtaaacagatgaaaaataaatccaaatgtgcagctagacaacttgcatgtgactactattactaatttactatgcacatatgtaaagatatattcattattcaacataaacatatccccccaccccccccaccccagaagaaaatgtactacaagggaaaggtataccatta

SEQ ID NO: 286412 - DNA, 367 bp, Glycine max
  unsure (1)..(367): unsure at all n locations
tgctttgcggatttggtcttcgctggcgaaatgatcgaagtgggtctaaaaagaggaaaatctgatcatcatgcattgataaatgcaaaaaaactggggcaactgaagagggtgagaatgagggagaaacccatgatgtgattgccattcctatacaaccaagtttcccaccaacccaacaatgtcattactcagccaataacaaaccttctccttacccaccacccagttatccacaacagccatccctaaatcaacccccaaagcctgtctaccgcactttcaatgacgaacaccacctttagcacaaaccanaacaccaaccaagaaatgaattttgcagcgaataagcctgtacaatcacccc

SEQ ID NO: 286413 - DNA, 416 bp, Glycine max
tatttaaggttatgagaggagtacggtagcattattagtgtcccagatgccccggaagcccattttttaacaaaacggggaaggtggttgccacctaactcgcccaggtgagctaggttgcttccaccttaagcatgaaattgcccagaaacctctagaaggacccaaatctgaaaattattatttgcacccctcattttactaaatacacccccctttttacttaccttttatcggacatagcaggaaagtaaagataagacactgatttcgtccgccttagccttttccgtaattaatctatgataaattccaaaggtcatcctttgcccatcatggggatttaattgatcttaatcacaatagttccatccaaaacgatatgaaataattgactcccgtctttgctttttctt

SEQ ID NO: 286414 - DNA, 367 bp, Glycine max
agctttggattcaaacattttccttaagagagagagagaccatttcattccaacaaaagatcaaacacactatatatactagagaaagagaataaacacaccagaagtaaaacaaaacttatttcttaataaaacaattaagctccagagacatgaacctgcaggaagattcagagctttcatactggcaatagcgcaggaggggcaaaatagcattagggaaatgtttgtcttctgattgtttgttggttccaaaagcatctccatagtgatcactattttcagaatttgcagggccagaatcttctctggctgttgtcctatcatttacaggatcagtaagcaagacatcatcataattgattct

SEQ ID NO: 286415 - DNA, 415 bp, Glycine max
  unsure (1)..(415): unsure at all n locations
ntgcgattcgggccagacgccagtgtcgaggacatcgatgacgacgtcgtgtgaggcctggtggaggtcttgccagaaggcggaatgggcctggaggcccaggaactcgggggtgcgagtggtgtgaagcgtgtagcgcgtgtcttcgtagacggccaagacggaatgggaagctcgaagcgcgtgggcttgttgagggtcgagagtggcagcgaagccgttgtaagcggcggtgtaggcatagaggagagagtctggagaagaatcgagtgtggcagtgtaccagtcacggtgcgtggggtgcacggtggaatcgtggcggtgtttcatgtgtactatgtaagtcttcttggtcgcagatagtagtgtgagttggaggagaaagaatgagaagaaggaaagggaaattgatgac

SEQ ID NO: 286416 - DNA, 390 bp, Glycine max
cttaagcgactgcatctgcattctttaccttaaggatatttttttgttgattgacttatcctttaaaggatatgtttgccacactgataaagcttactgcaacattttgggaattaaatcttagaagataagagatggaaagacaaaaatcttgtgtttaataaaaatttaatttaatttttaatataaaagacataaaatatggatttaagacgattacacatgtttaatatgttactcttttgttataaacattacataatttcattgattaatttttttaaaagaaatcacttatttttttctgtctctccagaaagttcctttgcaggatgcatctaatactaagctaggagcatttttaaccatctatatatatatatatatata

SEQ ID NO: 286417 - DNA, 357 bp, Glycine max
ataatatccattgattagatattatagaatcttcccaccgaagatagaggcgcgttttggtgtacataatttttaaattttctaaattcgtaacgcatcggtgttaagaattacctgagattattaagtgtgcccaaaatgattttgggcctatttgagctataacccttccagatttagaatgaggtgcctattaattacatacttcttattcatttgttaatcctcatttgcctcttcgacttacagcaagagggttgtgagccccactacttttatgcggagctatacacatattagatatacggttcttaatactcattactgaatagtaaagatcatttctaatgtcatcta

SEQ ID NO: 286418 - DNA, 371 bp, Glycine max
atcttcttatccaaggctcatcttggtggtgaagctccttcttccatggcttattccctagtggatgacgcctcctgtcacctcttctcctttgtcttccgctgcatctccatggtggataatcaccattaaaggacctcattgaagctcaaagatccagcctccatagaagccccacaagcaagcttccatcaaagtgtatgaattttaaaatccaatcctacagtttcttgaattaattaaattcgttattattggttctgtaattttatgtatctttgacacactaaattcgattatatttgctatttcattcctttagttatcttcgtcaattaaacaaacccatgatatttcgattaaacttgtac

SEQ ID NO: 286419 - DNA, 376 bp, Glycine max
tgttgccattagaagagaatgagcatgtgattggaattatgactgtgattgctagtcaatttgccaaattgattgtgaaagaatgcattgaccgtatcccggtgagagtgtgatccttaaattttgagagaaatgactatcatttaatactgatttttgcatgaatctttgaagtatggactgaatgcatgaaattgaggatgatgaaggccatgtttgattgggatagccacttagccacgtgtttgaatgatttatcctttgcacctaatttgagctgaatgaattattgattgattgaaccctgagtctatagagcgttatcttttgctaccttgacttacgttgtatgagagcatcattcacagaaagtgtg

SEQ ID NO: 286420 - DNA, 460 bp, Glycine max
  unsure (1)..(460): unsure at all n locations
agagatcttatcttacatctgaaactatnaaacccgactccaggcggagtatatataagatgatttttgctattaacttgctgcatgcagattgttgttgtcactcgacgagattgcgtggtttagatggtatacctatgctacacaatataccatatatgtttgatccctgtggtaagtacagcatcacattgattgagacatacacaaactggcgcttgataagagcatgaacatctattacagaactcggggttagtacatcgatgatcctatgcacatatcgctgggtaccatacacaatacgattatgacatcgagtgaagacaagacactgtgcctggaccatcgttcatgaactacaatgcactaatggcaagctatatatttgaatcatcagttcgcataactcaccttccagatgcgactacatagagtcaaaattgacagtatactatcc

SEQ ID NO: 286421 - DNA, 371 bp, Glycine max
tttcttttccaacgatgtccatcatctctacaaagacatcaccgccttgacgaacatgaaattatagaacaaggaaacgcagacctaccttggtaagctcgaacgattaattgctgattataacactttcatgccctttacgaaagacacaaagacttctaataagaagcacatccagcactttatggcccttgtccttgctggtcagacattcctttgctctttgctcgcattcttctaatagcggagggcaaagcaaaagtcgtggaggtcaaatgatgaaccattcatgtgcaactatcgctacatttaggggcatattaagtccattgttgcaacaagacttgcgatcaaacaaaatctatgaatgt

SEQ ID NO: 286422 - DNA, 359 bp, Glycine max
tgaaagcatgtaacctaccatcatctcatagtcaatcaccagtgacgtgtctactatcattgtgatcatctgcctctccatcattgagggcactactcgagctggcacaaccgtccataattggatgtatgtctttgaaagattcacgctccttattacacacgtacttgaatcccattgtattcgtagacatatcagaatggcagtgatactgcctaatgaaggcgaccattcagtccttccagaaattgactcaagaaagctcctgattagtataccaagtgacagttgccccacacagactcttctggaagaaatgcatcaacaaatattcatttttccagtatgcccccattttc

SEQ ID NO: 286423 - DNA, 142 bp, Glycine max
tttcttgtctggacggggcccaagttatgattgcccttgttatgtaagagaaagtgtttacatcccgaactgggtataggcttaaaattgggttgtatagctactctagaactgggcttgggaaggagttacaatggtgtat

SEQ ID NO: 286424 - DNA, 324 bp, Glycine max
gctatagagctctttcactcgctgagacgctgcattattttatgcatacgttccttacaagcctgagggcgcaattacatcacatcattaaccttttgctcaatagggtctattagacaagcagatggctgtgccacccagtaacgatgattgattcccactgtaactcacaacgaagagtcccgttgcgcatttgtcactacgagggaccgtgctaatagcgttgagagaattcaagacgatgggcatgacggagttggactatatattgatgagggtgatcatgacataaccatgcatattggtgaagatgactctggcact

SEQ ID NO: 286425 - DNA, 295 bp, Glycine max
agcttagcctctacgaactactacccaccagaccattagattcgatactgagccttcatcccacgacgcttattaataggcgagcatagtacatttacggcatacaaatacacaatattatgctcatcgactatttgtgttacgatggaccagataatcgggaggctcctaaagagggcataatctagcacatttagacttaccttatggtatatgattacgtctggaaattgctactagtactctactcatttcgcatgcctcatgaaaagctgtgctgtgggaattgatgtac

SEQ ID NO: 286426 - DNA, 318 bp, Glycine max
tgagcgctggagactgcgcgtggctgttaaagtatagagagagtactagaggaaccgcctcccgtggaggacgctgtctgaaacgtatttcttacttgaccgacgtagtatgacgcgctcgcgtcgcctctatttatttcctatcggaccttcgatgctgctgggatcgtatactcatttttgctatatcactgacaagtatacattccatccttggagctcgccctaaagagccaagatcgcactaatcacgctgactcatacatatctctggatctgcctactattactacatcgtgttacatatacattactcca

SEQ ID NO: 286427 - DNA, 376 bp, Glycine max
tgctttaaataccctagctttacaattacttatacaacctgatggattgaagatcaattaatattggctttcaaggttggtttctcatcataaaaaaaaggaggagaaattaaatgtaaaacatgacctcttgtactttaagacactactaaaaaaataggtttttacgacgatgtttaaagtcggttgtagaaaaattgtcattgtattagtttcggtggcaattttgtaaatactgcccacatttcaaagacgtggaaaatcgtttttgaaatgttggtagtaatcaaagacagttttgcgaaaattgtctttgaaacttcattttttttcattcttcatttttaatgcctcatcttcattatagaagcccacg

SEQ ID NO: 286428 - DNA, 435 bp, Glycine max
taatactcataatcacatctataggactaaggtcctttatattttaattactagataagaaagacttcacatcatttatgaaatgcataccactaccaaatatcaatatgtcatccacattcacacatttatcattattattgatttgaaaaccatacaaaagaacaacttgatcaaacttttcgtgtcattactttggagcttgtttcaaatcatataaagatttaccaagaatctataagtagtactatgcaaagaatatccaacaaaaacataatcaacagtctttggtccaattttccttttcttattaatagggatgttaacctttgctagacacccacacactttaagatattttagatttgattatctttttctccatagctcaaaaggggtattttttaaaaaataattataaggtaccatattaaa

SEQ ID NO: 286429 - DNA, 365 bp, Glycine max
agctttagcctttcatttcttggaagccatctacatcaaaaaaatcaaagacacaaaattagacaggtatttattcaaattagaaagcaaaaaaaaatctgaaatttaaactaggcgcttagcgagatggattcgcttagcacgacttatgaaaattaactcatacacttagcgcgatcgaggtgcgtttagcgagttaacacagaaaactactctactgcataattggctcgctaagcccaattccaaaacagaaaacaatttgcgcttagcgcatacggtgcccttagcgcgacaacaatactagagaataattggcttagcgagcaggctcgataagcccaattccaaaaattacaaaacag

SEQ ID NO: 286430 - DNA, 440 bp, Glycine max
actcagcttgcataggctcattcaatcacttagtgcaccaatagtttttggatccattccttaaaagcccgagggagttatgaaacaaagtattaatattttgcttaataccatatcaaagagaagaagtaatatgtgcccaagtgaaatgatgattgtttgcaactctagctcacaacgttaaagcccattgcacatctgtagaaactagctcccaatcaagttgccttgttgatatccaagaccaatgataaacctgaatttgactatattttgatgtgaattttcatgtcatatccatgcatattgatatattttattttggcaaaactcatggttgggtattaatttgtgaaagacatgtgcttaagacgctaaatgtggaaaagaactaaaaatcatgaactttttcacctaattagaagatcatagtcaaggtg

SEQ ID NO: 286431 - DNA, 381 bp, Glycine max
agcttgtctcgctaagtgggagtccactttttgcgcttagcgtgacaattcgtgcttagcgtgactccctctatgctaattctcgcttagtgcactaattcttgctcaatgcaattccctctcgggttggaattgtgcttagtgcgctcctcgcgattagaaagacattagttgttattatgttcaaaatcccaacggtcagaatgtggagaattgtcttaggaacctccagacaaaatttaaagataatccaatggttaacgaatccaggatcacgattttacagaaataggttttggtaaaatctgaaatctcataatttcaacttagctcagccaaactccacataactcaacatccacattaagaaattcacacatg

SEQ ID NO: 286432 - DNA, 433 bp, Glycine max
atggatgagttgcgtaaacgagccaagggatacatttagatggaggaaatgtctagattcaggaataaagatagactagcaggacaaaagtgtgacaagcgagaaggaaacaccaagaccgacttacacaagtcgaacaagaagcacaagccagacaagcattaacctctgttagtcgtcatttacgactaacttttatattgaagagcactatgaaatctatgtcttttccccaatttatagttctttttgtaagttcgtacatatttttatgtttagtttaatttttacacagtagatattcccttcaatgtgaattaatgtgttttcaacttcaatttcaggtgaaaagatgaagaataagaaggttgctttggctggtgtctcactaagcgaggcatatgcgcttagcgagtaacattcactaagcgag

SEQ ID NO: 286433 - DNA, 93 bp, Glycine max
agcttctaccgctgttgactatcaacagggggcgaaacgaatctgataacggctcaacccctcaggcacttctatatgtatcgaatatgcgta

SEQ ID NO: 286434 - DNA, 399 bp, Glycine max
tgctagacatggatcaacgagccggtgaagctctttcttgcatggctcattccctaggggatggcacaccctctcacctcgtctccttagccttccggtgtatcagcatggcggagacatcacctttactacaccgtcttgaagaccaaccatccaggcttcatagatgcgtcacaagcaagctggcataggagccgcacattatcgccatgacacagatgctgcgatggaccattatgaaactttatgcagaacgggcgtgcatgcacctatagtgacactcatcatactatttttatggacatgtcacacggaggcttacgatacatgatcactattcaaggcgaccaactggtacaaaaatatggtgtttatcaattcgtgctctatgcgagacct

SEQ ID NO: 286435 - DNA, 369 bp, Glycine max
atctttctagcttttcattggtgtattttgatctccttttggtgctctaaattgtgggaatgtgcttaaatatgtggggcaattttggtttgttttcttgcttgattaggttggattgggggtttgtatgggatggccctatgcctataatgcattttgaaacaatgggacatgccacattgtccccgttctcttgttattgatgcctaaacgcgcgcccaccaagtgttcggtgaaatgcctcaatggcattagcgcgtgacttttgtaaggaaacaacccatggggcattttggtttgcacatattttctatttttctgggacgtgcattcattctcgaataggctatagtgattgccccacatata

SEQ ID NO: 286436 - DNA, 420 bp, Glycine max
tgtcatttgtgtggagcctactacatcggtcttcttgggagctatttgaagcatttttcgtgaatcatgaagaacaagttgaagcattccaaaactgcaacactgagtgcaagatctatgagtgaaaaatctatgttttagcttgaaccctcatagggagagtgacctatttctaatttatgcttacaaagcttgtaataatcttagatagaagtgtgagattaagttcttgagtgaaatccctcttgtgaggtgaaaatttgtattatgtgcactcaaacacaaatctatttctctgtaaaattttagcgttggctggcaaaggtgaaacctagtggtgtagctagtctagtcaaggctaagactgaaatctagtggggaactgccaggttgttgaaacccagtggtttgctagtttag

SEQ ID NO: 286437 - DNA, 364 bp, Glycine max
  unsure (1)..(364): unsure at all n locations
cattcttcatgatgaatcaagaattgattcaaagaaggtttgatgataataaaggggatgacaaaaagcttaaaattcaagaacacttcatgataacaaagatgatgaatctcagaatcaaagaatgagttcaagattgaatccagaacacttcanggttaaagaagaaatttgatttcaagaatcaaagaatcaagtttcaagattcaagttccaagaatcaagatcaagattcaagaatcaagagaagacttaatcaagaaaagtattaaaaaggttttcaaaaactgagtagcacatgaatttttctcaaaccttttacccagagtttttactcttggaatcgataccagattattgaatc

SEQ ID NO: 286438 - DNA, 425 bp, Glycine max
tcctcggagccattcctgcgaaggcaaacatttgtaaagttagttcttaccaagaaatgctacccttaaaacagaaatggcatacaaccccctccaataaatacaaacatcaatgtaaatttagagcaagcttatgcgcatacttcttcacgaacgttcacttgcacaagacattcttataactaagaaaaatgcacccatatacaatcaaggcaccttcgttacctagattatttacatgtacttccaaggtgtatttgttacctacatcacacacatttcctttgctaaattcacatacatgcatactctaagcactttggctatcaaaaattgcatacgtgcacatctttgtatttctaatacctatacatacacaaacttcatgatgaatcttgactatctacacaataaggtgctacatt

SEQ ID NO: 286439 - DNA, 356 bp, Glycine max
ttcttattcccgcattcccagtaagcccttcacgtggtaatcgcgcaaacgcagtggtactttcttggtacgcgctggtctcggggtggcttggcatatgtcgatgttgctaacactgccttcctccctaaaatccaccttgtcctcaaggtggtaggtcttacacagatcagaccacatttcccacgaagtgtcttctggtggctcaccttcccactgtgtaagcaccaggcgagtgggcggtgttgtcgactggtcaagtttggagtctagaaagcacatgggacgttgaaggggcttggtttccaaaacctgtaagggccaaccataatctgtagccggtggtggaccatgat

SEQ ID NO: 286440 - DNA, 404 bp, Glycine max
aatcttcctaatgtagcttctcaacgaggtgagcttagctatgatgtgtaactaagctctagcttctcaaggaaggtgtctcaatgaagcttctcaaggaagttttctcaagaaagcttctaaaggaagctacctagctctataaatacaaccatgtgtaacacttattgtaactttgatgaatgaaagtcttatgatatacacttcaaagttccacttctttacctcttttattccttcaatttcgtgctccccccttctctctttcttttcctccattaaagcatcctcttcaagcttcttatccaaggcaattcttggtggggaagctacttcttccttggcttattccctagtggatggtgcctcccctctgctcttctcctttgccttccgctgcatct

SEQ ID NO: 286441 - DNA, 373 bp, Glycine max
tgcttgatgaattctaggtaaagactgaaatcaggactttgcttcttagatagaccacaatctcttacttctataccctctagtttctattccttgttcattgttattatagtgatttaaatcatccaagtttcacataggttacaaaattgatgtaatgcatgggaggaacaataaaatataagactaagaagaaaacaacattgtcttattttttctatcttctttttattcactgttgaagttatgttctggaaatgtcctagaaatattagacaggaactgcaacttattttgttatttcaaatgatccaaggtaggattgttaagttggttcacgaatatttgttattaataggaagatctaaaccct

SEQ ID NO: 286442 - DNA, 227 bp, Glycine max
ctcatgcttctaacctacggaatccttttcgggcattgttggcgctacaactttaaaaaccagtgcaagacttcatcgtccatttcgataagcatgcaccattggtgaagggggaggatgaaccgctcctggagaaagtgtttgttagagggcttctccaagagatccacactaaagtccagctctatgaaccggaatacttgatggactctatggacgttgcttgt

SEQ ID NO: 286443 - DNA, 266 bp, Glycine max
ttgtcatgcatgcttatgatgatcccatatggttggaacattctctcaaaacagagtaaccctgactggtcaccttatgattttacttactgagagtgacctgacatacccattgtgtggtgtgttttgttatgtactcttaaacaccctagtgtggttttttactgatatgggaccacattgcatataggcttgagttttataataattgttgcataatgcacgtgaattgtttattatgaaatcaatgagtgttgtcatgcctc

SEQ ID NO: 286444 - DNA, 425 bp, Glycine max
  unsure (1)..(425): unsure at all n locations
ntgaaagtagagctcgaagagtcaagagtggtgaatgagaagttgagggtggtagtcactagggtcaggaaaaaatgtgatgagctgaaagatatcaacatgaccacggtggaagcgttagagtgggaaataaaaaaaaggcccgaaaggaagaatggagcaggaacaagttccaaggggctttgtggggtagcattaaggagctcaaacttataaaggccgagagggacaaatcaaggatggaaagcatggtgttagaggataaatcaaagagttttcatagatcgaagagaattntgatggaacagttgagcaaaacagaagagaatatgttggcaatcatcaatgaatataaagaaaaggtgaacctatccgctagtcatgggtagaggctggaagatgaacgacacatgtatcgtttctgt

SEQ ID NO: 286445 - DNA, 356 bp, Glycine max
tagctttgagccaaaatcctgactcaccataaaccttgacccagggtgagaatgtcaatccttaccctcggaagcaaaaaagaatataacggaaattttcaatctaaaaagaatagaaggaaaatttccaatgaaagcaaaaaaagaaaagaaggaaaattccccattcaaagagtgggagaaagctaaaagaaaagaaaggaaattcccaatcaaagaatgggagaaagtaaaaaaggaagaagaataaggaaagaaagctcctgatcagggatcgaaggataaacagaagaaatgtgctgagaggtctttagactggacaatatctgaaccatacagaattggcaccacatgaa

SEQ ID NO: 286446 - DNA, 412 bp, Glycine max
  unsure (1)..(412): unsure at all n locations
tgccacccagctcgcccaggcgagcacggttgcttcctccagaagcaacaaccttctggaggaaggatcttgaaagcctaagtgggccacattgctattcgtaccccccctttttactaaatgcacccccatttatttttttggtaattctttttctgtaacgttacgaaactttacgaatttcgtaacgatacttattttccttccgcaaggttacgaatccttacggattatgtatttactcttttttggctttcgaagaagttacggaaactcacggattgcgcaaaaacacctcttttcgatttccgccacattacggaatttcacggatcgcgcaagcctgcttccttttgatntctgacacgtctcgggtcttcatttattgtgcaacacaggacgccaagtatct

SEQ ID NO: 286447 - DNA, 367 bp, Glycine max
ttcttttgcatgtgtaggaagttatagagagagaaaggtccaagttcccgagagttctgaaagattttgttgtgtgaagatctgcagagacgagagctcaatgcgaaagccattctaagagctttagatgagtttgtgagtgactgtgagatcctagaggtgaaggagacatcctcaccacttgtattttttcaatctttcaccttgttcttctctgtgttgtaaaggaggtttccagactatggaaagctaaatcctctattggatcttccctgtaggtacctgatgtaagctccattggagcttgtaagcctaggatcttcttcatcaatggattccttggcttattggaagatgaatggcagcg

SEQ ID NO: 286448 - DNA, 395 bp, Glycine max
  unsure (1)..(395): unsure at all n locations
tctcactaanagggcaaggaaggacgccgcaagttatggatctagtgcagccccacaagcagagattgagtttgacggacaccatttttgaagtgaggagcatcagcgccgcttcgaagcaatcaagggttggtcttttctcaaagagagacgggtcaaagtccaactaagggagggggaatacataaaattccacgaggaggtttcctggaggcaatggactcaactgacagagcctatggctaaatatgacccagagatagtcatggaattctatgcaaatgcctggcccaccgaagaaggagtcatggataagcgctcctgggtgtggggccaatggatcccctatgatgaagatgctatcaaccaggtcctggggcatccattggttctag

SEQ ID NO: 286449 - DNA, 381 bp, Glycine max
  unsure (1)..(381): unsure at all n locations
tgcttcgaaacctcacgggattaaaaagttgaaaatttcatatgatgatgctttgctaaggctggaaagaattccagatgttattggcatcaatgatgctccaagtgttggtgaagataatcctgaagtttggcatgttcaggtaattagttatctaataatgctgaataaatattttgattttctagaagcaattattttctcatttactctaaaatgaaattatcgattatgtctactttggaatgtagatatttcgttcaattgattcaaattccgttaaggggtttccaaaggatccaaaagatgcaacgagcaaggtgaatgaaaagccttgtgtttcaattnttgtttgtcagacttggtttaacctatcaaacc

SEQ ID NO: 286450 - DNA, 434 bp, Glycine max
tcatcagatgttgcatttcaatatcacttcctcttatggaagaacaaaatgcacttcttgcattgtatatctgtttaatggtcgtacaactattggcattgtgttccttcagagttagtagaatgtttcttggcttcaccatggacttcgtcatatcaacaataagtgttttttcagctttagtcaatcgctccgcatatggatgtccaactaatgagttgaccaattcatgattatgtactgcacaaatcaacttcaccatccagccttctcctccaaccactggcttgcaacaaagcttgaagggacacccacatttcctagtcctagtgtctcttctgataagttattttttcctacacctatactcgccactactttcacagctaattaacacaaacaaagtcctttctctactacctgtgtttgtgtct

SEQ ID NO: 286451 - DNA, 380 bp, Glycine max
  unsure (1)..(380): unsure at all n locations
agcttttttccttactcttattctggaggatctggtcctcgaatcctagccttgttctgtagttcacaacatccacattccaaatttcattagaaaattatgagtagtattgtcttctctgcactcaagggtagtgccgtaaaaggttactgacatgtgaaggaacgcanaactagtaaaacataattctctcgcttcaataaggaaccgtgaattggttcatgcataccaattcacatgacatttttaaaccggtttggtaaaatttagtgaattcgtgaaagcaatgaatcaggaaacatcacgagtttgactttggaactcttaaagaacataaacagctaagcttgttagttgttacagagagaaagagaggattt

SEQ ID NO: 286452 - DNA, 423 bp, Glycine max
tctagcttgtagggtcatgcgtgagggagcttgttatatacaagttataaagaaattcctgatccattaccttacatcttaagattttaggggaatcagtccttcacactgaacttatcattaaaaattgttgtaattgggacttgttttcattttcatttgataacttttatttacatatggtgtgcttgatgtctaattcttggtacatacattttgaacatgttttagaacttagacaccttgtgtttcaagttattcaataccttatttaaaaatgattttttttggcttcttataggtttgttccatgtatccaaattgattggttgtgacattgaagatctcaagttgatactatcaactcgcaaaatgaaagttggtaatgataatattgtccaaaagttgacgctatcacaggta

SEQ ID NO: 286453 - DNA, 370 bp, Glycine max
agcttgtaggattatggggtacccatcacatgtggtactaggtggcggtcgggcgatggtgcacaacaagttttcctcttccacaatgcgcgcataaacccaccatcccctgatgcccacctccaactgagctcacgtactcccacgtatcccatatcctcgattctctcaacaccgggtccccatcaatcctcccaagcttccacaacatccaagcaaaacaacattgaaacagcataagctatcacagacaagcaaaacagagcaaaggcagaaaactctgctcaacacatcaacccatatcacagcttttctcacttaaagaccacagtaacaattcctttgatccaattcgctaaccgttggatcg

SEQ ID NO: 286454 - DNA, 259 bp, Glycine max
agccggtttcataaatattatatgtaataacctcctgggctcccgattttgtttacctacaccaggtgtagggctctggggacatgacacgatatacgcctttatagggagtgcttactttacaaagacacccaatagatgtgccacatgatgatgtgggactatgttacagtcactacgaggaccttggacacgataggccctgctgtccatgaatccacagtttctcatgaacgcccttatgacttttgggtacatg

SEQ ID NO: 286455 - DNA, 380 bp, Glycine max
  unsure (1)..(380): unsure at all n locations
agcttgtaaaaacttaagtctgaaatttctctatagataaggaacaaaaatggtcagaccagaccaacatcttttcacaatacagtgtttctgatatttttgactcagaaatttccattcatctcattggaaaagtccaacccacatttcactgtatattagattcaacttcttgatatcatgtgctaacgaagcacaagatttagactcatgatattgagttcgggatactcagaaatttaatctacaatgggcattntgttgaataaaaagcaggcaaaaattaaaatgaacaaaatcatgccaataataactatagaacattagacaacactgacaaacttagtcgcattagccactaattgaataacagagcttag

SEQ ID NO: 286456 - DNA, 429 bp, Glycine max
tcttgacgacctatccgccaactgttttgtgagctgtcccacttggacctccagattctttatggcagactctgtgctcttctggttagacatagagacctgcataaattgaactggagtcttttccatcttcgtggtgcgatcatagagactacgtccttgttgttgcgaccttatggatgatcccccctggtctctattgaattgattcccaagatggttcttccattgtgcctgttgtaggttgcattgctgtccatgctggaatccagacaatccacctgcattaaaattgtttctaagctggttccccgtgtaattgacttcatgtgtgacttgttcttcattagggatacaatatccagatgcatgagctccaccacatagtgtacatcctgcaacctgcgtaacagaagaatgtgatgtatg

SEQ ID NO: 286457 - DNA, 364 bp, Glycine max
agcttcttttggaccttgaacaggcaactaactcctctttcaaaaccatgctatgtgctcgcgactggtccctttcttcctttcgcaacttgagttcactattgctaccccatagagctccgcgaaatttgttccggccatactcttccttgcgagccctcttggtctcttgttcaagggctcttgcgcgaactgcattctcttcccgtaacccggcacactccttccgaacgtgtgtagcggccaacttgaacttctccttggcaagttttgcctttcctaactcgcttttgagagcttggacttcttcgtcctctttcggtgcttcaaaactctctttgctgacgacttttaacttggcgag

SEQ ID NO: 286458 - DNA, 407 bp, Glycine max
aacttatcacactgagctccgattcagtcttacaatatattgagaccctcgaaattaaacatcggaagctctcgagaaattcaaatggtcataacgtttcacacgaaggtcagattcaggcacataatatgtcgagatgctcggaattcaaccacggaagctctcaagaaattcaaatggtcataacttttcacacggatgttcgattcgggcatataatatgtcgcgatgctcggaattgaaccacgaaagctctcgagaaattcaaatggtcataacttttcacacggatgtccgattcgggcgcataatatgtcgagatactcgacatagaacaacgaaagctctcgagaaattcaaatgggcataacatttcacacggatgtcagattcggcacataatatgt

SEQ ID NO: 286459 - DNA, 357 bp, Glycine max
agcttgtagaatggctagacatgatacatgtcacggcttggtttggttcaaggataaaaggggtgccccacattatttccatgacacaaatgcaaaaaatgatgatttggaaactttatgcaaaactggtcatgcatgcgcctatgcagacgctcaagtgtcagatttttatggtcatgtgacgctagggctcatgattcatttcctctattttaaatcaacccaatgtttccaaaatatgttcttttatcaatttgtgcattcatccgagtccatttcgggcgtccggggaaattccacagtattcacccttcaagtgtagacacatttttttcataaactagttatgatcaatga

SEQ ID NO: 286460 - DNA, 360 bp, Glycine max
  unsure (1)..(360): unsure at all n locations
ngtgtaaattactcggaattggtaactacattctttatgctgagagttctactgaattttgtcgaccttcggaccagacttataaaaatagaaccaagcgatttggattagagaaaaaaattacaaaaatcacacaagttggatgaaaaatcacagtccaggaaaataacagagaaaaggaagtgcgcttgttgttttagctcataattttttctataattggagcctactttataccactcctagttctgaaacttcaattgataataattatgaaaacaagtgcccaaaatagaggtgtcttgagtctttatttcgatcttctttgatagttgttctactctactctatagcctttct

SEQ ID NO: 286461 - DNA, 374 bp, Glycine max
  unsure (1)..(374): unsure at all n locations
tgcttataagaacaaaattgcctcaatcatttccaaatatgcatgtgaattaagacgcatcaacaagaatcaagccaaggctattgtgcaagcaatcaatggggcaaaacacaccaaatgattatgatgatggatggctcanattctcacaaaggtaaaatcatcactttcaaattgagctttcaaaactatcatgacatgtagagaagaatcaaggatttcaagtcacaaaatgtcaagaacttttattttcaaaacaattacccatttcttgaacatatcctataattcaaagaaaaacatgcaaagtcgtacgtgcacacaaaattgacccanaatattaaactataaatccgacgaaactaataacatta

SEQ ID NO: 286462 - DNA, 356 bp, Glycine max
catatccaaggctgatggatcgggttaaactccttcttccatggcttattcgctactggacggcgcctcctacatacctcttctgattagacttccggtgcatctccatggtggaaaaatatcattaagggtcctcattgaagctcaaagatccgacctccatagaagccctacaagcaagcttccatcgagctctctatagcatcactggcctaatctacttaaacactgtaatccaaagcccttacggagtagatagcatcatgcgcattgactcaagtgcaagcacaaaacttatgagccatgaccctgcaataggtctattgatcctaaaaatagccatatcaatgtgcatc

SEQ ID NO: 286463 - DNA, 371 bp, Glycine max
agctttaacctcatcgtctctcacagtctttagatttgggagccaatccaatccttgctttcggactctcagccacttatgatagccggcgatgaacccattactgcttcccctaagctctctgtcctttcttcacgccgcatcccatgccttgcgaactccttggagtaccctcgcgttatggtcactgaaacctcgtgcgatgaaaggcgtgatgctttcgtctaatggcgctcctctcatggggcagccaagctgtcttatggcgaggacgggattatagttaatacaaccgcttgttcccatcaagggaacatttggacatccttcgcatgaagatggaatcttgattcttccgttcttctagcgag

SEQ ID NO: 286464 - DNA, 373 bp, Glycine max
acaacatccaagcaacacaacattcacacagtttaagctatcacagcccagcaaaacaaagcagaggcagacaactctgtcaaaacaccaaccaaaaatgacagctggacccactcaaagaccccagtaacaagtccttcgatccaatttgttaaccgccggatcgactccaaaagattactggaagtctatagagcataagcctacattgtgaccgaagggatctactagcaaacatccataactcattttacattactctttccacaaccagcaaaatacatggatttgtctgcacttgcgcagaagtctgctgcacaattgtacagcggaatctgcacaaagagtatatttcgaaaaccacactttccct

SEQ ID NO: 286465 - DNA, 372 bp, Glycine max
  unsure (1)..(372): unsure at all n locations
agcttgccatgatgcttggaatagtttatcctttgaagataaccataaccatgatctgatttttaccaactccatcaccttttcatggcctttactgccattattaaagataatggagtttctatgaagccaaataatccaactcattgtgcaccacacaacttcccatctttgatttgcaattgatccaactctcagtatatagtgctatagatagtgatcctgcggttggttatgttgagctcccatgactcccaaccatctaaaacacaaagaccacacttcctgtgaaaaagtgcaaccgacgaagagatgttgtacactntccaaatgctgagagcacaaggcgcacaaatagttgttgtttggtcg

SEQ ID NO: 286466 - DNA, 410 bp, Glycine max
tgagatgaggaagtgttgaagggtgaaacttccttcttttattgttgaccacagagtggtacctggagatatgtcgcgggggtcaggagaccttggggacgtcaggtggggtgctattgcccaaaaccaagcttgaccaatcccgacccaacccgggcatagtcggtcagtgagaacctgtgatgtacctaagcaggcgagctcctggcagtcaacagataaaaggaaaacaagaccacaaagcaaggaggcttgtggtggctggccagctgtgaaacttgattgatatgtgagatatggtctctggtaatcgattaccaagggtgggtaatcgattacaaggcttaaaaatgaagacagggggctaagatggtctctggtaatcgattaccaggggatgtaatcgatta

SEQ ID NO: 286467 - DNA, 372 bp, Glycine max
  unsure (1)..(372): unsure at all n locations
agctttaagttgcaattgtgttccatgatttcaacataattgtaaatatacatcttaatgggtcctcttccctcttccattgcttcatcattttaagtaaatttgttgttcttctagccttcaaaaatcgaatatggtttaatcttactcgcctcattttgaaagtattatcaaacctatcttgttcaaaaaagtgtgtcaacatttaccttgtataaggctccgacctgcacgctgcattgattgtgatggttctattaaattaactttntctaaagattttggccaaacttcttgcagtgccctacatcatcagatttganaggcaatanaaaagttcaaaaacattaataaaattataatatcaaagtt

SEQ ID NO: 286468 - DNA, 348 bp, Glycine max
  unsure (1)..(348): unsure at all n locations
aacatctccagtgttaattttgcccgaccctaagagaccatttgaagtgtattgtgatgcaagcgggcaaggcttggggtgtgtgttaatgcaagagggaagaatagtggcttatgcttcacgccaattgcgtcctcgtgaagttaactatccgacccatgatttggaactagcagctatggtctttgccttaaagatttggaggcattatttataccgtactggttttgaagttttcagtgatcacaagagtctcaaatacttgtttgatcagaacgaactcaatatgaggcaatgaagatggatggagttcctcaaggattatgattntggtctttcctaccatcc

SEQ ID NO: 286469 - DNA, 369 bp, Glycine max
  unsure (1)..(369): unsure at all n locations
tatcttcggggacaggcgtgggtttgtttcagtgaagtcactgctgcaagcaatgcagtgcgacaaatgcaaaacttccctttctatgacaaacctatggtaattgttagattacacttatctagtatttattattacaccgaaacttatgattctgattcatatgtaattacctaatggtaatcaacttatagtgctgttgataatttctttacagttctgttcataactctattatatcttgtaccaaactttnggaaccatttctagtaaccaatgttatcttactgttcttttccccttttatcttgtatgttctagattctcttacttggctactagggatttatgttcgtgcccaaaaaatac

SEQ ID NO: 286470 - DNA, 414 bp, Glycine max
tgtgaaggaataccttgaagataattccaaaccattagtaattgaccgtaactttgtgattgatgcgctaccttcgggaaaaatcaatgaccttcgcaaaaatataaagctggtaatgggcgttgggtttgcaaaggagtgctacgaggtgtactgtaactggaggagggaaagcttaaaggagtgcttaataaatttattaggcttgccagagattaatgtggaggagaaaagtagattgttggaatttgaaaattacattcttagaagacgtattgaggctatccaggtcgctcttggaacactaattcccagtgagcgacgactctgtgatagcgtcttccaggggttctcttatgtggctgatctttgtttcactgatatttgtcggggaacctcaattcaattgctgaa

SEQ ID NO: 286471 - DNA, 370 bp, Glycine max
ttcttggaggattatggggtacccatcacatgtggtactaggtggcggtcgggcgatggtgcaagacaattctccacatccacaaatcacgtataaacccaccatcccttgttgcccacctccaactgagctcacgtactcccacgtagcccttatccttggtcctctcaacgcagggtccccatcaatcctcccaagcttccacaacatccaagaaattcaacatccaatcatcacaaactgacaaaaccaagcaaaacagggcaaaggcagaaaactctgcccaaaactcaaaccaaaaatcacagcttgttctcacttaaagaccccagtaacatttccttctttgcaattcgttcaccgttggatc

SEQ ID NO: 286472 - DNA, 413 bp, Glycine max
  unsure (1)..(413): unsure at all n locations
tatccttatggcttgccttcggacttcactcccctgtgccctctggaagatttaagccaagcccctacttctgaggggcaactcccgccttatgacgactatcccgggcaagacgatgaggaaggagatacccatctcggccccctgctccacctcaaagatccgtccccacatgaactaccccaaccgaacatagtctgccatatcccggcctcacccacacccgtaaaagaatctgttcccttcgcggaagataagggaaagatagaggcgcttgaagagaggttaagagcagtcgtgggccttggcaattacccattcttagatttagcggatttatgtctcgtgcccaatatcgtcattcctcccaagttcanagtgccagactttgatacgtacaaagggacgacatg

SEQ ID NO: 286473 - DNA, 374 bp, Glycine max
tatcttatgatgattcattctattactccttctcacagtggtgcctcaacaccgaagcttgcatattaggtgtataatttgtagcatggagagaggtgggaaagacgaataactgtaaggtcattgtatggttttttttttggtggatacaggggattctagtatacatacagactacatacatatatagtacatatggtacattgatagtgggtctttcattgcttttgttgcctttgggtatagtttctttggctataaccaatgttatatttgcaagatgtacttgagtacttcttggttagtatactgtgtacttgggtacttcatgtgcaatgttttctctttcagaataatttatagtcaacaagatt

SEQ ID NO: 286474 - DNA, 424 bp, Glycine max
tatagccccaagaccattaaacatagccaacaatgtagaactaatcgtttttgaatctgactttctttcatatggcctataaggtcacgcctctactggcaacaacaaatttgcaagtgtttaatgcttggctttttaccaatccaaagttcataaggggtttcgttaactgctttacttgacaccctattaaggatgtaaagtgtggtctttaatgcttatccctaaagtgactctgacaaagaagaatgactaatcatactcctcatcatattcttaagtgcaaaagttttcccgacatagtgtattgcggaacaatttcagactctttgaggaaaagtgcaaaaggccccagacgttattctattaatccaccatatcttccatagtactcaccaccacgatcagatgtggtagccttaat

SEQ ID NO: 286475 - DNA, 381 bp, Glycine max
tgcttgcccttcttgcacgatctgcactaagacaagaggggagggaaataataactactgagtttaaacagcatcttctaaccccaaaaccaaaagaagtttcacattgtgcttctttttatctgccatattagttgcattcaacttgcaaataagagagaaattacaagtctgcaaacatactcatactcctctggcatgtttttcttgatttctgcgttatgtcataccatcacacacccctgcgtttatctcatcaagtgcacgccattgtatctaacttatagatagtaagtcaaaatgtgtacatttgtcaacctatttctcgtgaaataaatagcatgactgtacacaaccataaacttaagtatgacactaacc

SEQ ID NO: 286476 - DNA, 433 bp, Glycine max
tagacgcttagcccttaatgcaacctatattatttttttaacatcatactaactaaacaaagaaccaacaatcattaacaacaactaacgtaagtaatcaaaataaaactttctaagtcctctaccctagggttcaaaagcgaaaatcaacaagagagggaaaaaagataacttacttggaattgcaagagtagagtggacaatgaaaggcacgtagagtgatgaatagtgcaaatagaaggtggaatgagatgcagttatatgaatgaaaatgtaactgcctaaggcagttatgatcttcttttgcagtttcgatttgctcgctaagcgcgagtgtctcgctaagcgagaactctgtgacattagaattttcagaatcggaattcatgcgcttagtgagatagactcgcttagcccaattctaaaatatgtg

SEQ ID NO: 286477 - DNA, 342 bp, Glycine max
ttcttacgaaagttcttctgattctgttatacattttttactttatggcatgagatgaagtgcaaagattggacctcttgctagttgttattaatgaatacttaaacacttatgcgtgagggaaacaatggtcatgagactgtggtttaagcttctttccttgatatctatcttatgcctaacttcatctaatcgttcaggctacattttattcttttctttggataactacatgccttgtaaaagagaagtgatgaggtgcattacttcattctcttatcatgcaatcatgaactcttgttgcatacacctttgtacatagtcactgcatgttattgtcac

SEQ ID NO: 286478 - DNA, 511 bp, Glycine max
  unsure (1)..(511): unsure at all n locations
tactcgtcctangatgcctgcacggaaggcgatgagatgaatgtacgcgttacannncaccccccaagacaggttgaactggaacgctgaaacatggaaacccacggcgctggaccacaaggagaaaagcgtgtcaaggatgaccctttgaccagcaggaaataggctctaagaacatgagactccaacttaacaccaaggacgcggcccccttttaagcaagacatacacatcccgctacggaatatcccgggggaatgctgttccctcttgatccaagctacccgaacatagtctgccatacaccagaaagcacccacgacagaaaaataagcgagtcacttcgtggataaactcggaacacaaccagcgcaacgaagaacgtgccaagcgtatgggtgacggataaattctcgcttcaaatgaaacaaaagccagcgccgtaacaattgggcaagactacccagccccataagccagaagtcaaatgactaactgcctgcacatctag

SEQ ID NO: 286479 - DNA, 379 bp, Glycine max
tgcttgtttagttatgtctcgtatcggcttaatcaattacagtcttctcgtaatctattacatagttgttctgagacaatgactgatttattcataagtctctgctttaatcgattaccatgttatataatcgattacttctctttctttaagtacttcaaaagtgaacaagaacactctaatcgattacgctgaatatctaattgattacattgttcttgtgttgtttccaagtgtttggaagaacactttaatcaattaaaaagataatctattcgattgcttcattgaattaatcaattaccttatagatttaatcgattataggcagttataactgacttctctataaataacttgcctgtgttctcttcataat

SEQ ID NO: 286480 - DNA, 219 bp, Glycine max
gccctactataaaaagtgaccaaaaaacaagcatacattccaaacgtactaaggtgcctcctactcacgcttttctaacgtcttgagctagactcctgatgactcgccggtcacagacctagtacgttgcttacatttggctttggatggggacacctattggtcgtccatgtgtcatatgcaactctctaacctttacatggatgatctgatgtgaac

SEQ ID NO: 286481 - DNA, 292 bp, Glycine max
tgcttgcttttgattaatccttagttctgtaacaagctttgaacaatatacttggccttcatttaactgtctttgcgcttggcggacacgctcaacaaagtactttcgacacctactgtacgttgatttgaccaatgctgttatgggaatgtttcgacaatacttcaaaaccttattgatacattctgaaaggttggttgtgatgtggccatatcgacgtccttctctatcataagccatcgtccattgttcctttgaaattctatcaacccatgtggctatggatggactc

SEQ ID NO: 286482 - DNA, 662 bp, Glycine max
  unsure (1)..(662): unsure at all n locations
acaccctgcgctctcacnttctgcatcggtacgcgaagtctcttagtttatgcctgtttncggctcaacncccccccncccagaggagagttganacatagaatacgcaagagacactatanaacactacaagcatagtgacagcgctactataagtgttagacagcggacgacttgcaactctctgtgactgattgatgaccttacatcgttatgaggcagatcatattgaatctcgatacataaactaggcgactgtgatgtcctagagttgttgcttgcaaagatacgatagaaatgttcggcgctatagctcgccgtgcagcattagctggcactcttgcaatgctacactctaaaagacatactacagtgtgatatactattaatcaacatagactcttagctgaactagagcatgaacagattctaaacatacgagaactgagaaataaaaagaattgacataatatacgacgagaccattaaacaccatttgatagatcaagcattatatactgtatatgtagagcacacgagagatgccatttgtctctacattcgcggtcactcataggatgctattgaatcacaatcacaatctattgactgatcgattgacgacgacaatactgaatacgagaagtgccttactgaaggcg

SEQ ID NO: 286483 - DNA, 365 bp, Glycine max
tgcttgcccttcttgcacgatctgtactaggaccagaggggatgggcgaagaaaatgctgggtgggcccatatttaaggagagtgagccggtggtacggaagtcaactcatgtgtggaaaccgagagtcattggccaagcttgtaaaattacaaacggatccatgcatgaccaaatgggtggcgagctgaagtatgaggcaaaggtggatgatatgaagcgtctaagtaaagctatggtcggcgttgtgatacatttcggccaatcttatcttatacaagaacattttgctatgcaaggggtgtctacaactttagttactcccttaggagctaacatggttctcttagaatgtagtgttgatga

SEQ ID NO: 286484 - DNA, 346 bp, Glycine max
taccagaacagcccatgcgggcaccgagttttcattaaaaatgagtaatgcatcacaaaattaactagaatttttattaaaaaaaatcaaatactaccgcgtgagatgaacaatttataaaattgacaaaaataatgatgaaactctgaattttattcttctgtggaccactttatttgattttgagagtatgctctgccaaactcatctcattcgattttactaatagactaatatctattttgttatcagatactttggggatgaaaaataaacaaataaacacagtgctactgctaccactacatacgagaaaaggaaatgatataaagcggaatccgagaga

SEQ ID NO: 286485 - DNA, 315 bp, Glycine max
cttcttctaaccaaatggtcttaccttggattaattcctttgatagccctttttaaccttgtttccctttccttggtttgaagctcactacaagccttaagtgaaaaaccatgatattaccatatccttaacgaattttggagctttggaattggtttggggaataagtgtgggggggttttgtttcattggacaacttgtttggtggctatgcttcatgatgtattttgggccatacttgatgtacattgcatattgggtaaatgttggacatgctgaatgaaatgttggttctcacaggcaaaaaaaaaaaaa

SEQ ID NO: 286486 - DNA, 376 bp, Glycine max
  unsure (1)..(376): unsure at all n locations
aactcaagcttgtaggattagggggtatacatcacatgtgggactttgnggcggtcgggagatggtgcaaaacaattttccacatccactaatcacggataaacccaccattccctggtgcccacctccaactgagctcacgtactctcacactagcccttattctagtacctctcaatgccgggtccccataaatcctccgaagcttcgacaacatccaagtaatgtaacgtccaatcatcacgaactaacacagccaataaaacagggcaaaggcaaaaaactctgccaaaacacaaaccaatatcacagtttttcacattcaaataccccagtagcatgctcttcattcatattcgttaaccgttggatcgac

SEQ ID NO: 286487 - DNA, 370 bp, Glycine max
ttctttttctttatgattttgatctgaagctattgtatggcattcacaaggcttcatcttctggcgccatgaagcttgaacccaaagcttttggtggcaaatttcctgctcaggttagtctctttcattttcctgtctaattaaattatcctgatcctgtcgttgattaatatgctgatggctcatggctaacaccttcaggtgcggttcaaaattgcttctgattgtgttccattacccgaaagcattttcaaaaaagccatcaaggataattataatgaaaagcacaagttcagaacagaacttaccgttagacaagtaagaattaaatgtaacctctggtggcctgtctgtctgtttctatcattct

SEQ ID NO: 286488 - DNA, 430 bp, Glycine max
  unsure (1)..(430): unsure at all n locations
ctatanagactcagcttgtaaaccttagaggtgatcttagtttgaagattttacccttttgggtcaaaacactctaaatattagtccaattaatcaacatgacgaagcacagtttcttcacaaataatccaaagctctttatgaaataaaaaaaaaattacagctagaaataaactattgaaattgctttgcaccttgatccagacaacaaggccattggattcactgccaataaatttcagtccataaaatgctttctgactgcactgctgtctaagctctcaagccaccaacaccgattcagacccaccttgagctcctgtgagagctatgtaattattgcttacaatgaatattactcaacatgtattttattattggtcaaaatgaatatatcttcataaacgatatgcacatcaatctagcatat

SEQ ID NO: 286489 - DNA, 368 bp, Glycine max
tttcttgtgagaatagtaaaaaaatcacggagatttatttttaaacacttggagaattaaaaacaagaacggattaaaattacctgggtgtgttcctctttgtattaccatcctctagacagcctgttgaaaattttagaggcttgtatttacgtattttgctttctctcaccacaagttccgtaatcaccctaaaagtaagatattgctcctttcttaagagtgaaagtccattctttctcattttctactaatttatctctacagagaaagcattttatgctttgaagagaatgcaaccaaagacaagaaagattgttgatcgtcgtgcctcaaaatgtccgaagataaggtattgaaagattact

SEQ ID NO: 286490 - DNA, 52 bp, Glycine max
caagacacggcgcggaaagagagaaacccaagtcccgacacgagaaggcaca

SEQ ID NO: 286491 - DNA, 353 bp, Glycine max
ctaacattgaatttagagcgtctcgttatattatttgtctctatcagacatgcgagtgtgaggtgattggcgatagaatgtcctcggaggttcagaagtgaatttccagcgtggacatatattacaggactcaatcaaacatccgggcgagaagttattgctgttagattagccttcagcttcacaattcttttgcgatcgatctacatattacgggactgtatcagacatctgcgtaaaaagtggttgtggtttggaatttgtcgaaagcttagacattatttttgcacgacttcgcacattgatgattagaattgggccatacaggtaaaagggtatggtcggttgaatat

SEQ ID NO: 286492 - DNA, 372 bp, Glycine max
ggtgtagcgctgcgatctactaatatatggaactttccattgctttgcctgagaataacaattggttgaccacaacagcgctgggggcggcaacggacaatggactttcaaataaacatgttggacatgaacaaacattatatcatgtgctgaccgcgccaaacgaaccagcgaagacattgcataattgatacactaactatattccatgtacctgaacaaaatgatttccaaacacgtgaccgacacatatgatgcggtggccataacagtcacgtggtggttgactactaagagggaaaaatgacatgctttgttgctgagacaactatacaaggatcactctttaccgggagcaatcacatatcccat

SEQ ID NO: 286493 - DNA, 370 bp, Glycine max
tttcttgaataacctcgggatattgaagaaaacttgagcaaaatgaagaaaatttggaagtgtggtgtttagcatcaaataagatgaaaaaccaaatttgttgttatctttggttggaagagagaatgtgactagaattaacctatatatggtaaaaaaaagtgtagtacgttaataaagattataaatatcttatttattttaattataaatctttggtattatccacttaagttacattattagataaatagtataaaataatatttaatcatgttaaataaaggtttgataaattgggtctcccatggtataattataagttgacttaagtatatttaaaataaaattatatcaccagtttatccta

SEQ ID NO: 286494 - DNA, 414 bp, Glycine max
  unsure (1)..(414): unsure at all n locations
taaagttgttaacccttgctaactccatatgttagtttgtcgngcccatggaaatacccacaacatgcataagttttagtcaaatattttagctggttgaaaaggtaatgaaatggaagaaaagcacgagaacataccttgaagtaacagtcccaaaaggaaaagcatagtgtcctcgatatgactttctttatggcttttcctcttcttcgtggcgttggaagacactgtgtgatggggggttttgttttcaagagattgcggttgaaggagagggcgacgtaagaacgaaacgacggcgtaagactacggttgaaggagagggggcgacaacggacgagagggcgacgtatgaatgaaagaacctttgtgggctatgttaaaaagtaaaaagatatacaaagacggtctttc

SEQ ID NO: 286495 - DNA, 380 bp, Glycine max
tgcttttcaaagatgtacttaaccgggtccatccttgatatcaaccaggtggtatggctcagcatgtattgtcttaggcggtgggacgcccagactaaagcacaacacgttctttcgagtagggagtaattcatttcacgggccgtgaacttcttactcaagttgtagacagcgcgctctctcttcccggactcatcatgttgccccagcatacatcccatcgactcgtccaaaatcgtcatatacaagatgagaggccttccgggcactggcggcataagcacaggagggttcatgagatactgtttgatccttccaaacgcttcttgacaatcctcgttccagcaaacggtttggttcttgcgtaagagtttgaacag

SEQ ID NO: 286496 - DNA, 428 bp, Glycine max
tagcagctaactcttgaggatcaggcctcaagagtgaaaatctataataagcacaaagattttccccctcttccagaatcacttgggtcttcagaaaagtgtttaaagtatcttcatcaaatttgatcagatgacctctgaccctcacctgcttaagtgacttgtcttctgggtcatagaggttggcataaaattccttcactatggcaacatcaatgttgccttcatcaaaattagtcaattcttcatcccatttccttctctcgagttcctctttgaaatcatcaaactcagtgtaatatactaccacattcctctctggaagcagtttcctaggcacaattatatcagtgtacctctcccaagcttcttgagaatgaaacctagatctgtcatatcttgcttgggtagaggaagaagcagaagac

SEQ ID NO: 286497 - DNA, 379 bp, Glycine max
ttcttcatcattcaatttcgagcgtctagatatattacaggactcaatcaaacatccgagtaaaatgttactgtcgtttaaatatgcttagctctccagctttaaatttcgagcgtctcgatatatgacgggactatatcagacatccgagtaaaaagttattgtcatttgaatttgcttagagattcaacattcatcttcgagtgtctcgttatattacgggactcaattatacattcgagtaaaaagttattgtcgcttgaattttctcagagcttcaacaatcaatttcgagcgtctcgatatattacgggactcaatcaggcatccgagtaaaaagttattgtcgtttgaattggctcagagcttcaacattcaa

SEQ ID NO: 286498 - DNA, 433 bp, Glycine max
  unsure (1)..(433): unsure at all n locations
tcacaccacagcaacacaaaatctaggtgtccaaaacccctcattttaatggattctctaggcttgagaagtgaaatttagaatgaggtaaatttgaagcaaactctcacctcacacaagtccataacctcaatctaaacttgctcaaactgaatttacacctaaaattccaccgaatcaaaatttgactcttcaacacccaattttgccctagaaatggctctttattcactttgatcatttgtttttctctctagcacaggccaaactttctcccaagtcctaaatgacatttcaagctaatattaacnnnngagaatcttcatataccacagagttcanacntnnccnnncnnccctcaaagcctcactctttttgcactcataacatcacattctcactttctaaccctacgttaactctaccattcat

SEQ ID NO: 286499 - DNA, 378 bp, Glycine max
tgcttgccatggtggtggcagacctcgaggctcaactaaaggagtcgaagtccaggctggaggagtctgagctgcggctgttcatggagatagaggttaataggaagcttgaagaggagctgctgatgtacaagaaggagactgtggaacagcatgaaaagggctttcacaaggtcgctaggtaggtcgggttctttgtcaaggcccttaacttgggtctttttgaccctttcaaggacatgaaggacggtgttctgcttgacgaggaagatattgctgctgaggatgacgctggtgacgagcacagcgatgattgcaatgtttacgttgccttttcgttatttccttctttgttgattttggctaccatggctatgt

SEQ ID NO: 286500 - DNA, 328 bp, Glycine max
gatgatgaatcacgttgatgcaagtcgtcttgatgatgttatagatgttgacaaacaggccacagaatgattacaagattctgctcccatgttcaggatcaagatgattttcacgtttcgtgatgggaaatcaggacgattcccgactcaggagaagtttgatctcaagattcaacagagggacccttctatgattctcgataagagatctagacgacttcgcaagggaagtagtgaactgattgttcagaggtctagcataccacagtttgcggttgaaaggaatgtgtctcataatattctaacttacccgagattctactctctg

SEQ ID NO: 286501 - DNA, 380 bp, Glycine max
tgcttgagatgaggaagtgtagaagggtgaaacttcttgcttttattcgttgaccacagagtggtacctggagatatgtcacgggggtcaggagatcttggggacgtcaggtggggtgctattgcccaaaaccaagcttgaccaatcccgacccaacccgggcatagtcagccagtgagaacctgtgatgtacctaaacatgcgaggtcctgacagtcaacagataaaaggaacaaagaccacaaagcaaggaggcttgtgtggtggctggccagctgtggactttgattgatatatgggatatggcctctggtaatcgattaccaagggtgggtaatcgattacaacgcttataaatgaagacaagagactaagatggt

SEQ ID NO: 286502 - DNA, 434 bp, Glycine max
ctcagcttgtccaagtagccttgggcatggcatggagggaatagccattgtcaacaagcactgtggccactatgtggtctaaacatttgacggatacatgcgaggctctgttggccgtgacgttgttgattatgcccctaaaacactccatacatatgtcttgagctatgtgggcttcgctcaaaatcttgaccaataacgctcgatgaggctcaaagttcataagcagtcccaacagatagatcctagctggggttttatttatttgtttaatcaccttgaactcgctctgctggatgattctcacgaactcggttgctacatctgaggatattccctttttgctgaagatgacctctatcttggaaaaccttccaaccgggacctcgtcattagaaatcaagcccgccttatcactctcttccacgcccgcc

SEQ ID NO: 286503 - DNA, 379 bp, Glycine max
tgctttgataaatgcccaaactccctctccatttctgatttcaggcttaaataggtggtctcgttggtgttctcatgcttagcgtgactctggctcgcttagcacacataagtgaatttcagcttatcgcgcgtcttctcgcttatcgaaagcatgcaagcagtgcgcttagcgggatgagccctcgcttagcgcgtgtgtccagctcatccttcttccagattcttcctcacgctcagccgtaggagtggtgcactcagcggatggctcgctaagccggcagattggcttagcgagaagctaaaaattagcacttcacaaacttgcctaattaacctgaaattataaggagatgattattaaatacacaacatgtgag

SEQ ID NO: 286504 - DNA, 408 bp, Glycine max
  unsure (1)..(408): unsure at all n locations
nggactgtgctagagaaaacaacaaatgaccaatgtgaaccttgagccatttctagggcaaaattgggtgttgaagagtcaaattttgatttggcggaattttaggtgtaaatccagtttggacaagtctaaattgatgttatagacttgtgtgaggtgagagtttgcttcaaatttgtcccattctcaatttcacttctaaagcctagaaaatccattaaattgaggggttttggacacctacattttgtgttgctgtggtttgaagcttgactttggtttatacatgattgatacatgatttgggacttggaggatttgatttgggcaagattggatgaagggaagtgtgattttcgaaatctgcacttatgcagaattctgctgtcaaaataggtgcagcaagat

SEQ ID NO: 286505 - DNA, 368 bp, Glycine max
agcttgtgaaaacaaaaaagtgcaacacatttgatatagtttataggcttctgaagttggctctagtcttgccagtagcaagtgcaagtgtgaaacgtgttttttcagctatgaagtttgtgaagagtcaactatgtaacaaaatggatgatcaatggttaaataatcgtcttgtaacttttatagaaagagatgttcttggaacaatcaacaatgaagttattttagctcattttcaaaaaatggatagtagacgatttttattgtaaatacatttccttaaacaacattatttcttattttcaatatattttagtctattagttcttttatattttacccacactgatatttattgtctggatccg

SEQ ID NO: 286506 - DNA, 418 bp, Glycine max
tcattagagaatcacaataacaacaatactaccatatcgtttaccaccactatcaatgtcagagagcacattctcagacataaagcataggcgttgtgatgccgtcaccacctcacccgcgtttcgtcttcttgaaaccaaatatggcttatttgtcacgaggtatggagaagatgaaacacgactaaggtgatgacagcataacgctggaatgcgatgaacagagaaagagtgagtcactgaccagaaacggagaacaccctaagaggaagaaagagagaacaacaatgcattggcgagaagatggaagagaaaatggaaatggaaagcgtgagaagaggatgaaggagaataggcgagaaatactaatggagagacgacgacaatgccacaacgcttggacgacgatgagagagtg

SEQ ID NO: 286507 - DNA, 200 bp, Glycine max
gtaaagggaagccatcgtgggaaggaagggcggtggtcaaagctcgcggttgagacaagaaagtgaaggaagcccgccctgccacataagtagaagctttataagcgcgggtctgggagacgaaggtcaagtggtcgcaatatacgaagatgatgttccgagtacattggatttggtacgaccttgccctcctgatttca

SEQ ID NO: 286508 - DNA, 347 bp, Glycine max
  unsure (1)..(347): unsure at all n locations
ctcncactcgataatggagacacatgaacagcgctttgcaatgacattcacggagctccaaataagagaggtatattgaggaatgtcttgagggtcctctcttatgcaatcatggaacacagctccaaactcgaaagtggaggacacatgaacaaccctaagcaataacattcatgtggctctggaacaggatgagaatggacgattgacttgagggtcctctcttaggcaatcatggaacacagctccaaactcgaaagtggaggacacatgaacagccctaagcaataacattcatgtggctccggaaccggatgataatggaggattgccttcacggacctctc

SEQ ID NO: 286509 - DNA, 372 bp, Glycine max
  unsure (1)..(372): unsure at all n locations
ttgcttggaccctcaagaaattttggtgctactattgaacaaccttccaacagtacaagttctgatcttaatattgtcttagtttctcaagttgcacagccttctgatgctcctttgcagttttcaacttctttcctttcttttgctagtgtttcaaatggaaaaaatgagggtttggatgttggaatctcacgtgaggatgagatggaggaagaagctcctgagacaagtaacaacacaactgaacttattttaagaagctntggcgggtttgcgattaactcaaaccctaacccatcaatgcctaagacaaatccttttgggggttcatttaataatttagcaacaagtttatcatgctctacagttaca

SEQ ID NO: 286510 - DNA, 413 bp, Glycine max
tggatttccttttagtaaggaatctatccttccttatatggagccaaacctagtcccccttattaagaactagctcctttcctcctctattgcctttagttgaataaacctttgtttggttctctatttggttcttaaccctctcatgcaacttcttcacaaactatgacctacattccccttctttatgtataaaagaagtgtcaagtgggaagggaatgaggtctaagggtgttatgggattgaacccatagacaacctcaaaaggggattgctaggtggttctatgaacccccctattgtacgaaaattttacatgaggaatatactcatcccaagacttatggttgccttttagaagagcccttaaaagggtggataaagacctattcactacctctgttggcccctta

SEQ ID NO: 286511 - DNA, 375 bp, Glycine max
tgcttggaaggatgcttcaatggaggaaaagaaagagggagagaaagagagaggggggagcacgaaattgaaggaagaaaaagggagagaagttgaactttgagttgtgtctcacaagactctcattcatcaaagttacaacaagtgttacacatgcttctatttatagactaggtagcttccttgagaagatttcttgagaaaacttccttgagaagcttctttgagaaaacttccttgagaagctatagcttagctacacacacccctctcataactaagctcacctccttgagaagcttccttaagaagattcctaaagaagctagagcttagctacacatacctttctaatagctaagctcacctccttga

SEQ ID NO: 286512 - DNA, 412 bp, Glycine max
tcttttagaccttgaacaagcaatcaactcctctttataaccatgctatgtgctcgcgactggtccctttcttcccttcgcaacttgagatcactattgctaccccatagagctccgcgaaatttgttccggccatactcttccttgcgagccctcttggtctctcgttcaaaggctcttgcggtaattgcattctcttcccgtaacccggcacactccttccgaacgtgtgtagcagccaacttgaacttctccttggcgagtgttgcctttcctaactcgctttcgagagcttggacttcctcgtcctcttgcggtgcttcaaaattctcttcgctgacgacttttaacttggcgagccaatctaaacctcgtatgcgaactttcagccattcgtggacccaccaatgat

SEQ ID NO: 286513 - DNA, 360 bp, Glycine max
tgcttgtagaatggctagacatgatacatgtcagggtttggattggttcacggataaaagggatgccccacattatttccatgacacaaatgcaaaaatgatgatttggaaacttcatgcaaaactggtcatgcatgcacctatgtggacgctcaagtgtcaaatttttatggtcatgtgatgctaaggctcacgatctatttgctctattttaaatcaacccaatgtttccaaaatatgttcttttatcaatttgtgcattcatccgagttcatttcgggcgtccggagaaatttcacagcattcacccttgaggtgtagacacatttttcaaaaatttgttatgatcaatgaattttt

SEQ ID NO: 286514 - DNA, 420 bp, Glycine max
tcaaagtcaaaaactaaccgggtgaagatcgacttatgatgaataatgaatgaggaacgccaaagaatagcgaagaacgtccatggaattgatcacggaaacgtcacggaagcgttatggaagcgcctagacttggattttttccttctttcttattttcctcactaattttaagtgaaaactgaatatcctaagtgttgaaccccttccccttagcccaaaatgctattttatagctaaaatgagggaggtggttgccgcccagtctagctcagctcacctaatcgagctcagctctaccaagcgagctatgtagcttccacctgaagcaacctccctccagaatattctagatgggcctatgactacgtacacccccctatattgatcagttcacctccctttatcatatttttgtca

SEQ ID NO: 286515 - DNA, 344 bp, Glycine max
ttgcttgtctcagcgcttatgcgagacggagaccaacatgctggctatcattgccaagtaccaagaagagttaggtctagccgcggcccacgagcatatgattgcggacgaatatgcccaagtatacgcggaaaaagaggctagaggaagggtgatcgactctttacaccaagaggcaaccatgtggatggatcggattgctcttaccttgaacgggagtcaagaacttccctgattgttagccaaggccaaagcgatggcagacacctactccgcccccgaagagattcacgggcttctcggctattgtcagcatatgatagacttaatgggccacataatta

SEQ ID NO: 286516 - DNA, 398 bp, Glycine max
tgccacccagctcgcccaggcgagctaagttgctttctccagaagcaacaaccatctggaggaatcttctggacggcccaaatgggcctggttgctatttgcacccccatttttactaaatacaccccccttgcacttttttggtgattccttttttcgtaaagttacggaaacttacagattatgcaacgatacttgttttctttgcgtaattttacggaaccttgccgattacataatcattcccttttttgacttacggaatgttacggaacctcactaattgtgcaacgatgcttacttttgatttccggtgtgtcacggaaccttacggattgtgcatcaatactttctttcggttgtccgcacatcatggtacttcacaaattgcctaatga

SEQ ID NO: 286517 - DNA, 309 bp, Glycine max
tgcttgccgagctcaccgtgaattgagagacatggacactttggcacacctcatgtacgatcttaggatttattacctgttcttagcacataatacgtgtgacactacgagataaccctaaatcggtataggtcgatacaatatacactagttttattcataaatgttagtcgttttcacagacgaactctgtacagtgtctatcgctttagagtgtattgtatgaaagactcatgcccatgtttgcatatgatctagaactgcctgctataaggatgatatcaaaacggtactggtactgtataatga

SEQ ID NO: 286518 - DNA, 251 bp, Glycine max
ttggagatcttgctatcctacgactcgtggacaacctcatcgtgaagaggaagtcatcctgacagcatgagatgatattgacagtgattattatgctctctaaggggatgacacatcctcactgcgtgtatggcatgcatacttcatacatctctttcttgtgttgggcaggaagcttaccatatatggacacctaagctctctgttggggcatccttatcagtacgctgatgtaaatgactggaaagcca

SEQ ID NO: 286519 - DNA, 373 bp, Glycine max
atcttgagagatatacatacaagtgagatgagatgagaaagacaaccgaactgagtgagcttgagaattctaaaattctatgttttgagatgaaatttataattctctgtagttgattgaaatttcttattaaagttctccattttaatttcctttcaataaaaaaaaccaaaaaaaaaaaacttagcataatcaaatcccctaaaaattactttcccctcttaaaataccttatcaaaacaaactcattcaaccgctaccattcaccgtcaattttgacagttaaacggtctataaagttagttgttacattgttttctcattctttcaagttagttgttacactgctttctcattcccctgcatgtcaaat

SEQ ID NO: 286520 - DNA, 431 bp, Glycine max
  unsure (1)..(431): unsure at all n locations
tcttanattaagctcaatgaccgtggcaaaagatctcaggatgaaggacccaaatgcattaagttggtctattttaaaagtaaaattcacgtttgtcagaaataaaaaaaataaaataatagaaaaaaatctataaatttaaattttaagattttaaattaaatataatattaaattcatttgcataattactcataatatattgatctaaatcttccgagtgattaaccctgtgaaatcagaacacatcttccatatatgtgaatttgcgattatttaattttattctatatatattgagcataggttagtgttaaactgttagttaattaattaatcttgcacgacaccttatccatcaatgcgtaaaaatgggttgtaccaaaaacgaacgttcaactgagtcatcanagtccatatggtttcacgtt

SEQ ID NO: 286521 - DNA, 535 bp, Glycine max
  unsure (1)..(535): unsure at all n locations
ccaccgccccacgcgcggcagacgagagacttatcgataccacacccccccccccagcgaggatgacctgaaacgcagaaancaangacacacaagacgccacccggacncaagagacagagagggttttaccttttaacgccacatacccggccgagggacaattaggcacctgagaccctcgaagacacaaggctgtatctcgtcgcgcgcaagtaagatcccgcacaaatacgccgggctaatgggaccttcgcacagagacccaaagaacagggggcgaagtcgccaacaagcgcgggcacacgcgaccaaacgcaccgctcagaagaagacggcaaaaccgccaacgaccgcacgatacagcgataccgtgagagaaagagaccgcataccttaactgtcagtacatgagcaggcccatgacagaccactggatcggacaaaaagcgcggagcaaccaagcgcaacccctcaagtccgaagagaagggcgcgcgccatctatcagcgaggcacgaccacgaggtcctacg

SEQ ID NO: 286522 - DNA, 375 bp, Glycine max
agcttgtcactggagctgacccatcaactgccctaactctttcagactggtgattcctaggctcttgaccttgacttgatagaacctctttttaagtgaaggcgcctgactcgatcccacgctttactaaagggaaacaaaacctagtacgaatcaaaactctgacatctatcatgggtggaatggacgaatgcatgaagaaatgcatatgacacatatgcattttatgaatacgggagcctggggatatgtccccttcttagatacaacatttgggcagcacggcgcccgacgtacgtatttaagatggcgacacggaccctctgtcagtttgacaaagggaggggatcaagacgcaatccgtgcatgatgcat

SEQ ID NO: 286523 - DNA, 416 bp, Glycine max
gcacgggtctgggagacgaaggtcaagtggtcgcgatatacgaagatgatgttccgagtacattggatttggtacgaccatgccctcctgatttccagctgggaaattggcgagtggaggaacgccccggcatttatgcaacaagcataatgtaaacctttacggttttaaaagctctataggtgggcctaggctttagagtttttccttttgttaaggctttgtgtcttttgtttttgaatttataatacaaggacctttcttcatctgttcctacgtctctacccattctcattcatttgcatgtttacttctttatttctgaaacggaagatccgatgacgagtccctcgaaggtactaatacctgagacccgcttatcaactttgagcaagaaacgaatcacacagaagatg

SEQ ID NO: 286524 - DNA, 378 bp, Glycine max
agcttgtaggattatggggtacccatcacatgtggtactaggtggcggtcgggcgatggtgcacaacaagttttccacatccacaaatcgcgcataaacccaccatcccctgttgcccacctccaactgagctcacgtactcccacgtaacccatatcctcgtttctctcaacaccgggtccccatcaatcctcccaagcttctccaacatccaggtaaaacaacattcaaacagcacaaactatcacagccaagaaaacagggcaaggcagaaaactgtgcccaaagcaccaaccaaaatcacagcttttctcacttaaagaccccagtaacaattccttcgttccagttcgttaaccgttggattgactcgaaaat

SEQ ID NO: 286525 - DNA, 429 bp, Glycine max
tgcgctggttttattcaacttcctaggatcatgatcagctatgtgtgtcctactatgacttgagaaataaaagtgatcaaataacaagcagatatttaaaaggtactaagttgcctcctagtagcgcttctttaacgtcttgagctggacgcatgatgacttgtcggtcacggacctagtactttgcttacctttggtcttggacttggtcgcctatttgtcgaccatgtgtcgtaggcaacgctctaacctttttgtggataagctgaggtgaactctataggtggtggcggcgcgcttattgcccactgccggccatccccaggctgttgtggtgtttcgccctgcgcctgcctgggggcgcagtacttcttgatgaaagctcggttagtatgacttgatgaccttgctggaggtgacaggcacacc

SEQ ID NO: 286526 - DNA, 380 bp, Glycine max
  unsure (1)..(380): unsure at all n locations
agctttacagcagattttagtaatgacccactaacctagaattaaaataacttaatgccattaacctatggaattaaaacaaacttaatggctgagtgtaactgatattgtggcaaccaaaagtcacccccaacagccaacaagtcagccaccatttggtctcccaaaaggctgatgcctatgttgccaattgggcccttattacaacttgaactaaagcccttttagttgattaacccaaaacatatttttggccagccaactttacaaggattgggccattatttagacaaactaaacactctaanattgaaataaagtggtgtcatttagtcctcctccatttgggccatgatacaactcacaaccttggacttttc

SEQ ID NO: 286527 - DNA, 414 bp, Glycine max
actcaagcttcctctgcactaaaataagacattatcggccagcgagcgttttataaaagaaattgcgcagtgtcaactgaaaaatatcagtctggatacttcacgacagatgtcggctattgagttgtatattcaatcccttaatgaaatatgcatgatgtcggtaaggaaatgttcgatcgacgtcatgcggtgatgcttccttgttaacctggatcggccatctttcctggccgaagtcgacaggaatttttttcgatcaatatcggtgaaaaatatttttttgccgagatgggctaatgttttcctggcctaatcaatgcaaatatgccagtttctgccgaaacaaaactgcctgtgagctctcttaaaaaaacttagccgacctacattgtacattgtttatgcaacacc

SEQ ID NO: 286528 - DNA, 352 bp, Glycine max
  unsure (1)..(352): unsure at all n locations
acgtttgctttcttacattgagaaaccatgcatccagagtactgatagctactgaccttccgaatctattcaggaattgtttttgctgcatattattaaaggacatacatctcttctatttgcttcatgatcacgcccatttttcctcagcaatactctcgtaatgctgtgatatgaanttaagtgtctgtactacgattgaactttccatttgtcatcgttcacgatctctttcttaatatccaatgtcacgactgattatagagttcagaaatctcactctgttatatattctgaaatctgatgatagctaagaggtaatatcttatgggacaatcctttatttaatatt

SEQ ID NO: 286529 - DNA, 293 bp, Glycine max
gagaccaccggcatgactgactatatggtcaaagagaaccacaaatctgcgtaagaagaggaagatggctcacaaactactaaaggtcacagccatgaatcacctgtcacacgttctcctcctttatgcggcagccgcaaagattatgcttataagggcacaaactatcagcttgaagaagcagtatcacagatcgacttcgaacggtatagcaatatcctgcaagctagaggatctttgcttagctctcagcagaacaagatggaccctctcaactgttacttgaaagataa

SEQ ID NO: 286530 - DNA, 295 bp, Glycine max
  unsure (1)..(295): unsure at all n locations
cagctttcattcagaccggtggtggttcaaaatccccattataattaccaaccttaaaggggccagaactacttcattagaataatttgaagtccactaaattcaactaacaataccaataagtcccagtacaaaaccttttgatcaataaaaaactctaaactggttgattgaaaaataaagacagaattttattactaagcttgtgggcaaattggacccagggtttnactttttaatcttttttcgaactggtatgtttgaaagaaataccaaggggtctggttttctaagc

SEQ ID NO: 286531 - DNA, 404 bp, Glycine max
  unsure (1)..(404): unsure at all n locations
tagctttgtttatctttaatggcctaatgtttgacttaatagttttcagacattcccttcaagaccaacaaggttgggcttgtgagtctggaagacccaattctttttctcttcagtttttgttggatcggtacaaattgttaggctattggactttgcacaggaccaaaatacagggtgggtgtagactagattgtggtatacggacaaattacattttgaaaagtttattgtaaaatgtaatggaaagtacaagaaataatagtgagagtgaaggaaattttatccctaaactgtatctacatgatcatgcataagactgtatactgtatcgtccaaaaaattcgaaccaattaagttcaacccctctattcttaagtgaacttttgctttntatttattta

SEQ ID NO: 286532 - DNA, 374 bp, Glycine max
  unsure (1)..(374): unsure at all n locations
tgctttaatctaaacatgcatttagtgtttagaataaatatgttagcagatatagtaagttgttgcaactacggtatttttttttcctaatgcgataagcttgctattaaaaccaatcttgtgtatctatcaaaactcgtttgaactggagttggtttctccttttactgaggttaactagaataccatggtcgcgggtgtgaaaggaaaagtggtgctaaaaaatattcattgggattattattctataaattaataagactgtgtttggcaatgacatgacttgatttattcaatntatgatttataaatcagacaggaaaatggagcaatgaattacttatccagaatgttgaagcacctcaagtacaatg

SEQ ID NO: 286533 - DNA, 427 bp, Glycine max
  unsure (1)..(427): unsure at all n locations
ttgaaatgttagattctcagactcggattatggatgccacagctggagactgaatgttgatttgttatgtgtgcatatatagtcagttcttgatgtaaatttcattctttaggtatcatcttattggagattttaacattttatatgtacagtctagcaattttaacagcatatctcttgtagggctcatgttagactacaaagaagttaccctatctcactttagttntgctagcttctttctgatgttcaacactgggactttatgtccatattgatgttttgcttccttttggtatttgagagaagcaaaatttgatctaacttctatttaaccaaaagatataagcctctcatggaaaaactctctatgggtttgatgtactttgatcttaaacaagcgtccaacatatggttacctggttgg

SEQ ID NO: 286534 - DNA, 369 bp, Glycine max
tgcttctcttggaccttaggcaaatcctcaattcatccttcaagatcaaactgtctactcgtgattggtccctttcctctctccggagcttaagctcgttgttactgccccacagagcccctcggaatttgttccggccatgttcttccctacgggcccttttggtctcttgttctaaggccttggtggtggctatatttacgtctctcagttcggcattctcctttcggatcttaagagctgctgatttgaacttttctttgactatttgggctttctcgatttctgtcttgagggcctgcacctcttcgtcctcctccggaacttcaacttccacccactcagtggttctctaactcgggagccaat

SEQ ID NO: 286535 - DNA, 393 bp, Glycine max
tgcccaagcgagctaatgcttagctctgaaggaatgagctcacccaggcgagctggttgcttatgcatgaagccatttcatggccaatgcgagccaaatgctatcctgtgggagctagggtctataaaaatccaaaaaagacccttttgcccccttctttggtatctttttgttttcttgatcaaaacactaagtgattccttgcttcgtactggaactagcgccaaatatcataattcgactagcaagaatcaaaatatcatatcgaacgatattccccggacaaaattagggtctgacattttcccctctctacttatcttttattgaagatgaaaaggtgagtaaagataaagacactaatttcatttgagcaatcttgctatttgaaat

SEQ ID NO: 286536 - DNA, 369 bp, Glycine max
agcttctcaagaaggtgagcttagttattagaggggtgtgtgtagctaagctctagcttctcaaggaagttttctcaaagaagcttctcaaggaagttttctcaagaaagcttctcgaggaagctacctattctataaatagaagcatgtgtaacacttgttgtaactttgatgaatgaaagtcttatgagacacacttcaaagttctacttctctccctcttttattccttcaatttcgtgctccccccttctctctttcttttcctccattaaagcatcctcttgaagcttcttatccatggcacattcttggtggtgaagctccttcttccatggcttattccctagtggatggtgcctcccctct

SEQ ID NO: 286537 - DNA, 408 bp, Glycine max
  unsure (1)..(408): unsure at all n locations
tgtaagattatggggtacccatcacatgtggtactatgtggcggtcgggcgatggtgcacaacaagtttttccacatccacaaatcgcgcataaacccaccatcccctgttgcccacctacaactgagctgacgtactcccacgtagcccatatccgtgtttatctcaacaccgggtccccatcaatcctcccaagcttccccaacatccaattaattcaacatccaaatcatcacaaactaacaaaccaagcaaaacagggcaaaggcagaaaactctgcccaaaactcataccaaaatcacagctttttctcacttaaagaccccagtaacatttccttcgttccaattcgctaaccgtnggatcgacccgaaaatattactggaaatctctagtacataaggata

SEQ ID NO: 286538 - DNA, 370 bp, Glycine max
  unsure (1)..(370): unsure at all n locations
ttgcttcangctttgcatgttattgaaatgtcatatgaatttgaagaaaactttcatctcaacacacgacaacgtcaatgtcaatggataatagaatgacagcggaaatgaaaaaaaggtcaaactttctaaacgcatgagtgatattactattcttatgctgaatataaatgaaatcgctattgacaattgttaagatcccaacggataagtgctatctgagtccgacagtaatatctatgttttgtgcttctcataccctctctttaatttggagtatatgcatgcattcatttttctttattctgcatggtctatcattacctcataatatccatgtctttgaattagtaggccctgtgattcatgt

SEQ ID NO: 286539 - DNA, 410 bp, Glycine max
tgtggctcttcacgtctggaatatgaatgtagcatatagatccaaagacccttagatgctttgctgatggcttcttcccgttccaagcttcaattggagtcttgtcttttacagacttagttggacatctgctgagtatgtaaacatcagtgtatactgcttcagcccagaatgtgttatgtagtcccttcttcatgagcataaatctagccatctccataactgtgcgattctttctctcagacactccattttgttgaggagaatatgcgactgtaagatggcgctcaatgccttcatcctcacataatctatcgaactcgcgagaggtgtactctatgtcgcgacactgcttaatactttatcacctttcactttgattttaacaagggccttgaactgttagaata

SEQ ID NO: 286540 - DNA, 369 bp, Glycine max
  unsure (1)..(369): unsure at all n locations
agcttcattctacacctgaaaaagaggatgagctagctgcacaaaagagaaagcttcctgatcatgagggagctaacacaaattttcatgcaggtggaccttctttgagtagttctgacttgtagcagtctcctatccctcttccatttccacctagagcaattccaaacaaaaagatggaagaagtggaaaaggagatcttggagaccttcaggaaagtagaggtgaacatacctctgctagatgccatcaagcagattccaagatatgccaagtttctaaaggagctgtgcacccacaaaaggaagctcanaggcaatgaaaggattagcatgggcagaaatgtgtcagcattgataggtaaatcta

SEQ ID NO: 286541 - DNA, 347 bp, Glycine max
  unsure (1)..(347): unsure at all n locations
agtccttgatttagacatgattgatactngatttgtgacttgtacgattcaatctgggcaaaatcggatgagggaaagtgtgatttctaaaatctgcactttatgcagaattttgctgtcaaataggtgcagcacaattttggctctgtgcagaaagtgttgtgtatttgctggctgtggaaagagtagtacagattggtttctggacgctttctagcagatcccaacggtcataatgtagatttatgtgctagagacttccagtaaaattttcgagtcgatccaacggtttacgaattggaacgaacagaatattactggagtatttgagtgtgaaaagttgtgat

SEQ ID NO: 286542 - DNA, 371 bp, Glycine max
agcttcgtttatggcccaagctaacctccaaaaaattccctcgtgaaaagtatttagctttgaaaacacgagttacggtagcatcatgattggttgaaaattgctaaccttccctaacatggaaaagttagaaccataaagatgtcgaaaggaatatccttgctcatctttctgtttagacctcacctgatgtgacaaatactctcaactcatcaaattaatatctttgtttaccaagataaatcaagacccagagtcactcttatttcatcaattcttctagaatatatctctgtttcacacataaaatttgcattcgattggtacgtccaaatgaggtcacgaaggtaaagaattggtaagttcagatg

SEQ ID NO: 286543 - DNA, 433 bp, Glycine max
tgtgtaaaatgtaaagaatcactgaaggctggccaagtggaaagattattggcttgtccaaaatttatgatatattctgatcaggattatgaatctgactgagaatatcagtatcttagaaattaaggggaaattaattggattccctaatactgggtctcctattccttggctctatatagaccattaactttttgatcaagacattaacacgagatattttatatgcttttgtataatgcaagtgtaaccttagacactagacaaatgattttgacccatgaaaaaatatataatttttgttataggaccttgtgctaaatcctagatggacttatgtcacattgttccttaatttaatcataatgttgtattttctttttatttaaacagctctggcgtgtttgttagtgcttctgaggataaaacaggg

SEQ ID NO: 286544 - DNA, 358 bp, Glycine max
ttgtttagaggtgttgcacgaaatgaagaaatgttccagggattttgtactcaatccacccctcgggcaagtattagactagctcatgtttctatgatttgactcgagaaggacagacaaagagttgtgcctaatctgccaaaggaagattttaatgttttggtggacattgcactttcaaatccaattgaagtcgaaattttgtaccactgtagagttatcttattagttttgcaaccaagcataatctgaatgagtggtataaataccatttttattgccatcccaagcaaatgagtcatgaacatcatgatgaagaatagggtgatgagagataaaactttctatgacttcatca

SEQ ID NO: 286545 - DNA, 320 bp, Glycine max
ctcagcttcaaaatactctggaagagcgccaatttcaaaatttcaaaattgctattagcaccccccccatttttgatcagttcaccccccttctttcgtaatttatggaaaagttacgaaagtctataggacttgattttcttcttttatctcttctgtctcacccatattaagtgaaatatgcttatttacggttatggaaattttacagaagcattacgggtgtcccagaagcctcggaagcccattttttaacaaaacgggggatgtggtggccagcttcctccccattgcgtccttctgagattcactattctacc

SEQ ID NO: 286546 - DNA, 380 bp, Glycine max
tagcttataacttacaagccttcaactaacttatccgttagttttatcaaacataaccatactgaagtttcattagtttttttatttcatatatttactagcaacattctaaactctagtttccacaacttacttgtttagcttctaaaaattagtttttaaacatatttacataattctaaaaaaacaaattatgaaaatataaccttttacttatagagtataatttcaaaaattttaaatttagtcatgtatacaagagcatctttagaagaaagttttttttttcttttataaaaaaaggtcaaagctgtatttaaaaaaaaattcaaaaaaaaaaactcacatatatacgtcatcattgatcgaagccttactat

SEQ ID NO: 286547 - DNA, 411 bp, Glycine max
tctagattcatcctaactaaccctaacagaagctaaacaactaactgaagggtatcttagccttctaaccccttgatcatgctcacggctcactcgataagcttcacacgttccattctgcatggcttctgtcgtaaccttctggatacgctggggtggacctttcccttcgtggtctcgcactccttgcttcctgcacctcctttgctattgacaccccttcccttacatttcccgtaacagaatccaaaatattaacatgcttggatactcatggaaaacccgttaaacgggaaaaaaaatataattttctagacatgaacgtacaagtgtaaagagtgttacttttgaaaaaaacgttgttacactgaacaaaacattttttcaaacacgcgttaagacattaggtct

SEQ ID NO: 286548 - DNA, 382 bp, Glycine max
agcttaaacattcaacttcgagcgtctcgatatattacgagtctcaaacagacatccgagtaaaaagttattcgtttgaatttgctcagagcttcaacgttcaattttgagcgtctcgttatattacgggactcaatcagacatccgagtaaaaagttattgtcttttggattggctcagagattcaacattcaatttcgagcgtctcgatatatcacgggactcaatcagacatccgagtaaaatgatattgtcccctgaattggctcagagcttcaacattcaatttcgagcatctcgatatatgacgggactcaatcagacatccgtgtaaaaagttattgtgcgttggattggctcagagcttcaacattcaatttcc

SEQ ID NO: 286549 - DNA, 432 bp, Glycine max
tctatatcagctgaaccattttatcaataaacacatgttgcgttttattcagaaaattagaggttatctcttttatcttagtgagagtgattctcctaaattcttgagtgattcatgaacaccttggctgtatcacaggactttcacaacctttgtgtgttgtcctcgctggaaagagcgatccttccctttctttcatcatcacccttgttctttcaaaccacaattccagaaaatccacctctgcccaaaattatctcgtggccataactcccattttacgcactcaaattaagtgattcttgatcctacattgaatttcacaacgagacctttcacctcgttatggaatcacctcatttggagccatgtagcttcagctatcgccatttctatatttctgtccagccaccacttaacctacgtcttacc

SEQ ID NO: 286550 - DNA, 365 bp, Glycine max
agcttgaagatctgtctgaaatagcacacagtggtcaatgtctcagcatctctgttatacaattgtggattctataagtcaatttacactattgtttattacctaacttattattttaaattcatacataatttactttatgttaacaacaataggcatatgactgagacaagtatgcgagcggggaataccaatgtgtatggattcctcgagccacaatccatccagagatctggccaatcacaatttgaattaaaaagttacattaagaactgaatgcagaattcaaaacgggatgtgtaccaaggagcctacctgaatgggtaagttaaactaaacaaatgaattaaataatgtataatgct

SEQ ID NO: 286551 - DNA, 366 bp, Glycine max
gtggtaaagcattgattctatactgcttctctcatcatgtggatcatgatgtccacaatttaatgatcctttgctaccctgcagtgagacacacacagatacacatacacacacacgtggagacaatgacacgcagacacaagcactgacacacattcacacttggagatgcacattgacactcacacagagtcacgctcacatatagacgtagactatgacacaaacacactgagccatagacgcacacggagacccacacacaaagacacacacactgagtcataaacacacacatacagagtcacgctcgcacacatggacagacactcacacacataaagagacaaacgcgacacacgcaca

SEQ ID NO: 286552 - DNA, 268 bp, Glycine max
ttctttgaacattcgaaccctaatggttgttgcgatgaaaaagggtgtaattgaaaacataacaaaaaacaaacggtcaaactcaaattggttttggggggcttcccttacatggaaaagttataaccataaaaacgtctataggaatatccttgctcatcttttctgttaaacctcacctgatgtgaccaatactctcaactaatcaaattaatatctttgtttaccaaaatatatcattacccagattcacctcttatttcatgaa

SEQ ID NO: 286553 - DNA, 423 bp, Glycine max
tgcgctgatgattcggagtgttagggttaatgtgttgaaaggaagtttagtgcagaaattaataatctgaagagattgagagatcttgaggaagtaggatgatgttgactctatagtgaaattcaagatgcttaaggattagctagtggagcttctggtaaaagatgacatttattgaatgcaaagagcgaacattgagtggctacaagaaggagattctaactccaaattctttcattacatggccttctcttgtagaaagagcaacaatatttcttagcttcacaatgattctggaatgttattaacgactcaacacgatcttaatcaagtagcaaagaattattttgggaaccttttcaattcatattcagattctcttgatgaggtgctagaagttattcatccaagtgtttcagatat

SEQ ID NO: 286554 - DNA, 117 bp, Glycine max
  unsure (1)..(117): unsure at all n locations
ttcattctatgtaccccgggtggtccacattnttgttcatgtatttttattcttggtttcatttactttntatacccccttttgatgtgcttaagccatttatttaagtcatttctc

SEQ ID NO: 286555 - DNA, 422 bp, Glycine max
tcttggggttggctggctattatagaaaattcattgagtgattttctaaattggcactgcctctaactaagttgactcgtaagaatgagaaatttgtctggaatgagaagtgtgatcaaagtttccaagagttgaagaggcggttgacaacagctccagtgttagttttgcccgaccctaagagaccatttgaagtgtattgcgatgcaagcgggcaaggcttggggtgtgtgttaatgcaagagggaagagtagtggcgtatgcttcacgccaattgcgtcctcatgaagttaactatccgacccatgacttggaactagcagcggtggtgtttgctttaaagatttggaggcattatttatacggtactcgttttgaagttttcagtgatcacaagagtctcatatacttgttcgatcag

SEQ ID NO: 286556 - DNA, 372 bp, Glycine max
agcttgcttcttcagaaattcgtaggccgcttttttgtttttccttgaataaacgttcatggtgatttcgcgcgtttttcttccttggaaaatgcaccgtgagcctcgcgccgacctcctgttgaagggtaggttgcgacaaggtgtacacacattaacagaaagaataactagaagcagataatgtcaaatcacagcagaaataacaaaataagccaaaagcaataatgtcaaatcataatggaaataacaaaataagccaaaagcaataaagtcgacagaagacaaatcagaagtttagtgatccggccgtatagccctatctcctcacaggaggaagtctatcaggtcagccatgtccctgcgggccct

SEQ ID NO: 286557 - DNA, 423 bp, Glycine max
tgtctcagcgtttatgcgagacggagaccaacatgctagctatcatcgctaagtaccaagaagagttatgtctagccgcggcccacgagcataggattgcggacgaatatgcccaagtatacacagaaaaagaggctagaggaagggtgatcgactctttacaccaagaggcaaccatgtggatggatcggtttgctcttaccttgaacgggagtcaagaactttcccgattgttagccaaggccaaggcgatggcagacacctactccgcccccgaagagattcatgggcttctcggctattgtcagcatatgatagacttaatggcccacataattagaaatcgttaggaaacttgtatggtctctaagaccttgactagatacgactttctttttgaaataaaatgagttggtcccatgt

SEQ ID NO: 286558 - DNA, 370 bp, Glycine max
agcttgtgtggggctagtgaactttggagaatttttatctgaaggaatctaaatcatggtggcttgcttggcctcctcttctcccctcatgtcaacttaattagattcttgggggagacaatcacattaaataatgtcctttcggttggctcaattttaaaactttgattctaaccatggtatcatgtagcccatctcacatgatacgataagattttattgatgttggtgatggttgactcaatttatttgtttctcttttcaaatataatgacaattgatactacccatggttatcaaacttttggttaactcgctaactcttacgattttatgagttcacttattttctgtgagttgattcgtgtgt

SEQ ID NO: 286559 - DNA, 407 bp, Glycine max
tgttgaggccattattcttgaagcttctaaactttatacaagaatgaagctctgataccacttgtttgacaagtggccttagaaatcttaagaatggggggttgaattaagattatgcttactattcccccaattaaaacctactcagatttttatgcaagttctgagttccctttataataaatgacttagatgatgaatcaaatgagcaaactgaaatgagactaataaacaacagctaatataagagataaggggaagagagaatgcacaaccagatttatactggttcggccacacccttctgcctacttccagtctccaagcaacccgcttgagagtatcactatctttgtaaattctttactagtattgtaccacacaacgactttctgatgaaaatcctg

SEQ ID NO: 286560 - DNA, 372 bp, Glycine max
  unsure (1)..(372): unsure at all n locations
tgcttcgacactatgatacattgtgcctcctcgttattgaatggagcagcttcaaaattgataatcgacaagaaagttctcagaaattttgctctaccaacaacatcaaagttgtccaagactgaagaattgaatttcgtaaatgacaaatgacgagtcttggtcttgatctttgtttctttcccaagttcttctgatctaaagtaaaaatctccaccgagtgatgtggctagatcatgcatgaggtcatgcatcacaaaacatttgccataaggccaactacttctacttgtgtttgaacgttgganaaatgatctcgaaaccaaatcatcataatactcatgaccaacctcttctaaagtcctacctttg

SEQ ID NO: 286561 - DNA, 385 bp, Glycine max
taataaatgtatatattgtttagaacaagcttcccgtcagaggtaccttaagtttcatgggataatttcttcatttggttttgatgaaaaccccatggatcaatgcatataccacaaggttagtgggagtaaaatatgctttcttgttttatatgtagatgatattttactagcagccaatgatcggggttcgctacatgaggtgaaacaatttctctctaagaattttgacatgaaggatatgggtgatgcatcttatgtcatcggcatttacattcatagagatagatctcgaggtattttatgtgtatcacacgaaacctatattgacaaaattctagaagagatatcggatgaaagattgtcaccaactgttgcccccatt

SEQ ID NO: 286562 - DNA, 387 bp, Glycine max
gtagagctgacctgcaggcatgcttatctccgtaatttgataaatatagtcgcgtagggggattagaggtcagttaacttactctatgcacctgactaagttcaacattggtgtttggatgactttctgcgaaaatcgacctcgtcttgcttaccatgaagggaggggggaaccaaaattggtcatcaatcgctgaaacttatacggggatcgtgggatagttaaaggttcaacagcaaattgcgtggaccgcagacttacaatgaattctatggaccgatggaggtgcacaacctgtatcataagatagtgatcgtctgtcttgacaatgtatgcccccttgtgacgagcttatgccattgattcaaagaattaatcgctataacc

SEQ ID NO: 286563 - DNA, 351 bp, Glycine max
tctaaatgtttcaagcattggacgattcttatgaagaattaaatacgatagatcgtgaagtgtcttatgatagacaatgacttggaattctattctacgaaattcaatgaattctatcaagattaaggcatcacaagatagagtaacttacgctatactttgtctcaaactggagtaactgatagaataaactagaccctattggaaagggcgcaatacattctatccaatgtaggagttgaataggagtgtctgggctgaaacattcaacgcaacatactatctcaagaatcattcaccatgcactatcataaattttagaactcgtagtgaagaatggtctaacaaact

SEQ ID NO: 286564 - DNA, 367 bp, Glycine max
tgcttttatgaccactatgtatttgtgtttacgattgctaagacaactttatattttggtattatttgagttctagaagcttttattctttgctttgcggaactgatatctatgacccttcatttttattaatttcttgagcaaagtaatgcttagcctagctaggtatatactttaactaatgtttggttttcttttatatgacagccacaaaatgttccaagaataggccattattgtgttataatcaaagcgtattggcctaaatgattatattgtatataggtggcaaccaaaacaaatggtattttaaaaaaatatcactttctaagtcgattctattggtaaccgtcttagaatgtaggcc

SEQ ID NO: 286565 - DNA, 396 bp, Glycine max
ttagaccagagcaacacataatctatgtatccataacccctcaatgtaatggattgtcaaggggtgagaagtgaaattgataatggggtagagttggagcaaagtctcacctcacacaagtctataacatcaatttaaacttgttcaaactggatttacacctaaaattccaccaaaccaaaattagactcctcaacacccaattttaccgtagaaatggctctttgttcactttgatcattagtttttctctctagcacatgccaaactttctcataagtgctaaatgacattctaagctatgattaactcactttaacctccaaataccactaaatccatatttggtcttccaactctcaaaacctaactctctttgcactcataacaccatat

SEQ ID NO: 286566 - DNA, 377 bp, Glycine max
  unsure (1)..(377): unsure at all n locations
tgctttggaacgtgacaaactttagttaaggttttaacaacaccatcatgcatattgatttgtacagaacctataccaacatacttacgaggagtattgttacccataaggacattaccaccaaacttctcctcatatgtcacaagccaatttttgtgtagacacatatgataaaaacaacctaagtccaatacccattgttcaaaatgttgtagttgttcaccaatgaccataaccaaatcccttttcgataaagagtcattctgaacaagggcagcaatataatagttctttactttctttggacaatctcgctcccaatgacccggttnntttgcagtaattgcagatgtccttatgatcaatttatctcttct

SEQ ID NO: 286567 - DNA, 415 bp, Glycine max
agtcaaaatccatggcaaacacgtccccagtccattgcgtgttaaacccaacgttcacccttggtgagcctttcttttgctaagttcgatctccataggaactcaagttacgcaaggtccacccttgacaatctttcttattcctaactcttattcgtgcaagaacgcaagaacatcaaaaacccaaggtccacccatggtacgcactcctatgaaacccaaggtccacccttggtaagtactcgttcaaacccaaggtaccctccttggttcgctcactccttaagaaccatgttgaccataacaaaaggtctagtgtccttaacgctaagcacactaccaccagactggatggcgagaccttcaaccaggtggaagtgatcctaactccttataaccatcatgggaaaagctc

SEQ ID NO: 286568 - DNA, 349 bp, Glycine max
ttctttaatataataattgcattaatagaattaatatatatatatatatatatatatatatatacacacacatttttttctttatttactaatataacaaattgcacaatttattaaaatttaagaataattatttgtaagagacagaaaggaacaatttacaattgattaaaatttaaaatttaacgcgtcggagtcaatagcaatcagaacaccactctaaattttaacaaaataagtcgtgccttttctttacgggtcaaaataaatcaagtctatatacaattttctataaatataattgacatatagccaatcaatagtagtaattatgacaaacaagaataat

SEQ ID NO: 286569 - DNA, 412 bp, Glycine max
tctctcagcaactttgactgcaaaacttcacaggtgctttatggcttctttgcaagtgacaagacaagctttggcatctgagtctcagagaacaccaccctcagtgcaaaatgcaacaacctccacaaccacaccaattagcaacaacttcagtgtgaagagtgagcaaactcatgcagtgttgccacataagagaccagaggaggagcaagagtcagaggcaaataggggtgtgaaaagggttaaggctgtggaaaatgttcctctgcaattcaagcctcttgaggaagatcacatagagcaaatgattgaggagcttcttgattatggatctattgaactctgctctgtcatttcaccccaggccctctaattgaatgtgcatgtttttgagctgaatttaaagtcacaa

SEQ ID NO: 286570 - DNA, 320 bp, Glycine max
ttctatattgtgaatcaaaggtgttttgatgatgacaatgatgataaccaaagatgatgacgaaggtgatgacaaaaagctcaaagatcaatcaaatatcaactcatgtgaatcaaagatcaatcaaagcacaactcaagtgaatgcagaacaattcacgagttcaagataagaattaagaggaattcatgacacaacaagaaagtttagagtctataatccagaatcaacgtttaagatctcacgaatcaagagaacacttaatcacaaaagtatgaaattcttttctcaaaacatgtaaccaaagagttttactctct

SEQ ID NO: 286571 - DNA, 419 bp, Glycine max
  unsure (1)..(419): unsure at all n locations
tgtctcanaatccttctctaagttacgaagccattccataatttaaatagtgcatcatccatgattttgttagcattgaatatgtcgttagtcaagataatgttgttccgctgctgccaaatagaccatgtcaacgctagccaccaacacttccacctgttgacctttacagcctcagccaccccaaatatatgttgaaggaaatgatgttttgggttttgcgggagaggacccacgcaattcacccaagacatcgattcccaccacagcggactgattttgctgcaatgaaaaaacgcatgacctgtattctcctccagattactgcaaaacacgcaactcgtatcatttaattccacctgtcgtctgtgaaggtttgcccttgtaagtagtcgatctctaagtaacctccatgcgaa

SEQ ID NO: 286572 - DNA, 333 bp, Glycine max
tatctttattcaaacagaatagtccaaagatgtcaaagaattgggtgttgaaaaagcataacaagactttctgtgattggtttaaagatacaatctttgtagatgaaaatgcttcaaaaacattaagaaagctagcaaatgggcctcaaagaaatgttataacttggcaaggatacatcataaacaagtattcattttacacaaaagcacaagacgacaaaagtacaatgcagaacagtggggtcacccttaaagctgaatctcaacacttcgcaagtgtgcatgacaccaatccctgtgtagcttccatcccttactttgggttcattgatt

SEQ ID NO: 286573 - DNA, 385 bp, Glycine max
ctgcagatatggccttcgccagtgaaaggatcattttgttttccaaaagaggcaaatttgatcatcctactatgacgactgacaaaactggggcaaataaagagggtgaggatgaacgagaaacccatgctgtgattgccattcctgtacggccaagtttcccaccaaacccaacattgtcattactcattcaatatcaaacctcctccttacccaccacccagttatccacaaatgccattcctaaatcaaccacaaagcctgtctatcccacttccaatgacgaacaccacctttagcacataccaaaaacaccaaccaataagtgaattttgcagcgagaaatctctgataattcaccccaatcccagtatcctatgctgac

SEQ ID NO: 286574 - DNA, 168 bp, Glycine max
  unsure (1)..(168): unsure at all n locations
ttctccttacgcatctgtgcggtatttcacaccgcatatggtgcactctcagtacaatctgctctgatgccgcatagttaagccagccccgacacccgccaacacccgctgacgcgaaccccttgcggncgcatngaatataactncntataaatgatcgcttacgag

SEQ ID NO: 286575 - DNA, 292 bp, Glycine max
  unsure (1)..(292): unsure at all n locations
tttttcttgtgaaagtccttctgattctatttatgcatttctgacttgatgacatgagatgaacataacagattggacctctcgctcgatgagattagtgaacaccttagacattaatactcgactgatacttatattgtgagactgtggtttaagctactctccttgatatttgtcttatgcctaactatatccattggtacaaatgacgttntactcttctctttgaataactgcgtgctctgtgaaagacagatgatgaaggcactttgcttcattcttttatcatgca

SEQ ID NO: 286576 - DNA, 412 bp, Glycine max
  unsure (1)..(412): unsure at all n locations
tctccctcttttccctataaatagggggagtagtgtattgaacaaaaacgttcaaccctcttggtatctgaggatcacttaaaattagtgagaaaaattgtttccgtgaagaaaatccaagccgaggcgcttccgtaacgcttccgatacatttccgtgggtgatttcgcgaagattttccaccgttcttcgtttgttcttcgtcgttcttcggtcttcaactagtaagttcccgaaatcaaactttncaattcattctctgtacccttggtggtccccactttttttccgtacttttattttcatttcatttactttttgtacccccttttgacttgctttagtcatttatttaagtcattctctcgcctantcaaaaataaaataatattccactgatcattcatattgt

SEQ ID NO: 286577 - DNA, 441 bp, Glycine max
  unsure (1)..(441): unsure at all n locations
aggcgtgggttcaggcgtcatgcntngcanngccnaancnagctcggacccgggatcctatacatctacctgcatgcattctttcttgtctttgagagnngaantgagccgtactgtgactttagatatcagacaatccaatcaagaaagagaaatccaaaagtgaaacatccgatagatcgttccgctttattttactaaaagagatcttttaaggatagcatgaatggatcctctccagttgccaacgtggttacagtactacggaacggactgatatcattctagcctccactaatggatataacaaacaaacatcccgggacattacggtatcctttgtcacgacatatacgacttatgtaatgacagagcacgtcaccaggcggcgaaaaggtatgaccccaagtatagtacaagaacgtcgggtacccgcgtgcg

SEQ ID NO: 286578 - DNA, 99 bp, Glycine max
ataacggctaaatactgggcacatacactacctggagaggatcatgcggcttgcagacgcgaattatgtggagagactaaccaagaccaacggtagtgc

SEQ ID NO: 286579 - DNA, 318 bp, Glycine max
taatcttttgctgaggggttttattattctagatatcataaccttctatgaagaagatggcaaatctatagagggaaaccaaaataagtacctgttagtcatcatctacaactaactttggtataaaaaagttttataaaatgtttatcgtttccccaatttatggttctttttgtaggttgggacatagttttaggtttagtttaattttgttcagtagaaatacccaacattgtgaatttaatgtgtctaactttaatttccggtaaaaaggatgaaatttgggaagctagcagctggtgtctcgctaagcgaggc

SEQ ID NO: 286580 - DNA, 407 bp, Glycine max
tcatgatgaatcaaaggtgattcaaaggtgttcttatgataacaatagtgaccacaaatgtgatgaacaaaaagctcaaagatcaatcagagaacaactcatgtgaatcaaagaatatctcaagtgaatcaagaacaagtcaagagttcaagataagaatcaagaagaattcatgaactccagaagaaagtctagagacaagaatcacgattcaaggttcaagatctcaagaatcaagatcaagattcaagaatgaagagaagactcaatcaagataagttttaaaaagtttttcaaaactttgaatagcacatgagtttttgacaaaccttctaccagagagtttttactctctagtaatcgattaccaactagtaaatgagtttgaaaaatgtttcatactgaat

SEQ ID NO: 286581 - DNA, 308 bp, Glycine max
tctttcttgtgttatcttatcatcctgcaacaaaaaagaaaatatcgttcaataatatataataatttattatccaagatacaggtttggacttcaacaaccctagttcctatacatatacaatagctaccatcctatctagttttggactgcagttacttcatggctcacaagtcaatcaactgcttgagatagctagcttcgcaaaacttgcaagtcaacatttttaacaaaatgttaatcaaataaattctcactaggtaaaccactgtactggtaataaatcacatagatagatatcccatacc

SEQ ID NO: 286582 - DNA, 413 bp, Glycine max
ttggaaaatggtttctatacaaaagttatttttttattgtgactaacacgctcccccaaatttacaattttgcttttcctcaagcaaagaaagaacaattcacttgtcctcaagtgacaaagacagtggctaatcaaaagaaaatggtgtttgattcattaaggacatcaaccatatgaactgaataccatggaatgcttaaatcaattacttctcacaagcatgcagttttttcaaagataagagcacaagtattagattcatagctgaaataagctagtaagcatgacagaaatcatggaaggatcatcaaccaaaatctcacagtcattgtttcactcaaactcaagtgtttaggcttattccatcataaacaaccaacacaagttccaacctttgcatgtcatctccta

SEQ ID NO: 286583 - DNA, 453 bp, Glycine max
  unsure (1)..(453): unsure at all n locations
cgacgttnnnctcgattgatgcnctgacnaancaaggcaattaagcgcgatcccgggagtctaccggcgaccggattgttgcattctgagcgtgacctaccgagggtggtgtaacaacggtgatcactatacccggcgtgaaattgacagactttgaccatggcggacatgctacaaaccggactcataacacgtactgcacgtggagcctaccaatggagctatgggactgtagcgacaatgctcccactgcctattgtacaattgtgagacgttggttgccacgtggacatatggacgggccaacgtaacataagccgagtgccatatgttctttgaaaagcgatcaatacaatgtggtatggctggaactcaaagacgaaaatattggtaatatagaacgaatgtgcccctagccaggagtgtaaggccgcctagaattgcccatgaacg

SEQ ID NO: 286584 - DNA, 399 bp, Glycine max
tattgttttcgtgtgtaaagcgcactctgctcactatatcagcacttgcaactgcaaaattaacatgttgcatactgccatacaaagtgcagcataagccatcccatattgattgcagagatcaggctctccaaaagggttgcctttctgcttacatatagctggaataatgatcatcgacaggtttcctaaatttcctgttcatatcaatctaaaaaatcagatcaaccataaaatgcatcaatcaactaatgatgcaaaagttcgatgctctaataaaaacaatgatgcatagcagaattttgcaagatgtattcttagtctaagtggaacttttgtgggtataacaagtctaacagttggatggattttaatcaaatgaatcatgaatggatcata

SEQ ID NO: 286585 - DNA, 335 bp, Glycine max
tgcatgctttcttgttcaccaatcacactggcaggttcaatctggttattaacataaagctatatccaacttttagtaattggagaataagatcacacattaattattaattgcaattgaaataatatcttacatatgccatgcatgaggacattctgtatatggatgtgccaaatgttcgaggaaatctttggaacaacatattctacgattagacaatgagggttttgtgtcagcaattccataatggatacaaacagcagctcatgtacaacgaagagaataaaatcagaattccttccaacttacttctggcacaaagatccccctcctaa

SEQ ID NO: 286586 - DNA, 341 bp, Glycine max
caaacatcatagtgcgatacaaatgtatattcatatgttacagagaagaaaacatctgggggaaacaatacaataagaaagaatactaaagaataacggagaaaaacagtcaaattactaggttctcttctaaagagattacagcagtcagattcagtaatcacagtatacgaatgaaatagcacccctccccccagctgctttaattagcactttatgctgtaaatcgaccgcactgatagcttggcatggcatccataaggggcatccatgcgatacacagctgtcaactcttctgaccctcataaaccaacactaggaaatgtaagtgaggcccatag

SEQ ID NO: 286587 - DNA, 375 bp, Glycine max
  unsure (1)..(375): unsure at all n locations
ttcttataagaacaaaattgcctaaatcatttccaaatatgcatgtgaattaagaagcatcaacaagaatcaagccaaggctattgtgcaagcaatcaatggggcaaaacacaccaaaagattatgatgatggatggctcanattctcacaaaggtaaacttatcactttcaaattgagctttcaaaactatcatgacatgtagaggaaaaacaaggatttcaaatcccaaaatgtcaagagacttttattttcagaacaattacccattacttgaacttatcctataattcaaagaaaaacatgcaaatttaacacaacaaaactaacaaaattaaactagaacccaacaaaactaacanaattaaactaattt

SEQ ID NO: 286588 - DNA, 413 bp, Glycine max
  unsure (1)..(413): unsure at all n locations
taatgaccctcaatctttcaatgattatagacctatctttcttatagggtgtgtctataaaattgtggcaaaagttttggccaagaggctggccattgtattacctcatcttatagatgaaaggcagacggcttttatgaaggggagacacatccttcatggtgttttgattgccaacgaggctttagctgaggccaagtctagaaataaaccttgcatggtcttcaaagcggattttgaaaaggcatacgattcggtttattggggatttcttgactacatgctcatgaggatgggattctgtgaaaggtggaggaaatggataaatggttgtctatccactgcaaccatatccattntagttaatggaagcccatctaaggaatttgctcctaagagaggtctaaggcaag

SEQ ID NO: 286589 - DNA, 324 bp, Glycine max
tgcttcttatccaaggctcatcttggtggtgaagctccttcttccatggcttattccctagtggatgacgcctcctgtcacctcttctcctttgtcttccgctgcatctccatggtggataatcaccattaaaggacctcattgaaactcaaagatccagcctccatagaagccccacaagcaagcttccatcaaagtgtatgaattttaaaatccaatcctacagtttcttgaattaattaaattcgttattattgtttctgtacatttatgtatttctgacacactaaattcgattatatttggtatctcattcctttagtt

SEQ ID NO: 286590 - DNA, 416 bp, Glycine max
tgttgccattagaagagaatgagcatgtgattggtattatgactggaattgttagtcagtttgccagattgattgtgaaggaatgcattgaccgtatcccggtgagagtgtgatccttaaattttgagagaaatgactatcatttaatactgatttttgcatgaatctttgaagtatggactgaatgcatgaaattgaggatgatgaaggccatgtttgattgggatagccacttagccacgtgtttgaatgatttatcctttgcacctaatttgagctgaatgaattattgattgattgaaccctgagtctatagagtgttatctcttgctaccttgacttaagttgtaggagagcatcatccacagaaagtgtggttcaaagcaaatttgtcccaaattttgcggagtaattat

SEQ ID NO: 286591 - DNA, 354 bp, Glycine max
  unsure (1)..(354): unsure at all n locations
ttctttgatgtatgagaagatgagtggagggagagggagagaaggggcacaaaatttatgcatcaaataaggtctaaactttgaagtgtgatttcttaaatgatcaaagttgaaaaaatgcacacacaaaagctttatttatagcctaaatgtcacacaaaattggagggaaatttgaatttctattcaaaattcacttgaatntgaatttgtggagccaaaattttgctaattatgattagtgaatttcagctatggttcagcccactaatccaagatcaagtctaatattctccactaagtgtgcttagatgtcacgagacatgtaaagcatgaaggacatgcacaaagtgt

SEQ ID NO: 286592 - DNA, 415 bp, Glycine max
  unsure (1)..(415): unsure at all n locations
tgtaagattatggggtacccatcacatgtggtactaggtgtcggtcgggcgatggtgcacaacaagttttccacatccacaaagcgtgcttaaacccaccatcccctgttgcccacctccaactgagctcacgtactcccacgtagcccataccctcgtttctctcaacactgggtccccatcaatcctgccaagcttccccaacatcaaagtaatacaacattcaaacagcacaagctatcacagccaagcaaaacagggcaaaggcagaaaactctacccaaaacaccaaccaaaacacagctttcctcacttaaagaccccagtaacaattccttcgttccggttcattaaccgttggatcgactcgaaaattntactggaagtctctagtacataagcctacatttggacc

SEQ ID NO: 286593 - DNA, 361 bp, Glycine max
  unsure (1)..(361): unsure at all n locations
ttcttgtatttaccactaaacctttaatctcaggtgcaagctttccaaatttcttaaccttgctcccatgaaaggcccactttaactcagcatgttccttgcaataattataaataagtatgtaaaggtaattgaccaataaaatttaagtacaatataattacaaatacaactacctctcctgcccacacttttgttgtcacatgatccacatatatgaagtaaacattgatgtatcttgaggcccacctggaaaactctgtgaatcatcacatacatcactcgtaactggatcataanggctctcatgaggctcgtcaacaacatgattcatattctcaatatcctctgcaacagctgc

SEQ ID NO: 286594 - DNA, 417 bp, Glycine max
tccatcaagtggtatcagagcacaagagcttcatttatgtgcttcttaaacctccattaattttttgctttaccttttcttccattgttgtttcttcattattttctccatgtatctcctcacatgtcttgtgctaaatgttgttaacatgattctttaaagtttccaccgattaaacttgctataaaagctagatttgattttctatggttcaaatttcttgttcttgttcttgaaccatgaattgtgttgagtttaggttcctttgagttttgtcttgttattttttgtggctgaaacctaaaacataaaattcttacaaaattattaaagtagaagaaaacctcaagaatctagagtgacttgttcacctattgtacgtttgtcatagaagtcatgtctagtcatgaaacttgt

SEQ ID NO: 286595 - DNA, 375 bp, Glycine max
  unsure (1)..(375): unsure at all n locations
tctttctttataaattcatcactcttaatattctgtacacaaaaacttaaatgatgttaatttaacaattattttctcagatgaaaaattagaagagaataattacaaattcctctataatttaacccccaggatatattcatgattagcagctatcaaactcccgccaatttaaatctttgtgtgtcctcaagcaaaacgaaaaagtgtagagtttaccaatcacaattcatgagatgactacatacanttccaaaagcttcattggtcaattctcaagtttacaattgtcataagttcatgaaaggagtagaacaagatgtacttcanatgaaatggttagcaagaatgacaaatcactatgaataatcacca

SEQ ID NO: 286596 - DNA, 409 bp, Glycine max
tgacctcatttattcttcataggattcgacagattctaagagaatgcctctacaaaatagattttagacacggagtattaaatgaagtcttaaatgtcatatcaaatcatgattccatcttgctatcatttgaaacatcagatgcagacttcacgaaacatgttctgatagcatataagacataacttttaacctttgtatttgtttacatttaatcaaaataatcaagggtcctggttcatcttttgacttaacaatctctccccccccccccctcttttttttatgtcaaacaaacacaaatttaaaagttgaaggcaaatttataagatttcacattaaagtgttagtcagtcttatcagatgcagaaagtatatatcataaatagatcataatacatcataagat

SEQ ID NO: 286597 - DNA, 362 bp, Glycine max
  unsure (1)..(362): unsure at all n locations
atcttgaangtgtgtaacccaccattttccatagtaaaatactggtaatgtgtctactatcattgtcatcattttttcgtcaatgaggtgccacttgagctgccaagttctccacctttgggcgtattctttgaaagatccgtgccccctttttgcacatgttttgtagttgcatcctatccaaagccattatactgacgcagcctaacaaaggcaaccattangtccttccaagaatggactcgggaaggttccaagttagtgtaccaggtaacagctaccccagtaagactttctttggaaggaatgntataaaaattcctcatcttttgcgtatgcccncatcntccgacaatacatct

SEQ ID NO: 286598 - DNA, 413 bp, Glycine max
ttgatgatatggtcttcaccgacgaaaggatcaatgtgggtctaaaaagaggcaaatctgatcatcatgctttgataaatgccaaaaaaaaactagggcaaatgaagagggtgagaatgagggagaagcccatgctgtgactgccattcctatacagccaagtttcccaccaacccaacaatgtcattactcagccaataaaaaaccttctccttacccaccgcccagttatcaacaaaggatatccctaaatcaaccacaaagtctgtctaccgcacttccaatgacgaacaccacctttagcacaaaccaaaaacaccaaccaagaaatgaattttgcagcgagaaagcctgtagaattcaccccaattccagtgtcctatgctgacttgctcccatatctacttgataat

SEQ ID NO: 286599 - DNA, 487 bp, Glycine max
  unsure (1)..(487): unsure at all n locations
cagaccacacacaaaagcacggggaaaaggaagacaaacaacaccancaccgaaagggantggacccctgcaacacaanccnnaaggaacnngaccaagngacagagagaacccaaagagacaccgcacgagtttgccataccaggaacaggaacaccaagggaggagggaacaaagaaccccaacgcgacccccaagggagaacacaccaccacggagaagacacgcacaaacaaaggagaacacgagacacgaagccccacccaacaaggaaaaagccacggaacaaagaaccgccaccccaacacgagccacggaaaagaagcaagcgacgacgccccaacggaggaaaagacaagagggagacaaagagagaggggggagccaccacaccgaaagaacaaacgacggagagaagcgcaacacagaaacatgccgcacaagaacccccgcaacaaagaaccacacaagaacacaagccacgacg

SEQ ID NO: 286600 - DNA, 430 bp, Glycine max
gacctataaaactcagcttccaggatggccccctgcattcagaacttaacttctaccagggatgcagagacgggaagcaaactcttgaggatcaatcctcatcctcgtaaatctggaataggtaggcagtgtctcaccctcctctaaaactattggggtttcaaagaaggtatttaggctgtcagcatcaatcttgattaagtgtcctgatgcaatcctaccccgcaagggcattggatagaaaactccaagtagattgggccaaagatgcaagagaaggccctagggttcttatgagccttagggtagatttcgggcccatgggctaagtatgagcccacttatctttgtaaatattaaattaaggtttcattatttttgggccttgcatttacggctccataatgtaagtagggtaccctagaaatat

SEQ ID NO: 286601 - DNA, 361 bp, Glycine max
  unsure (1)..(361): unsure at all n locations
tttcttggttgagtaaggccattagaaggatcttcagttggcatcgtatcaacatttcctctagtgccatcttctatttcaaacctggtactagaagatgattccaaatctcttgtttccacatgagcagtaaagccttgccaatctaaattcttgcaaatggttccttgtgaacaaatctaatcacctgatatctcaagtccgttgcttacccagctattaagttcanattgttgagaatgtacagtggggactacttgtcagcagctagctcccaatttctacatagtattaacatcaataataatattctatgacgctccaaccacgtcggtctcaataagctgtcgttgaacaaaac

SEQ ID NO: 286602 - DNA, 402 bp, Glycine max
  unsure (1)..(402): unsure at all n locations
tcaagaaaaagatggcctcagcaaattccttatttccagaagggaattctatcaatagacctccaatctttaatggagaaggttaccactactggaaaacccgaatgcaaatttttattgaggcaatagatctaaatgtctgggaagccatagaaatagggccttatatacccaccacagtagaaagaattacaatagatggtagttcatcaagtgaaagcataactatagaaaaacctagagatagatggtctgaagaggatagaaaacgagtacaatacaacttaaaagccaaaaacataataacatctgccctgngaatggatgaatatttcagggtttcaaattgtaagagtgctaacgaaatgtgggacactcttcgattaacacatgaaggaacta

SEQ ID NO: 286603 - DNA, 220 bp, Glycine max
ttgttttctttcttatcagacggctgtgggtactcgtcaaatcaataactgacggtagcaacaacagcggtggtggctgcaccgaagaaagaaaccatgggatccgggaaccgcacaacgctagcaagctgatctgggtactctacaaatccatcccaagggattaagctatatgtttataaggagaacgtgggtgctgatactgaagggatgactcctg

SEQ ID NO: 286604 - DNA, 403 bp, Glycine max
  unsure (1)..(403): unsure at all n locations
ntgagactgatccttgccccaccactctttgtatgaaatgtgatggtgacatgtgcaggcaactgtgtcctaataaagttctcattctctcaattattcaaccttggaataaatgctagctgacagtttttattctttcctttgtttttttccttgcccttttcctttaactcttttgaatttgatggatgaatgtatcattccctgatctctttgtctatcgtgtgctatgattttttttctaccttgaggaaaaagtataatccacaagacagtgatggattttaatactatttacgcaattcatatgtaaaactacagctcttttatcactaaacaatcactgaattaaatttccccaaaagaaaaaagtgacattactattagcttaatcatgtcaaat

SEQ ID NO: 286605 - DNA, 343 bp, Glycine max
  unsure (1)..(343): unsure at all n locations
ttcttgcttgtggggcttctatggaggctggatctttgagcttcaatgggatcctttaatggtgattttccaccatggagatgcagcggaagacaaaggagaagatgtgagaggaggcgccatccattaaggaataagccatggaaaaaagagcttcaccaccaagatgagccttggataagaagcttggaaggatgcttcaatggaggaaaagaaaagagggagagaaagagagaggggggagcacgatattgaaggaatanaggagggagagaagtggaactttgaaagatgtctcacaagactctcattcatcanagttacaaccagtgttacacatgct

SEQ ID NO: 286606 - DNA, 406 bp, Glycine max
tgccgccacggagttttccgactattctcttgtgtggtggaacaagctacaaaaggagagagcatgatatgaagagccaatggttgatacatggacggagatgaaaaagatcatgaggaagcggtatgttccggctagttactcaagggacttgaaattcaagctccaaaaactaacccaaggcaacaagggggttggggagtatttcaaggaaatggatgtgctcatgattcaagcaaatattgaagaagatgaggaggtaactatggctcgatttcttaatggtttgactaatgatatccgtgatattgttgagctgcaagagtttgttgaaatggatgatttgctttacaaagcaatccaagtggagcaacaattaaaaaggaagggagtggctaagaggagt

SEQ ID NO: 286607 - DNA, 367 bp, Glycine max
  unsure (1)..(367): unsure at all n locations
ttcttctatataagctgaaccattttatcaataaacacaagttgagttttattcagaaaattagagtttatctcttttatcttagtgagagtgattctcctaaattcttgagtgattcaagaacaccctggctgtatcaaaggactttcacaacctttgtgtgttgccctcgctggaaagagtgattctttccttcctatcatctccacccttgttctttcaaaccacaattccagaaaatccacctctgcccaaaattatctcgtgaccataactcccatttcacacactcaaattaagtgattcttgangcctaaatgaatntcaaaacgagacctttcacctcgttttggaatcacctcatttg

SEQ ID NO: 286608 - DNA, 413 bp, Glycine max
tcctctgccgtaaaaaagatattatcggccagtgtttgttaaaaaattgcgcaatgtcggctgaaaaatatccgtcggggctatttaactaccgatgtcggctattgttttttctattccacccctgaattatatttggatgatgcctattaggaaatgttcggtcggggtcatccggtcatgcttctttttgaggcctcgatctgtcgtctttcctagccggccgacgtcggctagcatttttttcgatcaatatctgtgtgaatcatgtttttttttgccaaggagggctaatgttttcgtggccgacaaaatgaaaacatgccagtgtcggccgaaacacaatcccgcacgaaaaaccctaaccgacctacattgtaattttttcaggcaataccgaacgacaaaacttc

SEQ ID NO: 286609 - DNA, 351 bp, Glycine max
  unsure (1)..(351): unsure at all n locations
ttcntcaactgaatttacaacgttccaatcaatttaaaatggtgtaatcgattacaatatattggtaatcgattaccagagtgtttgaatgttgaaattcaaattcaaatgtgaagagtcacatcctttcacaaaaatgctttgtgtaatcgattacaatgatttggtaatcgattaccagtgatatgttttgaataaaaatcaaaagatgtaactcttccaatggttttcaagtttttctaaaagttataactcttctaatggttttcttgaccagacatgaagagtctataatagtaagatcttaacttgcgttttacacacattgaatacattaatttcaatccttta

SEQ ID NO: 286610 - DNA, 415 bp, Glycine max
tgttcatcatttatattgaatttatgcttttctatatgactctctaagccactacgcttaggcttagcgagtgtttaaatttccagttttacttctaagtttgtataaacttgcttaggtggcatgccgtgctcagcgagttagtttagttaggtcagaatgtttgaggcttttggtattttgttggcggctaagcgagccgcgctcgctaagccaccatgcctctgaggtttgaataagcttgggctaagcgagtcagtctcgctaagcccaaggcaatttagtgttctgaaattttgttcatgcactaagcgagtcatgctcgctaagcgcaatttcttctctgtctttgaataaggcttagcgagccagactccctaagccaattatgttctagtggtcaagttgggctaag

SEQ ID NO: 286611 - DNA, 338 bp, Glycine max
  unsure (1)..(338): unsure at all n locations
ttcttgcagcgcatttctgatgaactttaccagaaattgcggtaggaggtcccaagactgggaagctcccagtgaagggttctgcctttcttacagctgaaggatcatccagatcaagccttgctataagttcaccagcctgcaaaaggtgatacaattttattatctttttcaatttcaacaattgtacttcctatgtggaatagaatgctatatacctgcattgcttgaccttcagacattttgaaatgaataatcccagaagcangcgaaagaagaggcatgcacattttcatgacctcaacttcagcatacggtgtgtcagcatcaacatgact

SEQ ID NO: 286612 - DNA, 414 bp, Glycine max
  unsure (1)..(414): unsure at all n locations
ntgaagtgaaaggatgtgactcttcacatttgattttgaatttcagcgttcaagggcactggtaatcgattaccaaaacattgtaatcgattacagctttttgaaaataattggaacgttgtaaattcagtttgaaaactttttcaaactcattttgctactggtaatcgattacaacaatctggtaatcgattaccagagagtaaaaattctttggtaaagggttttttcaaaaactcatgtgctattcaaagttttgaaaaactttttaatacttatcttgattgagtcttctctttattcttgaatcttgatcttgatttttgagatcttgaaccttgaatcttgattcttgtctctagactttcttcttgagtcttgaattgttcttgatttttatcttgaactcttgaa

SEQ ID NO: 286613 - DNA, 342 bp, Glycine max
  unsure (1)..(342): unsure at all n locations
atctttgtttgcttgaaaagttttcagtcgcattagctaagactgacaaatcgaaagttggtaaatcaatccctttcattctctttacttttctgaaattctgcttggaaaaatttcttgcaacccctgatacgttggaaaataagacttaaaacctttgcaccttatatgcacattttttagtgcctaatttcttgtaatagatgctaaataatatgcatatacatacctggatttttaattatccatatccacacatatatgattattaatccaaaagtagtcacaccacagtgatngctactgtctttatcttgagtttctatggtcactgtatatgat

SEQ ID NO: 286614 - DNA, 422 bp, Glycine max
tgttgattttagcgttaaggatgagatgggaattgaattgtaagatgcatagcaaacaaacaaacaaatctttaattatataagagtaaaaaatcaagaatattttttagttgcttaagagggacaaatacagcaaactagaagcaacaagtaacacatcacatacctttttctgacttgatcccggaggagtgcaaagcaatgtcggtgatgccggtgtcggaagagtggaggtggcatccatagttgatggttggagttagaatgttggaattaaaattggaaagaacccaagtgcaagtagaagaagagtctcaaaagtcaaaactcattaataaataaagcatcatcatttgatgatcattgcatttgatggcctatatattgtgataactcatactcattaattactagatcatttt

SEQ ID NO: 286615 - DNA, 265 bp, Glycine max
  unsure (1)..(265): unsure at all n locations
ttttcaatataacaataatttttctctcgcttttattcattatatataaatgaagaactacaaaatttaaaaataaattaataatggtgtaagattaatttataaaaataatattctttcatttatttattattttttcttggtctatatanaataacttaggatganaattatattatntaaaaataaacatatttattccgtagcatatctattacaaaatcaatttggattaaccctaaattgttcaaaatatggtagagaa

SEQ ID NO: 286616 - DNA, 417 bp, Glycine max
tgtacgtgatgccaccgtgatctgccatcgcgtttatctgcttcccaacacggtgctggcgtgcatctacttctcacggacctccgtcggactggcaaccctctcccattggccagtggcggggtcgaggaccaggtgtcagcgacgtagccgccgaggacatagatcttgtcgtggaggactcccgcggcggcgaattcgcagccaacgcgcatggagggacgaccgtggagctagtggttgaagcggcagtcgaggagccaaatgttgggggatgggacgatggggacagccatggcggtgacaacgtcaacgaccttaatggcagccttctagagaacgttgccggagacattgcttcgtccctctcacaaaggctatggaaacctaaaaggggagtaaagagagaggggaagt

SEQ ID NO: 286617 - DNA, 366 bp, Glycine max
  unsure (1)..(366): unsure at all n locations
tcattcttctatataagctgaaccattttatcaataaacacaagttgagttttattcagaaaattagagtttatctcttttatcttagtgagagtgattctcctaaattcttgagtgattcaagaacaccttggctgtatcaaaggactttcacaacctttgtgtgttgccctcgctggaaagagtgattctttccttcctttcatcatcacccttgttctttcaaaccacaattccagaanatccacctctgcccagaattatctcgtggccataactcccattntacgcactcaaattaagtgattcttgagccctaattgaatttcanaacgagacccttcacctcgtttgggaatcacctca

SEQ ID NO: 286618 - DNA, 414 bp, Glycine max
tttgcttgggagaaagaaggacaaccttgttaaatgcctcaggctatagtgaacttcacagtgcaaagtcttggtgatttgcttattcaagaaggatgatgatagttcataggcctttattggtaaatctgacatgtccatctatttgcgactacatttaaatgtacacttaatattctttcatctgcatttcccttgcgttaatatgggggttggtcttttcagatgatccttttattcttactaagtcgtattataatgtcttaatcatgttttgttcaagtcacatgcctcaagtcaatctgacatcagtagtctccaaaacttaggataaaatattcttaaaacgtgggggtataaatagcaagataaggggtgagaattacaattccctaaaatggttgggttagttat

SEQ ID NO: 286619 - DNA, 414 bp, Glycine max
ttgcagatttggtcttcgccagtgaaatgtatattgtgggtccgaaaagaggcaaatgcgatcatactactaggacgactgagaaaactggggcaaataaagagggtgaggatgagggagaaacccatgctgtgactgccattcctgtacggccaagtttcccaccaacccaacaatatctttactcagccaataacaaactttctccttacccaccacccagttatccacaaaggccatccctaaatctaccacaaagtctgtctaccgcacttccaatgacgaacaccacctttagcacaaaccaaaaaaacaccaactaaaaggaattttgcagcaaaaagcctatagggttcaccccaaattccgttgtcatatgctaaacttgatcccatatccactcaataattcaat

SEQ ID NO: 286620 - DNA, 342 bp, Glycine max
tcaatctttgaatactccagtcctagtcctagaggaccatccaatgctcctattctttttgccttcaatctctctctctacccaaaatacctaaaaacaagggtaaagaatgaagagaggggaaaaaaggtcatggttcaaattctttgttaaccaaaattaataaattaataaattaacaattaatattttttttttttttaaaaaaaaaactatgacatgttccgtgtatgtaatcaatcaccaaacttagttgtactcattttaatcctgactgtgtggtctatccaacaagctaggctcatcaaaatgggaccagtttcttgaaacaaactgcatcac

SEQ ID NO: 286621 - DNA, 401 bp, Glycine max
tcttgctcttaatcctgtgagtgtttaatttaatatgctcatttttttggctgttctagctgcttcagcattttggttcctccattctgccatggtatagtggcccaataatagataattcatgtacttcctatcaaatgcaggaaaaagttaacgtgtatggtggagctgtgtcattggggcatcccttgggttgcagtggagctcgcatcttagtcacattattaggggtaacttgtgaccttggttactttgtatatcattttctttcacccttggcacacaaattcttatacttctccagttagtattcagtatgccatgcagctgttatccattacattttataatcctggcttgattgctacactttccagattattgtgatctgtggatatctc

SEQ ID NO: 286622 - DNA, 300 bp, Glycine max
cattttttttgtttgggggcttctatggaagttggatcttttgaacttcaatgaggtcctttaatggtgaatttccaccatggagatgccgccgaagacaaaggagaacaggaagaggcggggccatcccctacggaataagccatggaagaaggagcttcaccaccaaaatgagccttggataagaagcttggagaggatgcttcaatggaggaaaagaaagaaggagagaaagaaagaggggggcgcacgatattgcacggattaaagagggagaaaagtggaactttgaagatgtct

SEQ ID NO: 286623 - DNA, 307 bp, Glycine max
tccttgagaatctagagtggggctactgacatttctgcattagctaagctcacctcgatgccaaaatacatgaaaatacaatgggaaacttccttgagaagcaaggaaggtagcttccttgggaaaaaaaggaagaaagcttctttgagaagctagaggggggcgactgattgaggccgtacccgaatcaaataaacattaaaaatgcagtatctaggaagtgatcctaggtcgtctcccaatgagcaatggtcaagcaacgtttataatagatagtgataaaacagtaacgaatgggggggggtgt

SEQ ID NO: 286624 - DNA, 258 bp, Glycine max
  unsure (1)..(258): unsure at all n locations
gctaacccatggaagctcctaatatctcccacactttttggggtgggccattcttggaaggacttgattatctcaagttccacttggaccccatttctaccaactacgatacctaagaaaactatattatctacacaaaaggtacacttctctatatttgcatagagggtgttttcctaaggacagaaataactttctgatatgtactaatgatctttangctcctactatccctaaaattcatcaaataacaacaca

SEQ ID NO: 286625 - DNA, 405 bp, Glycine max
tcatgctcaagtatgtatggcaaaacttataattgttgttcaagacatacaagtgagcttgttacaaatcttctacacttggagtgatgacatgcagtcctcttgaacctttaccaccgactatgacctcatgccaacactcaagacggccaagacgtatatccttctcaatgtagactcaacaagagtcaattgctacttctgcgcatatacctgtgaacaatagatgcttctggatgatacaaattctttatgtatccttttaagatcttcatgtatcactcaaccgggtacatccaccgcaaataaacaagaccacaacatttgatttctctgaccagatgcacactcaagtgaatcatgatgtcaaagatggtagggggaaaatacatctccaactggcat

SEQ ID NO: 286626 - DNA, 425 bp, Glycine max
  unsure (1)..(425): unsure at all n locations
cgaccaggggactcgntgcatcgccnnacantnggntatgnacccgccatcccgggattctattagtcgacccgcttcatgtcttcttagcnatattnnnaaggcatgtttcaattgtttggttgccctttatgattatggttaatcatttttctgtgacttagatcacttgttatgtgatgtttgatgaagtaagaacgccctgtcataatgcgtggactgactcaatctgtaaggttatcctatgaatgaaatgatgggtcttcctccatgcaatactatattggcctctttatgtagctataacttttggccttggtggccaaaaggcgacgcacgtttctttgaagaacctacattgatacttctcaattgattaggatatgaacataacttgaccttcttttaggctcaaaccttacgtc

SEQ ID NO: 286627 - DNA, 407 bp, Glycine max
ttccgatatatatattgccccacctattctagtttggttattatagtttcgatcatacttttcctcaatgcactgattcttctttgaggttgtagctttttctctcccttcataagccaagaaatatgtaatataagagagttatcggtaaggatatcaacatgccaaagataaccctgcaaagaaaaaatacaaagagcaaatgttaatatgaatgttaatctatacttgcattggttatgaaagttaatatgaaagcaatatcttacatcgtgaataacgaaaataacattaacttgacttaatttgacctaaaggatcactagaaaggtagtctacatatttacgcatcacatggtggggttgaaagcccgtgcacgatcaagttttgctagaaagcattctct

SEQ ID NO: 286628 - DNA, 333 bp, Glycine max
tttctttgagccaattctaacgataataactttttactcggatgtccgattgagtcccataatatatcgacacgctcgaaattgaatgttgaagctctgagccagatcaaacaacaataactttttactcggatgattgatagagtcccgtaatataacgagacgctcgaaattgaatgttgaagctctgagccaattcaaacgacaataactttttactcggatgtctgattgagtcccgtaatatattcgagacgatcgaaattgaatgttgaacctacgagccatttaaacgacaataacttttacttgggggctgattgagtccgaata

SEQ ID NO: 286629 - DNA, 397 bp, Glycine max
taaacattcaatttcgagcgtctcgttatattactggactcaatcagacatccgagtaaaaacttattgtcgtatgaattggcttaaagcttaaacattcaactttgagcgtctcgatatattacgggactcaatcagacatccgagtaaaaagttattgccgtttgaattggctcagaggttcaaaattcaatttcgagcgtctcgatatatttcgggactcaatcagacatccgagtaaaaagttattgtcgtttgagttggcttagaggttcaacattcaatttcgagcgtcccgatatattacgtcactgaattggacatccgagtgaaaagttattgacgtttgaatttgctctgagcttcaacattcaatctcgagcgtctcgatatatta

SEQ ID NO: 286630 - DNA, 345 bp, Glycine max
ctgcatcttcttataagctgaaccatattatcaataaacacgcgttgagttttattcagaaaattagagtttatctcttttatcttagtgagagtgactctcctaaattcttgagcgattcaagaacaccctgcctgtatcaaaggactttcacaaccttcgtgtgttgccctcgttcgaaagagtgattctttccttcctttcatcttcacccttgttctttcaaaccacaattccagataatccacctctgcccagaattatctcgtggccataactcccattctacgcactcaaatcaagtgattcttgagcctaaattgactttcacaacgagacctttca

SEQ ID NO: 286631 - DNA, 417 bp, Glycine max
tcgccggatgatgccgatcgatcatttcccaatttacatcttccactaattattcacggatcgaatagaataaacaatggccggtgtcggtcgctatatggccccgactgatatccttcagccgacattgcgcaatttcttttacaaaagctggccgataatgtttttttacgtgagaagaagttctttgtttttggattccctacaaaattctacgatgtacgtcggctaagtttatccctgcgagctcaacccaggttgtgattcggacgacactggcatggtctcattcattaggcgcccaaaacgttagcccactccggcacaaacaaacatcatcaacggagattgattaaaaataatgataagtgacgtcggcgtggacagatgaccgatcgagggctctacatgaagcat

SEQ ID NO: 286632 - DNA, 373 bp, Glycine max
  unsure (1)..(373): unsure at all n locations
tttcttgcttcaatctaggaactgtatttgccccctttagaaggcacataaaaatctttgggttgagaattttccaagaaaaataaggcaaagaccccaaaccttagaagcccaaatagaaaccaggatcttagtttcagccatcgcaatccatgcaatgcaaaagattctatctttgttaggcaacacagtcatagtagagtgtccatttcacatgtagccaaaacaagttcaattctgatgttntggactgtgtcaactgatgaatgatgcaaaaaccattagaggtggcactcttangaccccaaaagttacaaccatgatattgtgatgagtcaatcacgtgtcatgcaactaggttgaaaaataatgc

SEQ ID NO: 286633 - DNA, 427 bp, Glycine max
aatactcaagctgttgactctacctgagtcagtggtccctacctttttatttcattaaacaacaccctcaaatcctatcaaaattctggccttattttgttatctgtgtaacattacttatgttgaaattactgtttaaagtaaattatttgatagtgtacaattttagggtaacctgttcaattctaagtctctatcaggattacaaataaaagcaagtcatttatgaataatccttatccttactactctaaacatgacaactacacaagacaagtttcattgaccactacttttactagaaatcaaagccttgaattctggaggtacaaaagtcgaaaaatcaatgcttcatattaagttttttgttgtcaccaccaagggtagaataacatttactcatgattataattaaaataatgaataa

SEQ ID NO: 286634 - DNA, 340 bp, Glycine max
  unsure (1)..(340): unsure at all n locations
ttcttctgttatcttggaatttaacataggagcattttgattacaaatttacaatctcgaggaatttactgaggtgaagatgatatatgcagtacgattcacttgcaaaataatctagatgaaaacaaaacatattggtcctaaaaactaaaccatattgattttctgttgtgaatgcaatcaattgtttaaatatcattcttcttaattgttttttatcttaaaattgcatggttactagtctatttttgtgaaaggctaaggaaaatggttactagtctatgtaagattangagtttaggactgtcatnatttctagaataacattttgcaattgcta

SEQ ID NO: 286635 - DNA, 385 bp, Glycine max
tgccacccagctcacccaggcaagcaaggttgctttctttataacaaccgccttctggaggaagaatctggaatgcccaagtgggcttgattgctatttgtacccccctttttactaaatgtacccctctttaccttttgtggtgattctttttccgtaacgttacgaaactttatgaattttgtaacgatacttattttctttccgtaaggttacgaatccttactgatcatgtctatactcttttttagctgtcgaagaagttactgaaactcacggattgcgcaacaacacctccttttggttttcgccacattacagaatttcacggatcccgtaaccctgtttccttttgatttccggcgcgtctcatgacttacatatt

SEQ ID NO: 286636 - DNA, 329 bp, Glycine max
atcttcttaacggttctttctccgccatcatccctaacggaagaaaaaaggttggatttaaaaagaaaaaggaaaaatagagggaaagaggaaggtggtttacatacggagggttgattccgttacgggcggggagggagaaggacttcttttgatggcgtttggtctttttgttgatggaggaagcttcagtgctgctcattcttcttcttctctctgtgtttcgatgaatgaatgttaatcagatttcgcgcttaaattttttctgtgtgaatgtgccaaatttttatgatcctctttctctctctcttctcttcatgcaaatcacg

SEQ ID NO: 286637 - DNA, 419 bp, Glycine max
tgtgatgaatgcaataacttagtcgttagtttatataggctgcaaaatcaaattaataatttatgattttttttaatatcaaacaaattcacctaagttgcgtgagtatgtgcataaagccaacaggactgtgcaaacggatgaatttggataatttttattgggtcatcagcaaatgtacagttagataaagataaatgggtgctttcgatttcttcacgcacacattatatatataaatatagagtgggattaactcactcatattataattttaaaggaattatttttatcttaataatttattttcttaaaatttaatgattaaaattggttatttgttataaatattagattttaagaaaataaatgtttagaatgaagagtaattataagagttattcttgaaataagtttat

SEQ ID NO: 286638 - DNA, 358 bp, Glycine max
  unsure (1)..(358): unsure at all n locations
gatgatgattgcatgatccttatgcatctttgcttctcatgagaaattcagaaatatctcctttgttgacttttaaaagtgattttagaagaatagatcgcaaaaagactcataagagagaanaaacaagagagggtatttatagatnttnatgatnaaaccgctataatcgattaccaaatcttggtattgattatttcaatcaaataccctttgtttgcatttccaggatcgtggtatcaattacaccaactagtaatcaattatatcaatcaacaaagagcaaacaaaactctttagaagtagttgtaatcgataactgaaagtggtatcaatatctcgatgtatagagtttctt

SEQ ID NO: 286639 - DNA, 413 bp, Glycine max
tcttagtttcagatgatgcagatgagtttgtggctacctcatgcactcctctaatgactatagcatcatttctagcgctaaactactgggagtttgaagccatcttcttaattaaatttctggcttcaacaggagtcatgtctctaagggctccaccactggcagcatctatcatacttctctctatgttattgagtccttcataaaaatattggagaagaagctgctccgaaatctgatggtgagggcaactgacacatagttttttaaatctctcccagtattcatataggctctccccactaagttgtctaatacttgaaatatcctttctgatggttgtggtcctggaagcagggaaatctttttctaagaatactctcttgagatcatcccagctcgtgatggacctt

SEQ ID NO: 286640 - DNA, 361 bp, Glycine max
tcattctttttggagtagaaacatgggaccaactcattttatttcaaaaaggaagtcgtatctagtcaaggtctgagagaccatacaagtttcctaacgatttctaattctgtgggccattaagtctatcatatgctgacaatagccgagaagcccatgaatctcttcgggggcggagtaagtgtctgccatcgccttggccttggctaacaatcggggaagttcttgactcccgttcaaggtaagagcaaaccgatccatccacatggttgcctcttggtgtaagagttgatcacccttcctctagcctctttttcgcgtatacttgggcatattcgtccgcaatcctatgctcgtgggc

SEQ ID NO: 286641 - DNA, 412 bp, Glycine max
tatgctgcaaacattacaacagacctcctcaatttcagcagcaaaatcaaccacagcagaacaattatgacctctccagcaacagatacaatcccggatggaggaatcaccctaatctcagatggtctagccctcaacaacaacaacagcagcctgctccttcctttcaaaatgatgctggcctaagcaagccatacattcctccaccaatccaacaacagcaacagccccagaaacaacaaacagttgaggctcctccgcaaccttccctcgaagaacttgtgaggcaaatgactatgcagaacatgtagtttcaacaagagaacagagcctccattcagagcttaactcgccagatgggacaattggctacacaattaaatcaacaacagtcccagaattctgacaagtt

SEQ ID NO: 286642 - DNA, 334 bp, Glycine max
  unsure (1)..(334): unsure at all n locations
ttcttgcttgtggagcttctatggaggctggatctttgagcttcaatgaggtccttcaatggtgatttttcaccatggagatgcagcggaaggcaaaggagaagaagataggggaggcaccatccactatggaataagccaaggaagaaggagcttcaccaccaagaattgccttggataagaagcttgaagaggatgctttaatggaggaaaagaaagagagaaggggggagcacganattgaaggaataaaagaaggaaagaaatggaactttgaagtgtatctcataagactttcattcatcaaagttacaacaagtgttacacatgcttc

SEQ ID NO: 286643 - DNA, 415 bp, Glycine max
  unsure (1)..(415): unsure at all n locations
ttttcaaagtcaagtttgaaaatcatgcttgggttatttttgaatttagcttcagctaagacctcattagctatcattacaccatggaggatatgtctgcctttgaggaaagcaatttgcacagaactgtatctttcaagtgactttggatagggtaagcactaatctcatccaagaaagccacagttactccctcctcatgttcaaataggtgtctcctccatttcaaatcccatctccaaatattctggtagaagctacccatggttgaaataagatcgttctgctgcttactaatggtgaagagctaagggtatttgtgatccagactgcagccctctcccagccaattgtctttccaaaatcgaattttatccccacaacctgccttccacaccagattntgatgaataat

SEQ ID NO: 286644 - DNA, 521 bp, Glycine max
  unsure (1)..(521): unsure at all n locations
accacgcgctacgcgaaggactacgcgagacgccgacgagaattggataaacgaaacaaaccacaacacaagannagagtgnattgatgacgtcgtaggaaccaccagangagcgaaacgagccccgcacccggagatcctcaaaaagcacagcagcaggcatgcatgcttaacaaggaggtctaaaccaaacaacccaacggaagaaaagaagctggacccagccccaaaagggaatgcaaaaaggagacacaaagtgaaccaacaacaaccacagcataacgatgcaggacgcgcaggaaatacaccgacatgcaaaggggagggggaaagcaaaacccaaagggcccaatcccaaagcagcagccattactacctctcagctgagaagaaagagccctcagggaaggaagggacgaggaagaaaaaacgcgaacgtaaccagcccaccaccacacgaggaggaaacggaaaaggcacaaaagagaagagagaaccaagaacgaaaagaacaaggaggg

SEQ ID NO: 286645 - DNA, 396 bp, Glycine max
  unsure (1)..(396): unsure at all n locations
agcgaccnataaaactcagctnacggagcactaagaccgagcggcgatatccctaagttctaaacaccgaagaatccgaaagggccttaccttactgactcaggtccaacccctaaaataatttttgcacgcatacactgctgatgaatcatacaatacccacgacctcacactcgtgttgcaaacacgtttaacacattgcgatacaatataacactttagactcctaactaggaatcctacacttatcctttaacattgcgcataaacacttgtctcaaggtaaacacgagacaggatatcgaataattcacaagctacaatacaaatatcggcacatcaagtgcgacccaccactaattcacacccaaattgcatgtctacacactaacatat

SEQ ID NO: 286646 - DNA, 334 bp, Glycine max
tcttgcttgtactcacatcgttcgcgtgtatgatatccactccacaaggtttgaagtataggagagcttctaccctataacgcaacgtggcggacaaaagtgggcaataaacttgaatgatcgtcattgtcaatgctgaaggtattctgcgctacactatccatgttcacacattattgcaactcgtggttacgtgagcatgaactactaccactatatacatgttgtttatactaacgaacacatcttaaaagcttactccgcacaatggtggcctcttgggaatgaaagcggctattactccttctgatgacacatggacacttatccctga

SEQ ID NO: 286647 - DNA, 412 bp, Glycine max
tggattgcagatccagtgcactcaacatattcatttttatctacaatgtccgcaaaaaattctgtgggattgagtaactaagaatcaccaacaaagttaattagtttattaatcaagtacttttttttatcaatttataaatacatacgtgttgcattattaattaatttaatacttacttctaaccactcttgagctcctgcaggctcccatgctgctaaaccaccttttttactctgcaataaaaaaaatgtggtttagttaaaaataaatgtggtagtaaaagtaaataaagcatcaatgatcaaagtcctttgtcaaccctaacttattattgatcaaatattaagtaacaaagaaaaggggccattagttgattgatgattggttaattaaaaggatatggacataa

SEQ ID NO: 286648 - DNA, 362 bp, Glycine max
  unsure (1)..(362): unsure at all n locations
tttcttcttatccaaggctcatcttggtggtgaagctccttcttctatggcttattccctagtggatggcgcctcctctcacctcttctcctttgtcttccgctgcatctccatggtggaaagtcaccattaaaggacctcattgaagctcaaagatccagcctccatagaagccccacaagcaagcttccatcaagtggtaatcagagcacaagagcttcaagtaggtgctctntaaacctccattaattntttttttctttaccttctcttccattggtgtttcttcagttttctgcatgtatctcctcacatgtcttgttctaaatgtntgtaacatgatntcttagagtttccaccga

SEQ ID NO: 286649 - DNA, 413 bp, Glycine max
ttgctgatttagttttcaccgacgaatggatcatagtaggtatgaaaagaggcaaatttaatcatcttgcttggatgaatgagaaaactagggcaaatgaagagggtgagaatgagggaaaaacccatgctgtgactgccattcctatacaaccaagtttcccatcaacccaacaatgtcattactcagccaataacaaaccttctccttacccaccacccagttatccataaaggtcatccctaaatcaaccacaaagcctgtctaccgcacttccaatcatgaacaccacctttagcatgaaccaaaacaccaaccaaggaaggaattttgcagcaaagagcttatagaattcaccccaattctggtgtcttatgctaacttactcccttatctacttgataatgcaatgg

SEQ ID NO: 286650 - DNA, 274 bp, Glycine max
aggcaattcagctcggtacccgggatctctaagcaccgcagctgcttctttgctgagggttatattctaatttctaaccttctatgatgaagatggcaaatctatacagggaaaccaaaataagtacctgttagtcatcatctacaactaacttttgtatagaaaagctctatacaactgtttatcgtttccccaatttatgggtcttttcgtaagtttgtacatagttttaggtttactttaattttgttaattagaaatacccaacattgtg

SEQ ID NO: 286651 - DNA, 411 bp, Glycine max
tcatgatgaatcaaaggtgattcaaaggtgtttagatgataacaatagtgacaacaaaggtgatgaacaaaaagctcaaagatcaatcaaagaacaactcaagtgaatcaaagaatatctcaagtgaatcaagaacaagtcaagagttcaagataagaatcaagaagaattcaagaactcaagaagaaagtctagagacaagaatcaagattcaaggttcaagatctcaagaatcaagatcaagattcaagaatgaagagaagactcaatcaagataagtattaaaaagtttttcaaaactttgaatagcacatgagtttttgacaaaaccttttaccaaagagtttttactctctggtaatcgattaccagtagtaaaatgagtttgaaaaagttttcaactgaatttac

SEQ ID NO: 286652 - DNA, 363 bp, Glycine max
  unsure (1)..(363): unsure at all n locations
atctttgtgttatcgattacactgatttggtaatcgattaccagtgatagtttctgaacaaaatcaaaagatgtaactcttccaatagtttttcaagtttttctaaaagttataacttttccaaatggtttttaagtttttctaaaggttataactcttctaatggtctcttgactagacttgaagagtctataaaagcaaggctntgagttgcattttatttttcattcattctttagacaacaaacttttgccaattgatttctgaatctctttgaactccttcttcttcttcctttgccaaaagctttcttaaagtttctggttttctaaacctttgaaacaaaacttgtgctattcatc

SEQ ID NO: 286653 - DNA, 419 bp, Glycine max
tataagtacaaaattgcctaaatcatttccaaatatgcatgtgaattaggaagcatcaacgagaattaagccaaggctattgtgcaagcaatcaatggggcaaaacacaccaaaagattatgatgatggatggctcaaattctcacaaaggtcttatcactttcaaattgagctttcaaaactatcatgacatgtaaaggaaaaaaaaggatttcaagtcacaaaatgttaagagacttttattttcagaacaattacccattgtcgcaacgtgcccttcgcgggcgagcgagggcgaggctcacgggtgcgctttccaaaggaggaaagatgcgcggagttgccaccaacgtttatttgtgggaaacgttggaaaaaccgaaagaaaccggtcaaaatgaaaattctaagttcgggag

SEQ ID NO: 286654 - DNA, 229 bp, Glycine max
  unsure (1)..(229): unsure at all n locations
ttcttggttcccanagctctgatcaagctctcgcacaatctagaggtaaacatatgatctctatcatacactgatgcaatcctacccaccaccggtgttgaatagataattccaaaaggcttgagctacaccttactagacaggccctacggttctcatgaaccttacggcacattttagaatccatgggtcaacgatggaaccacttctttttgcccatctaccaata

SEQ ID NO: 286655 - DNA, 398 bp, Glycine max
tggtagatttggacattgcctgtgaacggatcatttttgttctgaagacaaggcaaattaagtcatcctacttgtacgaatgacaaatctaaggcttgtgaatagggtgataatgatggataaccccatgttgagactgctattcgtatacagcctaacatcccaccaaccgagcaatgtcgttactcatccaataacaaaccttgtccttacccacctggccagcatccacataggccatccctaaaatcaaccacgaaacctacctacaccacttgcactgacagacaccacctttatcagcaactcaaacacctgccaataaatgaatttctcctggagatagcctgtcaaaaacaccccacttccagtgtcctatgctgacttgctccatatct

SEQ ID NO: 286656 - DNA, 300 bp, Glycine max
  unsure (1)..(300): unsure at all n locations
atcttacaaatatgttntaaatccaagcccataagtaaaatcaaatcaaatctagataagataagataagataagatctagatgaaataatatctagatgaggtcaaatctaaataatatctagataagataagatctaattttatagaataaattagtctgccctcttcaagtccaagcccaattctagattcaggcccaatgcttcattaattcctgcaattagaataaaaacatcaaattagctgaatgggcccaaataatanaactgcctaataaatttgacaattaagactaatc

SEQ ID NO: 286657 - DNA, 417 bp, Glycine max
  unsure (1)..(417): unsure at all n locations
tctaaactttgtacaagaatgaagctctgatacctcttgttttacaagtggcctcagatatcttaagaagggggggttgaattaagatattccaaacttttctcctaattaaaaatctatcttactttttacttaagttatgaattcccttaatgacaatcttcttaaatattaattcaaatgaagcaacttgaattatgaatataaagcaataataaataaaggagattaagggaagagaaaatgcaaactcagttttatactggttcggccacacccttgtgcctacgtccagtccccaagcaacccgcttgagagttccactaacttgtaaattccttttacaagttctaaacacacaaggacaacccttcctttgtgtttagagattctntacaacaagagactcacagtctc

SEQ ID NO: 286658 - DNA, 233 bp, Glycine max
ttctttgaaatctcggataaaccaaatcatgttgataaattgcaaaaagctctttatggtttgaaacaagcccttagggcttggtatgaacgcttaagtaaatttcttctaaaaaaagaattctctagaaggaaagtggataccacattgttcatacaagaataagcataatgatattttggctggtccaaaaatatgatgatgatataaattttggaaccactaatgattca

SEQ ID NO: 286659 - DNA, 415 bp, Glycine max
tgtgcattcaatatcctgatgaggatgttccatatgttttcaagactggactaatacatttgctgcccaagtttcatgatcttgcaggtgaagatcctcataagcatcttaaggagttccatattgtctgttccaccatgaaatcccttgatgtccaagaagatcatatctttctaaaggcttttcctcattctctagagggagtggcgaaggattggctgtactaccttgctcccaagtccattaccagctgggatgaccttaagaaggtgttcttggataaattcttccctgcatctaggaccactgccatcagaaaagacatttcaggcatcatgaaacttagtggagagatcttgtatgagtactgggaaagattcaagatattgtgtgaaagctgtcctcactaccagat

SEQ ID NO: 286660 - DNA, 253 bp, Glycine max
gcagcattcttttcttaaataggtcagctgaaaagatgacggaagcacgatgttgggcccgctagactcgtgggtcatgccaaaccaaccacatacagagccaaccaacagccaaaccaagaggtcgctggaaagtgggttgagtgaaaacgtaatgtgccacaaaggggatcgtgcgtgaaggtgacatgtcggagtctggggagcgtggtggcacatgcggaggcgttggggttgttggagagagacactt

SEQ ID NO: 286661 - DNA, 416 bp, Glycine max
aggacctataacactcagcttcatgcaggaaacatgctatggcttttttttcttaattcggttttagaattagaagaaacatgaatattaggatttgcttgtgagagttttcgctcgaatatgggctgccccatgtttgatactttacatagaggtagtgtggaaaacaccttgcaatagtgtgtatacatatgtaaatataaggagcatgaaattcctagcaaagtgtgaatgattgtcttcctaaatgaatgtatgatagtgtggaatacctttttgaatgcaaatatgtgcaggatgtaattagctttccaatatgcatataaataaatatgagtgaaacagtcaaaatttgtatggcgtacttcaaatgtatgtaagtagtttgtgatatcaaatagttaagatataaatta

SEQ ID NO: 286662 - DNA, 253 bp, Glycine max
cattatttctttcgctggagctgacccattaactgccctaactcctttagactggtggtccctaagctcttgaccttgacttgatagaacctttttttaaacgaaggcgtttgacttgatcccattgtttactaaagtgaaacaaaatttagtgcgaatcaaaactccgacatccatcatgggtggaatggatgaatgcatgaagacatgcatatgacatagatgcaatctatgattacaggaccccggaaat

SEQ ID NO: 286663 - DNA, 401 bp, Glycine max
gttttggttgtgcatcttcttctctgtttgttgattcttttcatggctaggctggtaaatgccaacaacttctcctgtcacagttgggtgttcccaaaacatgtctctcaccttttcaaaataaccgtagctcaaggatgtcatcagcacagcttttgatttcggctttcctggtgaattaacaatatcccccttttggttaacatcaggcaaaagattctccttcaaagtgcaagctaagatctgatccaacacatgttgaaatggtccagttctagtatcaaacactcttatttggatgcctactctttcatcaacgtcagctaaataagcttgatagtatctgctaacaagtcctcatactttgttggtagggtggaacagatatctacccaagaaat

SEQ ID NO: 286664 - DNA, 351 bp, Glycine max
ttcttctcgatatgtgatgtgcatgaatcgaacatccgagttaaaagttatggcgatttgaatttctcgaaagctttcggtatttaattttgagcatctcgacacatgatgcgcccgaattggacatccgtgtgaaagttaagaccacttgaatttctcgagagcttcgctattcaatttggagcgtctcgatatgttatgcgcctgaatcatacatccgagtgaaaagttatgaccatttgaatttctcaagagcttccgttgttaaatttcgagcatctcgatatgtaatgcgcctgtatctgacatccgagtcaaaaggtatgaccttctgaatttctcgagagcttc

SEQ ID NO: 286665 - DNA, 384 bp, Glycine max
tcctctaccgtaaaaaaaatattatttgcctttgtttttaaaaagaattgcgcaatgtcggcagaaaaatatcagtcgtggctatataacgaccgatgtcaggtatttttgtttcaattcaatccctgaataatttttggatattgtccaataagaaatgttcgatcggcgtcatcaagtgatgcttgctttttattttagacctgctggatcggtcatctttcctggccgacatcgactatcattttttttatcagtgtcggtgaataatgttttttggccgaggtgggctgatgtttttctagccgagtaaatgagaacacgccagtgtctgccgaaacacagcttcggttgagctcgcacgaaaaaacaaagccgacctac

SEQ ID NO: 286666 - DNA, 293 bp, Glycine max
  unsure (1)..(293): unsure at all n locations
ttcttgtagacaataggtaaggaaaactctaccttatggtctattgcttaatctgattggaagggttgtttatgcttcaaagcatgtttgatttttgtgggttggtggaatttggtgttgggtttcctttagagtccttgccccttgtatgcttttgatttgggaattcttgatgaaatcttgtatatgtttaattgatggttgatttatgtttttttggacttgtgttgagtattgngatggttttgaatcatttgtgagtgtttggaaaggtagagagtaatgaagatacg

SEQ ID NO: 286667 - DNA, 403 bp, Glycine max
tgaagctccaggaaaagcttgaagatgttttgtttatgttttggcttttacatgcctaactcccttgagtggcatttgtattggttgttatcttggttgtttcatcttagtacattttgatatttgtattgcatcatgcatcatcgtggtttatgtgaagaaaagcttctaagttagaaagtttattcagaggaaataactctctattttaatcggttacatcctcatcgcaatccattacaacaagttgtctaaagcttaaagagttgagtctcatattagtttaatcgattatagtagtcttttaatcgattacactgttgtttgagatagtgactgatttattcaggagtctctgctttaatcgattgccttgagcagagtacttattagacctattttg

SEQ ID NO: 286668 - DNA, 331 bp, Glycine max
  unsure (1)..(331): unsure at all n locations
agctttaatgtgatgcatttggggcaggcataggtttgtgttgatccaagaagggcatcctattgcatatttttttagaaactgaatgaagctgctcttagttattctacatatgataaggaattgtatgccttaattagagctttgtagacttagcaacattatctcttgcccaaggaatttgttattcatagtaatcatgagtctttgaaatatttgaaaggacaaggaaagttgaacaagaggcatgaantttttattcactatgatcatgagtctttgaaatatctgaaaggacaaggaaagttgaacaagaagcatgctcttgttg

SEQ ID NO: 286669 - DNA, 415 bp, Glycine max
tgtaggattatggggtacccatcacatgtggtattaggtggcggtcgggcgatggtgcacaacaagttttccacatccacaaatcgcgcataaacccaccatcccctgttgcccacctccaactgagctcacgtactcccacgtagcccatatcatcgtttctctcaacaccgggtccccatcaatcctcccaagcttcccaacatccaattaattcaacatccaatcatcatggactaacaaaaccaagcaaaacagggcaaaggcagaaaactctgcccaaaacacaactcaaaatcacagcttttctcacttaaagaccccagtaacaattccttctttccaattccttaaccgttggatcgactcgaaaattttactggaagtctctagtacataagcctacattttgacc

SEQ ID NO: 286670 - DNA, 361 bp, Glycine max
attcttttctatgcagagaatatccaaggaaaataccttcatctgacttagcatcaaattttcctaagttatcttttccattattcaatacaaaacatttacaaccaaagatatgaagatgagagatgtttggttttctgccattgaccaattcatatggagttttctttaaaatgggtcttattaaagccctatttaaactgtagcatgcagtgttaacggcttcagcccaaaagtattttggaagaggagtatcatttaataaagttctagcaatctcttccagagatctatttttcctttcaacaacaccattttgatgaggggctcttggtgcagaaaaggtatgcttaatcccatg

SEQ ID NO: 286671 - DNA, 412 bp, Glycine max
tctagcacactctagatattttctcaaagatcctttgtgttaatcatgtcaaagtttcttgtgaagttgcaaaccaaatttagagaagctccaacggctaacgaaggctgggcagcgtttctaccgaggcagcttcatgtagttttctctagaagcttcattaagaggcttcctccagaagcttcattaagaggcttctggcacactccagacatcttctcaaagatcccaacggtcagatcatggaaaagtgttttgtgaagttgcagaccaaatttcgagaagatccaacggttaatgaatgttgggcagcgtttttacagaggcagctacatgtagctctctctagaagcttcattaagaggtttcctctagaagcttcctcgtggcttctttgagaagctttctcaag

SEQ ID NO: 286672 - DNA, 281 bp, Glycine max
  unsure (1)..(281): unsure at all n locations
ttcttgttgtttgataatccctacaaaattganagtttaattctttaatctaatccgatttgaagttcatacaaaatccagtaaacagtaggtttttatccaataagttttaatttgaaccaaaactttccttatttctctcctttccactttcaaaattatttgaaatttaaaaaatggatcactggatcataattgataataaattagttcaaaactacaggtaatacaaaggtaattattttggaatgacttcaaatttatcttaattcacataaacc

SEQ ID NO: 286673 - DNA, 415 bp, Glycine max
tgtaattgattgttttcctcataaattaaaaaattgaattatttataaaggaggaaaagtacaactaagacaagttatcctccaatggtggcggcttgtgttttgccattctgtttatgtggaacatgtttctgctttctagttcttgggctaccatttttgatgtggttaacgtagattattaccatcttttatacccagaaaatacatgctgctatgttgaaatttttttttttaggaagaaacctatagtacctgacgtgctatcccaccaacacatcacaatgttatctcggctgtttggtattttgtttccactggacttcaaatttatttggttttagatgcttgccatgttttgttactattgaacagaagtgtaattcacttagttaacaatgatcttattcttgat

SEQ ID NO: 286674 - DNA, 323 bp, Glycine max
  unsure (1)..(323): unsure at all n locations
atcttgagccatcacccaatcttgcaacacaatgttgggtccaaggttatcaaactcgacagtttacgtaaactcgtaagagttccatagactcaactcgtagacttatacgagtccacttcatataaaaataataacaaaatatctataaataacataccaattaaacattttaacaatataataaagcaaaatagtaaatcataaatttcacaatactgaaataaccaagtctagtaatgcatcactactagataataacttgcagattntatagtagtggtagagcattcccatcaaggatntgatgttattagagaata

SEQ ID NO: 286675 - DNA, 415 bp, Glycine max
tgaagtgagaaagtatggaagagtcagtcttcctacttttattcattgaccacaaagtggtacctggagatatgtcgcgggggtcaggagaccttggggacgtcaggtgaggtgctattgcccaaaaccaagcttgaccaatcccgacccaacccgggcatagtcagtcagtgagaacctgtgacgtacctaaacaggcgagctcctggcagtcaaccgataaaagaacaaagaccacaaagcaaggaggcttgtgtggtggctggccagctatgaatcttgagtggtagttggaatatgacctctagtattcgattaccaagggtgtgtaatcgattacaaggattaaaaatgaagacaggaagttaagatggtctctggtaatcgattaccaatggtgcgtaatcgattacca

SEQ ID NO: 286676 - DNA, 341 bp, Glycine max
  unsure (1)..(341): unsure at all n locations
ttcttgatcccaaaccggtgagagtgtgaccttactctgtgagtgaacgactagctatgagtgataatctttgcataaatctctgatttttagaatgaaatgtataaatgaggacatgatgaaggccatgattgtacatacacaagctcttttgaccaaacaacttaccatgaatgataattgcatcctttgctccctttttgagctgaatgatattgtcaaaaatttgaaccctgaacttaaataattatctcctgattccttgtttagattttagaagagcatatggttcaaggcaaatttactctanattttgggagggaagtcaattagaaatgaaa

SEQ ID NO: 286677 - DNA, 418 bp, Glycine max
tattgatttgtcatgaattgaaccctgaactttaaatgagtatctcctaaataccttgtttagattctaggagattatatggttcaaggaaaatttactctaaatttgggggaggaaagtcaattagaatgaaaagaaaaaggttaagcatcagcacacacaacaaataagttgtatgttaaaaaaaataagttgtgttgttacaaaaaggtcgaaagtaacttaagaaaagggaatagtgagaaggctatttgtacaaaacaagaaaagatcattgggattagtctaggacttgtgctctcttagaatctaaacttttgaatcctagaaaaaccagtgaaaatttttgtagccacaacctcactacaagcctgagaaagtccttctgattctatttatatatttctgacttgattac

SEQ ID NO: 286678 - DNA, 348 bp, Glycine max
gcatttctgatgaactttaccaaaaattgcggtaggaagtcccaagactgggaagctcccagtgaagggttctgcctttcttacagctgaaggatcatccagatcaagccttgctataagttcaccagcctgcaaaaggtgatacaattttattatctttttcaatttcaacaattgtacttcctatgtggaataaaatgctatatacctgcattgcttgaccttcagacattttgaaatgaataatcccacaagcaggcgaaagaaaggcatgcacatttttatgacctcaacttcagcatacggtgtgtcaccatcaacatgactgtcatctgcaaccaaatatct

SEQ ID NO: 286679 - DNA, 413 bp, Glycine max
ctgaagtgaaaggatgtgactcttcacatttgaatttgaatttcagcgttcaagggcactggtaatcgattaccaaaacattgtaatcgattacagctttttgaaaataattggaacgttgtaaattcagtttgaaaactttttcaaactcattttgctactggtaatcgattacaacaatctggtaatcgattaccagagagtaaaaattctttggtaaagggttttttcaaaaactcatgtgctattcaaagttttgaaaaactttttaatacttatcttgattgagtcttctctttattcttgaatcttgatcttgatttttgagatcttgaaccttgaatcttgattcttgtctctagactttcttcttgagtcttgaattgttcttgaattttatcttgaactcttga

SEQ ID NO: 286680 - DNA, 334 bp, Glycine max
  unsure (1)..(334): unsure at all n locations
tagcttcacatggagctacatcacagcagctgctactgtgcacccaacattgtcgcttcttctcttcgcgcctcttctcctcattcgtgcttccttcacgagtctcttctccacctctacaagtctcatctcctctgtcatcatgagtagtgttgtgtcgtcgataatgagtttttattttttggactctgtntactccattcagatttgcaatccatatgggacatgcgaaatacgaaatacaaaatacaaaatcataacttatatggattgacaattcgtatgtttcatacagattagcataaattgaagttacaaacaaaaaaactaacct

SEQ ID NO: 286681 - DNA, 415 bp, Glycine max
ttgcggatttggtctttgccggcaaaaggatcatatctggtctgaaaagaggcaaatttgatcatcctactttgatgagtgagaaagctggggcaaatgaagaggatgagaatgaggaaggaacccatgttgtggctgccattcctacatggccaaatttcccaccagcccaacaatgtcatcgcttagccaatatcagcccttctcattacccacctcccagtcatccaccaagtttgctagtcgcacatccaatgccaagcgcaaaccaaaacaccaaccaagaaatgaattttgcagcgaaaaagcctaaagaattcaccccaattccggtgtcctatgctgacttgctcccatatctgctcgataattcaatggttgctataacccccgccaaggttcctcaacctccttt

SEQ ID NO: 286682 - DNA, 329 bp, Glycine max
  unsure (1)..(329): unsure at all n locations
cattctatcttacgattaaaaacactatgacaaattacattgacacccgttatagtttcttgaaattttacacgatattcattgtcccctaccttttttaagcttatagtaactccccttaattgtttgaaaaacattaaaccctgtaccctttatacctaagaaacacattacatcataaatccctgacactcctgtggtttcttgaaattttcacacgatactcctagtccactacctttntaaggtaactcctttgaactgtttgaagcacattggacaatgtatccctattatccaagaacacataacatcttgcatcctataat

SEQ ID NO: 286683 - DNA, 415 bp, Glycine max
tcatgatgatgaatcaagttgattcaagttgttttaatgatgaaaaagatgatgacaaaaagcctaaagaatgatttcaagattaagttcaagatcaagattaatttcaagattcatcaagaagattcaagattcaagaataatcaagatcaagattcaagactcaaagattcaagaatcaagagaagacttaatcaagataagtattaaaaagtttttcaaaacattgagtagcacaagaagatttcacaaaattattaccaaagagttttactctctggtaattgattacaagaatgtagtaatcgattaccaatgtttttaaaacgttaagattttcaaaattcaaaatgaagactcacatctgttgatgtgtaatcgattacaccttaatggtaatcgattaccagtgact

SEQ ID NO: 286684 - DNA, 263 bp, Glycine max
tctttcttttacctcatcgtctctcacagtctttatatttgggagccaatccagtccttgtgttcggactctcagccacttatgatatccgccgatgatcccattactgcttaccctaagctctctgtcctttcttcacgccgcatcccatgccttgcgaactccttggagtaccctcgcgttgtggtcagtgaaacctcgtgcgatgaaaggcgtgatgctttcgtctgatggcactgctctcatgggacatccttcgcatg

SEQ ID NO: 286685 - DNA, 403 bp, Glycine max
ttataagcgcaggtctgggagacaaaggtttgtgttttcgatatgcgaagatgatgttcggagtactttggatttggtacgaccatgccctcctgatttccggctgggaaattggcgagtggaagaacgccccggcatttacgcaacatgcataatataaacctttacggttttaaaagctctatagttgggcctaggctttagagtttttccttttgttaaggctttgtgtcttttgtttttgaatttataatacaaggatctttcttcatctgttcctggtctctacccattctcattcatttgcatgtttacttctctttctgacacggcagatccgatgacgagtcccccgaaggactaatacctgcgacccgcctatcaccttcaagcaagaaatgaa

SEQ ID NO: 286686 - DNA, 246 bp, Glycine max
  unsure (1)..(246): unsure at all n locations
ttttgcttgaaggtgtgtaacccaccattttccatagtaaaatactggtaatgtgtctactatcattgtcatcattntttcgtcaatgaggtgccacttgagctgccaagttctccacctttgggcgtattctttgaaagatccgggccccctttttgcacatgttttgtagttgcatcctatccaaagccattatactgacgcagcctaacaaaggcaaccattaggtccttcaagaatggactc

SEQ ID NO: 286687 - DNA, 414 bp, Glycine max
ttgatgatatggtcttcaccgacgaaaggttcattgtgggtctaaaaagaggcaaatctgatcatcatgctttgataaatgccaaaaaaaaactagggcaaatgaagagggtgagaatgagggagaagcccatgctgtgactgccattcctatacagccaagtttcccaccaacccaacaatgtcattactcagccaataaaaaaccttctccttacccaccgcccagttatcaacaaaggatatccctaaatcaaccacaaagtctgtctaccgcacttccaatgacgaacaccacctttagcacaaaccaaaaacaccaaccaagaaatgaattttgcagcgagaaagcctgtagaattcaccccaattccagtgtcctatgctgacttgctcccatatctacttgataatt

SEQ ID NO: 286688 - DNA, 349 bp, Glycine max
ttgcttgtcttcttatataacaatagagaattctcggtgacacattctaaaacacattttactgaactcattattattgagtaaaatttattacaaattacaaaattttataattctataagtataatttcctattcgagctccacttataatttacaatttctgattaattttaattaaaaaataaaaagtgtgttaaaaaaaagttcgttaaagagtggcttactgatacttgtgtcctctcaacataataagttgtaacatggacatgtgacaccttgttatgggagtggtttctcaatatatggtctctcattttaaatcagatctatgtttttcgtattcaact

SEQ ID NO: 286689 - DNA, 405 bp, Glycine max
tatgtatccaatcatttgcattttgttttgtatttatacgataatgattttcatgtacccatctcttattcctgtttgtttctcttcttgcctttatttttatagcgttataattactatttatttgttttattttatttctatttccttctctttttctctttttctttttctcaccacaaacatacattatctgtatttaggctattgtatcctgcatttttattattgtatccgatgctttccaatgcattcgggaaaacttattttggaatttaaaatgaaaggtgtcggatgtaaaatacatttcacaatataacagaaggtgtcggatacaaaatagtaagagtgataaaaataaacttcctgtatttatagagaataaggcctgttggaagacttcct

SEQ ID NO: 286690 - DNA, 341 bp, Glycine max
  unsure (1)..(341): unsure at all n locations
tttctngaggatagagacttcttaagctatttatcttctctcttagagaggcttactcaagcttgaggatagagacttcccaagctatttatcttctctctcagagaagctctctaactttctagctttcttactctaagaagtggattcactcttgtcttggatcgactcactctacggtggctcactcaagcttgaggatagagacttcccaaactatttatctcanaaatcctcccaactacttcaaaaatttcctttgtactattaaacccactctaataatatttttctaagctatggataacactactcaatcgtcaactatttctgtccctatc

SEQ ID NO: 286691 - DNA, 411 bp, Glycine max
  unsure (1)..(411): unsure at all n locations
ntaggagaaaccataaaaactaaggtagttcctttacaaaaatcaattgaggaagcttcgccaagtatccctattgaaaaacctttattcaaacctttcaaagttagtgagaaggctaaacgaaaatttagggaacttagaaaaactagatccttaattgaaggcgtaggtgataaccatagtgaattacttaacaagattggtagtttacttaaggtcattccagatactcctcaagcctcggaaaatacttccaaaatggtaacaagaagtacctccaaattaattaatgttattaatgaagatagtgaccaaaactcagataacacaactgagataggatcagtgtcagaaaagaatataaatccaattaattccaaacactggataacaccctccaagttatattat

SEQ ID NO: 286692 - DNA, 355 bp, Glycine max
ttctttaaatatttcagatgaagtcattcgattattgttacttcataagtagcagcttggaggagatatatatgtttgtcaaatgttgttgacaatgtagaaacattgttaggcatgacaaccggatcgggttttgcttatcctatctcagtccccgattcctcatttccttctctacccctgtccccgaaattcaatgggagtgcatatttatgtgcatcccagtctccagtgaggttgagtatttaccgtcccgtcctgcccccgacatatttataaaattgtattaaaaaatctaatatttcatagaatgaaaaatataattgtaaataaaaatcacaatattgtacatgac

SEQ ID NO: 286693 - DNA, 419 bp, Glycine max
tgtacaggagataatgacaatttcgactttatgtttgcttggttgtccgtttgtcttattttattagaattaatatagaaattttgttattaacctcatctattattttattagaattttctttttttgtattattttattagaattattaattgttttaaaaaaacaaagacattctaagatggttctttgaaaaaccatcttagaaagtatacattctaaaataatttttgaaaaaattatcttagaattcttaatatttttaattgaaaaaaaaacgttctagccatcttaaaaaatataccttttaagaaggttctttgaaaaagtgtcttagaatccttaaatttttttgtttgtttaaaaaaagaacaaggattctaagacagttttgcagagaactgtcttagagagtttat

SEQ ID NO: 286694 - DNA, 239 bp, Glycine max
tcttgatgtcctggatcgtcttcatcaatggagtcctttgattcttgataatccctggctacagatttggtaaggcagaaaggtgattgtaaacgccactttctggagaaaatgagtcaacaacaagctcaccaccatatgaagccgtggataagagtttgaagtatgacaaaatgaccgaatggagagagagaggggggacgggggctcacagtataaatccctttgatgacgacctg

SEQ ID NO: 286695 - DNA, 408 bp, Glycine max
ttattctttgtacagtgaatacactcttattactctctcgaatatcccgagagaagagagtgagagcttagatcctatatccgtctatgagacaattaagaactagttagtgagccaaccaagcaccaaatcttctagtttgttttagagttaacaatggcttggtaggacaaagaatactacattgttcaagcttaatgataaacttggactgtaagagtcacaagtgacattaaaaaatacttataactttgaaaagttaatagaacttgtggtttaccaagaactggacgtagtatcaatgacaaagataaatcaatataaaacttcatgtgtctaatctttatttcattatgtgtgtaattgaccttaggtttaaatatgatttctgttttggaaaagttttta

SEQ ID NO: 286696 - DNA, 347 bp, Glycine max
  unsure (1)..(347): unsure at all n locations
atcttgccatccagctcgcccaggcgagccaggtttcctaaaaagcccaagtgcgcttggtttctatttgcaccccccatttactaaatacaccacttcctttttttgctgattcttttttcgtaacgttatgaaactttacgaattttgtaacgatacttgttttctttccgtaatgtcacggaaccttatgtattatgtattcatccctttttgggcttccggaaagttacgaaacctcacgaattgtgcaacaatgcttccttttgactntccgcaatgtacagaacttcacggattgtgcaacaatgcttccttttgacctccggcatgtcacggaacttcat

SEQ ID NO: 286697 - DNA, 416 bp, Glycine max
tcaatggaggaagagaatgagagagagagaaagattgtgtcgtgggaatgaaggaaagagagggagagaagtttaactttgaagtgtgtctcacaggactctaactcatcaaagttatcacaagtattacacatgcttctatttatagcctaagcagcttccttgagaagctagtgttacacccttccaatagctaagctcaccctcatgccaaaatacatcaaggaagaaagcttgcatgagaggcttccttggggaggaagtgttacacccctccaatagcaaagctcaccccatgggaacacacacccctccaatagctaagctcaccgccccccaaaatacaaaaaaaaagaccctactacaaagactactcaaaatgccctgaaatacaaggctaaaaccctatactacta

SEQ ID NO: 286698 - DNA, 331 bp, Glycine max
  unsure (1)..(331): unsure at all n locations
atcttgttgtgacccttaatgggccttcccagttgggaccaagcgttggggaatcttttctagcttcgcctcaaactcacagtacgaggtcactgggttgaaaggctcgtggttgaacctttgtattatatctctttatcactcagagcttcgtagtttattctctgatcctggccatctcttagacttcatctattgtcttgagttctacctttatgttttcttcattntgttgttgttggaacaatagtctccttgtccacagttcccctacttcgatggngatcatggcatttgtgccatatgtgaatcaataaggattttcattaac

SEQ ID NO: 286699 - DNA, 412 bp, Glycine max
  unsure (1)..(412): unsure at all n locations
ttttgaaatttcaaaaatatggtatttactctctttgttttaattaccagaggatgtaatcgattaccagtggccaaagtagtttctgaaatgttcttaaaattttgaatttgattttaaaagcctataatcgattacacaagacttgtaatcgattaccagaagttctaaacattttataaaagtctttagaaatttgaatttaaatttcaaagcctgtaatcgattacagcttgtgtgtaatcgattaccataacttaaaattcaaatttcaagtctttagagtcacaactctttagaaaaataactgtgtaatcgattacaccattttggtaatcgattactagtaaggaattttcaaaaataactcccaacaatcacatctattcaaatgtntttgaatggccatcaa

SEQ ID NO: 286700 - DNA, 328 bp, Glycine max
  unsure (1)..(328): unsure at all n locations
tttcttgtatgcttaaagtctcacgattgtcacgtgctcatgcaacaattgttagccgtggctatacgagacatcttgccaaacaaagtcaggttagccataactcgcctatgctttttcttccatgctatatgtagcaaagtcattgatcctatgaagtttgatgagctggaaaatgaggctgcaattatactgtgccagttggagatgtattttccccctgctttctttgacatcatgattcacttaattgtgcatatggtaagagaaatcannatgtgtggtccctgttatctacngtggatgtnacccggtgagcgatacatga

SEQ ID NO: 286701 - DNA, 413 bp, Glycine max
tgagtataattcattctttgtgttgtgagcctacttcattcatttggattattgatgtttctgtcacaatcaagcaattgttaacgttctcatatgggtgtacattgtggtcatgttttcgtttctagaattcattgaaatattattgttgattctgaataagtgatcatttttttttatttcaaaattattgtctcctaatcaatcgagtgttcatcttattattgatttctcatcttccaatcatgtcttgttaaactgcttgatatattgtgatgttgttattttgttacgaataaagaaagacttcactcttgttaatcacattaaggcattcgagaggaaatccttgagtaggcatgatccttgtacttacagatgaaagtaaacttaataagtcaagtacttgtgct

SEQ ID NO: 286702 - DNA, 336 bp, Glycine max
  unsure (1)..(336): unsure at all n locations
tctttctttaccctatatttatgatacatctagttcaacactagtttttttataattttattattatttatcttcaatctataaaaaaaataaacatatttttcttggttgatcaaggacgtgatacatgaaaagactatcttcatttgtccttgattgtttaaaaaaagacctacataagatattattaaaatattccttaccaacttctataatactcctactatatgttgaggacaatgcaaaaattgttaaaccatcaatctatactaagtcttataaaagtagtaatgcgcgatttagtctttntattttatatggtggggtatgtgatta

SEQ ID NO: 286703 - DNA, 412 bp, Glycine max
ttgataaatcttcggtagtaaccagtcaatctattataaccctttaactattagacattggtaggcttcggccaatctaacaccgcttgcaccttcccagcatccaatgctactccagctccagagactttatgaccaaggtattccacctcaagtaatccaaatgaacacttagagagttgagaaaataaaacatactattgtagtgtctgtaagacatactccaaatgacacaaatgagtagactaggaagggctatagaccagtatatcatcggaaaaaaacaagcacaaattttcctaactcattttgaaaaataatgttcatcaaacattgaaaggtagttggtgcatttgtgagtccaaatggcataacaagccattcataatggccatgatgagtcctaaaagca

SEQ ID NO: 286704 - DNA, 335 bp, Glycine max
ttcttgtccttttgggctttcactaagggtggaaatgagtgagccaaacttgaattgagttgaacacataaggcttgagtttgactaattatctctaataggcttaactttgtcatacataaaagtctagcttggcgagtctaattaaaagcttgcttaaagacgtctttgatcaattaattattttaaaatctagtgaaatactaactaaaaaaaagaaacttataaaatttaatatgagtaatgtacaaatccaaaaataattgataaacaaaatcatattgaattcaagtagttaaaatacaaagaatatataaaaaatgaaaaaaagagag

SEQ ID NO: 286705 - DNA, 410 bp, Glycine max
tggccgatggtccgcaacgaattgatcaaagaatttggcaaatggtcgcatgactacttcatcttcttcggtggaacacaaagattcgaacaattaaggatgtcgctacatgttgatgggttctcccaagtatgttgcatttgctaattttttttaaaaaaaacaaagttttaaaataattacatgtgtatgtttctttgattcaggttagtgtggacaagtggatggatataatggacataggatatgtcattgtatctaggtataacgtaatcgttatcccgacaacaaagcatgacattttttcctctgagaagtcaaccaccaccaaattattttattcaccgcatgatatgtgtcggtcacatgtttggaaatcattttgttcaggtacattgaatataattatt

SEQ ID NO: 286706 - DNA, 343 bp, Glycine max
  unsure (1)..(343): unsure at all n locations
tttcttctgagagtgccttattgtgtgctttttttttgggtaagaatactttgggcttacaagcttctgagggtgccctattgtgtgctgtttttttttttagacaaattcccttatcaatcccccaaattaaggacttatcataacttgaaacccttatgctttcttagaaccctaaaacaaggtcaaggatatcaaaattaagctcaggggtttattcaaacaaatcattattacttttggctcaacaggggtgcaagggataaattcatcacaggttagcttnttggctgagtggctaaaataaaaagaaacatggccttgatcatatccaccttatgta

SEQ ID NO: 286707 - DNA, 411 bp, Glycine max
tgccacccagctcgcctaggcgagctcatttcgttcatgcgagctaggttgcttcctccagaagcaaccgccttctggaggaatatcctggaaggcccaagtgggcctggttgctatttgcacccccatttttactaaatacaccccttgctctttttttggtgtttttttcgtaacgttacgaaactttacgaatttcgtaacgatgcttgttttctttcagtgatgttacaaaatcttacggattacataaccatcccctttttttccttccggaacgttacagaactttacggattgcgcactaacacttccttttaatttccggcatgtcacagaacttcacagattgtgctacaatgctttcttttgactttcggcatgtcacggaacatcacgaatagcctaacg

SEQ ID NO: 286708 - DNA, 334 bp, Glycine max
  unsure (1)..(334): unsure at all n locations
tttctttaacataaagagcatacttatttttacaacgaacaaacccattgtcttggaagtacttgtcaatgcgactattccatgccctcggtgcttgctttagaccatacaacgccttgttcaatttcaagatatttccttcttgacctttgatgagaaaacccattggttgttcaacataaacattttcttcaagatagccatttagcaatgccgattntacatcaagctgaaaaactctccacttcatttgagctgccaaggaaataaaaagacgaattgtctccatgcagacaaccggtgcaaacacttcatcataatcaactccatattg

SEQ ID NO: 286709 - DNA, 409 bp, Glycine max
  unsure (1)..(409): unsure at all n locations
taaattgcctcttggatcaatggttcatattgttatccatgtttctcagttaaagaagtttaatggtactgctactgctgggaactttagtccttcacctttattggatacttctcagaaggaacctgcagctatcattgacagaatgacagtcaagagagaaaatcgtgctgtaaccaaagttttggttcaatggaaacatcaactacctgaagatgcaacttgggaattcttttatgacttgaatcagaagtttcctcactttaatccttgaggacaaggattcttttgggtgggaggaattgatacaggcttangaaggtagttagttagttagactcgattctgttaacttctgttagttggaaagtagttaggcagttagtggttagaagctataagtagcaat

SEQ ID NO: 286710 - DNA, 116 bp, Glycine max
  unsure (1)..(116): unsure at all n locations
actctcagtacaatctgctctgatgccgcatagttaagccagccccgacacccgccaacacccgctgacgcgaaccccttgcnggcgcatngaatataacttcccataatgtatgc

SEQ ID NO: 286711 - DNA, 353 bp, Glycine max
ttttttttttcttcacaataaggccaacttatttacctccgttcgttaacgaaatgaaaatgacaaagtaatcataatttcataatacatggatagcaacgtaagcaaaaacatgatagagtggcaatcatagaaagcacctcacaacaatgtaatatatttattgacacataactgtcaataatagtagaaacttgtttacaatatttaaacaattgtatcgaaaacaacacattcattcttcctatgtcatgtgtaactatctacaccggatgttcttaacttttagaaaatatgctactcatttcttgtgaattgtgtcatggtctccaagtataacggcgggccatcaa

SEQ ID NO: 286712 - DNA, 410 bp, Glycine max
tactgttgacaaaaatcttattgatgttggttatttaatggttttacttgcagtgataaggccttaactttttacttatatgcacattttctaattatttttgtttaaaccaataaggtttttacaaaaggagtggatgcggatactgtggttttgatggcagctcaagcttcaagacttgagaatcaagatgcaatagacactgccatagttggaatgttggctgatccaaaagaggttagtcattgatatattattcaccgcgattcttttgatgacatatttattagctgcaagcctctaactgtaatctgcagatcatcataattgttactgtattttagtttgcgttttaattttcttgtctaacttactgctacaaaggctcgtcttggtatccaagaagtaca

SEQ ID NO: 286713 - DNA, 360 bp, Glycine max
  unsure (1)..(360): unsure at all n locations
tgcatgctatcttangaacccaaacttgtagcttcaacgcaaggaaacatgcttatggctaggaatccaaaatttggttttagaattagaaaagcatgaaaattaagacttgcttgtgagagtttttgctcgaatttgggctgccccatgtttgatactttgcatagaggtagcgtggaaaacaccttgcaatagtgtgtatacataggtaaatataaggggcatgaaattctttgcaaagggtgaaggagtattgaggtcgctttctaaatgaatgtatgatagcacgggattcccttttgaatgcaagtatgtacataatgtaaatagcttgccaatatgcataagtgtgagtgaaac

SEQ ID NO: 286714 - DNA, 407 bp, Glycine max
tctggtgggacatcttgacttgctttccaatctgacattcaccacagattctgccttcttctattttcagattgggaatgcctctaacagcacctttgtcaatgattttcttcatgcctcttaagtgcagatgtccaaatctttgatgccatattctgacttcatcttctttggaggatagacatgtggaggagtagctggtttcttgaggtgtccataggtaacagttgtcctttgatctgctgcccttcattagaacttcactcttctcatttgtcaccaagcattctgactttgtgaagtttacattgaatccttcatcacacaactgactgatgctgatcaggtttgcagtcagtcccttcaccagcagtactttgttcagactaagaagtccatcatgaact

SEQ ID NO: 286715 - DNA, 318 bp, Glycine max
ttcttcagaaaactatagaggataatgccacggcgaccgcctccaatacagctagggaagcggaactggtgctacatcccgcaataaacttaggccaagatagaaacacgatggtgttcggccggaggtatagtcctcaagcttacccttatggcttgcctccagacttcactccctgtaccgctccggacaatttgaaccaagcccctaccttcgaggggcaactccctccttatgccgattatcccctgcaagaagacgatgaagaagatgcccgtctaggccctctacttcccctcaaggatccggccccccatg

SEQ ID NO: 286716 - DNA, 420 bp, Glycine max
  unsure (1)..(420): unsure at all n locations
ntgatgacctgaaactcactcaaagaggatctctttcagtttgaagtaagataactgtcccacaagcaaaatatgagcaaacataaggatcattgcttgctgctatgagacaaaaagattatgaaagcaggcttgattgtggcaacttaagatcgcccaaaccacaaagataaaactagcaagaacaacatctttagcttgcaggtgaacaactaatttgccaacaaccaggataagatccataggagaagcaagattaaaaccatgaccagttaagttatagatgataaccaagaccaaatctaatctccaacccaacttcttctaaaagagagcatactttgtgcaaagcaagaatggtcaaaattctttgtaacatttcctagaaatggaaagacattaaaaaaatatatgaaaaat

SEQ ID NO: 286717 - DNA, 321 bp, Glycine max
  unsure (1)..(321): unsure at all n locations
ttcttttcatggaggtgagcttagtttttagatgggtgtgtgtagctaagttctagcttctcaaagaagttttctcaaagaagcttctcaaggaagttttcttaagaaagcttctcaaggaagctacctagtctataaatagaagcatgtgtaacacttgttgtaactttgatgaatgagagtcttgtgagacacaactcaaagttcaacttctctccctttttcttccttcaatttcgtgctcccccctccctctntctctccctctttcttttcctccatttgagcatcctctccaaacttcttatccaaggctcatct

SEQ ID NO: 286718 - DNA, 417 bp, Glycine max
tatggtgaataccaatgtttttgtagcatcatatctggtaggctcatcttacgtgattctgccttggctttatctacacagacttcactcaagtcagagaaacagaaagctgatgactttgaaagaaaatacaacgaagcccaagtttgtagcgaagaaagaggtaaaaaactggaagacacggagaagaagacacgtcagcttcaagaatcactgactaggtaatataaataatgaaaagtatgccctgatgtaattgttttcccgtgataatcaatgatgtcttgcaagggagagccttgtcacaatgttaaggttgttacttgtaaccctgaggttaccagtacaaatcttggaaacagtctctctgcttatggagttacagctgcatacatttactactccagaccctacttg

SEQ ID NO: 286719 - DNA, 343 bp, Glycine max
  unsure (1)..(343): unsure at all n locations
ttcttgtgttacgtcggtagaacaaaccctcagctgccatcaacagaaaacatacttagccgatgtcagcataaaaataacaatgactaacgttaaccgaaaacctagcctatttgaacaaaaaaatatccataaaatgactctggcaaataccctagcttgatgtcgaccaataaacctatcatatgtcaaccataaaatggcattggcatcgaccaaaaatagccttgaccattgtcgaccgaagaacatcatcaactgataaggtctatcctattttaatgtgtacttgtttactcataatggttcttgttgcgcagtccaaccattntgaatgatgtga

SEQ ID NO: 286720 - DNA, 406 bp, Glycine max
  unsure (1)..(406): unsure at all n locations
tcttgcgtagccgctcttggtgctcagaaaattttaattttttatccctcttattactagctattgtgaattctttagttcctgaatgtacaacattcaaattgttgctcgttcccctctttcttttctgcaaaaaagaaaatcaatatcaaagaaaacatggatgaagtcctaagaaaatcaatatcaaagaaaacatggatgaaatcacaattaaaaagcacaactaccaatctttcagagtcctttggttaatttgtcttgtctccttatgtggtggggttctgtttaataatattatacttttgccttccaaaaaaaacttatgactgatcctcttttcattaatcctattntgtatgttattgtataaaagatcatgggttctccacctacctccactcct

SEQ ID NO: 286721 - DNA, 337 bp, Glycine max
agctttgttgattctgcctataaggtggttaagcacttgttgttggttcgcttctgtcttgagtggttaagcatcatgtttggcttatgctctggatggttaagctttgttgcttctacctatatgatggttaagtacttgttgttggcttgcttctatcttgagtggttaagcatcatgcgtagcttctgctcttgatgattaagtttggtttgcttctaccttttaggtggttaagtggttaagcattgtgttgtggcttctgcttaatggttaagcatattccaattgtctttgaatgttttcagtcattgtcaatctgttgcccaggggagtg

SEQ ID NO: 286722 - DNA, 413 bp, Glycine max
ctcctctccctctccctctccctttatgtatgttttgcgttcctcctctctcttcttcttctccgccattgtatttatttaattacttaaatttgtttttttaagttggtttttaataattaattaattcaataaaaaattaatttattatttttgtttaatcaatttaattatatttgatatttgaaatagttatttgtaaaatatttaaatatcattgattccaaatttgtataagtatatattgtacatattagtttgacaagaaaatttatagttgtaaatgacaaaaaaaatttattgatatagtgatataaatatttttatactaatagtaataaatatttatataaatagtattttaaagtgtaaaaaatactcatttattggaaattaaaaaatttgtagtaaga

SEQ ID NO: 286723 - DNA, 337 bp, Glycine max
  unsure (1)..(337): unsure at all n locations
ttgttgcattcttgcatcaatcatcagcaaacttagaataacaatatgatataaatagtataaatagcaacatacttttggaggcaccaataattgtgtcctcaatttagctacttttttctttgaactgcctgggatgatactctgcaagtaccatattcaaattcaaatgcattaaattatcaaagacatagaagataaaccccanaccaaaattagaccataatgcaaagtgagagaaaacaacatgggaaaaatcactttttgagagcaaaaaatcagattcggaaaaaatattgacagagagagcataaacttctgtatccaatataaaaaa

SEQ ID NO: 286724 - DNA, 405 bp, Glycine max
  unsure (1)..(405): unsure at all n locations
tttgctcatgagccaaagataggtttagcttctctttgtactaccctattatagctagcatgctttactccgtggcttctaagtgctgggccaaactcctcttggatcttgagcaagcagctaactcttcttttaagaccatgctatgtacttgtgattggtctctctcttccctttgaagcttgagctcattgttgctgccccacaaagctccatggaatttgtctcggctatgctcttccttgcgagccctcttggtttctcgttcaagggctcttgtggtagctgcattttcttctcgtaactcggcacactctntccagacgtttgtagtgactaactagaatttttctttggcaagtcttgctattcctagttctggttttagagctcggacttcttcat

SEQ ID NO: 286725 - DNA, 299 bp, Glycine max
attttcaccatcaccatagccagccaacactcccctcaacattcaatacctccgatctgcactttctactcctaatgaaatccatcttgctgagttacccttcaactctacccaacacggtttgccatccaacatagagaacaccgagaagctccctttcactcacatagccaaactctttctttcaacactcagccttgaagctcctctttgctccttgatatcacagatcacagaacaagagggtcaccctccactttgcgttatatctgacgtgttccttggctgggttaacaaca

SEQ ID NO: 286726 - DNA, 415 bp, Glycine max
  unsure (1)..(415): unsure at all n locations
tgtagtgcagctccagatttcataattggttcattatcaggatgatagtcacagcctgcttcaaggatttgcttaccagatgacagtaaagttggaactttgtcatgacgaacctgcttctgattctcttttaactcaaaatcattagcataaggaagattagtatgtccattaaaataaccattgtttattgcggaagcgtcaagaagtgggttaaagaactgaaaaataaaaccagctgccaaacttgaacggtaagtggtttttgaggtatcatctttaggtacaatagtggctgtaaccaagatgacagcatcgtatagaatgctagcacttaaaagctttccagctaaaaactcctcaacattntttgctctgattgcatgcttactcccataagcaccaaaagacaacc

SEQ ID NO: 286727 - DNA, 295 bp, Glycine max
  unsure (1)..(295): unsure at all n locations
ttcttcaaaaagctgtgaaaagatgtaattgaatatttgaattgacgaagaaatcgagttttgaatatctaataagaagacttaaaaatgactagatcttggcgttgtaaaagaattagctgcaagtcgttttaaggaggaaatattaatataaaagcaagacttgctgtcataaaaaagttgtacgtaatgggaacgcataaatttgaaagcaagacttgttgacatatgtngcatgagtcctctgtgattcattccgtcttccaaaattccatcaatctggttttcatattat

SEQ ID NO: 286728 - DNA, 414 bp, Glycine max
tttgcaagtattttacccaagaaaacaggaaagttttataaaaggaaaacagaaatataatagagatgaagtccaacaatacatacatccaatgcgctcagcttcaaccatacgaagatctaaaggaatttcttgaaactgtgcagcaatttgatgatctccaagagataaattgtgtgaaacatatgcttttatggtgcctgctccctttgtgaatcctgtgtcaacggtcaaatggataggattgggtacttctcgagaataaaattcatggattaatgcactaccaccagttactccaagaccagttgaatacctgcatgaaataaccataattagctacagtgaaaggaggttcataaactggtataatagaacattctctaagaacataaagagtaagaaggaataaaa

SEQ ID NO: 286729 - DNA, 234 bp, Glycine max
  unsure (1)..(234): unsure at all n locations
ttcttcctttgcttagattatgatactaaaaggggaagtgatcttttgtcatatttacaatttggtaacttttgtgagtttttcagatgtgtttgcatcgttttatgtactagttatgttaattaattntaaaaatagcatagtaatgcttggaagaatgagccatgtgttgatttttaatacctcatacttgtgtgtttgatgttggttcattatgcagcttanactagtctc

SEQ ID NO: 286730 - DNA, 399 bp, Glycine max
  unsure (1)..(399): unsure at all n locations
tcaggctgctcgattgctccaggttgctgtattttaggcaaaggtctgtatggtggtcagcagaggagcacaaaccacaaacccttgtgtcgcaacctacccttcggcgggagggcgacgcgagactcgcgggatgcgtgttccacgaaaggaatacacgcggagtcgccaccaacgtttatttgaggaaaacgtcggaaaaaccggaaaagacgcgatctacgaacttttaagtgaaaggttcgggagttgtatttacgcacggggaaggtattagcaccccacacgtccgtcccaagggacggcagcctttaatcgaatgtgcaaacatgactttgattttttatgttccctttntatgtccttatatcctttataccctttttatanttntctctt

SEQ ID NO: 286731 - DNA, 278 bp, Glycine max
tcttgcaaaatgtcaactaagaaaacataagatagagtgtaaagtacattgtaaaatttagaagacatctaattttaggtgtcttagtttaaattatgcaatatactataataatttaatgtgaaatcaaacaaacgcataagagaaagggtaaaaatataatttttgaaacaaatattctcctatcagatgaaatttattggaattatgaattttttcttgctatcagtgtcacattttggttaatagattttgggataatgctataaagtttaatg

SEQ ID NO: 286732 - DNA, 405 bp, Glycine max
  unsure (1)..(405): unsure at all n locations
ntgaaaattgaacacctcaaaatgaaaattcggtgtttatgttgttaatggcgtttgtttggaggcaaaatgatagaggcatgtgggggcaaaagcaaatattatttcatcaatgaatttggccccacttcaaacccagctttttagtttttattttctttttggtgatcagcattttaatgtctctgtagcatgagaagtgagaattcagattacatagttaaattttagctgttgctaaaacttagccacatgtccatactccatactccacagttctcttctccaatccttccattttattttccacatcttttatttccagaaaaaaaaatcatatgatttttgtcattaatcagcatgaagggtctcattcattgccatagttttctagtaacttttaat

SEQ ID NO: 286733 - DNA, 352 bp, Glycine max
  unsure (1)..(352): unsure at all n locations
tttcttgcattcttggaatagatacacggaaaacattctcagcctgaatatccttcaggagataaatgttaagatttatcatactaagtttgatgagttcaaagtggagttggagaggcgtaatttacacaaacgcctcaccaacctccaggatggaagcataaacatggttatggttaaggaattctatgctaatttatacacctcagaggaccaagctccaaaagcagctagagtaagaggacacctgatcaaaatagatgccgacaaccctaatgagtntctctagactccagtggtattagaggaggaggaatctttacccacctgttttatcatgtggcctctgaat

SEQ ID NO: 286734 - DNA, 406 bp, Glycine max
tttgtgtgaaaggatgtgactcttctcatttgattttgaatttcaacgttcaaaggcactggtaatcgattaccaaaacattgtaatcgattacagctttttgaaattaattggaacgttgtaaattcaacttgaaaactttttcaaatccattttgctactggtaatcgattacaacaatctggtaattgattacgagagagtaaaaactctttggtaaacatgttttgagaaaaatccatgtgctactcaatttttgagaaaaaccttttcatacttatcttgattaagccttctcttgattcttgaatcttgatcttgattcttgagatcttgaaccttgaatcttgattcttgactctaaactttcttcttgagtcttgaattcttcttgattcttatcttg

SEQ ID NO: 286735 - DNA, 327 bp, Glycine max
ttttctttgaatgggctaatgaggatagctgatgccagctccattggagcttgtaggcctaagatcttcttcatcaatggattcctttgcttcttggaagatgaatggcagcggaatggagaaagggagagagagaggagacgccacttcaaggagaagatgagtctagaagaagctcaccaccatatgaggccatggataagagcttggaggaagaaggagatgaatgaacggagagggagagaagagcacgacattttgtgctccaatgaactttgaatctgaagttaatatcaaatgatccaagtcaaaaaatgccaccctgac

SEQ ID NO: 286736 - DNA, 407 bp, Glycine max
ttttttagtagtgaacaaaattatattcctctattaaatttgacttcagaaggtgcatgaaaaatcccaaaaaaatctttccaatcaagagatttacctcttgcatttgtcgaagcaatggtagcttccataacccataaaaaaggattcatcataaaatgttttcataaacgaccaaaaaaatataaacgtatcctgatttttcactccctcactagctttggctttcactactctttcacaaacccttaaagattaataagctctgatatcattttgaaaaaaacattaaacaaaacataaaatggagtttaagatcaaatcataaaatgctaccaaacacctgcaataacttatataagggatgtttgttacgaacgctactctattgctatactactactaag

SEQ ID NO: 286737 - DNA, 343 bp, Glycine max
  unsure (1)..(343): unsure at all n locations
ttcttggaatccaaacatgcagtaaatatcaatgaggaagttttcaaaacacatcaccgtatattacaatatacaagcaaaactaacaaggatttgcaaataataataataataataatagtaaattaatgaatgaatgaatgaataaatgaacgtacttgtgcattgtagcacatgcatgatacaagatccataatttaattatttgaattgaccataaacttgtctagaaaatcagaaaaaatggaaaaagaaaaggccaagatccataataaaaatcaagatagaagagaagaggacccttacgctaatctgaagaagaagaaaganaaatgaattgaat

SEQ ID NO: 286738 - DNA, 410 bp, Glycine max
tcaacatcagaccacgaccagggtgctggaactatttcacatggacttgatggggcctatgcaagttgaaagccttggaggaaagaggtatgcttatgttgttgtggatgatttctccagatttacctgggtcaactttatcagagagaaatcagacacctttgaagtattcaaggagttgagtctaaggcttcaaagagaaaaagactgtgtcatcaagagaatcaggagtgaccatggcagagagtttgaaaacagcaaatttactgaatactgcacatctgaaggcatcactcatgagttctctgcagccattacaccacaacagaatggcatagttgaaaggaaaaacaggactttgcaagaggctgctagggtcatgcttcatgccaaagaacttccctataatc

SEQ ID NO: 286739 - DNA, 381 bp, Glycine max
agcttggcttgtgtagaattagggtacacaacttttataatacccagggcgcagaattccacagagaccacaatgcctatttcgggaaaaaaaactctggaggaagcaagaggagcagcttttgcaaggatacctaagttttgtaatctcatttttattattattaaaggtttttctgtaatggcttgctaaacacccttgttggggatttctaatgaacagctgatgtaattattttaatatctattgattgtgtttcttgtgttcaatgcttctttcagtgcttaaatttcgtatgctcttggtctagtcacccatttgtgtgcatagttaggtgactttagcattgggaaatgtattgttgccttagaacttgaatga

SEQ ID NO: 286740 - DNA, 437 bp, Glycine max
tgacactataaatctcagcttccatacgagctgtcctttgaacacccagatgacctcccggtgtggaagaatgatagaactgcaggactgagtctgtctcatgatctggaatgcatcgtctaatgacttgatcactgcacaatttccacaagtaggggtcatcccaaataaaatgcttagcatcacttttaattttatctttttgggccttagatgctaagggaggaaaaacagaagcaactaaataattgacaatgttagcaaaccagggagtagaaaaagaatcagaaatactatacagtatatacaaatgatcatccgagaaatcatcccgaatgggtgaattctcatcagacacatgttcgatccgactcaaatgatcaacaactaaaatttgtgctccgctcctatcaccgatctccaagtcaaactcttgg

SEQ ID NO: 286741 - DNA, 371 bp, Glycine max
attttggtcatagttttgtcaaagcctactaatcattggataacaaaagttgtaatagttactaaggaggataagttatttaatgaactaatcagtcgctatgctcataggggaaccattgatcctaagtatgatgtaaaggatagactaatatttataaaagggaaattgatgattcttgaaaattcatttttgagaaaccagattttacaagaatttcatgacactaaattgtggggccatgctggaaagactaaaaccattgctagaatttgcagtcaattttattggcctaaaatgcaagaagatattaagtgctatatcagatgttgcagtatctgtcacaggctaatgtggatcaagcagtacct

SEQ ID NO: 286742 - DNA, 401 bp, Glycine max
ttatacagatgaccacttgcgtattttcgcctgccctttaacttcacgggttattattgacagagattgatggtgcgcggtatatgacgtatatctctgcacgtcacctgagttcagagtcagtgtgacacaaattgcggggcggccgacaaaagtgagtctcttgctcctacgtatcctcaatttgtgatgaggaacttaaacttacggtattcttgatactgtgagactaaatagtctcggtgttttttcactacaatgcgaacatgcattagtaaagaaacaaaacttccaactgatcaaagcaacatatgcttttttctatgaagacaatgtgtctattgcggaaagagagtgtactgataataatttcacataaccatatatgagattttgatgat

SEQ ID NO: 286743 - DNA, 361 bp, Glycine max
tcatttaatagactagattattatcctaaactagaatagagtttttctaataagccaataataaaactaagtgaaagcaatgttgcaggtgaatgcagaccttgacatggaactaaatccccaagcacaaccatggccatatcaagcgaagagccttaatagaatgtttggaaatggtaatcctcacaacatttgcaaattgcaaggacacatatcactaacagttccctcttcccatgctaaatttaattaagagcatgttgttccagtttttcttattttcatcctctagtgtgctcaacataggagattatgtgactgctgacagaagggtagtagtactagatcatgtatctatcat

SEQ ID NO: 286744 - DNA, 392 bp, Glycine max
gatgaaacggtggccttctcatggactctttcgaatgaaaatagcagcatttcttgcactgaagttgtgggagtaggaagccatcttctcaatcaaattcctaacctcagtatgggtcatatcaccaagagctccaccactggcagcatcaatcatactcctctccatgttgctaaggccctcatagaaatactatataaggagttgctcagaaatctagtggtgaggacagctcgcacacaatttcttgaatctttcccagtactcatacaagctctctccactaagttgcctaatgcctgaaatgtcttttctgatggcagtggtcctagatgcaaggaagaatatctccaagaacacccttttaaggtcatcccagctgagaatggatc

SEQ ID NO: 286745 - DNA, 347 bp, Glycine max
  unsure (1)..(347): unsure at all n locations
agtgntttcgcattttttcgcgtgtatgatatccactccgcaaggtttgaagttgaagagaccttccatcctattacgcaacgggggggacaaaagtgggctgttaacttgaatggtcattattgtcaatgcggaaggtattctgcgcttcactatccatgttcacacattattgcaactcgtggttacgtgagcatgaactactaccaatatatagatgttgtttacacaaacgaacacatcttaaaagcttactccgcacaatggtggcctcttgggaatgaagcggcctattctccttctaatgacgcatggacacttattcctgacccaactacaattcatgc

SEQ ID NO: 286746 - DNA, 307 bp, Glycine max
atcatcttacttataccccatgtcctgtcaacaggatgtgtcttatcattaaaaccaataacaacctgtcaaataactacataaggtatacatattcttcgattattagcgaaaataattacagaaaacaacttcttgattgatcatttctgaaagcccaaaatgttcacgtgataaaatgttacctgctctcattcataccaatgagaaaatgttttgctacaaacgattattgatactttaatttgcggtatctatacctgagcctaatattgatatttcagagatacatatatgtgaagtgtcc

SEQ ID NO: 286747 - DNA, 358 bp, Glycine max
gcaatctttggtggttttgtattccaaagcttgtatgcatctccagccattggtaggattgtgtggtcatacataccatcaagttcatataccctgatgctcatcataccaggccatacagtatctccatctcgagttactgtatctggattaatatcaagaatggatgtatttgaagtctgcaatgctgtacattcccgcaacacagtcaattcaaccatattcttccttttattataagaaaaccccatccttagcaacagcaagtaactcatcataatacatgagcagaaagaattccaaaatgaatatattgtatgagtaaacctattttataccttgacagacaccacagacc

SEQ ID NO: 286748 - DNA, 428 bp, Glycine max
  unsure (1)..(428): unsure at all n locations
tactcacgcttgttgtattagtatcttcaacaactgatttcaaacttgcttaatttagtttgtgaagaagattatttaattttttggttcatattttattttcttaaaagtgttgacggagaagtntattcaataagacctatatgaaagtgagatgaacccaacattttcaataggtgaaaatgaacttatgcaattcaggttctatattacgctgcaaaagaagttctaacaacaaaacaatgaccatgaacaattcaaaaatcaagatttgtgacttgtgaggaactcacgaggtggaataaacttcttgctgagtagcagaatctggaaacgctgcgtcgaaggtaaagtggcgtccgcgaagcctattgagtctaatgtaatcgttttcattagcaaactccgtgagataaacgtcacggcga

SEQ ID NO: 286749 - DNA, 409 bp, Glycine max
gctcctcccaggatcctctaagtcgccttttgcctgctatcttgacaatggcctgctagattttgagcctctggtgcagaatgcctctgacgacttttaagtctttatctgtaagacccctgtggacgactgaagaggagcaacctttgccaagatacctaggttccgaaatctcaggtttcataaaaagaaggcgtagttatagttggggaactgaatctccctggtgatttttatatcttgaatatggaaaatggattttctcaaggatcaggtcccatcattctatgcagaccctttatgaaaactgctagaactaagatagatgtttatgcacgcacactgtccatggagtttggtgatataactggtcattataatattctggatgctatgacatacccatctg

SEQ ID NO: 286750 - DNA, 354 bp, Glycine max
gatcttcctttcgggccttcttggtttctcattccaaggcttcatcggtggccatatcgacgtgccttagttcatcatactctcttcaaactttgatggctatggacttgaacttctctttgactacccgggctctttcaagctttgcctttaaggctagtacctcatcactttcttccgaagctttaacctcattgtctctcacagtatttagaattgggagccaatccaatccttgtgtccggactctcagccacttatgatagccgccgatgatcccattactgcatcccctaagctctctgttatttcttcacaccgcatcaaatgccttgcaaactccatggagtacct

SEQ ID NO: 286751 - DNA, 363 bp, Glycine max
ccctatttttctattaatagggggggaagttgaaggaaaaaactgtcaacccttccggttattcgagatcaattgaaattagtggaaaaaattggttccgtgaagaaaatccaagccgaggcggttccgtaacggttctgttacgtttccgtgggtgatttcgcgaagattttcaaccgttctttcacgttggtcgatcggtctttgtcattcttcggtcttcaaccgttaagttctcgaaatcgaacttttcaattcattctatgtacacttagtggtcctcatttgttttcacgggcttttattttcattcatttactttctgtacccccttttgacgtgctcttgtcatttacttaagtc

SEQ ID NO: 286752 - DNA, 397 bp, Glycine max
  unsure (1)..(397): unsure at all n locations
tgggcccatgataaataanagtatgtgatagacatgcaaattaagataacgtgagagagttgactgttagcaaatcacacgtgatggttgtgtaacttatgtgtgaacttgtgcaagaattttgtttggatattttggaatggattgttggacctttatgtcatatttgtttgctagttcatgcgggagaatagagactcacctatacacccaacatttttcagataaacttatagatgtagttcgtttatcaaagaagaaatggatttcactacatcaatcactaccagtgtagatggacttgttcgtgaaagaaagacctttcaaggataccgttagacattggatgacccaaccatctcttagagttttgatgaggacaaagatataaatatgt

SEQ ID NO: 286753 - DNA, 385 bp, Glycine max
agtcaccttgttgctgcattctttctagcttttcattggtgtattatgatctccttttggtgctctaaattgtgggaatgtgctcaaatatgtggggcaattttggtttgttttcttgcttgattaggttgaattgggggtttgtatgggatggccctaagcctataatgcattttgaagcaatggggcatgccacattgtccccgttctcttgctattgatgcctaaacgcgcgcccaccaagtgtttggtgaaatgcctcaatggcattagcgcgtgacttttgtaaagaaacaacccatggggcatttcggtttgacatattttctattttttgggacatgcattcattcccaaagggctagataatttcccacatatttct

SEQ ID NO: 286754 - DNA, 405 bp, Glycine max
tctagccaaatggacttaccttgttttaattcctttgatagcccttttgagccttgtttccctttccttgttttgaagctcactacaagccttaagtgaaaaaccatgatattaccatatccttaaggaattttggagctttggaattgttttgggaataagtgtggggggtttttgtttcattggacaacttgttttgttggctatgcttcatgatgtattttgggccatacttgatgtacattgtatattggttaaatgttggacatgctgaatgaaatgttgtttctcaaaggctaaagagtaaaaaaaaaaaaaatctaaaaaaaaaaaaaatctataaaagaaaaagaaaagcaataaagttgagtgaataagatcttaaatggcacaagaatgatgaaa

SEQ ID NO: 286755 - DNA, 229 bp, Glycine max
  unsure (1)..(229): unsure at all n locations
ttatctattcgatcttagcgagagtgattctcctacacgcttgagcgagacaagaacaccctggctgtatcaaaagactatcacaacctttgtgtgtggccctagcaggaaagagagagtgggtccgttctttcatcttaccctagttatttgaaaccacaattccagaaaagccagctctgcccaaaattatctggaggacataactccngctctacgcactcaaatt

SEQ ID NO: 286756 - DNA, 353 bp, Glycine max
tctatatatgctgaacgcatttcatcaatacagcacttgtttgagtatatattcgagacaattataagcgggatctctttctatcttagatgagaagtgattcctcctgagattcttgagtgatttagaacaccctggctgtatcaaaggactttcacaaccttagtgtgtggccctcgctggaaagagtgagtctgtccttcctttcatcttcaccctagatctataaagccacaattccagaaaattcacctgtgcccagaattatctagtggccatagctcccattttacgcactcaaatcaagtgatcctgcgaggctacattgaatttcataaccagacctttcacct

SEQ ID NO: 286757 - DNA, 374 bp, Glycine max
ttcttgcaacatatcacctatgttcaccactagggttccttcacatgggtttatatctatccactctcccttatttgatctgacttgaagccctcctatctcatgttgatataagatagtaatacaactcatatcaatgtgcatcccaagcccctcaacttgatcttctataacttctggagctgagtaatcgtttacccaacatatccaaccatgaacactccttcatacttgattcacttcttgtctgttcttttggttactttcatccgatagtcttcatgatgcaaaccatttaccttccaaaagtttacctatacctcaatttttgctactgcacatggtaattggtaagcctaacaagtacatggaaa

SEQ ID NO: 286758 - DNA, 396 bp, Glycine max
  unsure (1)..(396): unsure at all n locations
tgttcattagattnttcaaaaattattataaaatattccaagcatcataagcataaatgcataacacaacaaatctattctcataaacaacaacaaaatccgccgacgaaatttcttgatgataatgcttttttgataaactaatcaacgacgctaagaaattgagttaaaccttgattcctaatcagaaacagaatcctcaccatgaagcagttccaaggccactccgtcccgtcctctctcgaaaccttcggcctcgaaatcccccaataactggactccaccacgctcttctcagactcggccttctccttctccggaaacttcgcttccgccggcgaagccatcgtcctcttccagtagaagaaccctccattcgcgccgccagcgcagagt

SEQ ID NO: 286759 - DNA, 473 bp, Glycine max
  unsure (1)..(473): unsure at all n locations
ggcgatgaccctggatgcctcgtcgannncatgagtccatacganaactttcgangtaganaagctcccccgcgttgatatgctgagttctcctgaaggtatggctttcttgaacggcggctatgcaacatacatcggtattacgtttagatgattactggtgatccccaaagaacccgtgtatcggaaactcatgtcttgtgttaagcaagtcgattcctacgctacagcttctattttggccttttttgacctatgtcgttggtcattacacttataagtatctccttgcctaccgtgccaacgcatcttccgccaagtagacacacccatcctactgagcgcaccctgcacgatgctctggataacattgatgcaaacgaccatacattgtattagatcaattaatgagacaacatccatgctctacattggtataataacatggtcgcatgagaaactagcccactacg

SEQ ID NO: 286760 - DNA, 349 bp, Glycine max
  unsure (1)..(349): unsure at all n locations
tatctttacagcagattntagtaatgacccactaacctagaattaaaataacttaatgccattaacctagggaattaaaaaaaacttaatggctgagtgtaactgaaattgtggcaaccaaaagtcacccccaacagccaacaagtcagccaccatttggtctcccaaaaggctgatgcctatgttgccaattgggcccttattacaacttgaactaaacctaactaaagcccttttaattgattaacccaaaacatatttttggtcagccaactttacaaggattgggccattatttagacaaactaaacactctaaaaattgagacaaagtggtgtcatttagtcct

SEQ ID NO: 286761 - DNA, 399 bp, Glycine max
tagagaggaagcttctatggaggaagagaatgagaatgagagagagagagagagagagagacaatgacgtgggaatgaaggatagataaggagagaagttaaactttaaaaagtgtgtctcacaagactctaattcatcaaagttatgacaagtgttaaatatgtgtctatttatagtctagcacatgagaaacttccttgagaagctaggaaggtagcttccttgggaagctagaggaagaaaacttttttgagaagctagagggggctactcacacccctccaatctaagctcacccccatgccataatacatgaaaatacaatgggaagcttctttgagaagcaaggaagatagcttccttgggaagctagaggaagacaacttccttgagaagat

SEQ ID NO: 286762 - DNA, 380 bp, Glycine max
  unsure (1)..(380): unsure at all n locations
agcttatgctgccaacacttataatagaccccctcagcagcaaaagcaacaacaacagaataattatgatctttcaagcaacagatacaatccaagttggagaaatcatctaaatctgagatgggcaagtcctccacaacaacaacaacctgtccctcttttccagaatgttgctggtccaagcaagccatatgttcctcctccaatacagcaacaacaacaacaacagtcacaacaaagacaacaagcaactgaggctcctcctcaaccttccttagaagaattagtgaggcaaatgaccatccagaatatgaaatttcagcaagagacaagagcctncattcagagtctgacanatcagatggggcagatggctactc

SEQ ID NO: 286763 - DNA, 392 bp, Glycine max
catcacatgtggtactatgtggcggtcgggcgatggtgcacaacaagttttccacatccacaaagcgcgcataaacccaccatcccctgttgcccacctccaactgagctcacgtactcccacgtagcccatatcctcgttcctctcaacactgggtccccatcaatcctcccaagctttcccaacatccaagtaatataacattcagacagcacaaattatcacagccaagcaaaatagggcaaaggcagaaaactctgcccaaaacaccaaccaaaatcacagcttttctcacttaaagaccccagtaataattccttcgttccaattcgttaaccgttggatcgactcgaaaattttactggaagtctctagtacttaagcctacattg

SEQ ID NO: 286764 - DNA, 387 bp, Glycine max
attctttgcagagttatatagtatacacacgagttcattagaaggggcttgatcttaagattgataaaacgcctttcttacaaaaggtgttattctttacatggaattataaagctaaaatataactaactaattataattaactgtaactaactaaacaattaacgacagctcagctataactaacaaaactaacactcttaactgaaaactataactgaaaaatgattattctgtcgacagaaattagtactcatgagttaagactactctaatttccaaaagcatgcttttgtacgtcggcttttttccttatgcactaggcaataagcacatatatgaagttcttaaagccatgtcaatataactggtatactattggagata

SEQ ID NO: 286765 - DNA, 373 bp, Glycine max
ttcttgttgacacgctgagatttacgtcaacttttgtgctcacaagatttgtcatactgacatttgagtcacgttgacgggcggagataccctagtggttatccgtataaacattcttttttgctgtctgtaaaacgaaaagcctgatagcatgcagagactaacgtcgtcttctgcgcccttcgtcaatcgcggccgacaagcccgttgacacgcagagatttacgtcattttccgcgctcacaagatctgtcatactgacatttgagtcatgctgacggacggaaatacccaagtggatatccgtataaacattcttttttcctgtctgtaagacgaaatgcctgatagcacgcagagactaacatcgtct

SEQ ID NO: 286766 - DNA, 416 bp, Glycine max
tatgacaatttgaaattttcgagagcttccgaagattaatttcgagcgtcttgatatattataagtctgaatcggacctccgtgtgataagttatgaccatttgaatttctcgagagctttcgttgttcaatttcgagcgtctcgatgtattatgcgcctgaattggacgtccgagttaaaaggtatgactatttttatttctcgagagcttctgttgttcaattttgagcgtctctttatgtgatgcgcctaaatcagactttcgagttaaaagttatgaccatttgaatttctcgatagctttcgttattcaatcttgagcttctctatatgtgatgcgccagaatcagacttctgtgttaaaagttatgaccatttgaatttctcgagagctttcgttgttcaatttgatatg

SEQ ID NO: 286767 - DNA, 356 bp, Glycine max
attttgggatgaaacagatgtgattcatcaaaaattacatctctgctgagaagaactttcctttcagttggtgaccagatcctatagcctttcactccatcaccataacccatgaacagaccctttctacattaacatgataataagcattgcagccaaatactcttaggtttgagtagtttggtggtttgccattccatatttcaataggagttttaagtcctatagcagtagagggtgttctattaattagaaagcaagttgtattgatagcttctccccaaaaacttctgttgagaccagcataggacaatagacatcttgttctttccaggagtgttctattcattctttca

SEQ ID NO: 286768 - DNA, 418 bp, Glycine max
  unsure (1)..(418): unsure at all n locations
tggatggaaacaattcacctcaagcagtctccanatggtatgacctatttaaggggtgccacaattcagggaggaaagctagttccaacatggcataagatggaatagagtcttattcaaaagctagattttgggaagatggatgggcagctgatgggatccctttaaaggaaaagtatcctagactgtacctaaactcgaaacaaaaaaaagcaatacattttgcaaataggagacagttcaaaagggaaatgggaatggtgtctacagtggaagaggctattgttcgagactgaaataagtatgtgggctgattttctggaggaaatacaagatattaatgtaaatctccagctatcggataaatgggtatggacaaatgataccagtggaaaatacacagttagaagtgcatacc

SEQ ID NO: 286769 - DNA, 349 bp, Glycine max
ttcttgccgccattttttttccgactatgttcttgtgtggtggaacacgcttcaaaaggagagagctagaaatgaagagccaatggttgatacatggacggagatgaaaaagatcatgaggaagcggtatgttccggctagttactcaagggacttgaaattcaagctccaaaaactaacccaaggcaacaagggggttgaggagtatttcaaggaaatggatgtgctcatgattcaagcacatattgaagaaaagacgaggtaactatggctcgatttcttaatgggttgactaatgatatccgtgatattgttgagctgcaggagtttgttgaatggatgatttgct

SEQ ID NO: 286770 - DNA, 387 bp, Glycine max
ttgaacaacggaagctctcgagaaaatcgtgtggtcataaattttcacacagatgtccgattcggggaaataatatatcgagacgcacgaaattgaacaacggaagctctcgagaaatttgaatggtcataacatttcactcggatgttcgatccggggacataatttatcgagacgctcgaaattgaacaaccgaagctctcgacaaattagaatggtcgtaacttttcacgcgaatgttcgattcggggacataactcatctagacgctcgaaattgatacaacggaagctctcgagaaaattgaatggtcataagttttcacacggatgtccgattcgggaacataatatatcgagacgatcgaaagtgaacaacggaagctct

SEQ ID NO: 286771 - DNA, 330 bp, Glycine max
  unsure (1)..(330): unsure at all n locations
cttagttcttagttatgaacagacacaattcacatgcagtaccgtttggttcatattgctgctggagaattacttacggcagaaattgccactggaagtgataatggaaagcgagccccacagtatatggagaagggacagttggtccctgacgaaattgttgcgatggtatgtatgtatgtatgtcgtgactaatttctcttcaattcttgtttctcatatcatatccttgcttctgtttatgctatatagatggtaaagagcgtctcttgaaaccagattcnaaagagaatggttggcttttggatggatatcccacgagcttatcac

SEQ ID NO: 286772 - DNA, 407 bp, Glycine max
  unsure (1)..(407): unsure at all n locations
ntgcgataaaatgtaatctcaatacatctcaggcctttaaatggatagattacttgacagccctaagcaaggtgcaaatccaatggtaagtggtaaacttgagcttataaaagctaagatcacagttcatgacaatgattcgtattatagcacccaaaaattcgtattgtgctgcttagcatgaggcaaagcatgcaacctgtaccctgcgcatcatctcattatggaggccaataggtttcaatctgttcactgctaaaaataatgcacgtaccagagatgccccactacatcaaatccgcacacactccacaagtttacaaatcctggtcttatttctttactacttgtttcacatgattgaccactccctatatccattctaaaacactcagatcatgcaactc

SEQ ID NO: 286773 - DNA, 373 bp, Glycine max
atacccaaaatcttatctacagaaccaaggtctttcatatcaaaatttctagacaagaaaaacttcacatcatttatgaaattcatttactaccaaatatcaatatgtcatccagatacataaaatgacgcatccattatcatcaaattgtttcacatacacacatttatcactatcattaatttgaaaatcatacaaaagaataacttaatcaaacttttgtgtcaatgatttggagcttgtttcaaaccatacaaagaattaacaatttatttttcaagaaaaaatattttcaaagaaagtcacatctatagactccataatagtaccattagaaatttcaaatacttctgaattaataattaagaatcta

SEQ ID NO: 286774 - DNA, 403 bp, Glycine max
tctcatttgatccaacagaggatgagcatacaacctatttcactcaagtcacacccacggaattcaagcacaagagacttgatcattgccatcttgaaagaatgctaaacatgaaaaaaagaaaatatgcaaaagaaaattgaagaagtttcaaatggaagaatgcaagtctgttagcacaccaatgaatcaaaaggagaagtttagcaaggaagaaggtgttgataacattgatgaaggatattatgggagcttgattggatgtctaatgtatctcactacaacaagatcaaacattctatttgctcaaaagaacaaaactggaatttttgttgacaatcaagtagccattgctattgcaaacaatctcgtgtgtcatgggaagactaaacatttcaacatc

SEQ ID NO: 286775 - DNA, 368 bp, Glycine max
  unsure (1)..(368): unsure at all n locations
atgcgaaccaggaaaaatgaaatgaacagaaaacgcttgtgggattatcgtctacgggccttatacagagaaacgaatcaaggacctaaaaagggattattaaagaggttaaaaaaacggaaattgtaaaacaagaataacataataacagtattttacttgagtcataacataatttcttttatatttattatttgataatcgatacacattataagtatttagttttactatttatattggttactagatataaaacttagacggaatatacgcgttaaccgtaaaaatcataaaaatgtctttcgatagataagtatatnttcatgctagaatttattgacacatacgaattttgtgtatcatga

SEQ ID NO: 286776 - DNA, 401 bp, Glycine max
tttgggctatgtggttgcttggtttatcactctctagggagcaatcatgctcaattgatagaggaggatcttctccttagttgactcatgcacgggaaattgaagattaattgggtcaacattattattgatgacatgatgaagaccacgatgattaggtcttttatgtgtccctatgcaatgttgatctcaagaatccttgattacttcggagttgatacccaagaagaagtctttgcttttgttgaagttgaatttaaggtgaagtccaaagttttgaagcagatggggtaatcaatctaaagcatctggagttggataaattgagataaacaaagaggatcacacaacacaacaagatctagaggagacgcctatgagccccttggagcagatgatgc

SEQ ID NO: 286777 - DNA, 362 bp, Glycine max
atcttataggagtcaacgtgtcatcatccaactcgcaatgtgacaaaactttgacggtcagctcaacctatacaagctcgtacctcacaatccccaacgtaaagagagacccactgagcttacccaacacaactgtgagattaattgcttaaccggagacattaaggcaatggcataataatgatagcgaataaaggaaagggagaagaatccgataattgacggtgcggtgcgtggagtgtattgcgacagagatggacgccgtagcaacaggatcggagctgaacaagtccggaagcggaggttcggaacgaagcgatgacagcggaggaactggacgaagatggatatttgagtactct

SEQ ID NO: 286778 - DNA, 407 bp, Glycine max
tatgacacaaccacctgcacctttataaaacccacttggccaattcagtggagaccaaggggtcatgaagtggattcaactaggactccccgtgattaccatatagctctagggttacccttttatgactactccttctatagtagtgtaagattaatagttaaatacatgtatgaaaaaaaaaataacaattaaaactaaaatattacaagattttaaaattaattataaaaacttctaaatatattttcatcaataaaataaaattaaaaatatatataaatatcatataaatatctatttttgttattccgtatttatactagataggtatttggttagggcaaccaagtacttattggatccgcccttctatagagacaaaacaattatgcttatgagtaatc

SEQ ID NO: 286779 - DNA, 372 bp, Glycine max
  unsure (1)..(372): unsure at all n locations
tttttgttangcatctaacgagctctggtgagtacacagtcaagtaagcttaccatcacctaatggaaaagatgattcaaaatcaaggctcacgggttagtggaatctggatgcatatttggaaacttcaaatcccaccaaaagtcaagcatttcccttgacgtctccttcgtcattgcttgtctactcaagctcatctccaaacaaaaggtgtgcaatgtccttgcttatgtcttttttgtgataccaacattgagaacgaatgagacactttctttggatgtgattaagttgtacattatggggcagctactggtcagtggaacaccatggctaggtatgttgatcaggcgaaaggaacaaatgaattga

SEQ ID NO: 286780 - DNA, 366 bp, Glycine max
  unsure (1)..(366): unsure at all n locations
gtatgatacagcatatgnnttttctttcttctatggttttttttgtacgtttggatatatttctaggcttactttgatttttatgcagtatatatgcccatcaatgtgagttaatgagttttcaacttcagtctcaggtgaaaagatgaagaaataaatggccgttgtaggtggtgtctcgctaagcgaggcatatgctcttatcgagcaacatctgctaagcgagacatcatcccgcttaacgagtgaggagaatctggaaaagaatctgccatgcatgcacacgttcagtgtgccatcagctcacccaccaagtagtttgtccttctggccctcagcgaaaaattactaactcgcgcttagcgc

SEQ ID NO: 286781 - DNA, 361 bp, Glycine max
tattcttcttcacaatagtttctttcagacacatcggtttgtttcaaacattaaatttatttttacctaaaattagtcttgattttgcttattttaattgttgaaatttgctttgcttatgaggtgtttgacaaaatgtttaatttctaatagaatcaaggtcttttttggtttaattttttagtttcagattttgtatattgttccttttttggtataaggcttgactaggttgcatttttgtgttttgtttgaaaatgactttattaagcttgaaagacccgagaagcttcttcacaatagtttctttcaaacttcacaccgatttgtttcaaacatgagatttatttttatctaaaat

SEQ ID NO: 286782 - DNA, 109 bp, Glycine max
ccccgagagcaggcacaaccccgaccgccacagagagcagagcccgcaaaacacagggcccaaagagaggaccggtcaaccagagacgcgaccaaaagacaccaggaac

SEQ ID NO: 286783 - DNA, 354 bp, Glycine max
  unsure (1)..(354): unsure at all n locations
tttcttgtagaatggctagacatgatacatgtcagggtttggtttggttcaaggataaaagggatgccccacattatttccatgacacaaatgcaaaaatgatgatttggaaactttatgcaaaactggtcatgcatgcacctatgtggacactcaagtgtcaaatttttatggtcatgtgatgctagggctcangattcatttcctctattttagtcaacccaacgtttccaaaatatgttcttttatcaatttgtgcattcatccgagtccattntgggcgtctgggaaaatcttcacagcattcacccttcangtgtatacacattntttcaaaaactagttatgatcagt

SEQ ID NO: 286784 - DNA, 420 bp, Glycine max
  unsure (1)..(420): unsure at all n locations
gctatcaggacctatgaaactcagcttnagtatgcccgagtcattcatccctatgagatgttgttgaagtattggcgatcagaattgccattccttggattataggattgaaccaagctcatgcttttacaaaaaggttcatcaagtcaagttgaaatacggaagtaaccgtcttgcaaaattggggcaaaagatgaatcgagtcacatcactgcttcatctactgccaaacatatttaggattgttgatgtccttgttacttccagtttcaccttgacaaagttgtcatggaccatgttgaaaatctaaattgattcaaccccatatcctgcgtaaaaattcgcaatacttcaactttacatcattcgcatgcatccatgcttttcattggttgcattgctcattgcattctttccttg

SEQ ID NO: 286785 - DNA, 357 bp, Glycine max
atttatgatccgttttctacgactgacacttgttactctgagctcttcatgatggtgacagtcttttagtaccattctcatgctggaagtgaaaaagcattttttttattcctaatatattgcttgctatttattctgtagattcttattataagattttcagtgtgtgggcggacatatatggttcagttggccatgttcgcatctatgcgaatataataacttgctgataatctttgtcattgtttcagccccttggaaaaggccttttgcagagactcattgtaaacttatgtgcacatagtggtacaagggccactcttatttatcatttgcctgcatgattaaatctgaact

SEQ ID NO: 286786 - DNA, 424 bp, Glycine max
ctcaagcttgctgcccaagaggctgcccttgccgcccctaagcttttgttccttctaaaccaaatactgctatggaagcatccgcttccactgacaacaccaacatgggtaccatatcacttctttctactctatagtttatgactttattccttccctttgcattgcttatgtgaaatgtgtggattaatatgaattttctgagtaattctgattatatgttgatttttgtgaaagaatgttggattgattctctaagttaaaatgttagattaatcaattatatgaagcctttctcaaagttaaaatgcagaattttgttcagttaaaagaactttgataatcaaaattcaaaatgttggattgattcttgctgaaagaatgttactatgctccacatcagtaagcccagaattaaatctgt

SEQ ID NO: 286787 - DNA, 387 bp, Glycine max
  unsure (1)..(387): unsure at all n locations
atcttaaagatgctccaaattaagatttcaaccactcgtttcagagtcttaatttcattattagattctacatgcatgtacttgtgtatatttcatgtgttgttgcataccgtaaagataataaataaattaaagtagcaaagattacaacggttatgcttactagcatatttggaatattattaaatagaaattntattaaaaatataataaatatactgataatattaaatgttatacacattttaatacatattttcatttaatgttatagtataattatccatctatttattcaggggtttggatcaacctctgatccaacccgattcaatccaattaaattagattgaattttttaagtgtttaagtcaaattcaattcaac

SEQ ID NO: 286788 - DNA, 433 bp, Glycine max
ctatagacaactcaagctttgaacaatatacttgcccttcatttaactgtctctgtgtcttggcggctacgctcaacaaagtacttcgacacctactgtacgttgatctgacctatgttgttatgggaatgttgcgacaatccttcaaaaccttattgatacattctgagaggttgattgtcatgtggccatatcgacgtccttttctatcataagccatcgtccatttttcctttgaaatgcgatcaatccatgttgctatggctggactcaattcacaaaatttttctaaatttcgataaaaaactgtgcttgcaaggagtgtatgctgcataaaattacttatgaataacacttttaagtctatataaaagttacataaacgtcaccatcaaatatgacatcttacccaatttcttcaacatttcttttt

SEQ ID NO: 286789 - DNA, 366 bp, Glycine max
  unsure (1)..(366): unsure at all n locations
tttttgcgtccagtgcactttntggcatcgtattgcccaaaatcctgagccaacatcacaaaaacccaattacatccaaaataaaagttacattacatgccatatgaatattaagatctgaattcagagatgacaatacagtaataccaaacaaaattgaagaaacttttcccaatataattttttgccaacagaaataggagcagaggcatgacagaaatccataaaaatttcttaattntttttctaatgcaaactgattagttaccataagttttgatgaanatgaaactgttattattgtgaatcacaataataacagtaaaagacgaaccanaccaatccaccttataaaaacagttcagt

SEQ ID NO: 286790 - DNA, 417 bp, Glycine max
  unsure (1)..(417): unsure at all n locations
tgtctttgtaaacgtatgctttgtttaataaaaattatattattagcataaacattgtagaattgtactaataatatgatgtatcataacgtaccaatgacatgtattaatttcctataccaacaatagatgtcatgggtagtataacatgtaataatgttagtaggataaccgtttaatttttaatatataaagtctaaactaagcataataagcccaaagattaacatttttttccttagtatatgaatgtgtgaaatggaattgaactattgtattgatagtatatgagtggtgggacacacctgatctttcgctaacaaagtgtcccagtcgttatcctccaacagaacccttgtttcttcataacttanagccacccgataattcaaatctccaagccatattattcgactg

SEQ ID NO: 286791 - DNA, 346 bp, Glycine max
atcttcggaagcagaacaatcttgagcatcctctatctgataacattatcaaatcaaccatttttgctagtgttttgcaatcataaatcacataattttagaatagctccaaataaatttcatcaaagatcaattaactcctattgccttagatggttataacagtttctctgataaagactgttgggtgatacttgctggcagaggatatatgcaagactcatagtatacttaaattttgacagcaaactaagtttaagtaaaatcaatctaagttataactcacatacatttaaatatagatatttctgtagaaaggttcgagtaaaatctatctatgattctt

SEQ ID NO: 286792 - DNA, 407 bp, Glycine max
tggtgaagtaggagtgccagcggtgattaccgtattggggagattactgacaaatggtttaaacattgttgagagttgatgggaagtgaaattggctgaatggctgatctagcagccagcctttgaagctcagttctcgccttgtaagccacgccacgaattaaatggtctggcagtgaagccaacttcaccatcttttgctcaccatggtcttggagaaggagataccctatgatctttgtagtatgctcaggctcaaatctttgaagtttatcaaaaacaatcctcgtgtactccgaaatatccatagcttttcgtcactgcaagaagtcataacaaccttaacagagatgaacaagcactggtgagaaaataggcatagagatacacaattgcagattgagcat

SEQ ID NO: 286793 - DNA, 372 bp, Glycine max
  unsure (1)..(372): unsure at all n locations
agggtggggagggtgcgaatgtctgaccaagagaggaattggaggaggacgtggtaacgaaggatgttggcaaggacagtcaaggagaactggttgtcggcaaaaaggtaggagttgaagacgatgagaatggagagggaggatgagagatccgttatgaggggcatggcagaggtgagaagagagatgaataaggataatattatatttctatttttgttagacaatgaacaagaagtcgtaccaaaatttagtgagttataagtttttaggtatttgtcaagtccatcattnttttttattttgtactattcctcaatcattttttaaatcaaacatttataaatattctttttggtatccaatctctta

SEQ ID NO: 286794 - DNA, 404 bp, Glycine max
tttggacatttattaattgggatcttaattattagcatgctccataaatccaaagttaaggagtaaaatatcatttattaatcactaacacccaccacatcgtaggcgtacgtacgtgttcgccctaatctcttgtaaatagattaataagtcaacaaccagctgtgattttatcttttgtaattattcatagcagggcattttagtgttgaagtagaagtggttgcagtttcaagagaaggccacaaatggaagataagaggcacagctccaactaataaaagccgacctttgagcctcaaatggctccgatcagaacccccaacagccactggacccaccccttcaccaccgtgtcctaataccagtcattcttggccttttacccacgaagatcatactcg

SEQ ID NO: 286795 - DNA, 290 bp, Glycine max
ttgcatgcaagtttatatatacgaccatcaaatcaggagggaaccagactcgttatgcgtccatctatcgtagcaagaattgcaatctggttatgttttgccttgcataaaatataattgtgtaattatattagcttctagccttctacaaaaattacttaatgatctgtgaagtgagtattatattgtggaaatattgatgtggctatcgggaagggatcttctgcatggtgaaggattaattggaggagccacaattattctcttctgctgcataccgcatctcacaa

SEQ ID NO: 286796 - DNA, 370 bp, Glycine max
ttctttgaatagtatgaaagaccctcccttctactttgtaaaatagattcaatagaaactaggaaaataaacaaatatattcgccgagaaataggagagagggatttgaaccctcaatagttctttttttcgaactatattgattttcaagactgaagttgtcaaccactcaaccatctctccaaaagataatttatattctatatttatttcattgaataaaacatgagcatataaattgatacttattatgtgtgtacccataagggttgaacaactaccaagggtatggctgagaaccttttcggtcaaagccaaacacccccagccataaccagatatcccaaggtgactaattacccctcgggct

SEQ ID NO: 286797 - DNA, 392 bp, Glycine max
  unsure (1)..(392): unsure at all n locations
ctgganaatgatttcttttcaaaagttagtcgtattatgcgactaacaaactgcaaataaagcaaacaaagaatggtaaatttattagtcagtcaaaatattgcaaagaactaactaacaagtttgggatggaaaatgctaaacacatggccactcctatgagcactgcctgctatctggataaagatgaaaccgatcagtcaatagatataaagaaatatagaggtatgatcagatctcttctttatttatttgcaagtagacttgatataatgtttagtgtttgtatgtgtgcaagataccaagcaaatcccaaagaatctcaccttagtgcagttaaaagaataatgagatacttattaggcactataaatctatgattatggtatcct

SEQ ID NO: 286798 - DNA, 345 bp, Glycine max
ttttaagcctaagatacttatctgtggggggagttcgtatcccagggaatgggactatgccaagttcaaacaggttgctgataagtgtggggcagtgttgatgtgtgatatggctcatatcagtggtcttgtagcggctaaggtgatttgaattttctgtcttttctctttgttcttgttgaattatgttatcgattttatggttgtttatgcatctgaattagttttctttggagtgtagaggcagatgtattgtatgctctagaactagtatagatggagttgatagaacaatttacgtgcctgtactatgaaccaacatcttcagacttattcctgtcttat

SEQ ID NO: 286799 - DNA, 403 bp, Glycine max
  unsure (1)..(403): unsure at all n locations
tgtttacaatgctcctttaatcttattgatacaatatacgcaacaaggtttaattatgcttaagctcgtgccttttggagcaaaaggatccatttgattcttatgtactangattgcaaaaagtggaagtagtgagtttgttctgattgttctgagatgcaattttcttttgtttgcaggtcagatcactggggcaaatcctacaattcctggaatgtttccaaatatgtttccgttggctacaagtcaggtattttttgtttcttttttcccagctatggttatttagtgtcaagttcttattaatttcactctattcttgtttttttccttcttaagatgcagcaatttagtgctctccctgtcatgccagtgcaggctatgactcaacaggtaaaaatgc

SEQ ID NO: 286800 - DNA, 365 bp, Glycine max
  unsure (1)..(365): unsure at all n locations
tttgcatgcattcttgaacttttaaagcgtaaagttacgttactgtgttatttattaagattaatcctttagaaagcgtaaacatgttgttgtgcttgaattatttattaaaattaattgtatgtttattttggtatttaagcatacaatattaagctaaactaaataatttatgcatattaaatttaatggttaagagtttatatgtttcaaatattagataatcatatgcatataatatttatttaattctgaagttttgtgtgtatgatttatgattttatacatgcganattatcttgaatattntatacaatattatttggtttatttacattatttaaaatattatataaataattagc

SEQ ID NO: 286801 - DNA, 404 bp, Glycine max
tcctattcttctggtgaagtaaaagtgagattgctatgataaagtagttcttgatctgatttacaaagccatggaaccagcaaagtcactttctgctttgcagattgtgataaatatgcagctcgaaatagcgggtttacaactgttcccgtcatccaaggaagagtatcagttgtcactattgcaacatgtctttcattgtccaatggatgatgctttgcatggtctgtccataatccaccttcataccagtgccctatgctctgaaggacacttgttattggtaaatccaattgatcatttatgtttccattccctagaacagaagattcttccccaaagagggaataacaaatcgagtaaatcttaaactgtataaactagctgactgcctataaaactac

SEQ ID NO: 286802 - DNA, 385 bp, Glycine max
  unsure (1)..(385): unsure at all n locations
tttgcatgcattctttgatgatgtcgaaaataaatcacatgtttgtcatcatcaaaaagggggagaatgtgaatgtatgtatacatgattttgatgatgacaaagaagaatcaaacaaggctgcttcaaatgataagcatttgcttcaagattaattcaagattgcttcaacaaacaaagccttgtttcaagattcactaaagaccaagccttgccttanaacaaagtgctttcaagacatgcaaggctttggtaatcgattaccaggaagtgtaatcggttaccagaagacagggttgagaaatagctgttgaaaaaggttttgaatttgaattttcaacatgtaatcgattaccatatgtctgtaatcgattaccagcaacga

SEQ ID NO: 286803 - DNA, 406 bp, Glycine max
  unsure (1)..(406): unsure at all n locations
ntcataagtgaagttaggtgcaaccatctccctaagagtccgctcacgaggtagagattaagccatgttctcagtatgaaaattagtagccgaatgctcaaaattagaatgttcagaatcaccagcaacagaatgcacaaaatgatcaggatgcacactatgcctaactaatctatgaaaggttctatctatttcaaaatcaaagggttgtaaatcacctggattgcccctagtcatgcactatatgcaacaattcatgtatttctcaaataagcaccaaagggggtaaaactacaattatactcaaacgataaatgacttgaaaatttgtgagaaacaccctaaaatcatgaaaagatagcacaaaaattttcagacaaaaattcaaagtctgactatganaaat

SEQ ID NO: 286804 - DNA, 317 bp, Glycine max
atcttttcctctagctgttctgataaagttgtccaacgttatagaaggagaagagattgaagccttcattctactggctgcatgcaatgaatatttcttcctaacaagatcaattttcaaatcgcaacggtgaaaatatgcagaaatgaatatcgaaccaggtgtcccaatttcacaatgatccaacgggtaatgagtctgggattatagttttactatgacaagctttgggtctctgcaggacaagaaaaagttaagatgagaaaggaagttctctcacctccaactctgattcgcaatttcatcggtgagaatac

SEQ ID NO: 286805 - DNA, 391 bp, Glycine max
  unsure (1)..(391): unsure at all n locations
ntagattagtgattacatgaaagagtgcataatattttataagcattgagtttgaaatgcgatagatatcaaagtgtgaatacatcctaaaatacatataatggaaattgatgattgaatgttcaagcaaaatgtctaaaaactaggcctacccatacatatacgaaagatagagaacacactagtctcaaagcagtcaccactaaacccaaacccatggcaaggaactacacaaacgtgttgagataagagctcaacaattagaagagcccccataatgggactcctgagaggaaacatcacacatgacctcatcaagatcctctacaggaccctcatcattgctctccttaatgagccatctgtctcttccctaaggaaactctctact

SEQ ID NO: 286806 - DNA, 356 bp, Glycine max
tgtcttaacatcagaccacttccagggtgctggaactacttcacatggacttgatggggcctatgcaagttgaaagccttggaagaaagaggtatgcctatgttgttgcggatgatttcttcagatttacctgggtcaactttatcatagagagatcagaaacctttgaagtattcagagagttgagtctaagacttcaaacagactgtgtcttcaagagaatcaggagtgaccatggcagataatttgaaaacagcaagctcactgaattctgcacatctgaaggcatcactcatgagttctctgtagccaatacaccacaacaccatggcatagttgaacggaaaacaagactt

SEQ ID NO: 286807 - DNA, 365 bp, Glycine max
  unsure (1)..(365): unsure at all n locations
gttgctntctcttccatgtggcgactcggtatcctctaccaccccatttctattgttggtacagtcggtccattcttgcgccgagatcttgaccccttttgctaactcttgacatggaggggtatatcccagataatagagacgacttccttccacctatcgggcatcgcaggatcccttcaaactctactacggttggtattaactgaaagtcccccaacgtgaagcaccttaacgactggtcgtaatattgagtgagggatgcaatggcttcaacaaacacttctatcatagccaagtcctataggtttccatgtcttgcggaaggcttgacgatgaagaggatccattcgttaccctagctc

SEQ ID NO: 286808 - DNA, 382 bp, Glycine max
  unsure (1)..(382): unsure at all n locations
ttcttctcaagcaatcttccatcatataggacactaccaaatgccaaatggtgaatatgagtaatccctagaaagctaagggaaaaagctacaattgttttaaaaataagcttaggccaattcttttgttttgagggtcattttaggcttggaagtcagagcctttgcacttggataattgggctgcgaaattaggttttgctttgtgtaattagcttaattagatagattagatgggcctaatcaagacccatcttttccttccaattagtcacaatatatattagtatagttagttagttatttccattttgtatgaaatagaatttagaaacttcttttgcaagcttttagaanaaactcttttctctctttttctctc

SEQ ID NO: 286809 - DNA, 425 bp, Glycine max
actcacgcttctcccattcaggtctcttgtcatttggaacgaaatcagaagctttctccaagtggtcatgatgaccttgatcgagaaaccaaagtaccacggaagcagaccatgagggataattcttccaattcagcttagcagtagtgatggtcggagtcccagagaaggagaaaacgggtccagaagtagccattttggcccacaagatgaaaccctaaaggggtaaaaaagagagaagaatggggtgatacgttccaggcaacaaaactcaaaactgagggctggaacgaactcagaagaggccgacgagcagataggtggcggcacggcgcaattccggtgacggcatggaggcgcgtgggcttcacgcgccgaagaacgcgcgtgagaaaggtggcgtgtggagactcctttggcggcac

SEQ ID NO: 286810 - DNA, 380 bp, Glycine max
tgcttcaagaattattttgatgatgctaaggaatttcaaagatcattcaagatggatttcaaggatgaagaaagcaagatgtcaagcaaaagaaaagatctcaagataagaattaagataaactcttagaaaagtttttgaaaagcacaactgattggccaaatgagtttttatcttaacaaaaattttgcaaagcattttagtctctggtaatcgattaccagaaggtagtaattgattactagtagcccaaatatttctgaaaatggtttttcaaaggtgtaatcgattaccatggctttgtaattgattaccagtgcttataacgttcaaaaataatttgaaaaaccttgtaatcgattacacaaaacatgtaatcg

SEQ ID NO: 286811 - DNA, 417 bp, Glycine max
  unsure (1)..(417): unsure at all n locations
tgttaacattggtgttttcagtaacattggttttctgtaaaaccaatgttaacacgagtttgttaacgtcgattttttaaaaaccgatgctaatgaactcgtgttaatattggttttttatcaaaaaccaatgttaacaaacttgtgttatttacgagattgcccttgtgtttttgttaacatcggttcttggtacaactaatgataacttagcgatgctaaaaccattatttgtagtagtgtgtgaagtgttcaagtgacaaaattctaatgaatgcatgaatatgtcaaagaacctcacagaattgaagtggcacaacagacacacaagttgtaagctggtattttttattccatgataganaatagtgaaaacaataaaataatgaaatgaaaataatatgatttttataatta

SEQ ID NO: 286812 - DNA, 301 bp, Glycine max
ttcttggttcgaggtacttacccgttgaagatcgaagaacgatgaagaacgaatgaagaacgtcgaagaacggttgaaatctttgcgaaattcctcacggaaaacgttacggaaacgtttcggaagcgcctcggcttagattttcttcacggaaacaatttttccaagcaaattcgaaagagagagaagtgccaaaggggctgaaccccttccttcttcacttcctcccctatttatagcaaaataggggaggtggttgccgcccagctcgcccaggcgagctcagctcgcctaggcgagc

SEQ ID NO: 286813 - DNA, 388 bp, Glycine max
  unsure (1)..(388): unsure at all n locations
cgctttgagaaactcanatggtcattacttttcactcggatgtccgattcatgcgcatcacatgtcgagacgctcgaaattgataaatggaagctcttgagcaattcaaatggtcataaattttcactcgtacgtccaatacaggcgcataatatatcgagaggctcgaaattgaacaacggaagctctcgagaaattcaaatggtcataacttttcactcggaggtccgattcatgtgtataacatatcgagacgcttgaaattgagcaacggaagctctcgagaatttcaaatggtcattacttttcacttggaggtccgattcaggcgcataacatatagagacgctccaaattgattaacggaagctctagagaaattcaaatg

SEQ ID NO: 286814 - DNA, 356 bp, Glycine max
  unsure (1)..(356): unsure at all n locations
atctngacaggtttatgtgcaagtgctgctactggtggaggcacttgaatttggttgccagacctcaaggtgatggcactcacattttttggattctgcaaagtttgtgaagtcaatttgtcagaattttgggactgagcttgattcatctgagtagccatctgccccatttgatttgtcagactctgaatggaggctcttgtctcttgctgaaattgcatattctggatggtcatttgcctcactaactcttctaaggaaggttgaggaggagcctcagtttcttgttgtctttgttgtgactgctgctgtattggaggaggaacatatggcttgcttggaccagcaacattctg

SEQ ID NO: 286815 - DNA, 420 bp, Glycine max
tataatactcagcttgtccgaaaatactaaaaccgtttaagttctcaccttacactgtcctctttgcttttgtcggttaacatggaccgttcaaaagcataaaagtccatacatcactttactgcctttcgcgagaactacgtaggtctgatttcctcttcgatggaggacacgtaggagcaaaagccccgcttttgtcgacctcgtgagatggttagaggtccaatgccttagctttctcaccaagtaaaatggatcattttaaggtccaatgccttaaatgacccccttccaagtaaaaagaatcacttgattcgccccttttgtaagaactacgtacgtctgatttccttatcacaattgaggaatacgtaagagcaagggaaacacccttgtcgaccacataaagataaaaaaata

SEQ ID NO: 286816 - DNA, 340 bp, Glycine max
  unsure (1)..(340): unsure at all n locations
tgcttcagaccaaggcaactcaaaatctaggtatctaaaacccctcaatttagtggattttcaaggtttgagaagtgaaaatgagaatggggtaaatttagagcaaactctcacctcacacaagtctataaccttaatctaaacttgctcaaactggtttttcacctaaaattccaccaaatcaaaatttgactcctcaacacctaattttaccctagaaatggcttttgccttcactttggtcttttgtttttctctcttgcacagcccaagctttctcataagtcctaaatgacatttcaaactangactaactcactttaacctccaatttctactg

SEQ ID NO: 286817 - DNA, 418 bp, Glycine max
  unsure (1)..(418): unsure at all n locations
nttcctatggttgttctactagggtttccaagcatcatagagaaggagaagggattagagccaccatttcactatctccgtgtgagggaaatttctctctctatagacattatttcacaaatcccaacagtgaaaatttgcagaaatgagttcctaacctggttttcaaatttcatgatgatctaatggttaacgagtttgagatcgtagttttactcagacaaatttgggtgtatgcgagaaaaagaaaggattttgagagagggagaagggaaaacgaatttgagaggaagagagagcgtaaagacatatcgtaaatgtaaaaactaacctaatatgtctttatttatagttagagtgatctcagcctattatttactctatttttcttaaatttataaaaagaaactctatttta

SEQ ID NO: 286818 - DNA, 377 bp, Glycine max
  unsure (1)..(377): unsure at all n locations
ttctntagacaaaggacaacagtggaaatcaaaatcaaaactttattgtcgcttctctttaattctaccattggaggtaaccctaacgactgcgtgtagattttaatcataaaatcattgggccctaccaattaacattgatttgggaaagttgcctagggtgtgaaagaaactttagggccatctaatcaaatcatagaagaaaaaagataatacaattaatgcaatgaagaacttgctcttattaatcaatttaatttattatagttaaactcttggtaggagacaagttcctctcataatggacgaagatgggtatgatttctgctttctgtcaaaagctatacttcaataatgaatacagcttcaaccaaaaa

SEQ ID NO: 286819 - DNA, 373 bp, Glycine max
ttctcataagtaaaaaattggtacacccaaaaatacaaataattggccagctttacataattattccaagggtcttgcttaacttttctgaacaaatcattgctgcttatatgtaaagaaatgaaactgagtaggattttggcaattcttctgatgctgccatatcttgaaatggtatttataccattctgggagatcacaagttggttccagtctagctcttgcttcccaaaacatggttgcgatttacagaagcttctctttgatgtttacgcatttgaagtctaaatgttaaaattccccttcatatttgtgataatggaatggagtctgtgttgtgtctgaaattaggtgaacttgtcccgtatcaggg

SEQ ID NO: 286820 - DNA, 293 bp, Glycine max
ttctttatagttgaaagcacgagtcaaggtgtgaatatatgagggacgactgaacagattctttatgataaaagtacgggagagctatgcgggttttaaggagacgaattatttactggtttatattaaacatattatacgtataggatatattaatttctgattaatgtgatttttatatcatacatgatcttcttgattaaatttcttatttacgatattctgtttcatataccattctttgtttgatttgacattaattatttttcgattgtatagattctgcacttgct

SEQ ID NO: 286821 - DNA, 404 bp, Glycine max
  unsure (1)..(404): unsure at all n locations
tctgtgggtccggatgcgtgtggcagaacctggaatatgttgtgtagtgctccccttgctccaaaaccaccatggtctccaagaatgtgttcagtgactccctaacaaactttatcaacttgtccatgttgagatcggacgtatgagaggtgggggcgaggttggagtatgatagcacattccaggtctgggcaagtgtagtaaggtccttcctcagaagcttccaaggtgcgccctcaacgttcagaacaagtcctcaccttggaatgcagagcttggatgcaagctcttgtgggtttggatgcgtgtggcagaacctgcaatatgttgtgtagtgctccccttgatccanaaccactagggtctccaagaatgtgttcagtgactccccaacaaactttatc

SEQ ID NO: 286822 - DNA, 344 bp, Glycine max
  unsure (1)..(344): unsure at all n locations
tgttgcatgcaatctnttcgcaaagcttacggtaaaatatgggacctaaccatggtagaagtctccacagaggccattgcctccctcgcccagtattatgatcagtcgttgaggtgtttcacctttggggacttccagttatcacctatggtggaagaatttgaagagatcctaggatgtcctctagggggaaggagaccataccctttctcagggttctatccctcattagctagaatttataagatagtccaaatctcagcgcaggaattagaccacagaaagcaagtcgaaaatggggtggttggaataccgagaaaatgtttggaggcaaaagcaagaat

SEQ ID NO: 286823 - DNA, 394 bp, Glycine max
tgtaatcgattacacacatattgtaatcgattactataggagtttttcagaaaacattctcaacagtcacatctttttgtgtggttcttgaatggctatcataggcctatatatatgtgacttgagacacgaatttcataagagtttttcagaacaaaaagatcttatcctcttataaagcaaaatcgttttatcctcttacaaattccttggccaaattacttgtgattcaataaggaattatttgagtgctcaaattattcaatctatctctttcaagagagatttcttcttttcttcttcttcattctgaaaagggattaagagaccgagggtctcttgttgtgaaagaattctaaacacaaaggaagggttgtccttgtgtgtttagaac

SEQ ID NO: 286824 - DNA, 382 bp, Glycine max
tttgcatgcaatcttgccacccagctcgttcaggcgagcagggttgcttcctccagaagcaacagccttctggaggaatcttctggagggcccaagtgggcctggttgctatttgcacccccatttttactaaatacaccccctgccccttttttggtgattcttttttcgtaaagttacggaaacttacggatttcgcaacgatacttgttttctttccgtaatgttacggaaccttgcggattacataatcatcccccttttgacttacggaaggttacggaacctcactaattgtgcaacgatgcttgcttttgatttccggggcgtcacgaaaccttaccgattctgcatcaataccttcctttgatttccagcatgt

SEQ ID NO: 286825 - DNA, 404 bp, Glycine max
tctcaaaagacttgtgtaatcaattacagatagttgataatcaatcaaaatagagaagttttatatattcgggtttttagaaaatatatctataactcctcctagattctcttaaaaaaataaattggctattattaatagtttaatattacctcctaaatattatttttctacttactcattttatttaaaaatatatataataaatttttttaggctaaatactttcttctttatataaattttctatttagttattatccgggattgtccaaaaataccacctaccatttctttaaaaaataaataacaaatatttctttctttaatattgcgcataattataaaaatggttgaagactcaaccatggccaaattagaagcctctaaaggcatagatatta

SEQ ID NO: 286826 - DNA, 376 bp, Glycine max
ttctttgatgcaacatttggagaggttaatgaaacaacaagatgatgcgctccatgagaggttggatcaaatggagaatagagatcataatgaagaagaaaggaggagaagagggaatgatggtgttcctagacaaaaccgaattgatggtattaaactcaacattcctccatttaaaggaaagaatgatccggaggcctacgttgagtgggagatgaaaatagagcatgttttctcatgcaacaactatgaggaggaccagaaggtgaagcttgccgccacggagttttccgactatgctcttgtgtggtggaacaagctacaaaaggagagagcaagaaatgaagagccaatggttgatacatggacggagatg

SEQ ID NO: 286827 - DNA, 407 bp, Glycine max
tgtacattcaatttcgagcgttccgatatattacggtactcaatcggacatccgagtaaaaagttattgttgtttgaatttgttcagagcttcaacattcaatttcgagcttttcgatatattacgggacacaatcagacatccgagtaaaaagttattctcgtttgaatttgctcagggcttcggtaatccatttcgagcgtctcgatatattacgggactcaatcagacatccgagtaaaaagttattgacgtttgaatttgctcagagcttctacattcacattcgagcttttcgatatattacggactccatcagacatccgagtaaaaagtgctttgcggttgaatttgcttagagcttctacaatcaatttcgagcctttcgatatattacgggactcaat

SEQ ID NO: 286828 - DNA, 285 bp, Glycine max
tgcttgagccagttccaaatcactatgttgccttgagccatccccgacaacagttcctgagccataaggggacccacctttgaccttctccatctcatacatgccatctccaaatgtgtacccaaccggaacataaatcattccatggagaacaagctgagtgacagaggtcaacggggtctcttcttgtacacctccttgagaactagtgcttgagaagaaccctgcaggtttttctgctagtgcctgtgtatgccacagccctatagagccttctaaaaatgc

SEQ ID NO: 286829 - DNA, 400 bp, Glycine max
  unsure (1)..(400): unsure at all n locations
tctctttctttctccatcaacaaagntaccatcttgagactctttgtctctgtctttctcatgcattgaattcctcaacaacaatgcacagaatgtagaacatagactaggttatcaagaaagggaagatggagtttgatcttgaagacccactagtcagcttggaagaagagcaaacctttactatatcagaactctttgcctccgaatctgaacacgtgccctcaccaaactgcttaagttcaacacattttcacgttttctgtggtgaagccatatctctcattcttcaggtgaaagttatgtctatgtaaaaggttcagctccccctccttcatgccacatttgctacattatgttatattgttatgtttcttcaggttcaggtttcttgcacatt

SEQ ID NO: 286830 - DNA, 355 bp, Glycine max
  unsure (1)..(355): unsure at all n locations
cnagaccggcacaangcgcaaacaggcgcaaagangaaggccgncgcggaacgagnggggagcgngcacgcgaaaggaaaanngaacagagaagacacaacaccaacgaagaaaggcaacnctctaactgacaggtggaagaagaatgcctccccatatcatctctcaagaaggcatttactatgcctctattcgcagacctataccgcgccttacaaaggcccttaatgcctgacgcatccacgaaaggcctcatctacgcctgggtaggggaagacatcatcataccatcgtggctaaaagccaagccctactggggcttatggaaccaaacaggcccgctacatggtctact

SEQ ID NO: 286831 - DNA, 310 bp, Glycine max
ctatcaatactcagctggattttgcctgattaatacaatatatgtatgttctaaccatgtatacttatatacttatgagttatttaatgacggtgctcttgccatgaatctcaacatattacgaattaatcattgcattctggatggagtgggatactaatgggagctaaccatcgcacttcttatcctctttctttaacagacacctaatatggtttttaagggctattacatactgtgaaatattaattgcccgccttatgaaattaaaagtaggttatatggcaaacccgctgactattatctctat

SEQ ID NO: 286832 - DNA, 387 bp, Glycine max
  unsure (1)..(387): unsure at all n locations
atcttttgaaaagtggtgcttctaacttgtattttctaggctccaaaaccttgaccttgagctactccaaattcctttatattaaaaagacttcaaacgttaataatttagcttaaactttaaaagactagttaattaaattcctaaatagttacattctaactaaaaatgggccaaacatagttttaaattaaggttaaatgaaataattgatctcatacatacctaaaaaggtagacataaaatgcaataatcatacatcatgttttttatacaacacatgttcaccattntttaaacaaagccttaanaataagaaataaaaatagaaattcttgtaattatttgtaaacaacagaaactggaaaataaactagctttggtggt

SEQ ID NO: 286833 - DNA, 399 bp, Glycine max
atcatgaagtctcccttgactatttcctacaaagtccatcttggctctctcttcttcttttcactagactagagaccaggcgacctactcttctcattggtgcctcccatggccttctttttacgtggctaaaccaccttaattttctgacatcttttcctcaatcgatgctacaccaattcttcttatatataaatattttggatcttgtcctttcttgcgtaaccacacttccatcttaacattctcatttttgctactcctgcatttctctctcatcctttaaagcttagcattcactattattgtgaaaaattcaagtcctacattagctagagataacgccaagatagagtatataagtggtggcaatccctaccatatgagctagtttttggg

SEQ ID NO: 286834 - DNA, 294 bp, Glycine max
gtcacctgcggcatgcattttgagtttttcttcatggacgtcccgtggtgttcgtatgaatcttttggtgattcttacgggaagatggtgatgtagctccatgtggagcttgtatgccatcgatcttcttcatcaatggagtcctttgctccttaaagcataatgacatcggaatggatttggaacaatgatgatcggagacacctcttcatggagaagatgaatcaagaagaaacccaccaccataggaaaccatggataagagcttgaaggcttgagaacatgaatggaggg

SEQ ID NO: 286835 - DNA, 350 bp, Glycine max
acatggctctataatctggtctaagatctccaactgtcactctcaccaatggtcaactcatattacagagggatctttgttctaattctcagtatctcacagtaggagatgtatcagctctcacttattgtagccatactatggttcctcttccaacttctgtcactttattgcgggacccatgagtatggatctaccttttgtacgtgttagtacctctgagacttctatcaatatataatactttcgctgatcaaaaaaaacacaaaatattcacccttaaggagaaggaccacttgacaagacaagacattctggtggcttctactacacgataagcccgaaaacta

SEQ ID NO: 286836 - DNA, 381 bp, Glycine max
  unsure (1)..(381): unsure at all n locations
tgtttgttaaacatcttagaaaaaatcaagattttagcttgttcgcacatcactcacatgtatgatatccactcgacaaggtttgaagtagaggagaccttcaatcctataacgcaacgtggcggacaaaaatgggcagttaacttgaatggccattattgtcaatgcggaaagtattctgcgcttcactattcatgttcacacattaatatttcttctttntagtctttgtaagttcacactaaaattgaaaaaaaaaacttagagggaccaaattgaaaaattacacacttatatgaactaaaaatgaacaaaacaaattccatgcataaagattgaaaaaaaatgcaacttatgggaactgaaataaataaaaaaact

SEQ ID NO: 286837 - DNA, 405 bp, Glycine max
gctggaacacagagctgccactcttctcaagagaaggatgtataatctacagccaaagactcagaataggggggtcattccgaaacatctcctatggtttttcaagaaggcgagaaattacaagatttcagtgcaaatgagtctcatttggccgctgaacctggtcctccacagcttaattctgaaatcaatcagagaccaaaaagggtcactaaaccttctgaaagatatggttttgaagacctggctgcctatgcattacatgcagctgaaaaaatagattcaaatgaaccagccacttaccaagaagctatcaatcatcctgaagctgaaaattggctgttagcctatgaaagaggaaatggaatctttatataagaatcagacctggaaacttgttgaact

SEQ ID NO: 286838 - DNA, 372 bp, Glycine max
attttcgaatctcttcttgaagctgacattctgagcaaaccgggttgagataatgttgtatacaatatacctgcatcattgacaaaagggggaaattggatcaatgatactttctagattttaagtaagcgaactcatctccatatatgatagagcagagatgaaacgattgtaataaggtattttattgaatgtgtgaataatggaaaactgaatacaaaccagagccaagctcctcatcagagaacaaactctctctagctgcctaaccacaagggtgaaagcaaaatgaataatctccccccaatactaattcccactactctacttattgaaggaatatcctaaccgaatgccacctcagctatcaca

SEQ ID NO: 286839 - DNA, 431 bp, Glycine max
tatacacaactcaagcttgttttgctcactttctggatttgattttgtcacaatttttggttggtcttaaccaattaaaaggaaaacaaaagtgtttcaatttgtctgccttaattactcttcaatctttaacaattggttttggttctaggcacaagttttcgactcaaacttacgaagttaagtcttcttttacaactattgtacttcagtcatagttgtgcacaccatagcactaccatcatcatactccttgcttttgttgacgaccatctttcaaggtatgtatttgatagtcccactcctatggttattacatgcttgttgatatatgactattgttttatataagcatttatgcacattgcgagtgaaccttagtctcctgtttgagattgaatacgatgattaatactaacaatttgctttaa

SEQ ID NO: 286840 - DNA, 455 bp, Glycine max
  unsure (1)..(455): unsure at all n locations
agagaaggcntttgaagaatgaatgacncttttgannncacnngctcancgagatccctagagtagacctgcaagcatgcatatctttggctggcttctgagaggggaccagctttcattgatggtgtaacactataggagtcccgacttgtcactctttcacatatggatgggccagatggatctaaccgacaatcagtggttatcatggctagcaccataacacagaaaaaaccggtcggagtgggtttggctgatgcctatgacacattctaccgaagatgctacaaagacacaccgagaagtgacagtaatacacccgctctttatgtatggctggctcttaattttccctcatgaaagacacccctttccccctacaagcctacgccttgtgctgagaagggaagccaataggaaaactcatgcagaccgagaagctcagtactggtccc

SEQ ID NO: 286841 - DNA, 383 bp, Glycine max
cctacaagggctatctttattaagcctagtttaacaagaaggatctgaggatgaagctagcattgattcaacctaactaggtgatcaaggtttagtaatttaagctaccacatataacaccaagacatgattgattatagaaacatctttatatacatcagcttgtttgttagaaagacccagcacttgtacctactgttgtcaatcttacttacttgcattattactctttttagcctacactgaggctaattttgactaaaccatcaattatcaaagtttccttcaacacgccctatttatgaatctaaccctgcctaatactagtttcttgaggtcgatacttcgattcatccattctaattatacatatccgatgatcc

SEQ ID NO: 286842 - DNA, 373 bp, Glycine max
  unsure (1)..(373): unsure at all n locations
ttctttgatatgncgggtgtgtaaacagcgatatatacacttattgngattggcaataaatagttactaacattaactggttctcaaattatatttataaactgggtaaaaatatgtctcacaatagcttatacatttgtttgatgccagattattggggcctggcaaaaacctgttatggttattgtaactgaacttctcttatgtggaacattgcgcaaatatctgcggagtatcccggccaatgtgctcggatgttcgcgcaacaattggatttgctctttgtattgcccgagcaataggaatgcttacactctcatgggatcattcaccgcgaccttaaacctggtattgtatatgaatgtccaacttg

SEQ ID NO: 286843 - DNA, 521 bp, Glycine max
  unsure (1)..(521): unsure at all n locations
gcgcgacgtacttaacatacctttcaaccggttgtacggcgagatctagatannnacaanncagaagacgaatgaaccttgatgaccctttggaancagcgacatacaaatactcagctctcgggttgaaaaatatgacattatccaagctctatattgaggaccccaggctctctttatgggaagagatttaggctagactacttctattagacactgtattcgttttggaagaaaaattatagcattctacgttctctactgactaaaggaaggctacaactccaacgatgtattctctagaggatcaagcacagctctccttgaggctctattattactattaaatcctgataagtgtccactctttaccaaatactctgtatttgatgctataatccatgcatgctaacggctcgattaaccgtctctgcgcttaatttacgtacatgcttatagagcggccatgattaaatggagaatggggcggtaaaccaatcatggaaatcatatgctaaacg

SEQ ID NO: 286844 - DNA, 374 bp, Glycine max
  unsure (1)..(374): unsure at all n locations
tttttgtcttanaatcaatattctttgtgctaccaaatcactacactctaaacaaatcaataagattttttggagatttgcacattcactaaatttgtaatcatcttatagacggataaaacactcaacgcttttagtttttttctctcaagttatacaaagtattttaagagtttagtatctatacgaagatttacaaaaagctttacaagaaagaatgaaaaaaatatgtttgtgtagatgattcatcttcaagtattctttgtctcacaatagttggatttttcactctgctcttcatctaaagtcaagttcgttgaagaatttcatgtttacattacatgcacatcccttcttcatgcaangttcatgat

SEQ ID NO: 286845 - DNA, 399 bp, Glycine max
tcaagaattatggcctcatcaaactacttggttccttaaggaaattctataaataaacctcccatctttaatggagtgggttaccactactggaaaacccgcatgcaaatctttatagaggcaatagatttaaatatttgggaagccatagaacaaggaccttatgttccctctataatagccggaagtgcaacaatagaaaaacctagagcagattcgactgaggaagaaagaagattagtacaatataatttaaaggccaaaaatattattacatctgccttaggaatagatgaatactttagggtttcaaattgtaaaagtgctaaggatatgtgggatacactacaagtaacacatgaaggcacaacaaatgttaaaagatctaggataaacact

SEQ ID NO: 286846 - DNA, 260 bp, Glycine max
gagcttgactgtgacctgaacagcttgacccccggtactaatactttgtcttttgctccagtccaggtgtacaacatcagccattaagcttgtaatggctttgatttgcgaagaatacaaggccttgtacgtttgaaaataaacttggctagaaaaacgaatcgtacatttatgaacgccttgctgtataatgggctgtcagtttttttaatgagctgaaacatttaagtttgtatgtaagatgatttgaaccctgcatg

SEQ ID NO: 286847 - DNA, 394 bp, Glycine max
tggagaggatgcttaattgggtgttaagagagagggtgagacagagagagggggcagcattgaggttgaaggaagaacaatggagagaagttgatctttgagttgtgtctcacaagactctcatttatcaaagttacaacaaggggtacacatgcttctatttatagactaagtagcttccttgagaagcgttcttcagaaaacctccttgagaagctttcttgagaaaacttccttgagaagctcctatgagaaaacttccttgagaagctagatcttagctacacacacccctctcataactaagcttacctccttgagaagcttccttaagaagattcctaaagaagctagagcatatctacacacacctttctaatagctaagctcacct

SEQ ID NO: 286848 - DNA, 340 bp, Glycine max
ttgcatgcattcttctagccaaatagatttaccttgaattaattcctttgatagcccctttgagcctatgttcccctttctttgttttgaagctcattacaagccttaagtgaaaaaccatgatatcaccttacccttaaggaattttggagctttggaattgttttgggaataagttgggaataagtgttggggggtatgtttcattggaagatatgatatttggccatgcttaatgttctattctggccatgcttgatgtatatatatattgcctagatcttgctgtaatcttcaattgctggcaaaaaaaatatatatcaattgctgcaaattcgta

SEQ ID NO: 286849 - DNA, 387 bp, Glycine max
aatatacaatttccaaattcggatgtttattaacacaggagaaagaaactgtaaaagcatgatgaatttcccgttggcacatagaatcatatcagatatataaacatttgcattaactgagttgagttatttcacacaagaaacttttttgagaatttcctactctaatgtttcggaaccagttaatcattctgtacaactatgtgaaaatatcttaactcatttcttctagaatttcattagccgtctcaaaaagaggtgtgggagcttttaagcttggtgattttatctctgctacgatttctcttttgttataggatcagcagtcaaactgaacttctcattcttttccattcttagaaattctcctattattgagaaaaatta

SEQ ID NO: 286850 - DNA, 406 bp, Glycine max
  unsure (1)..(406): unsure at all n locations
ccgtgatcctctacgccaccttttgcatgcattcttcattacttcatgatgatgaatcaagattgattcaaggtgtttcgatgataacaaagatgatgacaaaaagcccaagagaatgatttcaagattgagtcaagaacaattcaagaatcaagagaaagattcaagaatcaagtttcaagtttcaagaatcaagaatcaagaataaccaagatcaagattcaagactcaagattcaagaatcaataaaagactcaatcaagataagtactaaaaagnttttcacaacattgagtagcacatgaagttttcacaaaatcttttagcaaagagtttttactctctggtaatcgattaccagtttactgtaatcgattaccagtggcaagttttgttttcaaaagct

SEQ ID NO: 286851 - DNA, 349 bp, Glycine max
tgtaaatcaaattccccttctcttcatcctcagttatctgcaagtactcggccgcgcttcgcgcggccacaatgttgtaagcactgagagtgatggttatgccatagcagaacttggcacacagctcaaatgcttccaccccacccggaaaatcacggagtcggactatttggtgctgtggagaatcagaactctctgagcataacctttgcaggcgcaaacatttggacaatagtggaaactgaacaacatcatgaacttgtgtgactaagcaatataaagattgaacaagtcttgttcaaaacacaaaatggactgagatatacaacttgaagagcttctaattttc

SEQ ID NO: 286852 - DNA, 343 bp, Glycine max
ttttctttgcatgtctagcgagctcttgagagacttaggtcctagctttacatagtctgagagattttgttatgtgaatatctgctcatactatagcttgaagaggaagccgacctgagagcttgagatgagtttgtgagagattgcgacgtcttaaaggtggatgagacatccccactacttgtattgctgcaaagttttatctgtctctcgtcttcgttgaaaaggaagctttccagggtcggatagctatatcctctgttggattttccttgtaggcatttgacgtaaatatctttctatctatctaatgatggttagaggcgtcttatgctatcagtat

SEQ ID NO: 286853 - DNA, 328 bp, Glycine max
tgaactatgcatactccgcttactaacgcttgtctttggagctgactttccttttgccctaactatattagactggtgattcctaagctcttgtccttgactggtaagaacctttttttaagcgagggcatctgacttgtgaccatgttttaatattgtgaatcataatcttccgcgaatctagactccgacttctattttgggatgaagggacgtacgcctaaagaattgcatatgatacatatgctatttattaatactggagcctgggagattgtctccttcttacatacaacgacttggggtatctcagtgcccaacgtatgta

SEQ ID NO: 286854 - DNA, 362 bp, Glycine max
  unsure (1)..(362): unsure at all n locations
ttcttgaaagagcccgggtagtcaaagagaagttcaagtccatagccatcaaagtctgaanagagtatgatgaactaagggacgtcaatatggccaccgctgaagccttggaacgagaaaccaagaaagcccgaaaggaagaacacgaccaaagcaaagttttgaggggctttatagggcagaaatagtgagctcaagctccgaagaggtgaaaggaatcatcatgggtcaaaggcatgatcttgaaagacgagctaaaggcttgccttatgtcgaaaagaaatttgtcccaacagttaaagcgagactgaagggaatatgtgggccatcatcgatgagtgcaaagagaagcttaatctacc

SEQ ID NO: 286855 - DNA, 400 bp, Glycine max
tgtaagattatggcgtttacatcacatgtggtactttgtggcgggcgggcgatggtgcacaaatagttatttatttccacatccacaatgcgcgcataaacccaccatcccctgttgcccaccttcaactgagctcacgtactcccacgtagcccatatccttgtttctctcaacaccgggtccccatcagtcctcccaagcttccacaacatccaagcataacaactttcacacagcacaagctattacagccaagcaaaacaaagtaaaggcagaaaactctgccaaaacaccaaccaaaaatcacagctttttcccactcatagaccccagtaacagttccttcgatccatttcgttaaccgttggatcgactcccaaattttactggaaggctata

SEQ ID NO: 286856 - DNA, 379 bp, Glycine max
  unsure (1)..(379): unsure at all n locations
agcttccatcaagtggtaatcagagcacaagagcttcaagtaggtgctccttaaacctccattaattttttgctttaccttctattccattgttgtttcttcattttttctccatgtatctcctcacatgtcttgtgataaatgtttttaatatgattctttagagtttccaccaattaaacttgctatagaagctagatttgattttctatggttcaaatttcttgttcttgttcttgaaccatgaattgtgttgagtttacgttcctttgagttttgtcttgttatttttttgtggatgaaacctaaaccataaaattcttacaaaaatattaaagtagaagaaaacctcanaaatctagagtgacttgttcaccta

SEQ ID NO: 286857 - DNA, 419 bp, Glycine max
  unsure (1)..(419): unsure at all n locations
nntaaaattgaattanaacgctcaataaactgctggtaatcaattaccatccatgtgtaatcaattacacattataaattttgaattcaaatttctagtaactgttataaacattttcagctactggtaatcgattaccagaaagtaaatctcaattttaaatgatttagatagaattttttggccaaaccttttgttttttcaatttggaaacttcttcctaagattctagagatcaacttaatcatatatcttgattttcttggattcttggattcttctcttaaacttagaagcacttgatcctttggcatcatcaaaacatcaaaacatcttgcttctacataggattcatttgacttaatccatcaactgaataaatccttcaactatttctcatccttggaaaattctttttg

SEQ ID NO: 286858 - DNA, 252 bp, Glycine max
  unsure (1)..(252): unsure at all n locations
tttcttccacccatttcagccaancgagcacaggtgcttgctccataagcaacagccttctggaggaaggattcgtaaagccccactgtgacgaaatgctattaccacccccctttttactaactgcacccccttatattagtatggtgagtcataatacgtaacgctactacacttgatgaatctcctagccatacttaataacgaacgcatacacctgaatccttacggattatgcagctactctatttt

SEQ ID NO: 286859 - DNA, 389 bp, Glycine max
agagattaagatctgagtttgtgattttttgtgcgcatttccagcatctttctatccatatcagactatgcatgattgcagattacatgaatggcctcctctatatataccaggatgacattattcttaacagatttccattcccataaagtatggcgtaaaataaaatgtgtcactctgaccactaatctttcataactccatatcgtggctggtccatggagactggtattcagtcgtgagaaagacatccctactgaggcatagatctccatgctgtcccagccttttgcacaaggatagtgtaattaaatgaatactgccatgcagatcaatatgatctttccccacaatgactgatccaattgaataaagaatggttacactca

SEQ ID NO: 286860 - DNA, 341 bp, Glycine max
  unsure (1)..(341): unsure at all n locations
atctngtgggctataccttcgaccaaacactttcgtgtttctgcctcggcccaaatttaaagcgggctgcaacaccggctccgcttccctaattgtactggaggcggttgccgtggctttatcctctatagttttctggagttttgacatgacctccgagatggaagccatttgatcttttaaggccgatggatcggccttcatttgttcctgcacgccctcttcattatccattattctggattgagtgttataggggtgcctttgtgctttcttagttatgatgaaattcctaaagacataaacaacggtgagtatgccaccaaaacatgaatatgcaa

SEQ ID NO: 286861 - DNA, 273 bp, Glycine max
aaataggagagaatgaaaatttccattccaggaaaatgatatgataggaaattccctatcatagagtgggagaaagctaaaagaatagaaagatcatttccaaccaaatagtgggagaaagtactaggaaagaaaaaaagctcctgatcaaggatctgaattatctcagaaaaaatgtgcgaataggtctttgtaccggactatatctgtatactacagatttgtcaccaaatgaactagacgaacgaaacgaaaccacgacctgaaagtgct

SEQ ID NO: 286862 - DNA, 387 bp, Glycine max
  unsure (1)..(387): unsure at all n locations
tgtttttattcttagttttgccgaactgatcaaaattcaaatgatctatggcccttcatttttatttcttgagcaaactaatgctcaaacttggtactttaactaatctttggtcttcttttctatgacagccacaaaatgttccaagaataggtgagttggctcttggtccgctcatgcttggggcttcaaatacactgcttaacgctgaccattacggtgtctatttcaaaggaatgcctctcttgaatggaaaggtgggcataccattctcctttatgtggtaattgggtatctggggtacctgaaaacttaacggtgagtttgtctaatcaggtattacggaggcatggagatgtatntgagcgtactgctagaggatactat

SEQ ID NO: 286863 - DNA, 417 bp, Glycine max
  unsure (1)..(417): unsure at all n locations
nttacttccttggtntcgtttttaattaattaaaaggaacgcgaaaaagttttgggctggttntgaacccttgccctgcaagcatgaaaggactccctttgccactaagctattgcaatttaattgtttaataggtgcagttcatgtgtattcataacttctgtaggataaatcatttgtgcacaaactgtttaaaattgtgtgtctctaagttatgctgaacatgcaatattatgttaaatactgatatgcatcggattaaatcctttaaattttattacatgttgaatgaatatacgtgcaatgttattttgaattggtatacatgtaatctttatgattcaatattgagcacatttgcattattaagtatgtttatgcaaggattattttgaatgttaagtgattaatataatt

SEQ ID NO: 286864 - DNA, 387 bp, Glycine max
agtcttctatagaatgttcgttcctaatttctctacaattgcatcacctctcaatgagctggtgaagaagaatgtggcatttacctggggtgaaaaacaagagcaagcctttgctttgctcaaagaaaagcttactaaggcacctgttctagctcttcctgacttttctaaaacttttgagctaaaatgtgatgcctctggagtgggagttggagctgtattgttacaaggtgggcaccctattgcttattttagtgaaaaacttcatagtgccaccctcaactaccccacctatgataaagagctttatgccttaataagagccctccaaacttgggaacattacctttgttccaaggaatttgtcattcatagtgatcatcaatc

SEQ ID NO: 286865 - DNA, 422 bp, Glycine max
  unsure (1)..(422): unsure at all n locations
ntgcggatttggtcttcgctagcgaaatgatcgatgtgggtctaaaaataggcaaatctgatcatcatgctttgatacatgcaaaaaaaactggggcaagtgaagagggagagaatgagggagaaacccatgttgtgactgccattcctatacaaccaagtttcccactaacccaacaatgtcattactcagccaataacaaaccttctccttacccaccgcccagttatccacaaaggccatccctaaatcaaccacaaagtctgtctaccacacttccaatgacgaacaccacctttagcacaaaccaaaaacaccaaccaagaaatgaattttgcagcgagaaagcctgtagaattcaccctaattccagtgtcctatgctgacttgctcccatatttacttgataattcaatggtagc

SEQ ID NO: 286866 - DNA, 374 bp, Glycine max
  unsure (1)..(374): unsure at all n locations
ttctngatttgaacctgacttattattgagttatgtctactacaattgtataaatcactttacgcttgtccaaaagtacttacaaatgtatgtccttgtctgtttttaggtggtactgttaatgagaaacctgtgcatgattttaactagctgagatttttagcatcatgtaagtattgatggtctgacctttagattgctataaatatgtaacatgtcatgctgagtaattgtctgccttgtataagcaccattagagttcatttttggtaaagtgttatcttggtttttggtctgtaaatatgtagtatgtcatgctgagtaattgcctgacctttattttattaaatttgctcaacactaaactatgatgc

SEQ ID NO: 286867 - DNA, 364 bp, Glycine max
atggctgcgcaacagctctgatttcgtgagtatttatagaagatgacgcatgtgaatcgattacaggaattgctaatcgattacaggcccaataagccttctggttatcgattacaagatgttgtaatcgattacaggctggctgttcatgtgtaatcgattacactggatggtaatcgattaccaaagcctatcctaagctatactctaataaaatatctatattcatgctcaaatacatcctatctgactaattatcactactactacactaaatccgatcatgtcattactatatacacactaaatcataacttctatcatcaatacaagaatgcgaacaagatcaatcataataatctac

SEQ ID NO: 286868 - DNA, 373 bp, Glycine max
  unsure (1)..(373): unsure at all n locations
ttcttctaacaatttcatgtattattacgtgtttaacatatttattactcattgttttgccttttgccgtaggatatgatgcaatcctacccctcaagggcattggatagaagactccaagaagattgggccagagatgcaagagaaggccctaagattctcatgagccctatggtagattttgggcccatggactaagtatgagcccacttatctttgtacatattagattacgatttcattatttttaggccttgtatttagagctccataatgtangtagggtaccctagaaatgtangatttttcagcccttgtattttatggcacctagactagtttttgtattangggtaagtttgaatttcacatg

SEQ ID NO: 286869 - DNA, 408 bp, Glycine max
tttctcatagatagcgatggatgtatagttttttgattacatgcataagagaaatgaaacaaaataaaaagaaagaaaggaaaagaaggattcccgatcaaagatcggaagaaagtaaaaaggaaaagatcagaggaaaacagaataattcccgatcaataaaggaaaccaagaaagagaacagaaggtcttcggaccagataaattttcagcgaggtaaatgaccgccgacaaagggaaaacccatttcaaagtggttcttcctttgtgattgccattcaaggtcgctcccaactggcgatgtcccgccccacataaacaaagaggaaaagaccgaaacacccagtttcctctccaaaaacactaccctcgagaaaatcctattgatccgtgatcgcgcgtgtaatc

SEQ ID NO: 286870 - DNA, 323 bp, Glycine max
gatcaaaacaaaatctatacattctagtccactcaattcatacaattactcattcaaatcaatcacaacacttcatttcatacaaaacaaaccactgaatatcatattcaatcagttcactgttcaaacatacttttgtacaagctactactacaaacaaaataactaaaagttataactgaaacttaaataactgaaacataatgcataaacaaaataaactgagtaaaataaactgttcacaatgagaaaaagaaaagatcttatcaatcctcctatggatgatcctctgcatactcattaagatccaacctggagcaact

SEQ ID NO: 286871 - DNA, 404 bp, Glycine max
ttgacttgagtcatcacaagatataaatatgcgatcttggcatggattgtttaaaaaataacaatcaagaaatctatctttcaatcttctctctcaacatcattcaactctttcaacagattgtttctgattcatcttctcttcatctttctaaaagtttttgttcaaaactttttctttcaagaaaagttctttgataaaaaacttgttctattaatctttttcattctcttctccctttgccaaaagaacaaaggactaaccgcctgaattcttttgtgtctctcttctctctttccaagagaattcaaaggacctcgcctgagaattcttttgattcttcccttccccttaaacaaaagatctcaaaggactaaccgcctgagatatcttttgttcccctt

SEQ ID NO: 286872 - DNA, 340 bp, Glycine max
atctttcttgagaagcttttatggaggctagatctttgagctctaatgatgtccttcaatggcgaattttaaccatggagttacactggaagataaaggagaaaatattatatgaggcgtcatccaccaggggatgagccatggaagaagaagctttaccaccaagataatgttttggataagaagcttaaagaagaagctctattagaggaagagaatgagagagagagagagaaagtggcatgggaatgaacgacaggtacggagagaagttgaacgttgaagtgtgtctcacaagactctcattcatcaaaattaccacaagtggtacacatgcttc

SEQ ID NO: 286873 - DNA, 403 bp, Glycine max
tctagccaaatggacttaccttgaattaattcctttgatagcccttttgagccttggttccctttccttgttttgaagctcactacatgccttaagtgaaaaaccatgatattaccatatccttaaggaattttggagctttggaattgttttgggaataagtgtggggggtttttgtttcattggacaacttgttttgttggctatgcttcatgatgtattttgggccatacttgatgtacattgtatattggttaaatgttggacatgttgaatgaaatgttgtttctcaaaggctaaagagtaaaaaaaaaaaaaatcgaataaagaaaaagaaaagcaataaagttgagtgaataagatcttaaatggcacaagaatgatgaaactcttggttctactc

SEQ ID NO: 286874 - DNA, 375 bp, Glycine max
agcttgtaggattatggtgtacccatcacatgtggtactaggtggcggtcgggcgatggtgcacaacaagttttccacatccacaaagcgcgcataaacccaccatcccctgttgcccacctccaactgagctcacgtactcccacgtagcccatatcctcgtttctctcaacaccgggtccccatcaatcctcccaagcttccacaacatccaagcaaaacaacattcaaacagcataagctatcacggccaagcaaaacagagcaaaggcagaaaactctgccaaaaaaaaacccaaccaaatcacagcttttctcacttaaagatcccagtaacaattccctcgttccggttcattaaccgttggatcgact

SEQ ID NO: 286875 - DNA, 409 bp, Glycine max
ttcttaagaaaacttccttgagaagcttctttgagaaaactttcttgagaagctagagtttagctacacacacccatctaaaaactaagctcacctccttgagaagcttccttgagaagctagagcttagctacacacccctataatagctaagctcacccccgtgacaaaaaaacatgaaaatacaaaaaaaatcctactacaaagactactcaaaatgccctaaaatactaggctaaaaccctatactactagaatggccaaaatacaaggcccaaaagaagaaaacaacctattctactatttacaaagaagagtggtcccaaccttggcccatgggctcaaaaatataccctaaggttcatgagaaccctaaggccttctttatcaactctagcccaatcctctt

SEQ ID NO: 286876 - DNA, 249 bp, Glycine max
tgctttaacctcattgtctctcacagggactagattttgggagccaatccaatccttgtgttcggactctcagacacttatgagagccgccgatgatcccattactgattcccctaagctctctgatcttgcttcacgacgcatcccatgccttgcgaactccttggaataccctcgcgttgtggtaactgaaaccccgcgcgatgaaaggcgtgatgctatcgcctgatggcactcctctcatggggt

SEQ ID NO: 286877 - DNA, 364 bp, Glycine max
  unsure (1)..(364): unsure at all n locations
tgttagtttcagatgatgcagctgagtttttggctacctcatacactcctntcatgactataacagcatttctggcgctaaactactacgagttgaaagccatcttctccattaaatttctggcttccctacgaatcatgtttccaagggctccaccactggcagcatctatcatacttgtctccatatgactgagaccttcataaaattattggagaagcacctgctctgaaatcttatagtgagggctactgacacataaatttttaaatctctcctagtattcatacaggctctctccactgattcgtctaatacctgagatatccttcctgatggctgcggtcctggaagcaaggaaatg

SEQ ID NO: 286878 - DNA, 366 bp, Glycine max
tgcattcttatccttatggcctgcctccggacttcaccccctgtgccaccccggaagatttaagccaagcccctacttttgaggggcaactcctaccttatgaagactatcccgggcaagacgatggggaaggagatacccatcttggccccctgctccacctcaaagatccatccccgcatgaactaccccagctgaacatagtccgccatatcccggcctcatccgcacccgtaaaagaatctattccctttgcggaagataagggaaagattgaagcgctcgaagagaggttaagagcagtcgagggcctcggtaattacccattctcagattggcagaattatgtcttatgcccaacatcgt

SEQ ID NO: 286879 - DNA, 399 bp, Glycine max
  unsure (1)..(399): unsure at all n locations
tgcctcanagaggtccaggaaggacaaggcggccgatagaactagttccgctcctgagtatgacagtcaccgctttaggagcgccgtacaccagcagcgcttcgaggccatcaagggatggtcatttctccgggagcgacgcgttcagctcagggatgacgagtatactgatttccaagaggagataggtcgtctgcggtgggcatcactggttacccccatggccaagttcgatccagaagtagtccttgagttttatgccaatgcttggccaacagcggagggcatgcgtgacatgaggtcctggatgaggggttagtggatcccgtttgatgtagatgttatcggccagctcctgtgatatctgttggtgctggaagagggccaagagtgcgagta

SEQ ID NO: 286880 - DNA, 385 bp, Glycine max
ttcttggagggattgatggggacccggtgttgagaggaacgaggataagggctatgtgggagtacgtgagctcagttgaaggtgggcaactggggatggtggatttatgtgtgatttgtggacgtggagagtcgacttgtaccatcgcccgatcgccacctagtaccacatgtgacgggtaccccataatcctacaagcttgaagtgaggaagtgtggaagggtgagacttcctacttttattcgttgaccacagagtggtacctggagatatgtcgcgggggttaggagaccttggggacgtcaggtggggtgctattgcccaaaaccaagcttgaccaatcccgacccaacccgggcatagtcagtcagtgagaacctgtgac

SEQ ID NO: 286881 - DNA, 412 bp, Glycine max
  unsure (1)..(412): unsure at all n locations
gggttacctccttcactacatcaagaatcaccgagttgactcttctatgtggttgtcttactggtttagccccatcctctaaatttatccgatgcatacatgtggatggggtaataccaggaatgtccgccagggtccagcctatagccttcttatgcttcttgagaactgataacaacttctcctcttgctcatcagcaagggaggcatatataattattggaaaacttttgctatcatccaagtaagcatattttaaatttgatggtagaggcttcaattctggtgtgggcggctggataatggtagaaagagatggtttctcagcctgtacctcataaagaaagtcagaggtatgtgtacttcctgaaacatggttagttctatctgactctaganaatctatctcaag

SEQ ID NO: 286882 - DNA, 351 bp, Glycine max
ttcttccaaattagtgtaccacactaccgcaactccggccaagctatcctgaaagaagtgtattaatagcttttcatctttagagtgggcgcccatcttacggcagtacatcttgagatggtttttgggacaagtcgtccctttatacttgtcgaagtccggtactttgaacttcgggggaataacaacatcgggtactaagcaaagattcgtcatgtctgcgaacggataatccccaaatccttcgacggccctcagtctttcctcaaggagatcgagcttcctcctttcttcagttgctggaggcggcccttccgtggacaaaactattggtggtgctgcgatgttggg

SEQ ID NO: 286883 - DNA, 416 bp, Glycine max
tcttatggaccttgaacaagcaattaactcctctttcataaccatgctatgtgctcgcgactggtctctttcttcccttcgcaacttgagttcactattgctaccccatagagctccgcgaaatttgttccggccatactcttccttgcgagccctcttggtctcttgttcaagggctcttgcagtaattgcattctcttcccgtaacccggcacactccttccgaacgtgtgtagcggccaacttgaacttctccttggcaagttttgcctttcctaactcgcttttgagagtttggacttcttcgtcctcttccggtgcttcaaaactctcttcgctgacgacttttaacttggcgagccaatctaaacctcgtatatgaactttcatccattcgtggtacccacaaatgatgc

SEQ ID NO: 286884 - DNA, 381 bp, Glycine max
  unsure (1)..(381): unsure at all n locations
atcttataatgaattaagattagggtgtgattttgtgattttgtaaaaataataatttaacagagtcaaagaattacagagcttgtcttttgtcagtgcttgttagaaataatggcactttgttgcgttcttgtttcatgttaataaactattttttattagcaataaaagtgaatctctgtgtccctactaaaatttaacaaagctaatctttgtgtatcttttccttttttctttcttttgaagtacaattgtctttcttatctggcagcaatcagtattggtattaacttctgattaaattgttccatgacaatcgtgctgctaatgctgacagggcaagctaaaacancacacaacctgttcctcaagtcctcaaat

SEQ ID NO: 286885 - DNA, 403 bp, Glycine max
  unsure (1)..(403): unsure at all n locations
tgacaanatagggaaagaacatcagaaatttgttcttagagttattgaagaaaaagtntagttatatggatcaagatatcaaagaaagatgagaactatttttataagcttttcaaggatgggtaaggattgacctgtaagatggaaggattagaatgctaagaggacaaacaaattctgacttattattgtggattttgagttggagaagtgaaagaaacctgttagaagatgaataatggtaaagttgttggtcctattggttcagagaatttagtttttaacagaatccaatggcattgtgtgatctgtataacccacaaaaaagtgctttgtaattgatggatcctagaaaatccaatggcatgggcaagtttgcaacaacaatgtatagatgtcaaag

SEQ ID NO: 286886 - DNA, 362 bp, Glycine max
  unsure (1)..(362): unsure at all n locations
gacatagtcagatcctgaaatactagtggcgacgatgccttagttacctctaggcagcctaccataactcaactctcatacaatactctgcatgatagcgtggctgttcaatctctactgtgtctcgaggaggtatcacaccaataagtctctgcaccactctgacactcagatgaatgcttactacagcacataaaaacgcagacagggagaactctctctcatggctgacgacaagctatagagagtgatgcagaacacaggacgatcggtcactcacattctggttcgcttagccgaattacgagcaatagggctacacgccccttctatctaaaccatgaagtggaagcgagcactan

SEQ ID NO: 286887 - DNA, 254 bp, Glycine max
tccttgatgcgtcttttcgacaagctatatacaatatctatcgacacccctctaatatctaaagcaaccttcttgaaaattaaacacgcatcattatacacttcattatctagcgagcaccaaacattattgctgataatatcttatggtgctacactgctcccgcatcttatctgtgctgatgactatgctgtaatggacagttgaagaagatgcagatcttcccttaattttgggacgtgcatgtatgtcta

SEQ ID NO: 286888 - DNA, 321 bp, Glycine max
  unsure (1)..(321): unsure at all n locations
attttgcttgtggatcttctatggnggctggatctttgagcttcaatgagatccttcaatggtgattttccaccatggagatgcagcggaagacaaaggagaagaggtgagaagaagcgccatccacttaggaattagccatggaagaaggagcttcgccaccaagatgagccttggataagaagcttggacagaatgcttcaatggaggaaaagacagagggagagaaagagagaggcggggggggggcacgatattgaaggaataaaagagggagagaagtggaactttgaagtatgtctcacaagactctcattcatc

SEQ ID NO: 286889 - DNA, 373 bp, Glycine max
tcaatcatgatatgtattaaaaagttttttcaaaaactgagtagcacatgaattttttctcaaaaccttttaccaaaaagattttactctttggtaatcgattaccagattattgtaatcgactaccagcagcaaaatggttttcaaaaaaaaatttcacactaaatttacaacattccaattaatttcaaaatgttgtaatcgattacaagtatttggtaatcgattaccagcgtgtttgaacgttgaaattcaaatttaattgcgaagagtcacatcttttcacaaaaatgctttgtgtaattgattacaatgatttggtaatcgattactagtgataagttttgaatgaaaaatcaaaagatgtaactct

SEQ ID NO: 286890 - DNA, 366 bp, Glycine max
ttcttcctctacccggggaaatatattatcggccagtgtttttaaaaagaattgcgcaatgtcggcagaaaaatatcagtcgtggctatataacgaccgatgtcaggtatttttgtttcaattcaatccctgaataatttttggatattgtccaataggaaatgttcgatcggcgtcatcacgtgatgcttgctttttattttaaacctgctggatcggtcatctttcctggccgacatcgactatcattttttttatcagtgacggtgaataatgttttttggccgaggtgggctgatgtttttctagccgagtaaatgagatcacgccagtgtcgggcgaaacacagcttctgttgagctcgca

SEQ ID NO: 286891 - DNA, 402 bp, Glycine max
tctatataagctgaaccattttatcaataaacacattttgagttttattcagaaaattagagttcatctcttttatcttagagagagtgattctcctaaattcttgagtgattcaagaacaccctggctgtatcaaaggactttcacaacctttgtgtgttgccctcgctggaaagagtgattctttccttcctttcatcttcacccttgttctttcaaatcacaattccagaaaattcacccctgcccagaattatctcgtggccataactcccattttacgcactcaaattaagtgattcttgagcctaaattgaatttcaaaacgatacctttcacctcgttttggaatcacctcatttggagccctgtagcttcagctattgccagttctatatttct

SEQ ID NO: 286892 - DNA, 369 bp, Glycine max
atcttggacgaataaggtttgcacttaggaaacacaacaacaaacaggtatgaaaatgttcattttttattagggttgatgaattcatggattttaattgttttttgtgtatttgaaatgtagggttgaatttgctcattgttatttgggatgccatgaacaacatgataacgctgcaacacactgaagttaaggcatcctttgagacaaatacacatgtggttgtacatgtttttaaagttaccttatacaagaggctacttggcatggtatcaaggtatgctttaaatcagattgctgctgagtatggccgtgcacattatgctggaaaaaaacccttctcattgtggatgtgtgataagaactacc

SEQ ID NO: 286893 - DNA, 399 bp, Glycine max
  unsure (1)..(399): unsure at all n locations
tcaatggaacttacatcatgtggtatcaagagcatcttcatctangtgatgttcttttgcttcctctatctttttgttcggtgaattctctttaattccttgttcttcatcttattctccatgtatatcctccatttccttgtggtttggtgctgtttagagtagattcaaaaaaaaaaaatcgattaaatcttagatctacacttgttcttgtatttctatggttcaaattttgtagatctactcttgaatcatgtttttgtgttgattttaggttctatcatttttcattcataatattcttgtgctgaaccttagatctaaagtttattccaaaatattgattagaaaaaaaaaacacaaaaatctaagtgtaaatcacttaatccatgttgtctt

SEQ ID NO: 286894 - DNA, 264 bp, Glycine max
ttacacatacttgctgatctatatttcgattctgcccttttaaagactggcattttgatctttgggacacatgagaatttagtgatctttatcgaggctcttgggataatatccgcatgcaattcatcaacgataagcctacttgattatagagttagatacattaaccccataacacatgtaaatattgggtatactcattttgaggtttatctcaattattttcattatataaaatgccctatactatatatataagaatct

SEQ ID NO: 286895 - DNA, 402 bp, Glycine max
tggtctgagatcaccggtttgtctgtcacctccacatagttgtgagggggagaattattaggtcttttgggttatcttcctatgtggagtaaagacccacataagaaggcaagtatgtctcacttatttaagcggagaggaatcatattatagagtgagacacactgagagagactcatttgagagggaaaaaaatctatcgagagagaaaatcattgggatgttcgtatacctaccggagagcgttttttagattgcaactgcggattcgatcaccgttggatcgggttgatttttggacaacaggttctacacacttgaaacttcaaattgtttggctggatcgggaaaaagatatctacagagagagataactattgtacattatttgctctatatttt

SEQ ID NO: 286896 - DNA, 388 bp, Glycine max
tttgcatgcattctttgcagagactgctccatatcccaacaagccatcactgcctccatggcatgaacacggacatgctgctgcagttgttctttaaaggcacagagcaacagaacataatgggtctgcaacaaacaaaataacaaaactcataaaaaacaagctcttcacattaacatttaagcacattaattaagaatgagaaacaaaacccatcaaaaggacaagaactgagaaggactatgtaaatacaagtgtaaataaaccccaagatgccaaacttatataaatgtccctacaaagttaacaaaatgttatagtgattcagtactccaatcattatatgtagagtggatattaagtcagaatcaaatcttaactttaatat

SEQ ID NO: 286897 - DNA, 417 bp, Glycine max
gacctatgaaactcagctatgaccacccctgccctttaaaaacccctttgccaattcagtggagaccaaggggtcatgaagtggattcaactaggactccccgtgattaccatatagctctagggttacccttttatgactactccttgtatagtagggtaagattaataggtaaatacatgtatgaaaaaaaaaatagccattaaaactaaaatattacaagattttaaaattaattataaaaacttctaaatatattttcatcaataagataacattaaaaatatatataaatatcatataaatatctatttttgttattccgtatttatactagataggtgtttggttagggcaaccaagtacttattggatccgccctcctatagagacaaaacaattatgcttatgagtaat

SEQ ID NO: 286898 - DNA, 360 bp, Glycine max
tgcttccttaagaagattcctaaagaagctagagcttagctacacacacctctctaatagctaagttcacctccttgagatgagaagctagagcttagctacacaccccctataatagctaagctcacccatatggcaaaaaaacatgaaaatacaaaaaaaaaagtccctattacaaagactactcaaaatgccccgaaaatacaaggctaaaaccctatactactagaatggccaaaatacaaggcccaaatgaaggaaaaacctattctaatatttataaagataagcgggctcatacttagcccatgggctcgaaatctaccctaaggctcatgagaaccctagggccttcccttg

SEQ ID NO: 286899 - DNA, 401 bp, Glycine max
tgtgaaagcattatatgggttgaagctagttgtaatagcttggattgagagactaagttcattcttagttcataatggtttctctagaggaatagtagacactacactatttagaaagactcgtaaagaggatctgctaattgtacagatcgatttatgtagataacatcatctttggggctactaaagaaataatgtgcaaagaggtttatgagctgatgaaagaagaatttgaaatgagcatgatgggagacctaaagttctttataggacttcaaatcattcaaaaatatcatgacatttttatccatcaagagaaattcaccaaggaccattcaaagaggttcataatggatgaagctaaaccaatagctacccctatgcatccatctactgtcatt

SEQ ID NO: 286900 - DNA, 325 bp, Glycine max
ttcttgcagtttctgggaggctttgccaaagttttcttcgtgtttggtcatgtgctcaccataactctctgtttgcttccgtacatctgagggatctacatggtaaaaaactgggaaaacaagttgtttcatctcactgatcttggactgctccaggatcttaacaagttcatcaaggcaccatgtggaggatgcgtagttcttagaaaacacaatgattaaaatcttagattcttcaatggccttggatagagaaggtgaaataacattccccaccggcaggtccctatcatcaaagaaaattttcatcccttttccggacaac

SEQ ID NO: 286901 - DNA, 396 bp, Glycine max
  unsure (1)..(396): unsure at all n locations
tatattgctagtggaagtgaggattcacatgtatgtatcttcaatcatcattgatcaaaatgggaaaatattcgccagtgtaatattttataatttgcaaattgaaagccttgatgtttatatgtctctgttaaatgttttttatttgctaattttttattgctggctcaataatttgttaaaataagttcaacatgcacttgatgcatgctatcgaggatcactaaaatattggcataaaagacccatgaaatggttctttgtggtctgatttactggacttgaatgaattgaactacaaattgttataatgttcaagagttacgggcttctgcaatattattctagtttatcttgataaaactangaacatcttgactgataatgctggaagtc

SEQ ID NO: 286902 - DNA, 354 bp, Glycine max
  unsure (1)..(354): unsure at all n locations
ttctngcctaattaacctgaaattgagagaaaatgattatgaaacacataaaatgaaaatactaagtatttattacctatacttaacagaaaatacttataaccttacaaaataaccataaattgggagagtttgatataatttatacaagtttcatacacaaaattagtcattttcaccgactaacaactcccccaaatttacagttttgcttgtcctcaagtaaaaagagaacaactcacttgtcctcaagtgacaatgacatgcagtgactatgtacaaaggtgtatgctacaaagtgactgattgcatgataagagaatggagtaaaatgcccttatcacttgtctttca

SEQ ID NO: 286903 - DNA, 390 bp, Glycine max
ctgagatccatagatctaatgcaaggtatatgtttcatagaagggatttcgttgcttgtgttggttgattccagagccatctattcctttatatcctgtgtgtaagtagaaaaacttaagcttttctgtgtcttctttaaataaagatctagtggtggagacccctactagtggctatgtgataacttcttatgtgtgtttgaaaagtcctgcggagatgtctaggagaacattcttgattgatttgatttgtttgcctttgaaccagattgatgttattcttggtgtggactggatatcttccaaccatgtcttgttaaactgtattgataaaagagtggtgttcgatgattctgtatccgagtaagatatgaagttgatctctgccaa

SEQ ID NO: 286904 - DNA, 390 bp, Glycine max
ttctttgtacaacctctgcattgttgagcttctgcagcttactaacagaagttgctgccctgattttaccaacatcattttctgaaaacacaaagctaccggatatatcccatagctccacagtcccctcatcatgcaaggtcacgaacttgacaccagtaagaatgagattcttcacagcagacaggaagtaaactttattagaattcaaaaacatgatttaaaattatagagttagcactatcatctttaaagcttgaacctaaatatcacaaccatcaaacaaaaaatcaagtcacacacaaatgataaaactataacctaagttaacaaaaaaaaattacaactgtcaactggtaatcaaggtttaaaaaaaaaagtctgcaacat

SEQ ID NO: 286905 - DNA, 411 bp, Glycine max
  unsure (1)..(411): unsure at all n locations
tcttggttgtggagttctgctgaaaccttgatgtaacactctttcactatctatttaatgttatttttatgggttcattgcttctaactatgcttattttacatacttatggcttgatcacccatttgtatgtatagttaggatttttagcattggaaaatgctttaaagccttagaacttggtagagcaagctagaaatctgtatgtctaggaatggagtatagtgatctagttcatattatgttgtagacttaatgcaattcttttagactaagtttgttgagggatcaaggacgaagtttanagagagttaagcttattcactagagggatcttggtttgagtagtttctcagcataagaatactatgataacgttaaatagagaataatacacattatcatcaagag

SEQ ID NO: 286906 - DNA, 382 bp, Glycine max
tttgatttgatactgcttccctcatcatgtggctcatgatgtttacaatttaatgatcctttgctaccctgcaatgagacacacacaaatacacaaacacacacacatagagacaaacacacacacacacacacataaagatacacacacacacacacacacacagagtcacacacacataaagacacagacaaacacactgagccacagacacacacagagacccacacacaaagacacacacactgagtcacaaacacacacatacacaaacacactcacacacatagacagacatacacacacataaagagacaaacacacacacacacacacacacacagataaagagacaaacacaaacacacacacccacacacag

SEQ ID NO: 286907 - DNA, 436 bp, Glycine max
  unsure (1)..(436): unsure at all n locations
ctatagacaactcaagcttcatgcatgtatgtaacaattnttgctattgactatattaaattgaatatcaattcaattcattgaacataagccttacttaagattgttgcttgtcaagtcgtcctaatgactatgtaattaagcgctgcaacaatgatcttgtgatacaacgtacaatattttgtaagcactagggagtagatgcctcctagattcaattatactttattcctcattttgactttcatccttgataagcttgatcatgtcatcaattcgaaggatagtagcttcagttgcaaactggggaaataaaaaaacttcatgctcatgcagttgtgtaaggaagctgtatattgaagtcaacaattgttgatatttaactaaatacatacctgaataatttttactttgctcattgcaggctcaatgactc

SEQ ID NO: 286908 - DNA, 320 bp, Glycine max
  unsure (1)..(320): unsure at all n locations
agtcttncatcactccgtgacaaaattaaactttccaacatccctaaatcatcttaaacatagccagacctgcatgaaaaatcccgaaattgagactcaaagaagaagcttgatgaacttgattttcaaagaggaagagcattatcaatgagacttagcgtaggtgtcatcattgttgtgatcatgaaggtgtcacgtgtagaagcatatgtaatatgaagttttgatgatgccaaagatgaaagctattcaagtttgatccaagtcaagaatcaagaaattcaagaggaacgatgaaattagtccataggatgttaaaa

SEQ ID NO: 286909 - DNA, 419 bp, Glycine max
  unsure (1)..(419): unsure at all n locations
taagaaatctatatatggtttanaacaagtgccctgttatggtaccttaagtttcatgggataatttcttcatttggttttgataaaaccccatggatcaatgcatataccacaaggttaacgagagtaaaatatgttttcttgttttatatgtaaatgatattttacttgcagccaatgatcggggtttgctacatgaggtgaaacaatttctctctaagaattttgacatgatgggtatgggtgatgcattgtatgtcattggtatttagattcatagagatagacctcaaggtattttaggttcatcataggaaacctatattaacaaaattttagagagattgcagatgaaagattgttcactaagtgtcgctcccattgtgaagggtgataggtttaatcagaaccaataccca

SEQ ID NO: 286910 - DNA, 324 bp, Glycine max
  unsure (1)..(324): unsure at all n locations
gaaacttctttgagaaacttcattgagaagctagagcttaattacacccccctttaataactaagctcacctccttgagaaggttccttgagaaactttcttgagaagcttcctttgaaaacttccttgagaagcttccttgagaatattcctagagaagttagagcttaggtacacacacccctctaatagctaacttcacctccttgagatgagaagctagaagttagctatacacctcctataatagctaagttcactcccatgccaaaatacatgaaaatacaaaaacattcctactacanagactactcaaaatgccct

SEQ ID NO: 286911 - DNA, 417 bp, Glycine max
  unsure (1)..(417): unsure at all n locations
gacattctaacttgttntgaaggtttggttaaacttataagttttttttttatggataaatgcttacgagtctacttacatgatctagttgatttgaaggcttaataataatgagatcatgattttttatttttctaaatattcattatagacttaatttatggtgtcatctttaacttaccatcacttatgactatcacccaaaaaattataaccaagattatattacatattacttttcatcaaatcatgtttgacttgaataagcctcacttgttaaaaaaatctaaaatcaaagaccatcaagtatttatcatatatttcacttgttaggcttgacttaatcattcttagcttatatagttatgtatgtcaaactacttgttaggggttggactttcaaataggacaaatcat

SEQ ID NO: 286912 - DNA, 353 bp, Glycine max
ttcttcatgtatgtaattggtaacagtactaaagactaaagagtgaagagtagtggtttagtgggtgcggctcgagagagaggaaagtaaaaggggctatagaatgtggatgtctacggtgggccacgttacagttaaagtcaattgggaccggtgtttaaggagcgatgattacgggttggattctcaatcccatttgtgtcgtttctgttccttcatcattcattcactgcaacggatccagggacttgttactatgccaataccctcacaactccaaactatattaataatcaattaaatcttcctcaccctaccattacacacccgctcttcaccataataattattct

SEQ ID NO: 286913 - DNA, 401 bp, Glycine max
  unsure (1)..(401): unsure at all n locations
tgtactctacatcctgtgataacataataagcaaattcttactaagtagattaagtctcttactaagtaaatgcttatgaatccctactactaccatatgcagtgaatagattacaaattttcaataccaacttggtaaatgcaaagataaaactatatatagttgttgatgtttcatctcaaaataacactaatcacacaactttgaacattaacattttcaggtatcaataattgatatcatgaaaccttgacaaataaataatattctttccaccaattatcatggcataaaaaagcataacataaaataaatatcatatttaaatgttaaatttgctgaatgtgaatggaaaaggctaattaccatctttntcaaggttttctcgaagcttctagat

SEQ ID NO: 286914 - DNA, 372 bp, Glycine max
  unsure (1)..(372): unsure at all n locations
atcttgcatgcgtttcatgcaaggcttttgccatgaacaggcttcgagtgtgcattgtcttctctgttgtacgtggtacaacaagaggcaagtgatgaggacattgaagctcaaggattgacaacaaggattaggaggacctatgactagagccagaaccagaaaggcagaggagaccctacaacaagtggtagcaaccattcttgaagttgcacttgcaataaagaacactgaacaaaaattattccaatacatgattattattgaagacccatgagctagagggtgttgatgctaactttntatttttatttttttagaattaaataaagntgtatttcttttattttattttcaattttcttttattta

SEQ ID NO: 286915 - DNA, 407 bp, Glycine max
tgcttgtagggcttctatggaggctggatctttgatcttcaatggggtcctttaatggtgattttcgaccatggagatgcagcggaagacaaaggaaaagaggtgagaggaggcgccatccattaaggaataagccatggaagaaggagcttcaccaccaagatgagccttggataagaagcttggaaggatgcttcaatggaggaaaataaagagggagagaaagagagaggggggagcacgaaattgaaggaataaaagagggagagaagtggaactttgaattatgtctcacaagactctcattcatcaaagttacaacaagtgttacacatgcttctatttatagactaggtagcttccttgagaagctttcttgagaaaacttccttgagaagcttctttga

SEQ ID NO: 286916 - DNA, 357 bp, Glycine max
ttgcaataaacgtgttttcatgacaaatggaacgaaaatgaggttttgaaaaggtaaattgatgacactccatttttatattctcctaatcttctttataaatttttgaaatatgatgaattatttactttctattatttattctttcgtttttctaaaactaactctcttttttaaattaaagtatttcacccaattatttaatctacaaaagcaaaaccattaaatagttgttcaaaacttcaagattatacattttcctgtatttttaacacaatattatgtttgaatttaattcttattttaatatatcttattctttatgcgaaaaaaaaaacataaaactcatgtctatat

SEQ ID NO: 286917 - DNA, 401 bp, Glycine max
taccacctcgtgatgccttctggctttggaccttctcttatatttatagtcctctagctcaaggagggctaaccaccctttgtaaatcgaaagagacatagatcattcccttgtttggaacgatccatcatcgctatatgctaactatcaatatgaacaactttattttaatttatttcaaactcttcaattagattattcatgaatgtcaatcgtcaaaaactaaaactcacaatttcaagatgaaatgcctaaatgtaaaacgatcaaatgaataaaatcatgtgcctcatgatagttctacatgttatcataagatgcattaccagaacaactcagcatgaagttacacacacaacatgcatacatgtgtatatatatacaactcttaaaaagaaaca

SEQ ID NO: 286918 - DNA, 407 bp, Glycine max
  unsure (1)..(407): unsure at all n locations
cccgggatcctctgagccgccttttgcatgcaatcttgtagggttaaagtctcactattgtcacgtgctcatgcaacaattgttagccatggctatgcgagacatcttgccaaacaaagtcaggttaacgataactcgcctgtgctttttcttccatgctatatgtagcaaagtcattgatccagtaatgtttgatgagttggaaaatgaagccacaattatactgcgcctgttggagatgtattttccccctgctttctttgacatcatgattcacttgattgtgcatctggtcagagaaatcacatgttgtggtcctgtntatctacggtggatgtacccggttgagcgatacatgaagatcttactagggtatacagagaatctatatcgtacagaagcatcta

SEQ ID NO: 286919 - DNA, 408 bp, Glycine max
taaaggagcactcaaatcgggtgtatttacccccatggcctagactccgaagagtccgtcagggcctctccctcctgattcaggtccaacccaaaaaacattttagcacacagactttatctatgaactgtacaaaatacacgactcctcaattgttctcaaaataattttatctaatcgcgcttgtgattaaactcgtcaggtcccaacagtggttcccatcataatactcgccacgcattaactcgtcgcccttagattcatagttcacaaatcagtgcacacaacatctcaatgcacatatatattacaagtcaatacatactcaatttatcacatacatttggtctcaatcacagtggtataatctcaatttaacatgttatcacacctcatgaatcatataca

SEQ ID NO: 286920 - DNA, 347 bp, Glycine max
aagctcaatctgaccttcatgattttcttcgaggtaaccatgattttaagcttggtccttggtagtttaagcttatctttgcatcttttctgactttggaaccatcattgtacgttttacgcttccttcgaaaaaacttaaagaaaaagacttttgtaaagttatctttttatgaaatggatgttattttcgtgaccttcactgaactctggtcacattggcatgatcgaaatttcaaaatgatattccttttcgtaaaatccgaaacaaccctcatccctttcatgtagtgacatgagtatttgactcagagtattgggtgtaactctatttctgaaatccatagt

SEQ ID NO: 286921 - DNA, 403 bp, Glycine max
tgacttgcccacttacatcaaccagtatattagcattcttgatatccctttaaaattgaataattgaattgaaatgttcagaatgtagcaaatcaatgcaaattcaagatatttaagaagtcaatttccaagcactgcatccaactttcatcttttgtaatgattgaaagtcaaacatttttcactgtctgaataaaatctgttaaagcaaaactctgcttcccaagcggagaatcatactcagtatctggtttctcaacaattttctcaatataaatatatgtgcaaatagagctataacatatcctctaatatatgaacataaatacaataactatgggtaacacatgactagaatgctaacttgcaagagagagaagtatatgataggaattaatgtact

SEQ ID NO: 286922 - DNA, 355 bp, Glycine max
ttcttgcctaattaacctgaaattgagagaaaatgattattaaacacacaaaatgaaaatactaagtatttattacctatacttaacagagaatacttataacattacaaaataaccataaattgggagagtttgatacaatttatacaagttttatacataaaagttagtcattttcaccgactaacacatagttgctagttaaattgaagcacaagttgaaatatatcatagttgcctagttatgttttatgctgggttttttttcctaatgtttgtttttaagtagttgcctagttatgttaaactcagcatgtacagggagtattgttccgtctataagggtattgatata

SEQ ID NO: 286923 - DNA, 391 bp, Glycine max
  unsure (1)..(391): unsure at all n locations
tgtccattntaagggtcatagagtgcatggtatcgtcaagacgagcaaaggaatcatcgaggttgtgggagaccataaggacaaacgagagcatcaaatgttacgaacaaaacataatgcaggaaattaaagagttggcttcgaggcaccagaacctccagaggaagaagaagagtagagaggagagtaatttgctaatttcattcatgcctgatgctattattacatagtcatatatgtactgcattctatgtaactaattttggcattttgtgatttctagaatgttcagaactcagcaatttggttattcttgtcccttaaaggccaacatcaaatcttccatcctgcacacaacactcctgcacgatcatgctcaaatgaagtcact

SEQ ID NO: 286924 - DNA, 230 bp, Glycine max
  unsure (1)..(230): unsure at all n locations
ccggctgcctgtgcctgtcctgtctgancccctggaaccccttttcgcttgccccgtttcggagagacggcacgcaaagacagccccaccatgcccaggcgttaacttgatgtattacttcaataccctcttaaaacccttaaaaagttccccttttattcacacctataagctctcgaatctccgttaccttttgatattatacatattgcaaaactattgttccacac

SEQ ID NO: 286925 - DNA, 398 bp, Glycine max
  unsure (1)..(398): unsure at all n locations
tctcccncaattttctataaataggggagaagtgaagtagaaaagggttcagccccataggcacttctctctatttcgaatttgcttaggaaaattgtttccttgaagaaaatccaagccgaggcgcttctgtaacgtttccgtgagtgatttcgcgaaggttttcgaccgttcttcgacgttcttcattcgttcttcatcgttcttcagtcttcaacgggtaagtacctcaaaccaagcttttcaattcattttatgtacccgtggtggtccacatttggtttcatgtatttttattctcgttttcatttactatttatagccccttttgacgtgcttaagccattttatttaagtcatttctcgcttaacctaaaaataaaataaatttccaccga

SEQ ID NO: 286926 - DNA, 343 bp, Glycine max
  unsure (1)..(343): unsure at all n locations
tgctttagacacactaaaaaaatatttattattagattttttaaacaaaaaaatcacatatgttgaaaaaatattctacatagttagcaaaaaaaaaaaaaactcaacataaaactttcatttaaagtaaaataaaaattcttaaaagttgctttagatttcagtttcagttggaccaacccttggacagagatgcctatttaacaagccgcaatagaaattaacttttgctgtatattgtaaagcaataccttcttatacaatggaccgtttctgtcaaaagtatttntatatgtaagaaaacagaagtaggtggggtgaagatcaaacacgaagtgtcaat

SEQ ID NO: 286927 - DNA, 398 bp, Glycine max
aaaactcagcttgggcttcccatcttgtgaaagacatgttgaaattggaagggaaaatttcttcaaccaatgtagatgttgccatatatgatagtttgacacattattttactttgctggttctgtgcttaatcttccatttatattgtttatattttgaaactatttttcactccacaatgccattttttgtttacaaagttagggatctgtaaatacatttttcagaatgtgcttgtcacaacttaaaatagcatgagaaactatctttcccctcctgtatttgacacatacacactgaaccttcaacccaaaaatggaaaacaaaaacaatgacctgtattggcttttacgaaagcgattgcatttggagttacctatctctgatctaaatttct

SEQ ID NO: 286928 - DNA, 385 bp, Glycine max
agcttctcatccttgtttttcactcgtcttgagtatcaagaagtttgcagctaaggttgttttttttttttttttccattggaggcacacattggtttatctttaaattaccagtttaggattaatgatatcgttccatcctttatatcaaacgttctagcggatgtatcttcgatcgtgtttcagtgaggtgtgtttaattgagatgtgccggggggaatccccctgttcccacaaaacacacacacacacaaagtactctaaaatttaagttgaagaattatgttgtttttagagatcttattcaacccgagcttgataagatgaataaatgtttcagaaacatattcacttctgggtatgaaaataaaaagaaaataatgtt

SEQ ID NO: 286929 - DNA, 381 bp, Glycine max
agcttgttcatccaataccctgatgaggatgtcccatatgttcttaaaactggactgattcatttgcttccaaagtttcatggccttgcaggtgaacacccgcacaaacatttgaaagaatttcacattgtctgctccaccatgaaacccccagatgtccaagaggatcacatatttctgaaggcttttcctcattcattagagggagtggccaaggactggctgtattaccttgctccaaggtccatcacgagctgggatgaccttacgagagtattcttagagaaatttttccctgcttccatgaccacagccatcaggtaagatatctcatgtattagacaactcaatggagagagcctgtatgagtactgcgagaga

SEQ ID NO: 286930 - DNA, 425 bp, Glycine max
ggatatattcattagagagctgtgagtctctatgtctttgtgtatagggattggtgtctttctcttttgcttcttactcctttgataggcctaaggtagcttaatttccacgcgacctcgctcttagtgcgggcttttgtgctaagcgtgagctagtcgttaagcgaggagaagtgctaatgacaatcctacaactgcccaaatacagggacctatgaccaggagtaggaccaaataatcagtggataccctccaacaaatggtatcaggcatacttaacaaggcccaagtggagaaaaatgaaggcccagaggcagaggcacttccaagaatcttaattgttgttgaaggcccacactattctgaacgcacatgccgaactatttttttgtcattttggcccaaactaatttgaaggcccatgc

SEQ ID NO: 286931 - DNA, 371 bp, Glycine max
tcgcattgagaaggaccatactgtatcaccagacccaccacacagtcacatcatactaatgctgcacctatatatgctgacagaattcataacgcattgaagatacccaacgtataataaccagagtacgattaccatctcaatctacaagtttatctcggtgtgatactgtatatccagtgatgttacacgctcatatgccaaattatcaacgctaactatcactatgaccctagtgcttctgaccctactctatttctatgagatgcatgatcttggtaatgatgacaaaaaaccacgttcggatatatacggctcccaaggggatattacataacaacctgaatagcacccttttcgtgtaccatacg

SEQ ID NO: 286932 - DNA, 308 bp, Glycine max
tatcccatgcctttatagcggatgtagcatcacaaatcttcttgtacgcatcatcatctaatgctcgatagatgatgaacagagctttcttgcctctctctcttgaatccttaaaagtacttctttggtgcttggaatattgaagtctcatgttgcggctccttatagcctttttcaaccatttcccacacattatgtgctccaagacgggcttccattttgatgctccaattgtcatacgtgcccccctatacaagtggaacttggaaggatgacgtccatttcttacattactctagaggaatttc

SEQ ID NO: 286933 - DNA, 386 bp, Glycine max
agcttatgagaattccaaattctacaaggacaagaccaagatgatacatgacagcttgataggtaataaggactttgtggttggacagaaagttttaatgtataactctaggctcggactcatgagtggtgagttgaggtcaaagtggattaatccttttgtggtgactaatgtttttccttaaggtacagttgagatcaaaagtaaatccacagatatgagcttcaaggtcaatggacatcggctgataccattcctcacaaatccttccttagtggatgtagtggtggaggagacctccttacttcaccctacttctcttccgccatgacttagggagtatttctttttctatctccttctttacttttattgcacttgtccaa

SEQ ID NO: 286934 - DNA, 397 bp, Glycine max
ctctccactaaattgcctaatgcctgagatgtcttttctgatggcagtggtcctagattcagggaagaatttctccaagaacaccctcttaaggtcatcctagctgaaaatagacctgggagcaaggtagtatagccattcttttgccactccatagaatgatgaaaagcctttacaaagatatgatcgtcttggacatccgggggcttcatggtgtaacaaacaatatggaactccttaagattcttatgaggatcttcacctgcaataccattaaacttgggcagcgaatgtattagtcaagtcttgagaacatatggaacaccctcatcaggatattgaatgcacaagctttcataagtgaaattaggtgcagccatctccctaatagacctgt

SEQ ID NO: 286935 - DNA, 384 bp, Glycine max
agcttctaaactttatacaagaatgaagctctgataccacttgttagacaagtggcctcagatatcttaagaagggggggttgaattaagatattccaaactacttacccaattaaaaatctatttcactttttattcaagttataaaatcccttaacaatgaacttcttaaatattaattcaaataaaaaaattttgaatatgaatataaagcaataataaacaaaggagtttaagagaagagaaagtgcaaactcagatctatactggttcggccacacccttaatgaattgagcactcaaataattccttaatgaattgcaattgaattggccaaggaattcttaagaggataatatgattttgctctttgataggacaaa

SEQ ID NO: 286936 - DNA, 422 bp, Glycine max
tgaataagttataagttgtttggttctctagttcttatattgtgctattgcattatattaaaatgttggtacaaagatgttaaccaatttttctaaccataataataaattgtttcaccaagttaaagtaatttccaccaagatgtcaaataaaaatatattcaattaaaacatggaaaacaaaagaatcaaccaaatttgaaggagaggaatgaaatggggaaaagaacatgcaattagcagcaaaaagtggaagatgaaaagttatctatagaatagtttttaccatatggatgccatcacccttcctccctctatacaaggatcatagttgatatagataacaaatctttttcttttttgccaactacttgttggtaaggtgctatgagcaaataatcaacagatcaaatcatagaaag

SEQ ID NO: 286937 - DNA, 373 bp, Glycine max
cttcttctgcttgcaatttcgagcgtctcgatatatgaagggactcaatcggacatccgagtatattatcttttttgcattgtgaagcacgcaccgagcttctgttttcaatttcgagcattgtgatgcattacgtgactaaatagaacattcaagtaaaatgctattgccgtttgcatttgctacaagcttctgagttaaaagttattgcagtttgcatttgctacaagcttccgctttcaactacgagcgtctcgatatattactggactcaatcgatcatcagagcaaaaagttattgtcgttagaatttgttcagtgcttccgttttcaatttggagcgtatcgatatattacgggactcaatcggaca

SEQ ID NO: 286938 - DNA, 424 bp, Glycine max
acagcagattttagtaatgacccactaacctattattaaaataacttaataccattaacctagggaattaaaaaaaacttaatggctgagtgtaactgaaattgtggcaaccaaaagtcacccccaacagccaacaagtcagccaccatttggtctcccaaaaggctgatgcctaggttgccaattgggcccttattacaacttgaactaaacctaactaaagccctttagttgattaacccaaaacatatttttggtcagccaactttacaaggattgggccattatttagacaaactaaacactctaaaattgaaacaaagtggtgtcatttagtcctcctccatttgggccatgatacaactcacaaccttggacttttctccttgacacttgggcttgtattcaaatagtatggacaaca

SEQ ID NO: 286939 - DNA, 247 bp, Glycine max
gcagcctgcatatttgtgcattttgcctagtgagtacatgactttatgtgttaatacgtatgtaattcacaatttttgtacttttctggttgaaggttcttaagcatctatacagatctgggaataatcacaaatttagtgctcgtccagcgagcgcacgcattacgccaagactgcgttattgactaagctgtacctgggcttatcaacggatatgcgctggacccacattccgtccattgttcaa

SEQ ID NO: 286940 - DNA, 375 bp, Glycine max
tttcttcgtgggtagaggggctctgtctcatataatggcttgatcactggctgacatattctcaattagctctgttgcttctttcggggtcttcagttttatctttccccctgtacaagcatctaatagttgcttggtttgtggtctcaacccatatataaacatattcaattggattggctaagaaaacccatgagtgggagtttttcttaacatgcctctgaatctctccaatgcttcactcagagattcatcacgaaactgatgaaatgaaaaaattgcagcttatccttctacagacttggactctgggaagaatttctttaggaactcttcaacaacttcttcctacgttttcagactgatacccttaca

SEQ ID NO: 286941 - DNA, 244 bp, Glycine max
tgttttattcttgagcaagtcttagtgaaagcagaacaatggtccatcccttatgagtctagcaactgcacaaagggtgaaagataatacaaatcatctccaaatgatcaatcttgatcacacaatatacatatgtgtttaaaatctgatatatagactatgtgtaaatacaaatggcaaaagctctgcacatgtgctgcttacaataaatactggcctccgtaaactactattaatcatccca

SEQ ID NO: 286942 - DNA, 331 bp, Glycine max
cggtcaagtggatacggaattgtttataaggtatgttgatttatatttttcatggaatcacatatcttgataataatttgagaattacatatgcgctagactttgaaatattgtatttattagggtacgctctctgatggacaagaaattgctattaaaagattgtttatcaattctaaccaaggagatacataatttaagactgaaatttcgctaacaggaaagctttagcaccgaaacttaattacactacttggcttctgctttgctaaaagagaaagatatttgattatgagtttgttcccaataaaaacctagatttattatattt

SEQ ID NO: 286943 - DNA, 736 bp, Glycine max
  unsure (1)..(736): unsure at all n locations
caactcgctctacttcactactacantatctacacactgatagngnagtaatatattacantaagtcactgtataantanagcaacacnncnnnaaacaagaganagnngtnngattggtggaacgtccgttgacacanntanangngacacatacnntatcntacgtcaccacgagagcactactattagtagtctgagacgtagcaggacctagactgtgtctataacaactgaacacacgctcatgagaacgctatcgcagggacaccgatantacaagtggctcgtgtggacgacatatatgagacatagtcactctttgtatcataacagaaacagagcagactgcaagctgattgatnctaaacaactgttgatacttacaacaagtcggtggtcatatacacagcttcgcatagtagccacgttacaatatgagcatgcacatgaacgcttcgtactacacaaatacaacctcgagtgatgcgcaacgacacatgtcgcacgtacgagagatacatgagcaagagtatagacactcgacaactgattgactgcaatggtggaacgtacatgacctcggatgtaacaacgacgacaagcatactgagcggaccactaacactatcatactagcaaaggatatatactctacgcgtgtaaacaacgcgcagaaaactacttcgatgcggtcgcaccaaactgagagctcaaatccctcttgctgcgggtcg

SEQ ID NO: 286944 - DNA, 504 bp, Glycine max
  unsure (1)..(504): unsure at all n locations
cccactttacctcctctgatcacattgaattcaatataattaaacacaanacagagggcgcgtgtgatcatcgatacacacaaaacattctcaacggcttgcgcccaaattgagcaagctatccattgatctcgaacacaatcctagcgaaaaccgtactagtgtcataatgtacaaacactggtacccaaatatatcttcctgggaacgacaacattgaaggaatcccatctcaactcatggccgccacgcacatggtaagacaactctagatttagctcaactagccttatgagtagctgagacccctccatcatacacgattaggctcctgccctaactaatttaatgacactttattcgaccctatatatctatattcaagcccagtgtacctcccatgtcagtaataacaatgttcaaacctatctacgaatgcaggcatacagcgcaccctcagttgcgaaatgaccggatacttcacatacatcgtatcgacaaacg

SEQ ID NO: 286945 - DNA, 541 bp, Glycine max
  unsure (1)..(541): unsure at all n locations
ccacccactacaccaatatcncatccctctatactactcctcactcactaataaatatcacactaaaaacaaaaaaacgagggtgaaattgatgcgtcgataaacaacaagacnaaaacacaacgacccaggatccacaagagacgacccgcacgcatgctttcttcattaaccatcacataagcacacagtagtcataagttcgcgaaaggtacacaataaaatccactccatatgaaacgggtcacaacaaagacaaaacacaacgaataatcaccaccatcataccacacaacgctagtgaaactctcaatcccacaaaagtccctgaaaatgtgtcagaaacatgacaacctggatcgtaaaaaactaaacattgcacaacagctaggtcaactcaatcattcaagcacaatgcgaataactagtgacgcgatcatggtaagcatgtggatgggcacacaaaaaaaacatggcttactcggaaaagaaaaaagagctacgcgacatcaattccctaacccacaacaaacccaatccn

SEQ ID NO: 286946 - DNA, 225 bp, Glycine max
ccaatgcgctgatcattttacgaagatctgtgatttcctgagtgatcgtgagatctctataggtggaggatacatcccacctcctttgcacggaagcaatttgtcttggtcgctcttcttcattattaaaggaacttccttgctatggaaggctatatcctcagatgtggattcctgctgaataatcgttgtatactctttccctacttaacaaatgatgtttat

SEQ ID NO: 286947 - DNA, 701 bp, Glycine max
  unsure (1)..(701): unsure at all n locations
ccatcaaccacccatacncnnactatctcccacgagaagcagtaccaacaatacgggcagatggtaaatacacttgcgacatcacnanannaccaagaggagcacgnagttgtagaccctgtanacactngagagaacacaggcnnaacacacgctaggancatcgcggaatacaaaagaagtggacacccgcgtgtttgtcaaacattcgatacactaattgaatcgacggagtgagactacgatgcatcgatactaacatcactaacacaatcagagaatgacactgcaaccgtatctggacgagggagacacagaacnagtcaacaactcacacacacggctacagaatatttagtgaccgacgacgagcgcagaggtatatgatgtgcgtggtgtgagtacacagcagcggaggcgaaacgagtacagcttaggacgaccgcgaggngataacagacgagacaggatagatagtttggcgccagaagatatagaatgggcaacaccgncgtgacgagatacataagcgaatacacagcgcggcggcgaaccttggacgacgaacgatatacggcagtagcgagatccagtcgcgtcgccgtgtcatcgcatgcaagatcgggcaagcaactatcggcagtagcgaagggcgcgtacagagaattggcgcggcacatgaggaagagtaaaaacatccc

SEQ ID NO: 286948 - DNA, 375 bp, Glycine max
agcttatctgataatatctgtgagttctacactctaacctatcaatatcttctatgtttgttaactttttttctgctatcataagtaattgatgcatttcatgtgtgaatgctaacaaactgttctgccagaacctgggaaatgtttgtcttggcattctaaacggctttgaagtacggttggaggaactgaatctagttggaggtaggaattttgttgtgttgttaccatctcttttcttctagttcccataccactcgcattacaattcctaacttcatcagcagttttcatcaaaatgatgtgtaaactctgcactatgtaaatcttggtatttattgtttatgcagacatattcatgcaagacaaagtgat

SEQ ID NO: 286949 - DNA, 418 bp, Glycine max
  unsure (1)..(418): unsure at all n locations
ntgaacatgactgtatgatcaagttaagcctaggcttgtgaaagaaataaagttgaagaaattgaacttaatagcatagttcatatacactcttacccaatttttccttgttggcaatggcaacttcaaaggttgcccttctcaattcatggcattcatgacatggttattaaattctcgagttaactcattaactcttacgagtttttgagtccacttagcatatgcgagttgattcatgtgtaaactctttttcagtagactttgagtagactctataaatcttaagtaaatccgaatttaccaccgagtcaatgaattaacaagttaaaaaaattatatccaaatgtaagtcatttagagtcattcttagttttgttagtgctcaacatacctttcattaacgtgttattttcaa

SEQ ID NO: 286950 - DNA, 384 bp, Glycine max
agcttgccacccagctcgcccaggcgagctaggttgcttcctccagaagcaactgccttctggaggaatattctggaaggcccaagtggggcctatttgttatttgcacccccatttttactaaatacaccccttgatcttttttggtgattttttttccgtaacgttacgaaactttacgaatttcataacgatgcttgttcgctttccgtaatgttatgaaaccttacggattacgtaatcatcccttttttgccttccggaacgctacaaaactttacggattacgcattaacacttccttttaattttcggcatgtcacagaacttcacggattgtgctacaatgctttcttttgacttccggcatgtcacagaacttca

SEQ ID NO: 286951 - DNA, 429 bp, Glycine max
  unsure (1)..(429): unsure at all n locations
tgtaggattatggggtacccatcacatgtggtactatgtggcggtcgggcgatggtgcacaacaagttttccacatccacaatgcgcgcataaacccaccatcccctgttgcccacctccaactgagctcacgtactcccacgtagcccatatcctcgtttctctcaacaccgggtccccatcaatcctcccaagcttccacaacatccaagcaaaacaacattcaaacagcacaagctatcatagccaagcaaaacagagcaaaggcagaaaattctgctcaacacatcaaccaaaatcacagcttttctcacttaaagaccacagtaacaattccttcgatccaattcgttaaccgttggatcgactccaaaattntactggaagtctacagtgcataagcctacattgtgaccgttgggatctact

SEQ ID NO: 286952 - DNA, 383 bp, Glycine max
  unsure (1)..(383): unsure at all n locations
agcttgatagtttacttagagtcatccctgaaactccccaaacttccgaaggaacatcataaaaaagggtaacaagaagtacctccaaattaattaatgttcttaatgaagatagtaatcaaaacttagaaaacacatttaagataggttcagtatccgaaaaatacataaatccaataaattccaaacactggaaaacaccctccaaattatattatcaaagaccaactgcccccgaccttctactagaagaaataggtgaaagtaattntaaaagttttagtgcaaataacatctatgagtggaatatagatgcccaaacggagtataatatcatgaatacactccaacatatgaccatggtagccatagtctaccaagca

SEQ ID NO: 286953 - DNA, 427 bp, Glycine max
ggtcaactcgcacgaacaaactttgtcccacttgcatataagtcctagtgtcttccatatttccatgccaaaaaacccgtaacaagaaagttcactgcaagcttgaaccaattgactattcgaagttgagctaagaacaacgtagatccataagtatagttcacttattggacaattttatacgatattaaatatattacctgtaagttaactacacctccagacagagagataaaaaaaataatataaaaaggtacaagtaaacaactagaatatataaagcttcaaactcgagactaaaaaacagaaagacaagttatagaaagatacaagtaaactcggtagccaataaatggttacatctttttctagtaattagagcagcttctactatgcctcatctgaaaagaataaattaattaattat

SEQ ID NO: 286954 - DNA, 388 bp, Glycine max
agcttcaaagaatttgtttcagataaggacatattgactgtcttaacatgttacagacaaatacaatgataaagctcaaagtcgaaactctcaggatgtacaaggtgttttgagagttgcgttcgaagttagaacaaaatttacaaagaatttgaatgcttaagaatgctttgtccacacgttggtttctctaagttcagctcatcaaatcttcaactatttgtagacttcagtaaaaggtaaccattgtgactgtaatgacctccatcctcatcttcgtctattggtaaaggtgttcgttgaaacatttaatgcatattaccaacttgccaaactaatatgataaaacatgttgcttatcttcatttacctacattccacaagtatg

SEQ ID NO: 286955 - DNA, 424 bp, Glycine max
tgtatttcaaatattatggtgtgcgcttgttgtaacatgttatgtttgctactgatttttaattctttgaccctttgaatgaccaaattggctttcgatgtcttcatgagacttgtagagaattttatcctttacattcaagcactggtatcatgttatttggaccattacaacataatcaatccttaaagcattgcagttttgttatattgtgaggacaaactgacatctctatcttcatggtcagtttcttccaagatccaagccttatttgcccatgacttctccataaaagatatatatatctttctcttagctttctacaaccactgagatcatcccaaattcacttttgtagctcaagtagttttcaaattattgcacacatatgaaactgtcaaggcaaaccagcgtctttaacttc

SEQ ID NO: 286956 - DNA, 384 bp, Glycine max
agcttgtatggttaaagtctcacgattgtcacgtgctcatgcaacaattgttagtcatggctatacgagacatcttgccaaacaaagtcaggttagcgataactcgcctgtgctttttcttccatgctatatgtaggaaagtcattgatctaatcaagtttgatgagttggaaaatgaggccgcaattatactgtgccagttggagatgtattttccccctgctatctttgacatcatgattcacttgattgtgcatctggtcagagaaatcaaatattgtggtcctgtttatctacggtggatgtacccggttgagcgatacatgaagatcttaaaagggtatacaaagaatctatatcgtccagaagcatctattgttgaga

SEQ ID NO: 286957 - DNA, 442 bp, Glycine max
ttacggacactatgaatctcagcttacatggagctacatcaaggatgatggtatatatggttccagaaaccccaattgcaaatcaaactacttcaacatagcctttggtgcagcttttgtctacttttatccaagttatccatggaatacttttgaaatttttctatttttggtcttatattgatggcatttggtgcgctgatgatgagtttttgaagagagaagtgctatctttctttaaaaatctttttcaatcctcaaatcaatgcaaacctggtagtctacaattgatttccattcctcaagtagaccaaaatctgtatgatttataactatctcatatttccatggatgatgttcaaaatgtcactttttttatggattcctacaaagcccttaatgtagatgagttccaacctatcttttttaagacttactggga

SEQ ID NO: 286958 - DNA, 747 bp, Glycine max
  unsure (1)..(747): unsure at all n locations
gacctcgcttcaantacatctactatcattcgtcacacactacnttatgccagagtcaaaaacgcaatntatcantacntanctacacaaaaanannaacgaggagacaacnnctggttgaccattcgatagactctacggaganactcanagactcagtnaccgcgcgcgacngctcatcggtatctcactctagcatagacatcgcatagctgtgttnatgactgtctgtaagtcgaatgcaggacaatatctatagcgcgagagcatctactcatctacacaaatcgacacgaagctgtactacagatacatatcgcatggtataggctagtaataagtgtggacacacaagttgacccatctataggaatgatagacaatcacaaacagactctgagctacatacgcatcactaccacctttaggaaccaccacgagagatgtcgctagtctgcatcgcatgcgttcacttaacagagctccatctattgtgagagcacgacatataacggcacaccgacctgcttcatctgcgctacaaagatactacgtgaggatacgatcagcatcttcatatatctaggacagcatagctgacctcnacacgatgatcgaggcatatgatcactagatatgactcaattatatactgtatcgacgcatgctacgtnttacaagcgcgacaccacatcactcttggctctacagttcaacgaactcgtcgactgagcaatgacgatatcg

SEQ ID NO: 286959 - DNA, 518 bp, Glycine max
  unsure (1)..(518): unsure at all n locations
ccactcctttcttatttaatatagtttgattatatccaancaccaacaagaggggcttgtgctcctgacgacaccaatattatagagcccccgccctatggactgaacaagaatgagatagatgtgttttcttatttgggccgataaaaacacggacatagttttaactctcaatagagtctcactaaggaacacattctgataatgacctgacccttgtggcacatgggacctttgaaagtgtatatgaaatactaagtgaatgcgcgtgtggagagctgtccatatagtaacatatatgataaggtagagcttaatggctcaactcgtcatactcgatagctcacgtttatgacaagtttcctggataagctatagcatacttactgccacccatctagaagctatactacactccttagcaggagaagctaaagcttagctccgtacaccgctctagtagactagcataccacatgccggatgtcttgtagatacactacaaagatggtagcacg

SEQ ID NO: 286960 - DNA, 451 bp, Glycine max
  unsure (1)..(451): unsure at all n locations
ccaacgcacttgacaaaagatatataattagtactaaaatacatacctcatananacgaggtganctgtgctcgtaaacacgggcacaaacgcgccggaggacctagcatcaccggcagcatctttttaacaccttaagctacgactaggtagttggcccaaaaggaacggctcctgaggaaaaatctagaagccccaacaggacacaaggtgcaaacaaccgagacgtgcgcggacaaaaaaatcctgatatagcaaggaacacgtagccctaaagcactctacaagagaaaaaaagctctcaaatattacatacagaaaaggggtaagcccgaaacctcctaacatcgtcccaaactaaaactaattgtggacccttaacggggttgacttctgacaacaaaaaaaacgaggaactcaagacttattagatcgaccataaaaaaatacg

SEQ ID NO: 286961 - DNA, 370 bp, Glycine max
agcttctctagaattttaacattttgaattgggcttagtgagcagatgcgctaagcgcaagggctcttaaaactcaaacgtcatatgggcacgctaagcgcagctgtgcgctaagtgcaccatacgaaactgccaaatattataaggtacctgccgtaggtagttaccatttcactcttgttgtgcattaaggccattcattgcatctaccctcaacttgcttcatttccctgcattcctgcacctttgctattctttgcattcatctacacaatccaagtaagtttctttactttacttcatttcgttctaagttttcaaccttaggatagataatttagtgattgttaggtagaatctctgtttatgc

SEQ ID NO: 286962 - DNA, 425 bp, Glycine max
  unsure (1)..(425): unsure at all n locations
tcttatccaaggctcatcttggtggtgaaactccttcttccatggcttattccctagtggatggcgcctcctctcacctcttctcctttgtcttccgctgcatctggaaaatcaccattaaaggacctcattgaagctcaaatatccagcctccatagaagccccacaagcaagcttccatcagaatggcaggggaaaatggtcctttttggtaacctggttcagcctgctatagtcaatgcagactctccaactgttctgcacccaagtaggaatcagctcctccttctcattntttatcacggtgaggccggttttcttcaggattacctggacagaactcacccattggctgtcggagataggataaatgattccagttngcaaaagcttggttacctccttcttcactacatcaagaatca

SEQ ID NO: 286963 - DNA, 384 bp, Glycine max
tagctttgagggaagaaacctcaagaacactttatgaagcttggaagaagaagaagaaaatggattcctctccctcccatgaagaactcgtgcacaacaatggagaatgaaggttctaagtttgatttttttggagaagtgaagagataaggctttaaggcttgatccaaatgaaacttggttagtttaatgttgataaaatcaaattgacaacttgaatgatcattcaatagccatggtggacatgccaaatgcagccatgcataatgagtattttaccttttgaatttttaaccagaaatgactaaagtatacttaaagcaaaaatggtaaaaattgtttttgctaaaactagtaaatcttatcctaatcttctagattagt

SEQ ID NO: 286964 - DNA, 404 bp, Glycine max
  unsure (1)..(404): unsure at all n locations
tgccgcccaactcgcccaggcgagcaaggttgcttcctccagaagcaacagccttctggaggaatcttttggagggcccaagtgggcctggttactatttgcaccccttttttactaaatgcacccccccttctatttttttggtaattctttttcgtaacgttacgaaactttaagaatttcgtaacgatacttatttcccttccgcaaggctacgaatccttacggattatgtatttactcttttttagctttccaagaagttacggaaactcacggattgcgcaaaaacacctcttttcgacttctgcctcattacggaatttcacggatcgtgcaagcttgcttccttttgatctcggagacgtctcgggacatcatntattgtgcaaccaacgacgcca

SEQ ID NO: 286965 - DNA, 385 bp, Glycine max
tatcttaccttgaattataattgtatcctttgcaccctttgtgagctaaattacattttcaaaattgaaccctggacttgaatgaatatctccagataccttgtttagattctaggagagcagatagttcaaggcaaattacctcaaatttgggggagttgattgggatgtaaagtaaaaggtaaagcatcagcacacacaacaaataagttgtgtgttaaaaaaaatgttgttgtaataaggtcaaatgcaaattaaagtgaaaggctggtgagaaagttaattgtattgaaagaaatatctggatgaatctaggatttgtgctctcttataatctaagtctttgaatcctagaaaaaccaattaatgttgtagccgaacctca

SEQ ID NO: 286966 - DNA, 315 bp, Glycine max
  unsure (1)..(315): unsure at all n locations
nntcaataataaggttgtagcccagatatgtattcataatctcaaacgcattcatgactggcactggtggtgctgaagaccctgcttcatccaccttatcaacacgcttnttgtgaatcccgtgcccaaaattaggcccactgacttcaaggttaaaaggataaatcttttccaaactttggttagccatttttaagccagaataaagtttaaaccaaagtttttaccttaacaaaactaaaattttgccctgaaaaatctaggaggctgataattttgcatgacccattcattctcaaagatctcatccattgt

SEQ ID NO: 286967 - DNA, 376 bp, Glycine max
ttgcttctcgcccaattttctataaatagggggagaagtgaagtgaaaaagggttcaaccgcttaggcacttctctctctttcgaatatgcttggaaaaattggttccgtgaagaaaatccatgccgaggcgcttgcgaaacgtttccgtaacgtttccgtgaggaatttcgcgaaggtttcgaccgttcttcgacgttcttcattcgatcttcgatcttcaacgggtaagtacctcgaaccaagcttttcaactcattatatgtacccgaggtggtccacattggtgaacgcgtatcattattctcgtttcatttactttttatacacccttttgacgtgcttgagccatggtatttaagtcatttgtcgcttaa

SEQ ID NO: 286968 - DNA, 339 bp, Glycine max
tgttggatgatgggacacccatcatatgtggttctttgtggcgagcgggcgatggagcggataaactctcccacatcctcaagtctaacatgaaccacccatacccagttgcacaccttcaactgagctcacgtactcctacataatgcttatcctcattcctgccaacagcgggaccccatgaacccctacaagctgccttagtatcccggcgatccgatctccactatcatgaggttccctataccaagagaatagggcagaggcagaaaactctgcccaaaacacattgacatcttatagcttatcttactcaaatgcgccaatcacattctctct

SEQ ID NO: 286969 - DNA, 367 bp, Glycine max
  unsure (1)..(367): unsure at all n locations
agctnnttggagtagaaacatgggaccaactcattttatttcaaaaaggaagtcgtatctagtcaaggtctgagagaccatacaagtttnctaacgatttctaattatgtgggccattaagtctatcatatgctgacaatagccgagaagtccgtggatctccttgngggcggagtaggtgtccgccattgctttggccttggctagcaatcggcgaagttcttgactcttgttcaaagtaagagcaaatcggtccgtccacattgttgcctcttggtgcaatgaatcaattaccctttcccttgcttccctttctgctgatatcttggcgtactcatcctctagcctttgctcgtgagtcgccgct

SEQ ID NO: 286970 - DNA, 415 bp, Glycine max
  unsure (1)..(415): unsure at all n locations
tcattaagaggcttctagcatactccagacatcttctcatagatcccaacagtcagatcatggacaagtgtcttgtgaagtttaagaccaaatttcgagaagatccaacggttaatgaaggctgagcatcgtttttaccgaggcagctgcatgtagctttctctagaagcttcattaagaggcttcctctagaagcttcctcgtggcttctttgagaagctttctcaacaggattctttgagaagctagatccttatctatccacacccctctattaactaaattaacttccttaaaaataattacggatgaaaataacgcaacaaataatcaaacatcaaacataattactaataatatatagatatatatatcanggtgttacaaggaactaacagatttgaggtcaaatcct

SEQ ID NO: 286971 - DNA, 377 bp, Glycine max
  unsure (1)..(377): unsure at all n locations
agcttacaaaaatttgtaaagggtgtcaatgagatatttggacaagagtacttgagaagacccaacaacaatgacatcaatcgcctactacaaattggagatggacaagggtttccaggtatgttaggttttattgattgcatacattgggagtggaaaaattttctgtcagaccctaattttgtccaaggacaatcattcatggatattttgattctcgctagccaaattgagctgtttgacaccagttaccgcgcaagacgaaagatcattcgatgttttggtcaagggtgtgaaagatactaaaagggaggggcaaaagggtcttttcanggttatttctagaccctggctcgcccaggctagcctttggctct

SEQ ID NO: 286972 - DNA, 421 bp, Glycine max
tgctcaagacaaaacctaacattccaatccactcaattcatactatttctcattctaatcaatcacaacacttcatttcatacgaaatcaaaccactgaatcattttcaatcaattcattgttcaatcatgcttttgtacaagctactactacaaacaaaataactaaaatttaagactgaaatttaaataactgaaacataaacataaaataaactaaaatagaataataataaactgttcaaaatgcaagacaagaagataaagatcctgtcaatcctcctgtgggtgatcctctgcatgctcattaagatccaacaccggagcagctggtggatcctgaacaataggctgctctggctccaatgctagtgcagatggatgagaatcatcaataactggagctggagagacaggaattg

SEQ ID NO: 286973 - DNA, 537 bp, Glycine max
  unsure (1)..(537): unsure at all n locations
gcgccaccacactcacttccactacatcgttaatgagatggctgattaaataaatacagtcgaaaaannaacagagaganatgatgcttcgaaaccacgacgncacaaanaaccggngcccgggattcngcagagtcaaaatggacgcatgtatcttgtggtggaaagaaggcgaccaggacaagctaccttatatttcattcaatggacatccaatgtacattaatgacgaggaagaccagaccgcgaagacatcatactaactaatcacagagcgatcgttaaggatgaaaatattgtcactaattaacgacacagagcgcgaaagtcatgacggggagggaaaccgggaccccataggtactagcaatgccaggactgaaggaaagaattgaccctccccgaaaatatgaagacattgtagcgaaaataatccttacaaaagccgtataaaacgaatggaaaaccagcgagccacactcaaaaagtatggggcgtgatgcaagcacaagaagagaaggaccccaaacaaccacc

SEQ ID NO: 286974 - DNA, 388 bp, Glycine max
agcttgttcattcctttctgcaatgtagttttatgcaagttaatttaaacaaatgatgatggagaaggttaacacctttgtaataaagaagtagtttgaagtccctaagaatctatccaaaatatactcaaggagcaaaagatgttaaaacaggaaatttaaagaggaatgtaatttcaagttttgcaattaacatggtaaatgatatttagttttctgttattccttgattcttctatacataatgcacaccagctgcaaattcaattgcagtcacatatcagaaacattgtcttggatcaatctgcttcaacacgttatacccgcattataatatcttttaagctagctagcttataatgataaattttaagggtcttcacatttt

SEQ ID NO: 286975 - DNA, 425 bp, Glycine max
tggacttaatattctgtagttggtggttgatccatcacactacggattagaaggcaacgggaattatggcaccgaaccaggaatcttaaacataaaaatagaatccaattactagttaaattagtagaaaacgacaagaaatcttctacactatattgcaatataaaattcaactatcctatgaagtatgaaccttccgttttctattcgttaagctgtatgtttatgaatatgattagaagtaggaacgatgtttacctacccacaaacaataacatcaattgaatagaaataccccctttttgctccctatcctcctatgatattgataactaattgaattgaatttgattttaatatatcaacagttttttttttacaagtataaattattttataggaataagaatataagatgaattaat

SEQ ID NO: 286976 - DNA, 384 bp, Glycine max
agcttatagaagaataagaaaggggcaaacagaagactcaccatcctgtcactgaaaacactcctctccatcaaacgaagaggcttgattccagcagatgactctctttcctgcatgacccgtgtgacaaacacatagttctgaaaggtgtaggcataccgttgcggctcggcataaaaagcatccaaaatgttaaagtgatcaggtccaacatcctgccacttgctaatgggttcatgaaccacctcaacaagatcacgcaactcgatcgtttcattcgctattctctggaggaaggtagtcttgccaacgctaatgttaccctcaacacagaatgttaagcgcttcttctgaacagaggaagaggaattgtcttccaactcc

SEQ ID NO: 286977 - DNA, 423 bp, Glycine max
  unsure (1)..(423): unsure at all n locations
tctaattntgtaaccttattctatttgggtagatgttcatttcaaggcaatttgttttactgaaccagtttatttagtattcaatgaaatgattgttttacgttaatattacatcgtttttactagttaatttccttttactcatatttcctctaaaaaaaaaaaaacttttactcatatttgaggtcatatatatgtaaatcgataccaaaataaaagcgaaggtagaatgacgataagagggcccagtaaattttttaatgtcaattgctacaaatagatcgactttattaaaataaggttttggttaattatgattaattgattatcagttcatttggttgtttttattaataatattattattggtctattaagcaatatgttggtatgagaaaaaatttcataattttaaatatatgt

SEQ ID NO: 286978 - DNA, 381 bp, Glycine max
gaattatacaataacacttttcgcccaaccatgaagtccttcttaattatcatgctatcatggaacttcttggtcttttctttgtagaacttggcattctcatacgcttctaggcggatctcatctaactcactcagttgcaactttctttcatcaccagcttgatccatagagaagttgcaggtcttcactacccaatatgctttgtgctcaatctcaactggaagatgacatgcctttccaaaggcaacccgataaggagacattcctatgggtgctttgtaggtagtcctatgtgcccaaagagcatcatcaagcctggtactccaatctttcctgcttggctgcacaatcttctctaaaattctcttgatctccctg

SEQ ID NO: 286979 - DNA, 427 bp, Glycine max
ttcataaaaaataaaaggttcatagaccaaaagaaaaaccctttatcctaattgttaactccaatcaagacttaaaatttataagttccaacacatggtaatcattttataaagttatataaatataaatttgatacaagaagtttttttttaagaaaacaattcacgccacgagatccacgataacaatagtcatcagggaccatgatagctgtcacgtacctacatgcaatgatagcaacattcaataattgcctacaaagataaagatgaataagaaaatttcataacaaaacgtgtcccaccacccaaacaaataaaaaaaagaaaaagaaaagagcccctttcaactatgaagagcataatgaactgatagtggccattggcttttatttgttatatgacacatattaccttcatcaaccca

SEQ ID NO: 286980 - DNA, 222 bp, Glycine max
agctttggggctgaggacctatataacagcactagggttttagttttggagagtttttggagagaagaataattctagggttttagaattccagacactgttcacgtagaataaaatttgttttccgcaatctcatttctacttcaatctacaatttcgttttctattgattaatggaaggctaaacctctctagttgttgtctcttgaggatcaacctcaa

SEQ ID NO: 286981 - DNA, 422 bp, Glycine max
ttggctgcgcagcagctctgatttcgtgagtatttatagaagatgacgcattgtaatcgattacaggtattggtaatcgattacaggcccaataagccttctggtaatcgattacaggatgttgtaatcgattacaggctgcctgttcatgtgtaatcgattacactggatggtaatcgattaccagagcctatcctaggctagtttctaagagaatatctatatttatgctcaaatacatcctatatgactaattctcactactaatacactaaattcaatcattcaattactatatacacaagaaatcataaattctatcataataacacgaattcacacatgatctaactatataatctacaatcaaaaggtaaaagtaaatcaaccaatcaatccctattgttctaaatctcttacat

SEQ ID NO: 286982 - DNA, 383 bp, Glycine max
tttcttgtggtggaaaaaagggtgaacaattttcaactatagatatttttttattagactccattgacatttgtatgaggaaatctgatgtgatgaaatctccttaatctcctatatttatgttatgatgaaatcttgtctctaatttatgacacaggtgtgacggtcatgcataaattgaaaccttgtttctttatgttttttctatgtctggattgcttgaaagtattgttgagtattgttaagcactgattactttttagtgaaaattttccttaaaattaccttcaagtaagactgtgattaccagtgaccacacactcaaactgtagtctgttcctgattggatagcaattgtgtgaagtggatatgttattcctgat

SEQ ID NO: 286983 - DNA, 408 bp, Glycine max
  unsure (1)..(408): unsure at all n locations
ttctgtgtctnttttaaataaagatatggtggtatataccccaactagtggttctatgttaacttctaatgtgtgtttgaattgtcctgtggaaatttctggcagaacatttgtgattgatctaatttgtttgccctttagccaaattgatgttattctaggtatgaactggttatcttccaaccatgtcttgttaaactgttttaataaaactgtggtgtttgatggttctggagtaagtaaggatatgatatttatctctaccaaccaagttgtgacatctttaaaagaagattctcaagtgtacatgatcttgtctaacctagaaataaagaccaaggtttccatgtgtgaccttcctgttgttagagagttctctgaagtgttccctgaggatatatctggtct

SEQ ID NO: 286984 - DNA, 379 bp, Glycine max
agcttatggcgtttttagttaaaatatttttatcatttcttatatcaatatttgtaaacgagatacaaagtgaaaataatgtgatattttagtaattgaaaaaaaatatataaaaaatatttatatgaaccacagtaccaagcacatttaagtttctgcatccaggtaatgatttcctgtggccatcattcataaattcaaattactttgccaactctacaatcacttgcttcatgaaaggacagaaagattgcatccataattctgcattaagctcatctatatgctctggcggtttccaaatataatgtgcaatgaagaggatgtgttaaaattttattgcaggggaaaaaatagctcctctaaagtaaatttttct

SEQ ID NO: 286985 - DNA, 418 bp, Glycine max
  unsure (1)..(418): unsure at all n locations
taaactntntttaccatgtatttacagggaaaattgctttgagttcagcaagtcatcgtaaaattgatgacgatgatgataacttagacgagtttcttgaggggatgttttcgcgatcctggctaatttgattgtggtaacaaaaggattcatcaaaagagttaagaaaaactcctattgagttcttgtattagagatactctaaaattaaactaagctaaaataaacatgtagtatttaacttaaacttatcatattttttatattaaattctcacattaagtaatgtcacatgatatcttttttacatttacaacaacaagttgatatgagatctatctagaacaagttgcagaatttcaagagaacattctcaaacatatatattcgatatgagatcttactgacaagaataaaa

SEQ ID NO: 286986 - DNA, 384 bp, Glycine max
  unsure (1)..(384): unsure at all n locations
tgcttatgcaaaaaaagaccccaaagatagagaaaaaggagagatttttcaataatagggaaaagcataactacattgtaatgaaaaatgaatgaataataataagagagatgaggtgaacaagttttaaacactttgtgattatgattttttttataatgtagaagtttttaaagtctccatgattgtaattgtagtagcattggttacatttatatgtaatttctctcaatatcaaggtttgtgacaaaactgtgacaacaatttaaagccctaatataaaggattaccttaaatgatttaggcaaaaatgattcatgatttacaaagaaacaactaaatttatttttcanactaccaaactaagcaataacaactacattt

SEQ ID NO: 286987 - DNA, 403 bp, Glycine max
tctggttatataggccttcttcaacaagtgtttattgtctttaaatggatagatttcttcacttgagctcgcgtttgaagattgtgatcgttggaacatttaatgtttgcattcaatgcacatatgataagtgccaaatttaagttatttttgggattaaattgttagcacttatcctttaattgtaatagttttcttataaactacccttaaaactagttgtaactatatattgtacattcactaatattattgcttaaatatgaaagattcatccataattttgtaagttttgatggttgtttgttatatctagaaacatagctaaaaggaagggtgaaatggtcatttcacgaagatttttgatcctaaattcacccaggctatcaattacatcacttat

SEQ ID NO: 286988 - DNA, 241 bp, Glycine max
tttctatgagtcaatactaacgataataacttactactcggatgtccgacagagactcgtagtatatagacacgctccaaattgaatggagaagctgtcatcctattacaacaatagtaacggttaactcggatgacagaatcttagacgtaatatttcgggacgcttggaaatgaaagtagagcatgtgagcactccccaacgacactctaatgttaactccgacgtgggaatgactcgc

SEQ ID NO: 286989 - DNA, 417 bp, Glycine max
taaacattcaattgcgagagtctcgttatattacggtactcaatcagacatccgagtaaaaagttattgtcgtatgaattggcttacagcatagacattcaactttgagcctctcgatatattacgggactcaatcagacatccgagtaaaaagttattgtcgcttgaatttgctcagaggttcaaaattcaatttcgagcgtatcgatatatttcgggactcaatcagacatccgagtaaaaagttattgccttttgagttggctcagaggttcaacattcaatttcgagcgtcccgatatttacgccactgaatctgacatcccaggaaaaagctattgtcgctagaatatgctctgagcttcaacattatattacgagcgtctccatttttttcgggactcagtctgacatccc

SEQ ID NO: 286990 - DNA, 384 bp, Glycine max
  unsure (1)..(384): unsure at all n locations
tgcttccatcaagtggtaatcagagcacaagagcttcaactaggtgctccgtaaacctccattaattttttttgctttaccttctcttccattgttgtttcttcatttttttctccatgtatctcctcacatgtcttgtgctaaatgtttttaacatcattctttagagtttccaccgattaaacttgctatataagctagatttgattttctatggttcaaatttcttgtttttgttcttgaaccatgaattgtgttgagtttaggttcctttgagttttgtcttgttattttttgtggctgaaacctaaaccataaaattcatacaaaaatattaaagtagaataaaagctcanaaatctagagtgacttgttcacctattg

SEQ ID NO: 286991 - DNA, 418 bp, Glycine max
tcgagcacactccagataacgtctcaaagatccaaacggtcagatcatggacaattgtcttgtgaagttgaagacctaatttcgagaaaatccaacggttaacgaaggctatgtagcgtttttaccaaggcagcttcatgtagctttctctagaagcttcattaagaggcttcctccagaagcttcctcgtgggttctttgagaagctttttcaagaggcttctttgagaagctagatccttatctatccacacccctctattaactaaattaacctccttaaaaataattacagataaaaataacacaacaaataatcaaacatcaaacataattactaataatatatatatatatatatatcggggtgttacaagggaggcaaagaattgggaagtacaggcggcccccattttgt

SEQ ID NO: 286992 - DNA, 378 bp, Glycine max
agcttagattatactaacagaacctgaaatgcatagtataatttttctaacaaaggaagcttaaatcatacaacagaagagaatcctgtatagactagaagcaactaacaagaatgatagacaagaccagagcactaagaagctgcaataagcagtccttcaaaggccacccagggtcccacagccaatgccaaattctatgatatgccccctcttctctgtacgcactcatatatagcaaatagcgttcttttcccccatgatggccaaatccactgacacatttatgagatgccaccagtccttgctctatatacttgcctctcctagtcctatcctatgaaggtcttccacctccttgctcctttcattgattag

SEQ ID NO: 286993 - DNA, 382 bp, Glycine max
tgttaatgtctaccatgaaaagcggttaccttgttgtattgggttgaaaaaaaatatataatttaggaatgattacatatcttgtattaccaaatgatagaattttttacgaacatccaataattgcattgactaataaataaatatttaactataactaattattatatataaaagaaataggatgtttagatgtacattgtattatatctattttatctttataactatattcataacttattatttgatttatattattacctgatataatcacccgctaactaattattatttttcattgaataaataaacatgaataaacagttacacgtgcatgtttattcctaaaatgttataataatatgtcattacctcaaca

SEQ ID NO: 286994 - DNA, 379 bp, Glycine max
agcttcaaaccacagcaacactaaatctaggtgtccaaaacccctcaatttaatggattttctaggcttgagaagtcaaattgagaatgggacaaatttgaagcaaactctcacctcacacaagtctataacatcaatttaaacttgtttaaactggatttacgcttaaaatctcaccgaatcaaaatttgactcttcaacacccaaatttaccctagaaatggctctttgttcactttggtcatttgtttttctctctagcacagcctaacctttctcataagtcctaaatggcatttcaagctaagattaactcactctaacctctaaatactaccaattccagatttggccttccagccctcaaaaattcactatt

SEQ ID NO: 286995 - DNA, 417 bp, Glycine max
tgtagaatggctagacatgatacatgtcatggtttggtttggttcaaggataaaaagggatgccccacattatttccatgacacaaaatgcaaaaaaatgatgatttggaaactttatgcaaaactggtcatgcatgcacctatgcggacactcaagtgtcaaatttttatggtcatgtgatgctagggctcaggattcatttcctctattttaatcaacccaatgtttccaaaatatgttcttttatcaatttgtgcattcatccgagtccatttcgggcgtccggggaaatttcacagcattcacccttcaggtgtagacacattttccaaaaattggttatgatcaatgaacttttttttggaaatcgtctcttttcaaaagcatgtcgttttttagctagacaacttattttc

SEQ ID NO: 286996 - DNA, 365 bp, Glycine max
agcttatgcaatcctaccccccaagggtattggatagaagactccaagaggattgggctagagctactaaagaaggccctagggttctcgtgaaccttagggtagatttttgagcccatgggtcaaggttggatccactcttctttgtaaatattagaataggttttttcttcttttgggccttgtattttggccattctagtagtatagggttttagccttgtattttaaggcatattgagtagtctttgtagtagggacttttttttattttcatgtatttttggaatgggggtgaacttagctattatagggggtgtgtagctaagctctagcttttcatctcaaggaggtgagcttagcta

SEQ ID NO: 286997 - DNA, 426 bp, Glycine max
gggccccaactgggaaggtttttcgaacccgacaagtgctccggatcgcgcaagtagtataaaatggtaagagcagagtatcgaattctcggggaactagtgttacttggtaaagctatagtcagtgaataggtgtctagtatgaaaagatatgcgtggactatgaacaggtatgtaaactaactattaaaaggaaaatcacgtgagtaatggtgcataaagacaagtagacaacatgttggtcttcctattaggtgcctgatgttataaggatattctctacttaataaagctcctgtgttctatggtgtctcctgaaatgctaaaccctgattcctcatgatagtctagcctaatcctaatcaagcatcatccttagattcctctttttggactaaactcgaccaaaaccgtattaagacaaac

SEQ ID NO: 286998 - DNA, 383 bp, Glycine max
  unsure (1)..(383): unsure at all n locations
agctttgtcgatttagttnttgccggcgaaaggatcgaagtgggtctggaaataggaaaatttgattatcctgctttaatgaatgggaagcctgcggaaaatggagagaatgagaaggagggaagaacccatgttgtgactgttgttcctttatggccaaatttcccaccagctcaataatatcaatactcagccaatatcaatccttctaattacccaccaacctattaaccaagaacgcttaatcatccacaaaggccacccctaaatcagccacaaaacccgcttgccgcacatccaataccaaacaccacccttaacacacaccataacaccaaccatggaaggaattttctagcanaaaagcctgtagaattcacccc

SEQ ID NO: 286999 - DNA, 416 bp, Glycine max
tgtgactcttggaaatttctttaaaactagtcacttaaatagttgtgacttttgaaaaaatcttcagaaacaagtcacttgaagaattgtgacttttggaaatttatttttcgaaatcaatcactagtagtcgattaccattaaggtgtaatcgattacatatcaacagatgtgactcttcattttaaattttgaaaattaaaatgtctaaaagctctggtaatcgattacattgtgtaatcgattacacaagttgaaaatgtttaaacacaagttgtacctcttgaaatatgaaatcttaacgttttaaaacattggtaatcgattactatcttctggtaatcgattaccagagagaaaaactctttggtaatgattttgtaaaaacttcttgtgctactcaatgttttgaaaaa

SEQ ID NO: 287000 - DNA, 371 bp, Glycine max
agctttgtgcatctcatcgtgcattgtgtctaagagggagacaaccataatattgcatccttgaggagtgcctgttgccggacagatatatttgaacatgaaacttatatctgatcattcgccttggaattcttccaattaaccttattataatttatgccttggctgatgctatatatatatatatactatatacttattacacaatatacgtgtatgtgtatacgattcataaagaataaatagtctcatgtttaatgattatatattgtggagtgataaaccattcactagttagagagacaacgggactgctacttttattatgtatctgataatgactaagacacactgttgactataagtttgtt

SEQ ID NO: 287001 - DNA, 440 bp, Glycine max
  unsure (1)..(440): unsure at all n locations
cacttagaaactcagcttgggcatgaatgtctgcccaagtctatttccatgtttgacctgctccaataacaagtcaatgaggcatcggtccattgggggtgtccaatatgttctagtacgatcagtgccacttgggttgcgacttccttttgtttcaccttcagaaagatatacgaccacagaggtaactactcagttctccaaagatcttatggcctaaaatatgaattataacatattcaagaaatgacaagtgcaacatggggatcacaattacaatctacccatgctaattatgtaagtcattcaaaaatttacacatctcataattagattcataaatatacagttctaagaagttaaaaaattataatatctagataacaaacatgtcctaggtatttccatgctatanacgcgtgaagtgactaagtgacaat

SEQ ID NO: 287002 - DNA, 382 bp, Glycine max
agcttgatatgaggaagtgttgaagggtgaaacttcctgcttttattgttgaccacagagtggtacctggagatatgtcgcgggggtcaagagaccttggggacgtcaggtggggtgctattgcccaaaaccaagcttgaccaatcccgacccaacccgggcatagtcggtcagtgagaacatgtgacgtacctaagcaggcgagctcctggcagtcaacagataaaaggaaaacaagaccacagagcaaggaggcttgtggtggctggccagctgtgaattatgtgtaatatgtggattgaggcctctggtaatcgattaccatgggtgggtaatcgattacaaggcttaaaattgaagacagggggctaagatggtctct

SEQ ID NO: 287003 - DNA, 418 bp, Glycine max
tatgcgcatatttccctacgaacgttcacttgcacaagacatcctattaactaagaaaaatgcacccatatacaatcaaggtagcttcattacctagattatttacatgtacttccaaggtgtatttgttatttacatcacacacgcctccttggctaaatttacatacatgcatactcaaagcatttcggggtaccaaaaattgcacatgcgctcatcttggtatttctaatacctatacatatacaaacttcatgatgaatcttgactacctacgcaataaggtgctacatttcatgctcttttttttttttttttttttgaggggaatattaaccatgtcccctcccttctcatggattagcatcttgcctaacttgaacttacttaggttagaattatgcgttgattacttatt

SEQ ID NO: 287004 - DNA, 383 bp, Glycine max
agcttgctgcatggcatgatggaacttgcagttatcctttcacctttgttattcacggaaatgtatgtcttcctaggtttttctatctgttcaggaatcatatacaaataccattattactagcattaatcatatattctctttcgttatttttctcttttgtagtacttctcattatgctaggtggaggagagcgaggacttgaattatttattataattttgccactcattattcattcataatattatccttccactgttatcttcaacgcatttatttgaattttgtgggggaactcgagtaagttgaggagtttgacaaaatcaaagtctatagactatagcaaacgttaaattcctagttctgatgtttgacaaaat

SEQ ID NO: 287005 - DNA, 423 bp, Glycine max
tagcccatcatcaatattgatttcaagaaacaaaaaagcaagtagatatatcagtgaactgagccagaccaaggaaaaatacatcaaagaaaataaataatctagtatagctaattttataatcagataaagcatctgagacctgctgccatgtggtatcaacaggaggctgccgccgagcatcgccagcatcaaaatccagtacaccataatccctcaaccgaatctacacagcaataactaaaatcagaagtctttttgaggattaaatgcatggcattatctataagacacatttttcaaattgagacaaacccgaaggaaggcacggattctttgcaaattcccaacaccaccaccaagagcagcctaccattagataaaaaagcaagcagaaattaagtgttgataacaaatacaaat

SEQ ID NO: 287006 - DNA, 379 bp, Glycine max
ttattgtgagcatctctcgtgatcggatgataaatctttcctacaatgagctttccacccagcctaagggagcttcggcagctaccgtacctctaggtggaccacaacctcatcaaaggaacgctgtctttggcgctggtcaactgctctatgcttttgcatctgagcatggagggaacgttcttaccggcgtccgtccattggcgattacggcacttccatagctttaagtgatgtcactctctagaacaatctcactagctccattctgggttccgctttctacaacagtaatatccacgtgtcgacgctagatgtttccaacagtgcactgtctaacgacatatattactcctcaatccgattgctatcatcaaat

SEQ ID NO: 287007 - DNA, 424 bp, Glycine max
ctagagagttctacactactctagagttctccaggtcattcaagaaaattttacacttttctagtctctccaattaaggagggatcccaacaaatctccccctcccgacttaattgggaggtagtagcaaaccggcaccttgacagcaatcttcaaatgtctttgtcggtagtactttggtcatcatgtctgatcagttctcgtttgtgtgaaccttgtcaagatgtactttcttttcctcgaggacatctcggatccaatgataccttatgccaatgtgctttgtatgggaatgaaatgttgagttccttgccaagtaaattgaactttaattatcgcacttcaacacatacctatcttgatctattcccagctcctgcaacatgttcttcatccacaacatctccttgcaagcttcagtgga

SEQ ID NO: 287008 - DNA, 365 bp, Glycine max
  unsure (1)..(365): unsure at all n locations
tgcttctctctgatctgcctttagctacggggagagatgcatttggcaatggtccagcctcctangctctattctctctttcgaaaaagcttcagaagcttgctttctcgaagaaaatacaataccatgcgctgacatagccactccgttaccatggcgagactgattacatgccagatctctaccgtggatctgactgattaattgctttttcagctggacactgttagatacatcattccctgctttcactatcttactatgttccagcagtggatcaccacatgttccatgagatgtaagattcgtaaacatatactgatcatactctctttatacgagcccaaacatttgatctacatgac

SEQ ID NO: 287009 - DNA, 405 bp, Glycine max
  unsure (1)..(405): unsure at all n locations
tgcctncacagaatgcctagaccgagagacacatgttatctatcgctacaaacccctccgtcgtggacgaatgactgaaatagagctccttactgctaacatgtctattctccacgggacgaaccgagtctaccatatactatgtgcgcctttgtaacacctacacgttgaagaggttatattgatgatgcaattgttcctactacaccaatagtgctacagagctgactgtgtgaagataagctaaaggccgaagcagatctatcaatatctgaaattcaacaaaccaaatccttgtgtgcctcctaagaacacttatttaatgtcttagtttgaacctgataggagaataacgatctccttcttcttgaagctttttaattttcccagtgtcggctgaaaaat

SEQ ID NO: 287010 - DNA, 382 bp, Glycine max
  unsure (1)..(382): unsure at all n locations
agcttgaagatgttcatgttaatagtgttgaatcataacagaataatctgagacaaaacgaacaagtgttgcaacgctgtcagtttactgaacaaaggaaacttcaggaaattgagtgaatcttagctttgctaagttagtgagtttcattgtattcgagcttattatgtaaacactctttgagtgattaagaatacattctctatcaaacatatattatttttgaaagctaggagtgccttagtgacaaagaatacttgggtcttaatctcaatggaagattaaatgtagtgtcaagagtggcctagagagtactctntataatcaaaagtggcatagataatacttggttgtaatcaaagaaattcttagtggaaccctt

SEQ ID NO: 287011 - DNA, 416 bp, Glycine max
tctcagtcaattgactcaccttctccttaagttgtccattctcttctcactcttgttgcgcaaaagcttttgagtctctagcttggattttcagcttgttacattctcctattaacacatgatcttgctcttatgccttcttcaaggcaacatccttctcctctattggctttaatgggttgatattacctacggactgcctcaattctagaaaacattttatatcctagggtaacatgggtgagatactctttcacccctaccaagattgatatggtagaatctaagctggtatgattgttttttagaacaatatcccaattctcaaacaaaataagacgatcaatctcctcactcaaagacatcaatatgaggggaccgccaaacatcctggtaggaaccaagctagaattgga

SEQ ID NO: 287012 - DNA, 385 bp, Glycine max
tgcttataagaacaaaatttccttaatcatttccaaatatgcatgtgaattacgacgcatcaacaagaatcaagccaaggctattgtgcaagcaatcaatggggcaaaacacaccaaatgattataatgatggatggctcaaattctcacaaaggtaaaatcatcactttcaaattgagctttcaaaactatcatgacatgtagagaagaatcatggatttcaagtcacaaaatgtcaagaacttttattgtcaaaacaattacccatttcttgaacatatcctataattcaaagaaaaacatgctaagtcgtacgtgcacatgaaattgacccaaaatattaaactgaaaatacgacgacactaacaacattaacaaattaaca

SEQ ID NO: 287013 - DNA, 423 bp, Glycine max
tgtaggattatggggtatccatcacatgtggtactatgtggcggtcgggcgatggtgcacaacaagttttccacatccacaatgcgcgcataaacccaccatcccctgttgcccacctccaactgagctcacgtactcccacgtagcccatatcctcgtttctctcaataccgggtccccatcaatcctcccaagcttccacaacatccaagcaaaacaacatttaaacagcacaagctatcacagccaagcaaaacagggcaaaggcagaaaaactctgctcaacacactaaccaaaatcatagcttttctcacttaaagaccccagtaacaattccttcgatccaattcgttaaccgttggatcgactccaaaattttactggaagtctatagtgcataagcctacatttggaccattggg

SEQ ID NO: 287014 - DNA, 381 bp, Glycine max
  unsure (1)..(381): unsure at all n locations
agctttatagatttagtgtttgctagcgagaagatcaaagtgggtctgagaagacgcaaatttgattatgctactttgatgaataggaagcctggggaaaatggagagaataagaaggagggagaaacccatgttgtgaatgtcgttcctacatggccaaatttcccactagctcaataatatcaattctcgaccaatatcagtcattctcattacccaccaccctaccagctaagaacacccaatcatccataaaggccacccctaaatgggccacaaaacccgcttgctgcacatccgaggccaaacaccacccttaatacaaatcaaaacaccaattagggaaggaattnntccagacagaggcttgtagaattcacc

SEQ ID NO: 287015 - DNA, 421 bp, Glycine max
tccacatcaagcaagttcatctcaaagctcttatgctaacaatagaattcaaaagttggagaatttgcttgaaaaccttgttgttgtccttaaagtgcattttgcagaagatccacaaattaatcaagtcttagaagctatagatcaagaggtatcaatatataatccaacttattcaaagatttaactatgatatgatactttacaaagaaaaaacattgttctaatttaggtacttacaaatggttctactagtaaaaatcatcaaactacaaacgatctgaactagaggtgagttgaaatttaataattaatatattgacaatatcatttttgttagcatatggtatagcttgtaatgtatccgtactatctatgtatataataagttgacatttaataattaacatgttgaaaattt

SEQ ID NO: 287016 - DNA, 361 bp, Glycine max
agcttctgttgttcaatttcgagcgtctcaatatattattggcctgaattagacatccgaatcaaaagttatggttgtttatattatccatgtgcttcaatgttcaatttttagcatcttgatatattatgcagcttaatcgggcatctgagtgaaaagttatgtcatacgagttagccgagaacttcgttgttcgatttcgagcatctcgacatattatttgcctgaatcggacatcagagtcaaaagttatggcagtttaaactttccatgtgcttccatgattaattttgagcatctcgatatattatgcacctgaatcggactactgagcgaatagttatgccatatgagatagctg

SEQ ID NO: 287017 - DNA, 416 bp, Glycine max
tcaccttttggtcctcctcatagctgtcgcatgagataacatgctctattttcatctcccactccaagtaggcctacggatcattctttcctttaaatggaggaatgatgagtttaataccatcaattcggttttgtctaggaacaccatcattccctcttctcctcctttcttcttcattatgatcactattctccatttgatccaacctctcatggagcgcatcatctcgttgtttcattaacctctccaaatgttgcatcaaaggttgcatttggaattgcgaaagccccactccatcattaggattagtacctgtcatctcaaacaaacaaattaaacgtaacaagacaattatagctgttgtttgaatacctcacccactcaagtgtatcacacaattatggcttctctct

SEQ ID NO: 287018 - DNA, 372 bp, Glycine max
agcttgatttcgaaaatctgcaaaattatgcagaaaagctgtcaaattgtgcagcaaatctgccaattatgcagaaaaaaaaatggttgtgtagtgttggtttctgctatcacgggaaaggtagtgtatctcgcgttatagacattatttagcagatcccaacggtcaaaacttagatttacgtattagaaaccctcaattaaaatttcaaggcgatccaatggttaacgaatcggaacaaagaggattttactgaggtatgtgggtaggaaaaactctgtggaatttgaatgaatcttgtgtaaagatttctgcctccactttgtttttaaggtagtttcatgacaaatggaattgtattgtttggatatt

SEQ ID NO: 287019 - DNA, 417 bp, Glycine max
tcgttgcaagccagaggttggaggagaaggctggatggtgaagttgatttgtggagtgcataatcatgaattggccaagtcattagttggacatccatatgtggggcaattgactaaagctgaaaatacacttattgctgatatgacgaagtccatggtgaagccaagaaacattctgctaactctgaaggaacacaatgccaatagctgtacgaccattaaacagatatacaatgcaagaagtgaattccgttcttccataagaggaaacgatcttgaaatgcaacatctgatgaagcttcttgaacgtgatcagtatattcattggcacaaaataaaggatgaagacgtggttcgtgatatcttttggtgtcaccctgattcagtgaagttagtcaacacatgtaatttggtgtt

SEQ ID NO: 287020 - DNA, 361 bp, Glycine max
agcttttggaatatttattctgaaaattgctattcatattctggattgattggcaatttctggaataattctgaaaacttgctgtaatccggagaccacttgatcttccataatactcattttggaacagttttataagactctggattaccttttcggcttttccagaaagaaagattgaacaaaaatgttttagaattttaattccgaaatgctccaccttccccacggtaaatcatccatttagccattttcttttataaaaccaatacttgaaagttctttctagtttcataataacttccacgcagaattatttttcctcttattacacctcattctttctagtgtcatagatata

SEQ ID NO: 287021 - DNA, 409 bp, Glycine max
gattattgaaaaacatctctttagttactttcccctcatggtgtcaaatttatcaggttaggaagccacaaaagaatgtaaaactcccaataatagaaagtgttgtaggaactcttgatttgaatatcatatatttgcggcgaggggagacctttcctggggtatgctatatatatcacattgtttttcttcctctttgatggttttaatgctcttctaactaacaatttctggacgaactcgtggattctcctcctttttgtaagatcgaccgaacagcatcaagcagatatggttatattgcacacttgtgtgttgccaaatcactttatcgcaagggtgttgcaagcaaaatgttgtatcttgctgtggagtctgccaaatctactggtaatgtgagagaacattt

SEQ ID NO: 287022 - DNA, 177 bp, Glycine max
agcttgatagtaggacttgtatagaggctagaccttctacctttaatgatgacctttcatggggacctgtcaacatggagatgcagtcaaaagcacatgagaacatgagatgggagactctatcccctaacgaatattcgcaagtagaaagagctctcccacctagaattgccttgg

SEQ ID NO: 287023 - DNA, 277 bp, Glycine max
ctgactattgactaatacttctgtttgcaaggtcacatactagctctttctgcgactaacatacggacttgctcaatctcatgacaagaaagcaccacatccatgacagacagtgcattccctcccaaatgaattcataacaccaattgtcacacccagatcaaaatgtggcactacctaaccatccaggtcgagtataactgttccatctgcgtcacaacgtgcatactaattatccacgggcagaaatatcacctgtctataaacattatccgca

SEQ ID NO: 287024 - DNA, 373 bp, Glycine max
  unsure (1)..(373): unsure at all n locations
agcttcaaagaatacgattcagataacgacatattgactgtcttaacatgttacagacaaatacaatgataaaactcaaaatcgaatctctcaggatgtacaaggtgttttgagagatgagttcgaaggttgaacaaaatctacaatcaacattaatgcttaaaaatgctttgtccacacgtaggtttactctaatttacactcatcatatacttatctatgcgaacacttcagtaaaaagtaaccatagtgactgatatgaccaccatcctcatcttcatctactggtaaacagagtgaatgatacattaatgcatattatccactagccaaactaaaatgataaaacatgaagnttaacttaatctaccta

SEQ ID NO: 287025 - DNA, 421 bp, Glycine max
tgtatttcatatattatggtgtgcgcttgttgtaacatgttatgtttgctactgatttttaattctttgaccctttgaatgaccaaattggctttcgatgtcttcatgagacttgtagagaattttatcctttacattcaagcactggtatcatgttatttggaccattacaacataatcaatccttaaagcattgcaggtttgttatattgtgaggacaaactgacatctctatcttcatggtcagtttcttccaagatccaagccttatttgcccatgacttctccataaaagatatatatatctttctcttagctttctacaaccactgagatcatcccaaattcacttttgtagctcaagtagttttcaaattattgcacacatatgaaactgtcaaggcaaaccagcgtctctaac

SEQ ID NO: 287026 - DNA, 386 bp, Glycine max
agctttgaaatggtgctaaccaagcgacccgtgcgtatgcacgggttgcatactagttaacataaaatcacaatatctataaaccaatatggtcagtctagtttgcataaggtcattgaagcaaacactattaccattgttgcgcatgttctaaaaaacaaaaactaagcatataatgagtagctcactctatgattagttaaggctcgaattctcacaaaaggaaacgtatctgatcttctcttacaagaaattgtatctataagataatatttgtgaaaacaatacattaactagtattttaacgtgaatttatatcatttaaagtgaactaaaatatgtaaatacatgataaccaaattattgatacatgttaattaattaat

SEQ ID NO: 287027 - DNA, 407 bp, Glycine max
cctatatatactcaagcttgtacgcacatcgttcacgtgtatgatatccactcctcatggtttgaagtacaggagaactacaaccttatatcgcatcgtggcggacaaaagtgggcagttaacttgaatggtcatcattgtctatgccgatagtattctacgcttcactgtccatgtctacacattattgcagcttgtggttacgtgatcatgaactactaccaatatatagatgttgttcatatcaaacaagcacattttaaaagcttactccgcacattggtggcctcttgggaatgaagcggctatatctccttctgatgacgcatggacacttatccctgacccaatctcaattcttgcgataggtcggccaaaatcttccaggataacatattatatggatt

SEQ ID NO: 287028 - DNA, 387 bp, Glycine max
agcttttatccaaattcctgactcaccataaaccttgacccagtgtgacaatgtcaatccttaccctctgatgcaaagaaaataggagagaaggaaaatttccaatcaaaggataaaaggagaggaaaggaaattcccaatcaaagagtgggataaagcacaaagaaaagaaataaaattcccattcaaagaatgggagaaagaaaaagataaggataagaaggaaggatagctcctgatcaaggatcgaaagaaaacagaagacatgtgcatatgggatctctggaccagacaatatctatacaaatacagaattgtcacctaatgaacaaaagaaacacaatgaaaccatagcctaatagtgagcatatgcctttgattaccaac

SEQ ID NO: 287029 - DNA, 417 bp, Glycine max
  unsure (1)..(417): unsure at all n locations
cttgatttanaacaaaatactcataagcattaagaagtattccatggcatgagcaaccaaaacaatgtcatacataaataaaagcacatacaaaattgtcttagaatttgggcttatgacctaactcaatcccacaaaaccagcttgattgatgtggaactaaacaccaagcaattaacacagcccccaaagatgccgcaaataaggtatgttaggggtgaccgcaattaaggtgactttccaacattttctgaaaacagtatctttaatggatttgacactcaatgtactactgccttgatccttaccaccaaattaaataaaccacatagtcatcatttacgttaagaatttaaaatcatatcaaacaggaaatttatttataaaattccacaatgaagctagtcttacacaaaa

SEQ ID NO: 287030 - DNA, 369 bp, Glycine max
tttcttgccagattttaaactactatacgttgtattaagaaatgtttggcacggctccaaaaccctaccaccacctacatcaacgaattttataagacaatatcttatcagcatcaagtaatacatagctgtttattcttcaatcaatcagaaaagctctccaaatacaaatacgcttcaccagaagaacgcgactgaaacaaactatcacaaaaagtggcatccaagcttctatatattgccaccacgttttacacgatagggatgtgccctacatctgccaccactgaaaagtataaggcagatgtcaaacctcaaaagtataaattcggaagaaaaattaacctacgttaagccattaaaaagaaa

SEQ ID NO: 287031 - DNA, 399 bp, Glycine max
cactatataatactcccgcttctctcactttatttaatattatacattacattacatttatttgattatgttgctgtaactgtcattatttttttaccatcattctgtcaaaaccagtttttacttctttgtttctcaattattaattaatgtgtatttgatacaacaacgtagtttctattatgagggatgtgctgcaggtcccacaaagagctagtaatgttccaaacatgcttattctttgtttttaattttcaacgaatttatttttttcaactttctttgcagctcttgattcgtggttctgacttacatatgctcctcactgcggcatgagtaatgaactttgtatcacattatcgggtgacaaatatgtataataactatttgagctttgcc

SEQ ID NO: 287032 - DNA, 296 bp, Glycine max
agcttgtgttataaaactggatcgagaagctagagctcagctccacacacccctctcgtgactaagcttacctgcttgagaagctgccttaagacgatgtctatagaggggagagcttagctacacatacgtgtctaatagcttatctcacctacttgagaagagaagctcgaacttatctacacgtcccctattctatctgagctcacccccatgacaaagggcatgaataggcgaaacgaggccttacttctaggactactcattatgccccagcatacatggctaaatcccta

SEQ ID NO: 287033 - DNA, 406 bp, Glycine max
  unsure (1)..(406): unsure at all n locations
cggcaccacaagcatacaaactgttactgcctaagtcggaaagaaatnaataaggagaaatgtgctcgaanacacgaaataaatgtcggggacatactaaatcgcgatgacaattttgcacgaagaatagacaggggctgtcaggcaagcccacaaaacaccaaaaccggcgaaaacgcgattaggtgtgaaaagagcggcgaacactgactatagaagagaaactagagacaaagaagtatacagagaaggaaccgcagcagcgcacggcaacaacactgagtaacgaaaggacagtcctaatgcatgaagcacagaagatccggagatcagggaggaaaccgaaaagaaaagtaaaccgagtaaaaaaacgcagaactggtggaccagcgatatcaaaccgaag

SEQ ID NO: 287034 - DNA, 527 bp, Glycine max
  unsure (1)..(527): unsure at all n locations
tgctccgaacactaacacctaccaacnacataatcccgttacgaatagacgatgatgtaacaagaacncncggagaggagcatgtgacgcgtagaacatcacaggcaaacaaaaacgcaccccgggatcctcaaaagtacacctgcacgcacgctatctacgcttcgcgagacatccgtacgcgacggtatccttacctgtgcgacaccacaacaccacagaccacttgagaaaaccatcatacgcgactgctcaggcgcttatggcatgcgcaaccacatcgttagagcataatgaggacagcattagacaagcaacccgctggataaaccctctgcaagatcccacataggcctagacaagacacaaacttgcaaatcaggaaccatgagcccagagaccccacgcaaggacagtaacagggcgcgcatgaccaaccgacaaccaaatccaaccgaaccaaatgaagagtagaacaacaccatcataaatgcgagaactatagacaccggcgagcatagacatac

SEQ ID NO: 287035 - DNA, 385 bp, Glycine max
tgcttgtatgcctctatcttgcttctgttttggaactatacgtgagtaacgttgttctatttgatatggttggaaaccttcgggttctcctctgtgctacttattttgctcacgatgacattaatgagtcatgaacccatcttattggagaggccggagatgttcgcgcacgtgacgccgaaccactagcatggcatcgctatcatttcagtcagagaaagcggcgttcccaaaggcatccacgacaaactttaaagtgagaagtgcgatgtcgtccgaggagagagaaacaaaggggtgaaagaagaatatgaacaacgtatacggaaacttatatatatatatatatgtatatatctatatatatatatatatatataatacg

SEQ ID NO: 287036 - DNA, 416 bp, Glycine max
tatcagtggtgtactgttaatacatgtctgaacgctccttatatgatgctaggtagagtgtggatacaaaaaattaaaattcagaggaatatgtaagacatggaaatgcaattatattagctaatcgatactatatattatttgaataaaataatatcaatttggtcttaacattattttgatgatgtgtgaaatataatcaacattattccatggactgggcggatgaaataagtggtgaactcttcaattcgcctctaagtgaagtcggttatattttcaacctacttcttgctgtatcctccttaatgctgagtgaagatacacagaccgatggactcactttgccatgctatttgagagagagagagaggaggaccatgtgtaggacaaatgtgataaaaatggactacaag

SEQ ID NO: 287037 - DNA, 89 bp, Glycine max
agcttctaaactttatacaagaatgaagttctgataccacttgttggacaagtggcctcagatatcttaagaagggggggggggggggg

SEQ ID NO: 287038 - DNA, 426 bp, Glycine max
gtgcatatgatctatttgctccagctcgtatgaggtagtgcagaatgatcgaatcatttgtctttgtattcttatcacatagatcggaaacttaaactctgatatgccatattcatcaaggcactattcgagaagtacactgatcatctctcctctcatctcatttttgtatcccatatatatgtaacatcttgaatcttataaatctgtgaaagacaatgacgttatgattcctcctcaccttcatttcaagaatttcattaataaatatgatcctaaccggactcgttgactctaccctggaaaccggctgcataagatttaacaatccacttcgatcttgtccatactgctcaaaagtgagtttctcctcagatacccatgagaagactacactcgaatctaatcttactgtcacattaaaag

SEQ ID NO: 287039 - DNA, 376 bp, Glycine max
tatgcttgaaatgaggaagtgtacaagggtgaaacttactgcttttattcgttgaccacagagtgatacctggagatatgtcgcgggggtcaggagaccttatggatgtcaggtggggtgctattgcccaaaaccaagcttgaccaatcccgacccaacccgggcatagtcagtcagtgagaacctgtgatgtacctaagcatgcgagctcctggcagtcaacagataaaaggaacatagaccacaaagcaaggaggcttgtgtggtggctggccagctgtgaactttgattgatatatgggatatggcctctggtaatcgattaccaacggtgggtcatcgattaccaggcttaataatgaatacaggagactaa

SEQ ID NO: 287040 - DNA, 418 bp, Glycine max
acagcttctggaggaagtagacaaaaatgacagttgtcatgaagtgacaactaacagggtcatcctaaagtggtcattctcaagaacctttctgatgagcattttgaggtaacattagaatggtaattctgatgttagctgagaaaggatccatacttgaagtatatcctttagatgaagtcaactgttatgtctttctgaagtaggatagcttcatcaatcttaacacatcttcacaggttaaagcattcttaagtagattgcttcataaggttaaagtgaagcaacagctgttggtgtgttagtgttctacctaaggttagactatttaacgtatccaatcttccattttggtgatccatatcagatcttctcatggacgacttcaactttcaacttgattgcattttctaatgca

SEQ ID NO: 287041 - DNA, 387 bp, Glycine max
agctttacattactcctcatgcttctcaccatgtctaataaggttcgatttcttcgttctgccacactattatgatctggagaactatgcatagtgtattggacaacaatcccatgttcttgaagaaatttcgcaaatgaacctggtgcttgtccatcctctgtgtatctaccataatactccccacctctatctgatctcacgatcttaatttgttttccacattgtatctcaacttcagccttaaaaactttaaaggcatctaaagcttcattcttagaatgaagtaagtatagatacatatatcgtgaataatcatctatagaggttatgaagtatttcggacaatatgcattcatgtctggacaacatatgtcttgtatgtat

SEQ ID NO: 287042 - DNA, 385 bp, Glycine max
cttgcattctgcgcggtgttatgctgtggtaaaaggttttctatggccagaaatgagccttcaatgctgggaggtgcactgccactgcgattgggtgccgcattctttccaccaccttggaacctatggcccttcagaagtatacccatatcctccgtcgccatgttacgagacgatgaaccaaaagctgcagcttccttgtgagaaggccatttacccccagcttccgagattctaatcagactctcagttgccatactactgaaagattagctgcccccttctttagtaatgaagattacaaatatcacattggcgcctaaagaccacccaaaatcgtcaagtcagtatgtattacaagacatttacctcaacaaccttcatt

SEQ ID NO: 287043 - DNA, 382 bp, Glycine max
agctttatacaaagcatctggaggccttgattgaattacacaatatgactgggacctttgcaaggaatattcagcacttattttctgtttctgatgtccggtttttaatggatgtgcttaaatctgtgtacttgccttatgaatcgtttaaacagaggtaaaagcgtattttaatttaaagcataattgaaaaaaaatgattaattaagtttggctgattatgccttttggcatttggcttcagtattatagaagaattgggtgggtctatgggagagagcttcatatctcacaatatattgtctcaaatgtataagtatgaaataataggaacagatagataaattttaataatccactggccttatgatatgtcatgctt

SEQ ID NO: 287044 - DNA, 372 bp, Glycine max
tattctatctaaaggaaaccctcattttgtgtgtgatgctcgagtgcttgttaagccttacaaggagaatggcatagtcccatacaagtacaggcaccccctctttctactcttatgttatcttttttttgtatttgttattcccttgagtttgttttgaatgtgctcactattgtttcttgtgatttgcaggaggctgcagcatcatcaggtagattgaggagatttttcaccatgtggtactcctactggattagatgccatagaccaccaatttgatctttaacttggtagttgaaccttccattttgttgtcttttcagattgtgttggtgaaacctactctacttaacacgtgtactgttttaattg

SEQ ID NO: 287045 - DNA, 377 bp, Glycine max
agcttattttttgcgtctggttggtacttccaatgttcaatggagcggcttacatatatgagaattatgtgaggcaatacataaagaatattggaacttccaattattctgatgagtacaagaaggtccttcacatgatgaccttcgatgcaaggaaagcagttgaacgctataacgatagatatggccctgatgcctttgatagagtagtcagagcggcatgatacaaaactatgaattgcttcatcctaaagctcatctatatatctgtgtttttaacgtttttttttgttaactttcatatgatcaggctgaaaaagaagcaaagaagcgatgagtgagtgactatcgatttgaccaagttggaatgaaacgaa

SEQ ID NO: 287046 - DNA, 421 bp, Glycine max
ggtcgtcaggcttcaatttcaattttcaggtctatgcatataagagaatgtttgtgtctccaaagattagtatctaactctcaaccagaatactctcagcactcaatttttttatgtaacattataaaattacttttataaaattcttaagcttgtttatcatgagaattaacaaatttactatatatgagaaagtttgtgattagattctccctacatatattatatatttcttttgaaattggtcaagtgtagtagtcttttattttaaagggtctaattaactagcttgtggctatgtgaattcctattctcagatcaagtatgtggggaatgagcaagacaagggaagcttacagatggaaggattgaatctaatggacaaaactttgtctgttcaaggagctcgtatctcgtttag

SEQ ID NO: 287047 - DNA, 381 bp, Glycine max
agcttatttatatatttacacatatcaaatatatataacacaccactatacaaatacatgtaatactaaatatatatatatatatatatatatatatatatatatatatatatatatatatatatataattataataacaataatgataaatatattattagataaatattatatatataagtacaaaaaaataattaaacgcattatatatatatgtgagtaattaaatttattataaatattaatatatatatatatatatatatatatatatatataagtaattgaacgtactaaaagcattgagataaatatatatatatagtatttaaacacattatatatatatatatataaaaaataagaacgtgtgaaatata

SEQ ID NO: 287048 - DNA, 384 bp, Glycine max
tggttcgaggtacttacccgttgaagatcgaagaacgatgaagaacgaatgaagaacgtcgaagaacggttgaaacctttgcgagattcctcacggaaaacgttacggaaacgtttcggaagcgcctcggcttagattttcttcacggaaacaatttttccaagcaaattcgaaagagagagaagcgcctaaggggctggaccccttccttcttcatttcctcccctatttatagcaaaataggggaggtggttgccgcccagctcgcccaggcgagcagggttgcttcctccagaagcaaccgccttctggaggaatcttctggagggcccaagtgggcctgggtgctatttgcacccccatttttactatatacacccccct

SEQ ID NO: 287049 - DNA, 387 bp, Glycine max
agcttattagaacaaaattgcctcaatcatttccaaatatgcatgtgaattacgaagcatcaacaagaatcaagccaaggctattgtgcaagcaatcaatggggcaaaacacaccaaatgattatgatgatggatggctcaaattctcacaaaggtaaactcatcactttcaaattgagctttcaaaactatcatgacatgtagaggagaatcaaggatttcaagtcacaaaatgtcaagaacttttattttcaaaacaattacccatttcttgaacatatcctataattcaaagaaaaacatgcaaagtcgtacatgcacacaaaattgacccacaatattaaactaaaaatccgacgaaactaacaacatttacttattaacaca

SEQ ID NO: 287050 - DNA, 410 bp, Glycine max
aataagactcttctcttgatgaagggaaaattatatgtccatgtgctacataagaaaggacgatagtttttcgagttgaaattgtgaaacttcacctttacaaagatggattcatgcctaattacatggtttggattgatcatggtgaaaagatgccacatgttgataatcatcacatgggtgttttaagtagtggtgtagatgtggcctaaggtgaaccatttatgttaatgcaggagatgatgtttgatgctcttaggcagcccaaaatatttgaagcaccaaaatcagataacatggaagagcctataaatgaagaagctcaaggattttataatatgttggtagaggcaaataacgtcattgtttgaagggcatcagtctctaagttatcaatgttcacttatagc

SEQ ID NO: 287051 - DNA, 689 bp, Glycine max
  unsure (1)..(689): unsure at all n locations
caccatcctccgacgtactcaccaaatantacatantangtntaatagcggtnnntgtagtagtantgancntatcgtctcactgntgtancanannannaaaaaancgnnantcacnnnanccaagaatgatgatantcnnacatttagggtaccgtccngatcagagcacaancctganngcncncanacngcnanaacatcccgctaaccgcagnngcggatnanctncatagnaactgacgtacacctgtcnancgcnactagcatagtacttagtantagaggacacgtgggtgtagcactatcacacgcgagcatattgggatgccaagacttggcgctccacacaccagatcactgaacacttcgcacgtccagaaccaatgacacgaggagggaacacacaccaactctgaagcaggaagcaatgaaatgcacgcgcgaccacagcgagtgagccacctgcgagacatgacccgctgctgaatcccagacaaaaacggggaaaaagcgctccacaaccagcacgaagagccacaggagaagacactgtcatgacaagagtgccagaagacgcacaaagtactcacatccgacgagacaaaacacccgagggagtaaatcccatgagtaactcgtaaaccatcagcactgaagacacaagccaccagccccaaacccgtggc

SEQ ID NO: 287052 - DNA, 329 bp, Glycine max
tgatcaatcccgacccaacccgggcatagtcattctatgaaaacctgtgatgcacctaaacaggcgagcatctgtcagacaacaaaacaaaggaataaagaccacaaagcaaggaagcttgtgtggtggcaggccagcagtaaatctcgtgtgataaatgggtcatggcctctggtaatcgattaccaagggtgggtaatccaatacaacgcctaaaaatgaacacaggacgctaagatggcctctggtaatcgactaccaagctagaaaaccagatcaggaagctaggggagcacctggcaatcataaccaccggaagaatcgatacc

SEQ ID NO: 287053 - DNA, 384 bp, Glycine max
agcttttgcttcctccagaaggttcctgatgggcccagggctaagtacacccccctaaattgatcagttcacccccattttgtgtttttttggctgatctccttcccaaatgttgtgaaactttacggattacgcggcgatgagtgttaagcatctcaatttggtcaaccaaagttcatatgttgacaagcaatgtccccagacgaaattagggtatgacaagggattctcaaacctccccttcatgggaacgaggcgttgtatcaattatagtcccgtccttgccataagacaacttggctagcccgtgagaggagcaccgtcagaagacagtatcacacctttcatcgcgcatggtttcatcgaccccaatgcaatgatatt

SEQ ID NO: 287054 - DNA, 418 bp, Glycine max
  unsure (1)..(418): unsure at all n locations
ntataagtgcgggtctgggagacgaaggtcaagtgttcgcgatatgtgaagatgatgttccaagtacctcggatttggttcgaccatgccctcctgatttccagctgggaaattggcgagtggaggaacgccccggcatttacgcaacaagcataatgtaaacctttacggttttaaaagctctatagttgggcctaggctttagagttttcattttgctaaggctttgtgtcttttgtttttgaatttataacacaaggatctttcttcatctgttcctggtctctacccattctcattcatttgcatgtttacttctttttctaaaacggcagattcgatgacgagtcccccgaaggtactaatacctgtgacccgtctatcaacttcgagcaagaaatgaatcaaatggaagatg

SEQ ID NO: 287055 - DNA, 384 bp, Glycine max
  unsure (1)..(384): unsure at all n locations
tgctatataatgaactttctcttcattgctactaacattaataatagtaacaaacttctcttccaacatagcaagatcatgatccaaaacaccaaggtggacttgctcatttcantcagagaagttaagctcattaaaatgggtacacatgatacataagaattcaactaattcaaaacatgtattacataataaaattcacataagtgttttgagacataaaatacatgtcatacatatgattcattcaaataacggtcaatgtatattgatgttctcctttggatgatacaccaacacacaacatacaaacataatgatgctaataaaatcttaacattatttggtaattaaatatgcaccaattagtagtatctatttcct

SEQ ID NO: 287056 - DNA, 413 bp, Glycine max
tgtcgctcccctatttggggcattttgtgcctctatctagatgcttacaattgctacctttgcattagtaaaaccaatcgcatgctattatgtaaaatgtaaaatataataaaagtaaagaattaaatatgtactaatggttagtcaatttctcatctcattagtgtcgacttgtggcatttaacgattattttcttctcttattgacggacatacactcactacatgaattctaattctacttgcttaggaaggtaactttgactataataatggtttaagtaaataatatataacggaaaaactataaatgttgtctttattaaagggtgacagataccaacgtagttaattatcaaaatgaaatataaataagacaataatgttagatcactaaggttaaacctttgttc

SEQ ID NO: 287057 - DNA, 372 bp, Glycine max
agcttcatgcatgttgcatgtgatttacttgaatcttacctggtccatatctgggctgaagcattattctttggaatacttttcagaatgcggctgagatccccttttggaattccgtttattaaataggaactcatgaatttggtggaaattcttagataatgatgtatggactatagatttctaatagatatgaatacaatgaatgaagactatttctgccattgatacattgatccccccctctcccttgtcgcgtgatgactgcattactatctttgcctggctcagagcatggtacaaatatgtctgacataaataatggcctactccacgtttgtataagttatatataattcactacagcatgca

SEQ ID NO: 287058 - DNA, 408 bp, Glycine max
tgcagaagtttggtatgttacaatcttattgacaagtgttatttcggatagaagtattatgtgaaattattgacaaaagtgatggatgcacattctatgacaaaagcaacctgcctttcatttttatattatattatttcaaaagccacctcattgtttaaaaagctttcatattttgcatgaaaaaagagaggtataaactaagatagacagtgatgatcttttatcatgttggttcagataagagactattagacagttgcaaaaggaagctgccaggcttgaatgggagttacgaagccctgacctttctgtgaattcatgtctaaggtcattgctagctgaaaaggagtcgaaaattaggcaggtacaaacttcattcttttgtcttaacgtttatgtgttaca

SEQ ID NO: 287059 - DNA, 382 bp, Glycine max
agctttaatattccttcgatacttgttttaaccttaaaaaaataacacattctataatacgataaacaagtgcttaatatataacgtggcttacttctaaatgtaacgttaatttagttggtagtggtacaaatatattaatagtaacgccatttcatcattagctcatgcagaaatgcagatcatacacaatgaccataacaatttcaatgcagcatgcaacgtttctaatcagacaacaccatcaaaaattccatgtcatctatatgacttatttatcgggcttcaaaaaaaaaaaagaaaaattacatatatgttacttactggaaagcaaaacacaaaataaataaatgatgaagttgctaaaaaatgattgcatatt

SEQ ID NO: 287060 - DNA, 421 bp, Glycine max
tatgctgcaaacatctacaacagacctcctcaacctcagcagcaaaatcagccacaacgaaacaattatgacctctccagcaacaggtacaatctcgggtggaggaatcatcctaaccttagatggtcgaatccttcacaacagcagcaacaacaacaacagccttattttcagaatgctgctggtccaagcaaaccatacgttcctccaccaatccaacagcaacaacagcaacagccccagaaacaacaaacagttgaggctcctccgcaaccttcccttgaagaacttgtgagacaaatgactatgcaaaacatgcagtttcaacaagagactagagcctccattcagagcttaactactcagatgggacaattggctacacagttaaatcaacaacagtcccagaattatgacagat

SEQ ID NO: 287061 - DNA, 382 bp, Glycine max
  unsure (1)..(382): unsure at all n locations
agcttttctttcacaatcaatctgtctactgactaacaattctaattgcaagttctcattcttgttctttctttgtctaacatacacacttgctcaaactcatgaaaagaaacacagattccatcacaatcatgcattctattcaaaaccaagtcatacaccaattttcacaaaaagataaaagtgttttactgctatgtcatcaaaatcaagtcaaactgttccatatgcttcagaataagcaaaccaactactaaaaaataaaactagcagtgtatataaacataaaagaaatactgtattgaaaccataagcataataataatgatccacanagcaaaataaaaaaaacaaatatcatcaggaattcaaaattcctgtg

SEQ ID NO: 287062 - DNA, 414 bp, Glycine max
tcttattcacataacaccaatagtattccatttataagcagagattgacgattcaaattacatatttataagagaccaaccaaacacaaagcaaccacagcttaaaacacccgtaacaaatcctagaacatttgaatttgcaaaggcgggccatgaccactttattctaaaacttcaaacacaacacatacttattatttattgatacatgtattacagctatctctgcttgaaggttatgcatgttgatctcacttgcagctgcatgggtcgcaagtgcagtttgatccacagttgcagccaccgttctcagctgcaacacccatttcagcaccctcgaattgggccttcaccggcccaacacccaaaactagagtctcatttgtgatcttctcaacgtagtcaaaagagtac

SEQ ID NO: 287063 - DNA, 375 bp, Glycine max
agcttgctttttgcaattctaagacactagagagcttccaagtatatgacatgtcccacttgtactttttctatctaatttgcatcctgcaaaatcagaatatgaaaaacctgttatgtttaaggaggtacctttaggataccacataagcaaacacttagcatgatatccaatctacttgcagttaggtagagaagtgattcaatcatacctctgtatcttgattcatccactaatttacctttctcatcaaagtcaaggtaggttgatgtagacataggagtagatgcttctttgcattttttcataccaaatttctttatcggttttatgcaatatttggtttgactgaggaaggttccatgtttcaattgc

SEQ ID NO: 287064 - DNA, 416 bp, Glycine max
tgcttgtggggcttctatggagactggatctttgagcttcaatggggtcctttaatggtgattttccaccatggagatgtagcggaagacaaaggaaaagaggtgagaggaggcgccatccattaaggaataagtcatggaagaaggagcttggagaggatgcttcaatggaggaaaagaaagagggagagaaagagagaggggggagcacggaattgaaggaagaaaaagggagagaagttgaactttgagttgtgtctcacaagactctcattcatcaaagttacaacaagtgttacacatgtttctatttatagactaggtagcttccttgagaagctttcttgagaaaacttccttgagaagcttctttgagaaaacttccttgagaagctagagcttagctacacacaccc

SEQ ID NO: 287065 - DNA, 381 bp, Glycine max
  unsure (1)..(381): unsure at all n locations
agcttgataacacgcagagactaacgtcgtcttttgtgaccttcgtcaattgcggccgacaagcctgttgacacgtggagatttacgtcatcttccgcgcttacaagatctgtcatattgagttttgagtcacgctgacgggcggaaatactcgagtagttatccttataaactttttgttgtttgtaagacgaaaagcctgatagcacgcagagactaacgtcgtcttctgcgaccttcgtcaatcgcggccgacaagcccatttaaaagcggtgatttacgtcatcttccgtgctcacaagatctgtcatactgacttttgagtcacgctgacgggcgcanatacccgagtggttatcctaataaaatntttgctgtct

SEQ ID NO: 287066 - DNA, 406 bp, Glycine max
  unsure (1)..(406): unsure at all n locations
nttcgtcttacagaatgcaacaagtttatacggataaccactcgggtatttccgcccgtcagcgtgactcaaaagtcagtatgacagatcttgtgagcgcggaagataacgtaaatctccacgtgtcaacgggcttgtcagccgcgattgacgaagggcgcagaagacgacgttagtctctgcgtgctatcaggcttttcgtcttacagataacaaaaagtttatacggataaccactcaggtatttccgcccgtcagcgtgactcaaaagttagtatgacagatcttgtgagcgcggaagatgacgtaaatctccgcatgtcaacgggcttgtcggccgcgattgacgaagggcgcagaagacgacgttagtctctgcgtgctattatgcttttcgacttacaga

SEQ ID NO: 287067 - DNA, 386 bp, Glycine max
agcttgttcttgattttttctaagttctttaacaagcttggaacaatatatttgtccttcatttaactgtctttgggcttggcggccacgatcaacaaagtactttgggcacctatgttaaacaaatggcctcagttatcttaagaagggggggttgaattaagatattccaaactatttcccctaattaaaaatctatttcactttttactcaagttatgaattcccttaatgacaatcttcttaaatattaattcaaatgaaacaatttgaatatgaatataaagaaataataaataaaggagattaagggaagagaaaatgcaaactcagttttatactggttcggccacacccttgtgcctacgtccagtccccaagcaacc

SEQ ID NO: 287068 - DNA, 410 bp, Glycine max
tctagccaaatggacttaccttgaattaattcctttgatagcccttttgagccttgtttccctttccttgttttgaagctcactacaagccttaagtgaaaaaccatgatattaccatatccttaaggaattttggagctttggaattgttttgggaataagtgtggggggtttttgtttcattggacaacttgttttgttggctatgcttcatgatgtattttgggccatacttgatgtacattgtatattggtttaatgttggacatgctgaatgaaatgttgtttctcaaaggctaaaaaaaaaaaaaaatcgaaaaaaaaaaaattcggaaagaaagaaaaaaaaaaaataaagctatatagttgagtgaataagatcttaaatggcacaagaatgatgaaactct

SEQ ID NO: 287069 - DNA, 387 bp, Glycine max
agctttagcatggcttctgtgatagaagccatttgatcttttaaggccgataggtcggccttcatctgttcttgcactccctcttcgttatccatcttacttctggatcgggtgttataggggtgcctttgcgcttttttagttatggtgagttccctaaagaaacaaatagtagtgagtatgccaccaaaacatgaatatgctaatgaatgatcagagcacttggatccacctcaaggcctttttagacaacgtgatgagtttcagaacttctctttttataaaaaggaacaaaagcttctatctagccaagatcatacaaaagtgttacaacagaacctaacggtttctaattatgtgggccattaaatctatcatgtgttgaca

SEQ ID NO: 287070 - DNA, 422 bp, Glycine max
  unsure (1)..(422): unsure at all n locations
ntctagctnttcattggtgtattttgatctccttttgatgctctaaaatgtgggaatgtgctcaaatatgtggggcaattttggtttgttttcttgcttgattgggttgaattgggggtttgtatgggatggccctaggcctataatgcattttgaagcaatggggcatgccacattgtccccgttctcttgctattgatgcctaaacgcgcgcccaccaagtgttcggtgaaatgcctcaatggcattagcgtgtgacttttgtaaggaaacaacccatggggcattttggtttgtacatattttctattttttgggacatgtattcattcccgaaaaaggctagaataattgcctcacatatatactaggcctaggaaccaaagttcttatgcaaaagaacacaagaggaggtgcatgtt

SEQ ID NO: 287071 - DNA, 392 bp, Glycine max
  unsure (1)..(392): unsure at all n locations
agctttgagccaaaatcctgactcactataaaccttgacccagggtgagaatgtcaatccttaccctcgggagcaaaaaagaaaagaaggaaaatttccaatcaaagaggaagcaaaaaaaaagggagagaaggaaaatttccaatcaaaggaacgaaaattccctatcaaagagtgggagaaagcaaaaagaaaagaaagaaaattcccaatcaaagaatgggagaaagaaaaaaaagagaagtaaaaaagaagaaggctcaagggtcaaagaaaccagaagaaatgtgcagagaggtctttagaccggacaatatctgaacaatacagaattgtcaccaaatgaacaaaaaaaaggaaaggaaaccatgacctanaatggtcttctccct

SEQ ID NO: 287072 - DNA, 424 bp, Glycine max
ttcgacctcttgaaaaagacgctaataattgcaccagttatagtggctcccaattaggggcaagaatttgaattaatgtgtgatgctagtgactatgcggtagagtagtattaggacaaaagagaaatggaagatttcatgctatctactatgccaacaaagtgctaaatggagcccaaaccaactacacaacaacggagaagaagatgctagcagtgtttatgcccttgaaaatttttgatcatatcttgtaggatcaaagatcattgtgcaaactaaccatttagctataaaatatctactcgctaaagcggattcgaagccaagattaattagatgggtcctgctactacaagagtttagtttagagatttaagataaaaatgggtgtgacaacctagtagttgatcttttatcgagacta

SEQ ID NO: 287073 - DNA, 365 bp, Glycine max
agcttttatccaaaatcctgactcaccataaaccttgatcccaggtgagaatgtcaatccttaccctcggaagcgcaaaatgagagaaggaaaatttccaatcaaagtaaaaaagagaggaaaggaaattcccaatcaaagagtgggagaaagcaaaaagaaaagaaagaaaattcccaatccaagagtgggagaaagaacaaagagaatgagaagaaggaaagaaagctcctgatcaaggatcgaaagacaaaaaagaagaaatgtgctgaaaggtctttggaccggacaatatctgaacaatacagaattgtcaccaaatgaacaaaatgaaggacaggacaccacgacctataatggtcttc

SEQ ID NO: 287074 - DNA, 413 bp, Glycine max
agctggtttggaagcttgagatgagtttgttggaccaagtggcctcggaataattaagaaggggggttgaattaattatgaacgtgtcttagctaattaaagaattatccttcttaatattactagattcaatgaagctttacaactaagttatgagaaagtaaagaacagaaacaataacttagacaaaagtaaagcagaaataaaaagtgcacagcggaaaataaagagtgtagggaagaagaagacaaacacaagatttatactggttcggccacaacccgtgcctacatccagtccccaagcaaccaccgattcttgagatttccaataaccttgttaaatcctttacaagcaaagatccacaacggatgtatcctcccttgttctctttgaacaaccaagtggatgta

SEQ ID NO: 287075 - DNA, 383 bp, Glycine max
tgcttatccttatggcctgcctccggacttcaccccccgtgccaccccgaaagagttaagccaagcccctacttttgaggggcaacacccaccttatgaagactatcccaggcaagacgatggggaaggagatacccatcttggccccctgctccacctcaaagatccgtccccgcatgaactaccctaaccgaacatagtccgtcataccccggcctcacccacacctgtaaaagaatctgttccctttgcggaagataagggaaagattgaggcgcttgaagagaggttgagagcagtcgagggcctcggcaattacccattctcagatttggcggatttatgtctcgtgcccaacatcgtcatccctcccaagttcaaag

SEQ ID NO: 287076 - DNA, 423 bp, Glycine max
tcttgctgatgtcatagtcttgaagtatgtctatgataccaaaaaacaaaaccacctcatagaactctccaattggttctcctacaagttgtaattcacaaccacttctcctcaccgtcctttcagcccttgctggcatgttcacccccaatttgatactcgcccaactgctaacacaaattagatagatgtaatatccaacaagacatgacttaagtaataatggtcagccggagctcgggaggaggttttaagataaattcgtagaagcaaggtacaaaatatacaaccatattaagaaattaaatatgccttacatcatgttgaaatattaatttttccaaattcaattgaacttaattatgccaatgtcaagatgaaaacaaaatgtgcattatattggcaacctatataaagagaaag

SEQ ID NO: 287077 - DNA, 384 bp, Glycine max
agcttttgtcactccacccaaatttggccttgacattaaccagacttaagacagccgacaacagcgtcaaggaattcttgcaccccgaatacaaaggcttctttgagtcactctgcaatccttcatacacagaggcatgtgcttgctgaaaagactcttgtccaaggtcacaaatcatgtcctccaagcgatctcccatttctacatcaaacggttcagattggggcttgccctgcatgtctgtcatttcaccatgccatatccatgtcgtataattcctcttaattccatcacacaatagatgttcccgtatgtcatccagtatttgtcttctatcgttcaaacaattgatgcaagggcaataatattttccatcttcatccg

SEQ ID NO: 287078 - DNA, 415 bp, Glycine max
tccatcaagtggtatcaaagcacaagagcttcaagtatgtgctctttaaacctccattaattttttgctttaccttctcttccattgctttttcttcatttttctccatgtatctcctcacatgtcttgttctaaatgttgttaacatgattctttacagtttccaccgattaaacttgctatagaagctagatttgatcttctatggctcaaatttcttgctcttgttcttgaaccatgaattgtgttgagtttaagttcctttgacttctgtcttgttattttttgtggctgaaacctaaaccataaaatccttacaaaactattaatgtagaagaccacctcataaatctagagtgacttgatcacctattgtagttttctcatagaagtcatgtctagtcatgaaacttgt

SEQ ID NO: 287079 - DNA, 383 bp, Glycine max
agcttgccacccagctcgcccaggcgagctaggttgcttcctccagaagcaaccgccttttggaggaacatcctggaaggcccaagtgggcctggttgctatttgcactccccatttttactaaatacacccccttgcctttttttgctgattctttttccataacgttacggaaacttatgaattacgtaacgatacttgttttccttccataatgttacgaaaccttatggattacgtaatcatcccttttttgccttccggaatgttacggaactttacggattgtgcattaacacttccttttaattttcgacatgtcatagaacttcacggattgtgctacaatgctttcttttgacttccagcatgtctcagaactt

SEQ ID NO: 287080 - DNA, 414 bp, Glycine max
tcataacacagtgtcgcaacctacccttcggcgggagggcgacgcgtgactcgcgggatgggtgttccacgaaaggaatacgcgcggagtcgccaccaacgtttatttgaggaaaacgtcggaaaaaccggaaaagacgagatctacgaactttttagtgaaaggttcgggagttgtatttacgcacggggaaggtattagcaccccacacgcccgtcccaagggacggcagcctttaatcgaatgtgcaaacatgactttgatttttatgttcccttttatgttcttatatcctttataccctttttagattttttcctttttttgtggtcgacaagggtgtttccctttgctcctacatattcctcaatttgggatgagaaaatcagacctacgtagttctttcggaacaaa

SEQ ID NO: 287081 - DNA, 384 bp, Glycine max
ctgcttctttcaatcgggtccatttaagtggctttcagtcatccatagagttctctctatcacttcttgggtctattctgaacccattgacaccatccatcttattgtgctggtctttaaagtggtgtatgatcccaaacgttcccgaaatcataatgtggatgataggaatatgctagggcatcatctactaacctctaatcattgtccacatactgctgcctactggaaaaatctcattgaaccattgttgggatgccacagatgccttcgccattctctctaaccaacaggagctccactatttgccctactgctaatggcatactattcatcacccctcaacatcgacaaccgagtatcatcttctagtatcttgtcact

SEQ ID NO: 287082 - DNA, 334 bp, Glycine max
gacctataatctcagctttgacgtggacaaagaaaaagttcttcagattattttgagcggtggaggcagtttatatccgatttgaccatgaaatacgcacttgtagccgacgagtacggggtggacgatactgtctgtgaaaaataccgtatcaacaaggataaatgggcccattcttgtcagacccacatggatccctaatgggaggtatgttctttgcaatttgaatttatctacactaaacattcagacattataatagatgggaccattcttttgctcattatatgttagattgtggtgcgatgtacggtacaaaacacacgccatcctg

SEQ ID NO: 287083 - DNA, 372 bp, Glycine max
agcttgtgtgaagagatagacaaaaaaagacttagaaaattttttgcaattgtctatccgctaagcgcatagacccctgattggttggctgaatagttcagctaagcacatatcattgcgctaagccccacatcttcacagtaattgaattttaactagtgggcttagtgtggatgatgtgctaagcaccacttcttcctgggaaaaaatttatggtagcagcgctaagccccacatctattttgtaacttgagtttttaagctgggcttagcaggccaggaggcgctaagcgccaatctcttacaaattttgaattcttggaagtgcactaagcgcgcctattgcgctaagcctgaactactctttgtaag

SEQ ID NO: 287084 - DNA, 418 bp, Glycine max
  unsure (1)..(418): unsure at all n locations
tcaatggagganaagaatgagagagagggggggcactaaattgaaggagaaaaagagggagagaagttgaactttgaagtgtgtctcacaagtttcacattcatcaaagttaggacaagtgttacacatgtttctatttatagcctatatcactaactaaatgaaagcttccttgaaaagcttccttgagaaactttcttgagaagctagagcttagctacacacacccctctaatagccaagctcacctccttgagaagtttccttgagaagctatagcttagctacacacacccctctaatagctaagctcacctccttaagatgagaagctaaagcttagctacacacacccctctaatagctaagctcaccccatgccaaaatacatgaaaatacaaaaaaaaaatctctacta

SEQ ID NO: 287085 - DNA, 374 bp, Glycine max
agcttgccctgaccgaaggtggtcatgaagtccacgtagcctctggtctcgactctcacctgcaaagccgaggagtggacttgtgtgggggtggacagtatttggtgagacctcaagtttctggaaagttttctagtacaagatatcaacggaactgccttggtcgatgaggaccctgaacaccataaagtttgctataatgatgaagacaaccacagggtcatcttggttgacgaggttaatgcccttgaagtccttgtctgtaaaggtgatagaagggagactttgttgtaagggtgcgttgacaaaattaatgttaatgtctcaaatggcacgtaagtgccatattcgagattggttggactatcctccat

SEQ ID NO: 287086 - DNA, 409 bp, Glycine max
tgtacaccacagatgatgcaatcttctgtagagtattcccgtcgtcgctgaagggacatgctctccattcgttcactcgcttaccccccaacttgtggactcgtttataccttggcagcctgcttcggcatgtagtttgccaccagccgaccccaccacttaacatctatagccctcgtcaacatccaactagagacaaaagaaccattaggaaccttcatagaatgtttcaaaaggatttcattgaatatctgaaacttggatcccacagtagccatgcaccacttgataatagcgttaaagctgggagcttttgtgaacaacatatgcaaaaaacctacatctaatcaggatgagcttcgaaggagagcggccaagtacatgcaaatggagaaattggtcaagtata

SEQ ID NO: 287087 - DNA, 380 bp, Glycine max
agcttgaacgaatataagaaacatcttcttcaaccttggtgattcttgactccatctcattgaagcgcatgtccacttgtaatttcaaagtgtcaaacctttcaccaacaaaggtttgaagaccatcaaacctgtccaaaatctttgaaagaagagatgaatcttctccatcatgtccttcttcaccaacatgtcgagcaccctttttcacccaagagccatcatgctctttttgataaccaaaggatgcaatgactgaagcgcctattaggaaggatctcttgattggaacataaggttcagaatcaagagggatgttaaagtgttgaaggaagagagtgactagatgtggatatgacaatggagcattcaatcgcaat

SEQ ID NO: 287088 - DNA, 420 bp, Glycine max
tatgctgcaaatatttacaatagacctcctcaacctcagcagcaaaatcaaccacagccgaacaattatgacctctccagcaacagatacaaccctggatggaggaatcaccctaacctcagatggtccagccctcagcaacaacaacagcagcctgctccttccttccaaaatgctgttggcctaagcagaccatacattcctccaccaatccaagaacaacaacaaccccagaaacagccaacagttgaggcccctccacaaccttccctcgaagaacttgtgaggcaaatgactatgcagaacatgcagtttcagcaagagaccagagcctccattcagagcttaaccaatcagatgggacaattggctacccaattgaatcaacaacagtcccagaattctgacaagcttccttct

SEQ ID NO: 287089 - DNA, 387 bp, Glycine max
agcttgtggcaacttagattattgtttctataatcaaaacatcaaaatggaaatcaacgaaatgcaaactaggtgcaggaagagaaaatagagtgagattcctagtgttaaaaagggaagatagaaggacacataggtaggcatggcaatgaaacctgtacccctcaatatccgcttaaactcgtcccgattttgagggaaaatacccaagttgaaagggtacgggttcagattcagggattatccaactttttaaatcggggttggagacagggatgtcactacctatctcatactcattctcgacccgccccgatgatgaaattatgaaatttttattaattacttgttaattttttataatttttacataatttaaaattcttt

SEQ ID NO: 287090 - DNA, 426 bp, Glycine max
tgaaggcatgtaacccacaatcttttcatagtagaactgatgcaatcctaccctcccaagggaattggatagcagactccaagaagattgggccaaagatgcaagagaaggccttaggattctcatgagccttagggtagattttgggcccatgggctaagtatgagcccacttatctttctacatattagattaaggtttcattaatttggggccttgtatttaaggctccataatataggtagggtaccctagaaatgtaggatttttcagcccttgtattttagggcacctagactagtttttgtattacgggtagttttgtaatttcacatgcattaagtgaatatttgatgtgtgcgttgagaaataaatctaattgaattgggagaagcccaatccaattataatttagagggggaggtg

SEQ ID NO: 287091 - DNA, 333 bp, Glycine max
agcttctcaatatattatgcgcctgaatcggacttccgtttgaaaagttatgaccatttgaatttctcgagagcattcgttgttcaatttcgagggtgtcgatgtattatgcgcctgaaccggacttccgtgtgacaagttatgaccatatgaatttctcgagagctttcgttgttcaatttcgagcgtctagatatagtatgcgcctgaatcggacttacgtgtgacaagttttgaccatttgaatttctcgcgagcagtcgtggttcaatttacaccttctcgatatattatgcgcctaaattggacttccgtttgaaaagttatgaccat

SEQ ID NO: 287092 - DNA, 416 bp, Glycine max
tctcgatatattatgcgcctgaatcggatgtccatttgaaaagttatgaccatttgaatttctcgagagcatccgttgttcaattttgaccggctcgatatattatgcgcctgaatcggacttccgtgtgataagttatgaccatttgaatttctcgagagcttccgttgttcaatttcaagcttttcgatatattatgcacctgaatcggacttccgtgtgacaagttatgaccatttgaatttctcgagagcttccgttgttcaatttcaagcttctcgatatattatgcgcctgaatcggacttccatttgaaaagttatgaccatatgaatttatcgagagcattcgtagttcaatttcgaccgtctcgatatattatgcgccataatcggacttccgtgtgacaagtcatg

SEQ ID NO: 287093 - DNA, 390 bp, Glycine max
agcttccttaagaaaattcctaaagaagctagagcttagcaacacacacatctctaatagctaagctcacctccttgagatgagaagctagagcttagctacacaccccctataatagctaagctcacccccatgacaaaaaaaagatgaaaatacaaaaaaaaaagtccttactacaaagactactcaaaatgccccgaaatacaaggctaaaaccctatactactagaatggccaaaatacaaggcccaaacgaaggaaaaacctattctaatatttacaaagataagcgggctcatacttagcccatgggctcaaaatataccctaaggctcatgagaaccctagggccttcccttggatctctagcccaatctacttggagtcttc

SEQ ID NO: 287094 - DNA, 420 bp, Glycine max
tccattgttcaatttcgggcttctcgatacattagacgcctgaatcggacctctgagttaaaagttatgaccatttgaatatctcgagagcttccgttgttcaatttcaagcgtctctatatgtgatgcgccttaatcggacttccgagtgaaaagtaatgaccatttgaatttctcaagagcttccgctgttcaatttctggcgtctcgatatattatgtgcctgaatccgacctccgagtgaaaagttatgaccatttgaatatctcgagaacttccgttgttcaattgcgagcgtctctatatgtgatgcgctcgaatcggacgtccgagtgaaaagtaatgaccatttgaatttctcaggagcttacgctgttcaatttcgagcgtctcgatatattatacgcctgaatcggacct

SEQ ID NO: 287095 - DNA, 350 bp, Glycine max
agcttaaacattcaacttcgagcgtctcgatatattacgagtctcaaacagacatccgagtaaaaagttattcgtttgaatttgctcagagcttcaacgttcaattttgagcgtctcgttatattacgggactcaatcagacatccgagtaaaaagttattgtcttttggattggctcagagattcaacattcaatttcgagcgtctcgttatatcacgggactcaatcagacatccgagtaaaatgatattgtcccctgaattggctcaaagcttcaacattcaatttcgagcatctcgatatatgacgggactcaatcagacatccgggtaaaaagatattgtcgttt

SEQ ID NO: 287096 - DNA, 423 bp, Glycine max
tcagcttctatataagctgaaccattttatcaatatacacaagttgagttttattcacaaaattagagtttatctcttttatcttagtgagagtgattctcctaaattcttgagtgattcaagaacaccttggctgtatcaaaggactttcacaacctttgtgtgttgccctcgctggaaagagtgattcttccctttctttcatcatcacccttgttctttcaaaccacaattccagaaaatccacctctgcccaaaattatctcgtggccataactcccattttacgcactcaaattaagtgattcttgagcctaaattgaatttcaaaacgagacctttcacctcgttttggaatcacctcatttggagccatgtagcttcagttattgccatttctatatttctgtccagccaccactt

SEQ ID NO: 287097 - DNA, 379 bp, Glycine max
tgctttacatctaaagcgaacacacaattggcatgctcctgagattcactagtcgatctcgcaagcaactcgattagactagcgattgtttaccacatttcagcgtaaacacaaccttaattagaaacaaatattactagtttgctactactatctaaatcactaaaatatatcctttctttatgttaaacctcatattcctcattttcattaaattacaaaattaaacaagtatcataatccatacaaagcatatcacgagaacaaagttaacataaaaacaatttcaccaagttttcaaataattcacccgaataaaaaactagataaactttattgaaagccgacatcatcttatttcaactagaagtttcacttt

SEQ ID NO: 287098 - DNA, 418 bp, Glycine max
  unsure (1)..(418): unsure at all n locations
tgcgttcccgagagcattnttcacttgagcgtttcagcctttgctttcgtgtagcttaggaaaaacatcatttcttctcctttctttcttccaaagccatttctaacgtctcaagcactttctccatcatccacaaccaccattagccaccacaaactgccgttgttctccgttgaaaccccacatcgagaggaacccttcaaccgaagcggaatattccaacttgccttgcgatttcggtagagaacgaaaccctaatctgacctttcatttttccttcgaggtaaccatgattccatgtttgttccttgttagtttcatgcttgtcttcgcatcttttctgactttggaaccaccattgcatgttttacgcttcctttaaaaaccttagagcatagagactntgtaaacgttatct

SEQ ID NO: 287099 - DNA, 384 bp, Glycine max
agcttatcaagaggatgtaatttagttattttgcatgaattgttgcaaaactcacatacttgagttcaatttttatgaataaaaaaaatgtttaaagctaattacacacttcaacaacaattatatttattgtaatgagaatgggacaaattcaatgaattattgtaaattcattttagaatattttcttaataatcttctaacttattaaattaagaaatattcattgtttttatatttatcaatttaataatatggaataaatttaacgaattattgtacgagacaaaagcttgcaacttttaccttagtgattcataattataattattaatgtgttgataagaaaggtaggaatataggtaaaaatgcactacaagataa

SEQ ID NO: 287100 - DNA, 420 bp, Glycine max
ctacgaaagatgaaggggaagattccagagattgtgggctctcacatctcatctcgggttcttcaggtatgcttgttggtatcccttttttttttcgttcaatttcagttttacatacttttagaggaacttgcattttaaatcttttgctttcattttgttttaactgatagacttgtgtcaagcattgttcacaagctgaaagagatgcagtatttgaagagcttcggccacattttctaactctagcattcagcgcttatgctgttcacttagtgaagaagatgctcgacaacggtaatggtctacttgaaatatactttgttatttgtcagtgtcaccttttcttctaattggtcattctccattttcagcttccaagaaacaactagcaggctttatctccactctccgtggtca

SEQ ID NO: 287101 - DNA, 386 bp, Glycine max
ttgcttattggaatttggaggaacttcttatggtgggtcaagaaacacttcgaaaattgtctggattagttgggaaagagtatgctccctcacagaaaaatgcggccttgggattaaaaatctctacctctttaatattagcctcttatctaagtggaggtggagatttcttcaagaaagtttgcaatttggtccccttttattagattcagatatggttgttctttctctgatctatcacatctgacccacaaaactagtttgcttctaacattattcacaatgacaaaaatggctcccaaatgaaatttcggtatgttctttggtttggcaacacaaattttcattgtgtgcataattggttttaatttagactctacaaattt

SEQ ID NO: 287102 - DNA, 399 bp, Glycine max
tttccttccatggcttattgcttagcggatggtgcctcctctcacctcttctcctttatcttctgctacaactccatggctaaaaatcaccattgaagaaccttattgaaactcaaagatccagccaccatataagcttctcaagcaagcttccatcaagcggtatcatagtacaagagctttaagtaagtactccttaaacctccattatccttcattggtatttcttaatttttctacatgtatttcctcacatgtcttgtgttgaatgttgttaacatgatcctttagaatttccaccgattaaacttgctacaaaagctagattttattttctatggttcacatttcttgttcttgatcttgaaccatgaattgtgttgagtttacgttcctttg

SEQ ID NO: 287103 - DNA, 386 bp, Glycine max
agcttgtcaactcctcatcccattttcttttttctaattcctccttaaattcgtcaaattcagtgtagtatactaccacatttctctctgttagtagtttccttggcaccattatatcagtgtacctctcctaagcttcttgagaatgaaacctacatctatcaaatcttgcttgggtagaggaagaagcaaaagactttctcttcttggaagccatctaaaaatataagatcaaacaacaaggttaaaacaagattattcaacaaaaaatagaaaaataaaactaaaaactgaattgggcgcttagcgtagcaggctgggcatagcgcgccttatgaaattttactcatgggctaagcgcagtagactcgcgcttagcctaaaga

SEQ ID NO: 287104 - DNA, 418 bp, Glycine max
tgccaaggagaagttcaagttggccgctacacacatccggaaggagtgtgccggattacgggaagagaatgcaactaccgcgagagcccttgaacaagagaccaagagggctcgcaaggaagagtatggccggaataaattttgcggagctctatggggtagcaataatgaactcaagctgcgaagggaagagagggaccagtcgcgagcacatagcatggttttgaaagaggagttagttgcctgttcaaggtccaaaagaagcttgtctcagcgtttatgcgagacggagaccaacatgctagctatcatcgccaagtaccaagaagagttaggtctagccacgacccacgagcataggatcgcagatgagtatgcccaagtatacgcagaaaaagaggctagaggaagggtgatc

SEQ ID NO: 287105 - DNA, 375 bp, Glycine max
  unsure (1)..(375): unsure at all n locations
agctttcacattaagaattattaataattgtttgtataattaaactccaacagaaaaactcatgatcttaattctgaatttcggccttaactttcacttgttggttaccacttttctctttgaacaatggtgaagatgatttacaagtaaaacaagctgccagaaatatagagttagacatttctatgtaatgctttcagttcaataacctacaacataacaatagacaaagaaaactatatcaattttttttttgagttagctatacttttatgtcaacattgaattcttagtaaggtattccaagttaaagcaccaacaaacttntttgtctgtctttgatttgtactgtgaatgatatgattattgaaattc

SEQ ID NO: 287106 - DNA, 416 bp, Glycine max
  unsure (1)..(416): unsure at all n locations
tgtaatcgattacacaaatactgtaatcgattaccataacagattttcagaaaatattctcaacagtcacatctttttatgtggttcttgaatggctatcaaaggcttatatatatgtgacttgagacacgaatttgctaagagttttttagaacaaaaaggtcttatcctcttaaaaagcaaaatcgttttatcctcttacaaattccttggccaaaacacttgtgattcaataaggaattatttgggtgctcaaattgttcaatctatctctttcaagagagattacttcttctcttcttctttattctgaaaaaggattaagagaccgagggtctcttgttgtaaagaaatttgaacacaaaggaaggattgtccttgtgtggttcagatcttgtaatanggttttacaagat

SEQ ID NO: 287107 - DNA, 351 bp, Glycine max
agctttgagccaattcaaacgacaataactttttactcggatgtctgattgagtcccgccatatatcgagacgctcgaaattgaatgttgaagctctgagccaattcacgcgacaatatctttttactcggatgtctgattgagttctttaatataacgagacgctcgaaattgattgttgaacctctgagcaaattcaaacgacaataacttttttctcggatgtctgattgagtcctgtcatatatcgagacgctcgaaattgaatgttgaagctctgagccaattcaaacgacaataactttttactcggatgtctgattgagtcctgtcatatatcgagacgctcga

SEQ ID NO: 287108 - DNA, 404 bp, Glycine max
  unsure (1)..(404): unsure at all n locations
ntaacttaatcaattcaaaagccttttgtgcttgttcattccacccaaacgcacccttcttcaaacattcggtcataggacttgctatagtgctaaaattctggataaagcgtcgataaaatgatgcaagaccaaggaaagatctcacctccgaaactgttgtagggctcggccaagtcttgatagcatccacttttgtttgatcaacggatactccatctttagacaccacatatccaagaaacaccacactttcaaccaagaaatcacacttttccctcttcccatagagtttttgtgctcttagggtctcaaatatttgtttcacatgagtgaaatgctcctctatagatttgctatacaccaatatgtcatcaagataaacaacaacaaacttacccaca

SEQ ID NO: 287109 - DNA, 373 bp, Glycine max
agctttacagcagattttagtaatgaccctctaacctagaattaaaataacttaatgccattaacctagggaattaaaaaaaaacttaatggctgagtgtaactgaaattgtggcaaccaaaagtcacccccaacagcctacaagtcagccaccatttggtctcccaaaaggctgatgcctaggttgccaattgggcccttattacaacttgaactaaacctaactaaagcccttttagttgattaacccaaaacatatttttggtcagccaactttacaaggattgggccattatttagacaaactaaacactctaaaattgagacaaagtggtgtcatttagtcctcctccatttgggccattatttggac

SEQ ID NO: 287110 - DNA, 416 bp, Glycine max
tcgagaaaattcaaacgacattaactttttactccgatgtccaattgagtcccataatatatcgagacgctcaaaatttaaaaaagaaactctgagcaaattcaaacgacaataacattttactcggatgtccaattgaatcccataatatattgagacgctcgaaatttaaaacagaagctctaagcaaattcaaacgacaataacattttactcggatgtgctattgagtcccgtaatatatcgagacactcaaaatttaaaacagaagctcatagaaaattctaacgacaataacattttactcggttgtccgattgagtcctgtaaaatatcgagacactccaaattgaaaacagaagctccgagaaaattcaaaggacattaactttatactcggatgtcttatggagtcc

SEQ ID NO: 287111 - DNA, 398 bp, Glycine max
  unsure (1)..(398): unsure at all n locations
agcttctcaaacgcttctagagtcacattcatcgattattacaaattaaaatgtttccatccacttcagtgttctccctcattacttagagaaattaatgatttggtcttgatctaatataatggtataaggtagccaacatataatgcataggatccaaatagtaaaattgtgtaataagatactttatgtatgttttagtttggtttcttatgtttaaaaagtttcactttagtctcttgttctcttttcactctcattttttatttgatcctcacaaacttcacttggagacataggtgtgagggtaacctttntccttttatgaacaaatganaatntgtatgtgacaccattatggacaacatccttatcatactgccaaggccttccacgta

SEQ ID NO: 287112 - DNA, 112 bp, Glycine max
ttgtacttttcgtacaacactgtggcggatgattgaggctggttttccccatcctaaagccttattttaaatgttaataaatgcaactgctttgaaacgctaaggctgacta

SEQ ID NO: 287113 - DNA, 414 bp, Glycine max
  unsure (1)..(414): unsure at all n locations
agcttgtacgattatggtgtacccatcacatgtggtactaggtggcggtcgggcgatggtgcacaacaagtttttccacatccacaatgcgcgcataaacccaccatcccctgttgcccacctccaactgagctcacgtactcccacgtagcccatatcctcgtttctctcaacaccgggtccccatcaatcctcccaagcttccacaatatccaagcaaaacaacattcacacagcacaagctatcacagccaagcaaaacagagcaaaggcagaaaactctgccaaaacaccaaccaaaaatcacagcttttcccactcaaagaccccagtaacaattccttcgatccaatgcgtaaaccgttggatcgactccaatattntactggaagtctatagtgcataagcctacat

SEQ ID NO: 287114 - DNA, 455 bp, Glycine max
tgcttgtggggcttctatggaggttggatctttgagcttttatgaggtcctttaatggtaattttccaccattgagaatggccaaaatacaaggcctaaaagaaggaaaaacctattctaatatttacaaagaagagtggatccaaccttgacccatgggctcaaaaatctaccctaaggttcatgagaaccctagggctttctttagtagctctaacccaagcctcttggactcttctatccaatacccttggggggtaggattgcatcatcccctccaccttggaaaggatttgacctcacttattgtagggatttggtgcctaataatacctattttgggcaccaacaaagcacaaggatttaagctcttatgaaccaaaccctcatccaacaactcctttacttgaggaataacctcaagtccaagaggtgtgacagttctaacaagtgtc

SEQ ID NO: 287115 - DNA, 414 bp, Glycine max
  unsure (1)..(414): unsure at all n locations
agctttgacttgagtcatcaagagattataaatatgttaccatggcataagtttcaaaaaaagatcaatcatcaatcatctttgaatcatctatctttcaatctttttcaacatcatctctcaaacatctttcaatcaatctttcaatatctttctacagaattttctgattcatttctcttcatctttctaaaaagtttttgatcaacactttctcttccaagaaaagttctttgttcaaaaacttgtgctattcatctttttcattctcttctcctttttccaaaagaacaaaggactaaccgcctaaattcttttgtgtctctcttctccctttgccaaaagaacgaaggactaaccacctgaattcttttgtctctcttctcccttacaaaagattcanaggactaacca

SEQ ID NO: 287116 - DNA, 427 bp, Glycine max
actcatgcatgagaacaattctcaagttgcgggacctatctttatatttggctccgactagttttccagattcaagaataccatgaagcgatagagaagacatactgtagattacacacacaacacaacactagcatgtcaaagcataattcttcaaaccttgtaaagaatatctaaagattaataacactcccactaattacaataataatatattaatgtaagaaatacttatttcttttaagtggataacatacagcctcttacaaaattgcgagcaagccacttggttatctagtcgtttctcatacacgttctaagacaatgtatcatattcatgttcaaatcataataagatataccatatcatataagctcctagttagcacgtcgatcctattgatatcaataagctaatgataacact

SEQ ID NO: 287117 - DNA, 410 bp, Glycine max
agctttcataccaacaagctgaacattaattttttttttatcaagttaatggttcattatatgccaaaaactctttcaggattgaataatacttcctccctacctatcaaagaatttttcttgctccagtggaatggaaaatttgaggaagaatgatgagattgtaacttctgatcaatctaagaaccaaatatcactttcactcaatacaaacagtatattttgtatatttaagaacaacaagacatcattcctatgaccaaacacttacatgaaaagaacagaataagaaaatgagaaaacaatacacttgccaagatatgtgggaaaaactacataaaaagagaagtgtaggtattaaaagattcacttggactccaaatgttgaaattggttgatcatgcacatat

SEQ ID NO: 287118 - DNA, 447 bp, Glycine max
tgatccttgaatcttgattcttgaattcatccttcttcttttatcttgaagtgatcttcaacttttcctcttgagtcttgaattgttcttgattccttcttgaacatcttgaactcatcctttgattgaacttttcagttttttgcatcacctttgtcatcatcttttgttatcatctttgttatcatcaaaacatctttgaatcattcttgattcaccatgaagctttgcttctacacaattggcggctaatatcttcttatgatttttgggggcttaaaaacccccccacaaattgcaaaacgccatcacaaatttggagggctggggtaatgcattgttggagcagaagaaatcacccatggaacatttgcatctgcagaccttgatcttctttgtcttcatcatccaagggacctgtacattcattcacatgctccaatacct

SEQ ID NO: 287119 - DNA, 445 bp, Glycine max
  unsure (1)..(445): unsure at all n locations
agaggattgagcttgtgaacactgaacacnaaaccnaacacacaatacccagcgttccgcgaagcgaagtgtggttgcaagtatcgacaggacgcagggagagcaagggcgagtatagtacacaccatagcttcgtaggaggaaagagaaagacatctgacgcatagcatcattggaacagaccgatacaaagcgacaagatatggacctgccgaagaccaagcaacaataactctcgagatctgaaccacggacatgaaggtgccggaaataccaacagagaagacgttcgccttaccgaacggaaagccgggacggaaggtacaatgtaatgacggccccaacgagttaccaaagtgactaagacgtggagaccacgaaagtgaatagccacggtgagaaaaatgaagcgacacacggaacaatggggggccctaacaacgag

SEQ ID NO: 287120 - DNA, 464 bp, Glycine max
  unsure (1)..(464): unsure at all n locations
tataagaacaaaattgccttaatcattttcaaatatgtatgtgatttttgacgcatcaacaagaatcaagccaaggctattgtgcaagcaatcaatggggcaaaacataccaaatgattataatgatggatggctcaaattctcacaaaggtaaaatcatcactttcaaatcgagctttcaaaactatcatgacatgtagagaagaatcaaggatttcaagtcacaaaatgtcaagaacttttattttcaaaacaatntcccattttttgaacatatcctataattcaaagaaaaacatgcaaagtcgtacgtgcacacgaaattgacccanaatattaaactgaaaatccgacgaaactaacaacattaacaaattaacacaactaacaaattaacaaaaccaacaaaactagcaaaaccaaagaacactcccacccccatacttaaacaacacattgtcctc

SEQ ID NO: 287121 - DNA, 357 bp, Glycine max
  unsure (1)..(357): unsure at all n locations
agctttatcctagtacaagtaaaatcaacatattgagcctttagtcaacattagattttatggttttgataaacctatcaaccattagattgtcgagagtttatcaatcattagtctcctgagaaacaaaatcttgatttatagtacaagaggccctaggatgagtcagacgaagctcaccattaatccacatgtagagaaagcttacctctttctgactaaactcttctttaagtcgggtgatatcttcttgaaattgaacattttcttcttgttctcattgtgcataagcctttgattctttagcatggactntcaactcgttaaactcttccaacaatgcatcaactcgctctt

SEQ ID NO: 287122 - DNA, 452 bp, Glycine max
tcaggctgttcaattgctttagattgttgcacatatttcaaaggtctgtgtggtggtcgacagaggagcataaaccatagagtctggcgacaggtgcagattttttattcatggccagttgggttaccaggttaactaaggcatctagtttaccttcaagcttcttagtctcagctaattaagatgaattcgtggctacttcatgcactcctctaatgacaatagcatcatttctggcactaaattgctgggagtttgaagccatcttctcaattaaatttttggcttcagcagggatcatgtctccaagggctccaccactggcatcatctatcatacttctctccatgttactgagtccttcataaaaatattggagaagaagctactcagacatttggtggtgagggcaactagcacatagttttttaaatctctcccagtattcatat

SEQ ID NO: 287123 - DNA, 402 bp, Glycine max
  unsure (1)..(402): unsure at all n locations
agtttgctcgtcttgtggagggagtgcgtccttctttagccattgaccattacgatccttacgataaccaaatgaagtgactgcaccagcacctatagcaaaggaacgcttgacttgaacaaaaggttcatcatcaagaggaatttgaaaatgacagagaaacaaagtgaccaattgaggataagggagaggtgcattggcccgtaatgccttatgcattcggtacctaaccaagtgagcccagtcgatctgacaactagtaagaaaagcccacatcanaatcaagtcctcctcagaggcttgagctaaatttgaagaacggngaagcanaattctaacaataatatagtgcaagatgcgacaatcaaaggttaatgagctggccagcaatctaccggtcat

SEQ ID NO: 287124 - DNA, 454 bp, Glycine max
  unsure (1)..(454): unsure at all n locations
tcaagaataatgacctcagcaaacttcttattcttatattgattctcaataaattggcctcccatttttaatggagagggttaccactactggaaaatccgaatgcaaattttcattgaggcaatagatttaaacatttgggaagccatagaagttggaccttatgtacccaccatggtggctggaaatacaacaatagagaagcctagagaagagtggtctgaagaagaaagaagattagtgcagtataatttaaaggctaaaaacatcattacctctgccctaggaatggatgaatattttaaggtgtcaaattgtaagagtgctaaggatatgtgggacactctactaggtacacatgacggaacaaatgatgtcaaaagatctacgataaatactntaactcatgagtatngaattattangatgaagacaaatgagagtatacaagata

SEQ ID NO: 287125 - DNA, 413 bp, Glycine max
  unsure (1)..(413): unsure at all n locations
agtctttaaagtaggccactaaaccattcaaattaataataataataataatactaatactaataataataatcacaaaatatagatacagttccttattaagttcatgaccttacctatcgttgttctccaaataaaattaaaatttcattacaagacaatctatctttctaagttttaaatggatcattatgatggaaactctaattttaatgatggggcntnngttaaaacatctaaatttgtattgtagttagaatgaattattattattatcctacacctaataacttttcttttatctcacttccaatttttatttatttttttggatcaactagagtatccatagttgagagttagaatgaaggaataaggattaatttcttaacaactaaaatttatttacaaca

SEQ ID NO: 287126 - DNA, 433 bp, Glycine max
tgtctttggagattaatagctatcgtgccattgttattgtcaacttataattgtcttttagataacaccatatttcggtagtccagttgttcccatattgagtatgatgggggggcatgcgttgttctagattttagcgtatgtaatatattgaacattactgtcaacattatgacggaaatataacgttctatattgtcgtatctgatgcaaagtaaaagcccatatagaatatgggttggtttgatccaatccgattttcaagcctggtttgacggatcagatggatcaatctgtgtattttgtcgagctctatgtgagattccaaccataatcaattatcatataggtataaggttaatttgttttaatttatatattcatataaatatttattctaataaaatacagagctccatattcttttgtgtat

SEQ ID NO: 287127 - DNA, 410 bp, Glycine max
tgtttatttgacttatgaaagtggcttatgaattattaccttcccataagttattttcaacttacctaggcttaagggtcaagcttttatacacaccttattaagttgtccactcaaaaacattctacgtcttgttgtaataatttattcaataaacatttttatgtgaagaaaataagaaagtaaaataaattgagtttctctcgtatataaaaatcaacttatgcactcaactttaatagaaattctcttaactggataattgaaatgtataagttaattttaacttatggaagaaactaatctcagtttatcataacttctttttttataaatactcgtggaaacaatattctaactggataataaaaagatgaaatagcatttgtttaatagcagcatgtggtggg

SEQ ID NO: 287128 - DNA, 436 bp, Glycine max
  unsure (1)..(436): unsure at all n locations
ttgtgtaatcgattacacttatttggtaatcgattattagtgtttgtttctgaaaaatctaaagatgtaactcttcaaaaaggttttgactttttaaaatgggttttaagtttttctgaaagttataactcttctgaatggccttcttgaccagacatgaagagtctataaaagcaaggtttttttttttgcatttttgaaacaatctttctaacaacaatcttgaatacttttgcttttccatacaatcctttacaagccttgaatctctttgaatctctttgaacttcttcttcttctttgtaccaaaagctttctgaagttgtctggttgtccaaaccttgaaaacttgngctatttatattttcattctcttctacctttgccaaaaagaattcgccaaggactaaccgcctgaattctttttgtgtctctc

SEQ ID NO: 287129 - DNA, 407 bp, Glycine max
  unsure (1)..(407): unsure at all n locations
tagttattgaactgtctctaacttttttttttagtccaatttaagttntagttataccatttctttcttgtatttatgaaaggagtgaaatttccatgtgttttccacatgtcaaaacatagctaacaggactttgatttaaaagtttgacccttttctcacaacaaacaggttcgattgtaggagtttcttgttagtagacgatgtgtattctttattttaagtttttcatagaggttgatggtttatcctaaatttaaaatagagattcatctatgcctaaacttttgtatatcaataataatattttgttcacagtcttgttattataatctggattttcatatcatctcaattataattgcaattgggaagagagtatgagtattcatggatcggttctgatt

SEQ ID NO: 287130 - DNA, 463 bp, Glycine max
  unsure (1)..(463): unsure at all n locations
acactataaaactaagcttagatgaagctcaaagaaatataatcgttagttacacaaacacttgaaatgaaaacctgataatctagatgctttgaagaaatgagtaacgaacctacacgctatcattcaaattctttatgtagaaaactctttgtatattcttaataagtttgaaaagctctcaaaacatcttgaatactctaagacaaaaaactaaatgcttagatttcacatttgtttgtaagatgattaagaattaatcagttagcaaatcanacaacatatcttctgatttgtatagaaccaacagtggctgggaaggacaaagaatattcggttgttaaagcttggcgataaactatgttgtgatagctaanagtaacagtgacaaatacttgtaactnttgtgaaattagtgaaacttgatggctaaccaaaaactgaacttagtctgaatggtaga

SEQ ID NO: 287131 - DNA, 411 bp, Glycine max
ttttgttgcaagtttatcattagatcagggaatctatgtaaagtagtaaaatatatggaaagttgtaagactcacaagattacgataaacaatctatttaaacaataatgtattgtatatgttcaaaggtgtttatgatatcatgtgtgctacctatctatggactttggcagcaaatcttcacacaaaataccgtaagattgattctcaggtcaagcaagggtggttaaataaagctctctttagagtaatgctccaaagatgataaccttccaacattataggtaaatctttcccggagtcagtttataatcactgtgaccaaccattaacaggtgtatgtgctagctttacacataataattaatgcattttgatatattatgcccgaaattatcatgaaagcataac

SEQ ID NO: 287132 - DNA, 436 bp, Glycine max
tgtattacaagcaggaatgacaatctttcaaggacgtatgagtaattctcaagggagatatttgtggtctaataaatataaagcccaagagagaagaaaatcgaatcacattgaaggaagtatttgctgttcctattttatataaaagaagtaacagaattttgtcacattttgtccatctaacaaaaaaaagtagaaggtttatggtcacttcataaaaaggaaattctagacaagattgtaataagaaaattgcacttgtattctgatacgggatatggagatgtaacatatatataataacagaacgatatgttctttggtgttgctatcgtatctgattatggttctgcatacgtattctacaaactggaattaacatagaatattacggatggaatgcttagaacaatattctttttatattgattgagta

SEQ ID NO: 287133 - DNA, 401 bp, Glycine max
  unsure (1)..(401): unsure at all n locations
agtttatgaaacatacaatgaaaacctggttgctttgtttcgggtacaaggtgcaagtccagataatatgcaggccatccaagttgatcaagtaagtttcaatgattctgactttatccatagtggagccctttttaatatatcttatctctaattaccagaaaaatggatagcaattatcaaggctttcaagcatagctattgaatatggactaaaacactatttcaatattttgttcttattgaatatggactaaaacactaggcacttaagtccaacctattgtgctctattgatgatggtctattggctgatatatatgttggctggaaccaaaataaaattataatcagaataattattnttccatctgtggtgctcanaatggtaactttgaaac

SEQ ID NO: 287134 - DNA, 449 bp, Glycine max
  unsure (1)..(449): unsure at all n locations
tgctcttccatattgtgagtctttgctgaaacttgattataactggttcccaagttgatcagagagttggactaaccccgactggcagtcccaaaaagtgaaaaggtggagaagcaaccctgcatgaaaggaaatttgcagctggctcattaaatctttggtttgtgccaatcccataaaagacactcttaaggaagttaactaacaatccagagaccaattcgaagcctcggaatattgcttttattgcccaaagactatcatgagtcacctgtcccaccataactgaatcatcagtgtattggagaattgagtattggaactcttctccaactttcatacctttgaatagtcttttctccaccgtgctatgaaccgccccgttagaccttgagcagctatcaagaacanaaatggagacaacggatcaccctgcttcaagcctctta

SEQ ID NO: 287135 - DNA, 351 bp, Glycine max
agtcttgttcttaatggatggctatctgacgatcctctagaggcacatcctatagactatagatacatgcagacagagtctcctcctgctcaccacctatgttgagagacatgaagactgataactgcagagagtgaatgatagccgcctacttatcgagacctatagatgtatggaacgccgaggaaagtgaatagattatgccacgtgacagtaagatgactgagattgttataggcttctggacgcagctactatatcctatatcatagttatactactcagcacagaatgtgacgatgtatgctctatcaaaggaataatacgccgaggtatcctttagtagatgtg

SEQ ID NO: 287136 - DNA, 356 bp, Glycine max
taacataggctccgcatacgcgggagcactaagggccatcctcgagtttagggcgtgtaagctagagcgggcgtaacgcctggcttacgctgagcctggctgaagaggcctgctgcgcacaacgcacggatcttgcgctaatcacgcggcctagaagctgatgctcatgtcaaatctacgtcgcgctatgcgcgatgaaaccgtactaatcctgaggatagctagcacaaccatctgttactttatgcacttcataacgctatcaattatccacctgacatggcacataaactatcggtaaaaacaatggacatatgatagagccatccttctacataggactataattatctaca

SEQ ID NO: 287137 - DNA, 405 bp, Glycine max
  unsure (1)..(405): unsure at all n locations
agcttaatctgttttctctgctctttgatcccgtgaaaaaaaaaatggctggagatgaagaaaagcttcgaatagtgtgatgtttccatggctagcctttggtcacatgatcccaaaccttgagctggccaaactcattgctcaaaagggtcaccacgtgagtttcgtatccacccaagaaacatagagcgtcttccaaaaccgtcactaaacacacttgatatcaatttcgtgaaccttccactgcctaaagtccaaaaccttccagaaaacgcagaagccaacactgacatcccctacgacgtctttgaacacctcanagaagcctacgacgttctccaagaaccgctgaaacgttntctcgaatcttccanacccgattgagtcttctacgacttcgctccc

SEQ ID NO: 287138 - DNA, 455 bp, Glycine max
  unsure (1)..(455): unsure at all n locations
tagcttatccatctttgtcccattttcattgtgaggttatttcagcagttatgcaacacttcatatgccccactgtgtgctagtcctaagcttactacaccaagacccaaatttgtgatgtgtaattcatcaagccaaatcccgtgttaccccattttttgttgcatcaatttggttaacagctctaacaaagatgtacactcaatagcaatgccctatgctctaacattaaaaattgtttaactatttttcttttcacaaacaagatatttgagtagtatgtttttgcccttgtaactttttgatacaaaaaaatcaactccagcatggaaaagagggggattttctaacatggcatttgcctaanaatctatacacaatgttggctacgaaaaatcacacagtttccaaactctgaanaagaaccagcaaacaaaacanaagtatgtattgac

SEQ ID NO: 287139 - DNA, 413 bp, Glycine max
agcttgtcaaacacattctcaccattttcatttgctgttaaacccactccaacccaccagagaattatattacttttcttcataacagcattttcagggaaatgtaagagagacaacaagcaacgttttccaacatgatcaagtttgttacaatttacctcaatcatttccaactcctcacgttgtatgctcgaagggagttttcttgatgactgagaatcctctatattagtactttggatttcaccagcaggcagcaacttttgagttgattctcttattctcttgcgaatgtgtccctcctcttctgtcaacttatttatgtttttggtgcgaagatagccatccaggactgttaatgtgtcaaggagttcttcttcatttttcttcactaaaggaaacaggtcctttat

SEQ ID NO: 287140 - DNA, 371 bp, Glycine max
  unsure (1)..(371): unsure at all n locations
cgcgacatcgaggactactagcatagatacttccacctactccttgccacccttcatacctaatatcaaacctctgattacagcttatcatgacacccactgccagacctgacacacacttatagaatgtaaaggagtgatttgagctccatatctttagtcgacaactaatgctaatacctccgtacgaattctattaacagagcattggtattgacgagacgcattgcagaaagtaaacgcccgatccacttcctgtanaattcaaatgttagggtacgattagtcccaacagattgagttctatatcctttcagagacaacgataagaatcagacatgattcctcctcactttatgccttaagaacca

SEQ ID NO: 287141 - DNA, 335 bp, Glycine max
agcttgtaagtatttgttggtataatttgcctgttccattatgctcttaatgtctttagaggttatttcctcgttgacatcttttgtcttgaatggaattgccatgacaggtttattgttactgtctttgatgtttggtagttgatattgtgttgcgggaggtaattccgattggattaactcaccatccttcacttgccaatttgttatgacatttgttgttggatcacctatgatgtcttgtttccaagggtaatctatatcctttctgatggcataagcatgacaccaatcaaagaaaaggacattaatcttgactctctcgacaaattcgt

SEQ ID NO: 287142 - DNA, 428 bp, Glycine max
  unsure (1)..(428): unsure at all n locations
tcagtcgcagatgcaatctcagggacttgcagttccttctgttcctctggttggtccctccggtcctcgagtgagcacaaaggggacttgtgttgatccctcaggaaacgatcctgagacgggtgactctaataggtgcggcttgtacatagaagcaaatcctacccgcctggttgccatggggagagtttatgagggatccactgttgttcataacattcctttgttgcctggccaagtaaaggtgagtgtggaggagcttacagatgcagatgctccagttcctgtacccactgatgaggtttccttagtgggataggcatttcacaccttcctttcttggccgacacatctggtcaagtctttatcacagcaggtacttattggccttactatatgtttcttctttntaaattaattcattaagt

SEQ ID NO: 287143 - DNA, 409 bp, Glycine max
agcttgccttgccccttgatatattcgagggactcatggtcactatgaatgacaaattccttgggataaaggtagtgttgccatgttttcaaagcccgtactaaggcatacaactccttatcataagttgaatagttaagggtaggaccacttaacttttcactaaaataagcaattggatggccttcttgcatcaacacagccccaatcccaacatttgaagcatcacactcaatttcaaaagatttttgaaagtttggcaacgcaagtatgggggcattagttagctgttgcttaagaacattgacagcttcttcttgtttctctccacatttgaaaccaacatatttcttgagcacttcattgagaggtgctgccaatgtgctaaaatccttcacaaatcgtctat

SEQ ID NO: 287144 - DNA, 460 bp, Glycine max
actaagctcgaattgaaaatggaagctctcagaaaacaaattgtcttacttttcactcggattgccgattcaggtgcataacatatcgagacgctcaaaattgaacaacagaagctctcgagaaattcaaatggtcataagttttcacatggatatccgattctgtgttataatatatcgagacggtcgaaattgaacaacgactctagaaattcaaatggtcataacttttcactcggatgttcgattcaggcgcataacatatcgagacactcggaattgaacaatggaagctctcgagaaatacaaatggtcataacttctcactcggatggccgattaaggcgcatcacatatcgagacgctcaaaattgaacaacggaagctctcgagaaattcaaatggtcataacttttaactcagatgtccgattcggggataaaatatatcgagacgctcg

SEQ ID NO: 287145 - DNA, 409 bp, Glycine max
tgtttctcaaggaagctacctagtctatacagagaaacatgaataacacttgttgtaactttgatgaatgagagtcttgtgagacatacttcaaaaagttccacttctctccctcttttattccttcaatttcgtgctcccccctctctctttctctccctctttcttttcctccattgaagcatccttccaagcttcttatccaaggctcatcttggtggtgaagctccttcttctatggcttattccctagtggatggcgcctcctctcacctcttctcctttgtcttccgctgcatctccatggtggaaaatcaccattaaaggacctcattgaagttcaaagatctagcctccatagaatccctacaaaaaaggttccatcaaattggtttaggggttggacttg

SEQ ID NO: 287146 - DNA, 412 bp, Glycine max
  unsure (1)..(412): unsure at all n locations
ntcaaatttaaggtaccaaagtacacaacatattcttttacctactgaatataaattagtcatatccaactacacatcctaataacaaaataaaacaagaaatgggtcttcacttttcttcatttttatactggatctttatcagcagccttccttctagtgaaccttggtgttggcatgaatagtatgggtgctgttggtgggccatccacaacaggtgcatctactattgaagtgtcggaaatgttcttttgtttgggtcttctttgctactggtggaacatcaacaataggtgcagggacctacatgcaaatgccaaacatgaataacacttgtaatatataaaaacaaattggttagtcttaagagaacaaaatatttaccatgaactccatgtcactatcttgtgac

SEQ ID NO: 287147 - DNA, 407 bp, Glycine max
  unsure (1)..(407): unsure at all n locations
agttttaatggagtgaaatgtgattgaataagtagtgaaaatatatgggaatgagttatagataaactcctatgctaagtttgacggttggttaagcttcaattatgtgaaatgcggccattaagttttgtgcatgtaattgctttgagttatgcaatttgttcctttattatttaaattgatctaattgttttttattaagagaattttgatcaaccaagtgctaattatattggttgtgagagaattcaattgcacggttaaattggatatggtgtttaagagatgcttaanaagtggtttattgcttttgtaagtgaattgaacttgttctaaaggaggatgtttatggaaatatgaatggtgtgtaagtactagatngacatgtttttagtttatatattaag

SEQ ID NO: 287148 - DNA, 453 bp, Glycine max
  unsure (1)..(453): unsure at all n locations
tgttggaggacaatcctactcctctctcctcgatctctangttatttcactcaaattagggttccgattctccgttaacattgattttgcacttaaatcaaaatctgtccacgtttcagatttggtgtttgttcgtttagctgaaatatgtttttactcctaaaatttggataactccttttatcggaatgaccagaaagtaacagaatcggtgtttttgagtagtttaaagtggattttaaagcaaccgcgcattcgatttttctttatcttaatatattcggttgaaattgatcaagcaggatgttatctgtatgttcaattcttttgtagctaatatgattcggtggaatggttgaagcttttgtaggtttcagttgttgtcaggtaatattctgttgcatganagtattggctatgggctatattgtatatgttagatggttagcatat

SEQ ID NO: 287149 - DNA, 405 bp, Glycine max
agttttaacaaagcacacaaagacaacctcttcttcatcatcaagaattacttctttgcccttgtagcatttgaccttttgatagagtacatgcttgtcaacaacaatttaaaagctagtttctgatgtgaccaagcacgagaactgggttcccaacataaagggttggcgagtgttgagtcattgaattttgcctaaagaggcttgtgtggatcaaatctcctttttataggtagatagcttcattatgagttttggcccatgatatgataaatcctagttagagaaatttgaactagcttcaggattagccaacaaaatatcttcagtctggaaggtcacgtctgattgagagtgatcctagggaagaccaacattaagtgtgcacagaagacccatcaacta

SEQ ID NO: 287150 - DNA, 439 bp, Glycine max
  unsure (1)..(439): unsure at all n locations
tttgatataggtaaattggtcttcatattaaaatccatctttgaatctgatcgcgataaggaagacgagttatattcatcaaatcaagaccagaatgagacataattaaaaaaaaattaagaaaatgaaatcatcaacttatgaaacctagccaagttaatgacattaacttcttgattgttttgtaattgggtttgttcctactcttcgtttgacaacatagctcatcagtcttgtcctgattttattcagagtgaaattgtaattcgaagacctattcagcgaaatcaaaggtttgatatctttttcctttgtttttttatgtcatggttggcttattcaatatggttttccttctccttcctttctgctaaaaagtaatgattctgcaattcatcctcctctntntatgctcttattcattntcatatacaattat

SEQ ID NO: 287151 - DNA, 394 bp, Glycine max
tgtcttagtggctttgtgaagatgaagaggtaaaagtgactcaacaggttgaggtgtgtctcaccattgggagatataatgacaaggtgctgtgtgatgtggtcccaatggaagcgacccatgtgctgttaagaagatcgaggcagtatgataccaaggcagtgcatgatggcttcaccaactacatctctttctagcgagctgacaagaagattgttctcaaaccgttatctcctcaagaggtttgtgaggatcagataaaaatgagagatatgatgaagagtgagacactcgagaggaaaaagagtgagacacttgagaaggataagtgaggaaagagaaagagtgaaacacttgagagggaaaagagagaatacatagagagtgaaacact

SEQ ID NO: 287152 - DNA, 452 bp, Glycine max
  unsure (1)..(452): unsure at all n locations
nttaaccttgacttggtagaacctcttgccggtttgttttgtttccatgcttgctaaagtgagacaaaagctggtgcaaatcaaaactccgatatctcatgggtggaatggatgaatgcatgaaggaatgcatataacacagatgtaatctacgaatgcgggggtccggggaattcgtccccttcttagacacaatgtctaggggtagcaaagtgccccaacgtacgtttttaagaaggcgacacggaccctccgttggtttgtatacagaagggatcaagacagaacccatatgcgatgcctatgcaaaagacacaatgcgggaatgtacacagtatgataatattcactgaacataagcaaaagggtatatgatacttatgcatggcagtgtaaaaatggcacgcagcgtgtttgctccgtgcccctatttaaggggacctatacggaga

SEQ ID NO: 287153 - DNA, 411 bp, Glycine max
ttcttgtcgccacggagttttccgactatgctcttgtgtggtggaacaagctacaaaaggagagagcaagaaatgaagagccaatggttgatacatggacggagatgaaaaagatcatgaggaagcggtatgtgtcggctagttactcaagggaattgaaattcaagctccaaaaactaacccaaggcaacaagggggttaagaagtatttcaaggaaatggatgtgctcatgattcaagcaaagattgaagaagatgataaggtaactatggctcgatttcttaatggtttgactaatgatatccgtgatattgttgagctgcaggagtttgttgaaatggatgatttgtttcacaaagcaatccaagtagagcaacaattaaaaaggaagggagtggctaagaggagtt

SEQ ID NO: 287154 - DNA, 443 bp, Glycine max
ttatatacacaaaccaaggtaccatgagagtgtttcatatcagatacaagaacaatgctgataagaattacacttactccagtgaacacagttatagcatcttcggccttagaaccatcagttggatatgactcacgccatatctgccaaacacctatcacactaaattttggcaaaaactcaaccttcgacatgacatataaattcttagccacaataaaatatttaaaatggatactgtctatttagaggccactataacaaaagttaagagttcttatctcttgttttagtaatgtatcttcttcgcaagcagaagtgaagataatatattaccgtggagcctgcatagagaggggccattaaaccattgaaaaacccatgaacatgtatattatatatgttaaggactgacgtaataaagatatcccaaatgttttaaa

SEQ ID NO: 287155 - DNA, 411 bp, Glycine max
  unsure (1)..(411): unsure at all n locations
ttttcatgcaagtttaccagaaatacttttatcaacttttacagattaattttgaaaaaatttaatattcaaattgttggtattttaggatcctggtgaacccataaaataaaaaatgttcaattttgatgaaaatgcttgttgaaagctgttctgagtacgtacttcatactacatgtatgttatttaccatatatgatcaaatgaaataaaatagtaaaaaaaaatgcacatataaagtaatgtatgtgtaaattttgatgtaactcattttattaatttcaaaaattaaattcttattagtaatttccagttgataaataatcttattttatactaatgacttaaataacactttaatttacaaagagctntaatttaattggtttaacaggtgcgttaattattaca

SEQ ID NO: 287156 - DNA, 448 bp, Glycine max
  unsure (1)..(448): unsure at all n locations
tcattagagaatcgcaataacaacaacactttcatatacatcattatcaatttcagagagtacattttcagacataaagcaaacgcattgcgatgctatcaccacatcacccgtgtttcatcttctcgaaaccaaataggacttatttgtcacaaggtatggagaagacgaaacacaactaaggtggtgacgacagaacattggaatgtgaggaagaagaggtgcgaggaataggatgtgttgacggcttacctgctaagggagcaaatgcagcggagatgcaaagaggcgcgaggaggcacgaggaggagaacaggtgaggaggcgaacaaacaagaatgcaaggaagagtgcgcacgagagaaaatatggctcgtagagacatttcanatatttttaaatgtatgttntaacatcggtttctactaaaaaccgatgcatttgattt

SEQ ID NO: 287157 - DNA, 402 bp, Glycine max
  unsure (1)..(402): unsure at all n locations
agctgctagcaccagcgatttcaacctagaaatcaagagtagtgtttatgttgcttaaggcttggatagtttcaatttgtgtttgcttatgctcaattatcttgaataacacaattcaagagagcttaagacttatttgattctcaaatccagccacaactcagcaccacaactaaacttcatcataggcatcatgtaggaatcttagaaaacaaaaaaagagttcaacaacaagactacttctaggaattgatttagaacatgttatgaactaaataacatgcatgaattagactcaaaattcaaaagataggctaagaatgacaagtgtatatctaagaatgacatgtattcagaanaagaatattatgaatganaaatgatagaacctanaatcaacac

SEQ ID NO: 287158 - DNA, 444 bp, Glycine max
  unsure (1)..(444): unsure at all n locations
tgtagaatggctagacatgatacatgttatggtttgttttggttcaaggataaaagggatgccccacattatttccatgacacaaatgcaaaaatgatgatttggaaactttatgcaaaactggtcatgcatgcgcttatgcggacgctcaagtgtcaaatttttatggtcaggtgatgctagggttcaggattcatttcctctattttaaatcaacccaatgtttccaaaatatgttcttttatcaatttgtgcattcctccaagtccatttcgggcgtccggngaaatttttacagcattcacccttcaggtgtagacacgttntttcttcaaaaatcggttatgatcaatgaattttttttcaaagaaaagttggaaatcatctcttttcaaaagcatgtcggttnttagctagacaacttattttctctttttccacctt

SEQ ID NO: 287159 - DNA, 414 bp, Glycine max
agcttgcctgcccggtgcagcagtaatgatggcccgagttatgttggggaacggttacgaacccggaatgggtttaggcaaagacaacggcggcataactagcctgataaatgccaaaggaaatcgtgggaagtatgggttaggctataagcccactcaggcagatatcaagagaagcatcgcgggaaggaagagcggtagtcaaagctcgcggttgagacaagaaggtgaaggaagcccaccctgccacataagtaggagctttataagcgcaggtctgggggacgaaggtcaagtggtcgctatatacgaagatgatgttccgcattggatttggtacgaccatgccctcctgatttccaactgtgaaattggcaagtggaagaacgccctggcatttacgcaacgaacata

SEQ ID NO: 287160 - DNA, 428 bp, Glycine max
tgtgtcggcttgtggggccacactgaaatcctcttattgttgcccttcctggactgcttcgtggggagcttcttcgtagccaattctaggttgcctcctagtagcgcttctttaacgtcttgagccagatgcatgatgacgatttgtcgatcacggacacaatacctgctggtacctgcccgggtggttggtcgcctactggtcggccatgtgtcgtacgtaatgctccagcctttgtagatgagctgaggtggactctgcaagtggtggtggtgcatctgttgcccgctactgtgatgccttgccctgtgcctgcctaggggcgtagtacttctcgatgaaagccctgttaataggggcctgatgaccctgctgggggcgatgggcactctatagaactgacagaggcacgtaatcagagctggaaa

SEQ ID NO: 287161 - DNA, 399 bp, Glycine max
  unsure (1)..(399): unsure at all n locations
agctttttctcaaagagatctaggaaggataaagcagctgaaggagcgctgagcaccagcagcgcttcgaggccatcaagggatggtcatttctctgggagtgacgcgtccagctcagggacgaagagtataccgacttccaggagaagatagttcgccggcgttgggcatcactggttacccccatggccaagttcgacccagacatagtcctcgaattttatgctaatgcttggcctacagaggagggcgtgcgagatatgcgatcctgngtgaggggtcagtgaatcccgttcgatgcggatgctctcagtcagtgcctgggataccctntagtgctggaggagggccaggaatgcgagtatggccagaggagggaatcgtccgacgggttcgatg

SEQ ID NO: 287162 - DNA, 452 bp, Glycine max
  unsure (1)..(452): unsure at all n locations
tgtagagctgcattgaggcttaccaaggataggccttgggttttatgaacctatgagactcacaaagggtggatcttgggtatgacgagccttgtgtatgcagcgcatgtgtcgtgttcttgcatacgtgtcacttcatggagtggcacgtgttggagacaaggtgcataaacctgtaggactcaccaagggcagaccttgggttttgtgagccctttggaggatcgacaagggaattgtttgacctgngttttgggcatcgtgctcttgcatacgtgtcacgtactggagatgtaatgttgtgctcttgcatatgtgttactcgtgaactgacatgtactggaggcatggtgctcttgcatacatgttacttgtcaaatntcacgtactggagacttagtgtcatgctcttgcatacatgtcactcgccgtggatggcacataccagagac

SEQ ID NO: 287163 - DNA, 409 bp, Glycine max
  unsure (1)..(409): unsure at all n locations
agtttatacgccaatttttttcaatagtgcttatttcttcctattccaatgatgtatatctgtctgtatctcgtcggcttaacgaattcctaccctccaaatttaatggaaaaaaggacaggtggtgaagaaaatagagtgacagcatagccattcacatgatcattgaatgttataaaacttttacctgttatgtagcacacccaccatgcctactttttttctttatctgtccttttcaacataccttttatatttcaatagctgggaacattcccatattataataaaagtaatatggtaaggatatgacaaaatccgttcacattggtttagaaaattttccactgccggcttgatataatgtattgactntcatttgatgatgccacanaagtccaagtgtttt

SEQ ID NO: 287164 - DNA, 459 bp, Glycine max
  unsure (1)..(459): unsure at all n locations
actcaagctacaagacaaagatggcctcaacaaataccaatcaccttattgaattctatcaatagacctccaatctttaatggagagggttaccactactggaaaacccgaatgcaaatttttattgaggcaatagatctaaatatttgggaagccatagaaatagggccttatatacccactacagtagaaagagttacaatagatggtagttcatcaagtgaaaacataactatagaaaaacctagagatagatggtctgaagaggatagaaaacgagtacaatacaacttanaagccaaaaacataataacatctgccctgcgaatggatgaatatttcagggtttcaaattgtaagagtgctaaggaaatgtgggacactcttcgattaacacatgaaggaactacagatgataaaagatctaggatatatgcactaactcatgagtatgaatta

SEQ ID NO: 287165 - DNA, 416 bp, Glycine max
  unsure (1)..(416): unsure at all n locations
agcttcttatgacttgcaataaaatccanattctgaatacagcccctaaccaaggctatgggaattgaggaatttttacaagaattccattaaaatcgaatatataggcttgaaaaaagaagaaccctaacaacttgtaaatcatgaaattttgtaagttattgggtacttatagctggtcaaagatatatcgcaaagcatgtgcttaacaatgcttgaggactagaattttcgaaaaaattgtcagactacacattctctttcttatctttctctaaattacataagtttgttaaaaaatttccaaaatgttcactaccccgacttccctacagggccttttttaaaattaatttatatgtttaaattnttattntaattntaaatattaaaataatataaatattatagtatat

SEQ ID NO: 287166 - DNA, 458 bp, Glycine max
  unsure (1)..(458): unsure at all n locations
tttgtcactctacccatatctgccttgacattaactatacttaacatcgccgacaacaatgtcaaggaattcttgcacctcggatacaaaggcttctttgaatcagtttgcaatgtaccatacataggggcatgtgcttgctgaaaagactcttgtccaaggtcacaaatcatatcctccaagcgatctctcatttctacatcaaatgattcagattgggatccactctgcatgtctgtcaattcaccatgtcatatccacgttgtataattcttcttaatcccatcacacaacagatgctcccgtatgtcatccaatatttgttgtctcccattcaaacaatttatacaaggacaaaaaaaaatttcgtcctcattcggttgacttctttaggaggcaaattgcaagaactctntgacgccttcctcatatgcagggctcatgtgactntcgttcat

SEQ ID NO: 287167 - DNA, 414 bp, Glycine max
  unsure (1)..(414): unsure at all n locations
agtttcttcatcagaccacttccagggtgctggaactacttcacatggatttgatggggcctatgcaggttgaaagccttggaggaaagaggtatgcctatgttgttgtggatgatttctccagatttacctgngtcaactttatcagagagaaatcagaaacctttgaagtattcaaagagttgagtctaagacttcaaagagaaaaagactgtgtcatcaagagaatcaggagtgaccatggcagagaatttgaaaacagcaggttcactgaattctgcacatctgaaggcatcactcatgagttctctgcagccattacaccacaacagaatgggatagttgagaggaaaaacaggactttgcaagaggctgctagggtcatgcttcatgccaaagaacttccctataatc

SEQ ID NO: 287168 - DNA, 465 bp, Glycine max
tatccttatggctggcctccggacttcaccccccgttctaccccggtttatttaagccaagcccctactttcgaggggcaactcccaccttatgaagactatcccgggcaagacaatgaggaaggagatacccatcttagccccctgctccacctcaaagatccgtccccccatgaactaccccaaccaaacatagtccgccatatcccgacttcacccacacccgtaaaagaatctgttcccttcgtggaagataagggaaagattgaggtgcttgaagagaggttgagagcagtcgagggcctcggcaattacccattctcggatttagcggatttatgtctcgttcccaacatcgtcatccctcccaagttcaaagtaccggactttgataagtacaaagggacgacatgtccgaaggggcatcttcggatgtatttatcgaaagatggaggcgtattctgc

SEQ ID NO: 287169 - DNA, 412 bp, Glycine max
  unsure (1)..(412): unsure at all n locations
tgtttgcagaggtcggtggcagactcaagaataatggaatgtgtagtggctttgtctcatacctccattacacttcatttgtacctgagcttgcttccctatttttattaattttgttcatgtttatgtgtgagttgaatcttccccgcgaggatcaaaagataaaaaaaattgtaaatataagaatcaaaatgaatgtcttaaactatagggactaaaaaaaattatcacaactataaggactaaaagggtaattaaatcaaaattaaataaactagagcaaaataatggtggtgtggttagacacttttaatcctaattgtctccttgtagacatatatacctctacatatgtgntgcatttgcaaccaccaccattagtggaaaaaaantttaaatgcaaacccttcta

SEQ ID NO: 287170 - DNA, 450 bp, Glycine max
  unsure (1)..(450): unsure at all n locations
tgtaagatttgcaagatcatcttccttgacaacttccttgaaaaagattgccgtcaatatgaagagagaacaatttagagagtgatcgaagactttcaaatggatttccactgaatttattcatagagagatcgagatatcttaatgatgaaagttttccaaatgatctaggaagagcaccaccaattgagttgttggaaaaaagtaacgtgtcaatatttttaaatgccccaatatgatctgtcagattgcctgaaagtcgtgaactctgaactgcaagtcttgtgagtccatgggaaatacaaggagcaagaatttctaaaagttcattaacctgttggttgagtttgagatatgataaatctatcacccttaagttgcagagattacccanagaagttggaatgtttccttcaagttgattatgtgataaatcaagttcaacaagag

SEQ ID NO: 287171 - DNA, 406 bp, Glycine max
  unsure (1)..(406): unsure at all n locations
agctttagacaacttgttgtaatcgattacgacaactctgtaatcaattaaaatagagagtttttgctccggaagaaactttttctaacttaaaaagttttcttctcactaaccatgatgatgaataatactatgatgcaacacacaaaataacaaccaatacaaatgccactcaagggagttaggcatgtaaaagttaaaacatcttcaataacttcttcaagctttccttgagagattgttcacaatgttgctcatgtcatgttgctccccctatctctaataactagtgctccccattaagacacattgngtctcanaaacggcttatccaaaaattcttctaaccattntntaagctcggctaactctataagagacatcctataaggggctatgaatatgg

SEQ ID NO: 287172 - DNA, 449 bp, Glycine max
  unsure (1)..(449): unsure at all n locations
tcaccactaagagaatgagaatgagagagggagtaagtggcatggaaaattgaaggaagaaagggagagaagtggaactttgaagtgtatctcacaagtttctcattcataaaagttacaaaaagtggtacacatgcttctatttatagcctaggtagcttccttgacaagcttccttgggaagctagtgttacacctgttcaatagctaagctcacccccatgccaaaatacatgaaggaagaaagcttccttgagaagcttccttgggaagaaagtgttacacccctccaatagctaagctcacccccatgggaacacgcatccctccaatagctaagctcaccccccaaaatacatgaaaatacaaaaaaaagtccatactattgagactactcanaatgccctanaatacaaggctaaaatcctatactaccaaggtacccttaa

SEQ ID NO: 287173 - DNA, 368 bp, Glycine max
  unsure (1)..(368): unsure at all n locations
tgtttttacggtggcaagggcggnggaacgagagactacgcgtgatgggtcaagttcgtccagatctaacaaattgggctatgggtcaaaccgatttgggtcgtctgggcccaataagggagggatttctgattgggtgttagtgaaggggagtaaggaagcaacacccagaacaaatggacctgggccccgtggtgaaaggccgggtcaacccgaaagaagaaatgggccaagagataggggatttacccagctttcttacagcgagatcatggagaggcgaaggataaatcagtgtttcaaatgcgccggtccgttcagttcaacacaccaatgtcctgacaaaaacttgcgattgctaatcaccg

SEQ ID NO: 287174 - DNA, 441 bp, Glycine max
  unsure (1)..(441): unsure at all n locations
tgtgtctttgtttttatattttagaaggggattttattttatttttgaatacgaataacataaaatttgcacgaatttaaacttaaaatcattccaaacataaaaataacattacattaacttcaaacttcaaacattaaacattacattaacttaaatagagttgaaagaaataaaattagcatcaaatacgacaactaagtgatgctaattttgcgacaaggacatattatgttccatttcgattacatgcttactaaaaacaactaaaatttctattggcccaatttttttccagtagttagaatgcactaacaccttcaactgtcatcgttgttttcagttcaataatttcgaatttgataattntatctgaatactcatagtgacttggttgtcgaaaaaacaatcgccttaccgtttgtgtatcatgaatatcat

SEQ ID NO: 287175 - DNA, 409 bp, Glycine max
  unsure (1)..(409): unsure at all n locations
ttatcccatgcttctttggccgtcgttgcgttggatatcttctcaaatgtatcttcatccaccgattgataaatgagaaagagagctttcttgtctctctttcttgactccttcaacgtctcctttacaccttggcttagcaaggcttcatcttgctcctcaaagtcattctctacgatatcccacacatcttgagctcctagtagcgccttcatcttgatactccaattatcatagttgttctttgtgagcatcggcatttggaaaggaaaacctccattcgccatcttttgaggatcttgaagctctgataccactntgttggaaataaggctntntatgtttaggaaaagtgtttaggaatattggagactntgaatagaaacttgataggaaggagaattcttta

SEQ ID NO: 287176 - DNA, 464 bp, Glycine max
actcagctttaagaggctttttgaaagtagatccttttttccacatccctcttttaactaaattaacctccttaaaaataattacggatgaaaataacgcaacaagtaatcaaacatcaaacataattactaataatatatagatatatatatcagggtgttacacatacattttacatccaagacaaagtgtagatttctatgtgtaactgatgctcttggcatttcaatctaacaccctaagttgttcacaccttccaaatcatggttatacatgcacaaactcatttgacaataacacatgtaatggtcattgatgcatttcaccgaacagttggtgggcgcatgtttaaacatgtaaaacatgagggatggagaataatatgacatgcacatgcatagtacgagcaaaggtaggcatatggtcatcccttacagcaccaatcaaacaatcaaagcatgga

SEQ ID NO: 287177 - DNA, 154 bp, Glycine max
agcttggacataagagaactagtctgtcactcattagagaatttttggatgctcatcatatgcattagccgattaatggactaagcatgatgataaacctatctcatgtgtatccattgactatgctactcattctcatgcatacatactgtat

SEQ ID NO: 287178 - DNA, 431 bp, Glycine max
tgtgtattcctgcattctactaatatatggtattgtttattgcttggcctgagaataacaatcggttgaccacaacagcgctgggggcggcaacggacaatggtctttcaaataaacctgctgtacatgaacaaacattatatcatgcgctgaccgtgccaaacgaacaatcgaagtcattgcataattggtacactaactatattgaatgtacctgaacaaaatgatatacaaacacgtgaccgactcatatgatgcggtggccacaagagtcacgaggtggttgacttgtaatagggaaaaatgatatgatttgtagttgggacaacgatacaaggattacgtgataacgtgaagcattcacatatacgatgtctgatatatccatacactatgacacactaacctgaatgaaccacacatacgcatgt

SEQ ID NO: 287179 - DNA, 399 bp, Glycine max
agcttgggaggattgatggggacccggtgttgagagaaacaaggatatgggctacgtgggagtacgtgagctcaattggaggtgggcaacaggggatggtgggtttatgcgcgctttgtggatgtggaaaacttgttgtgcaccatcgcccgaccgccacctagtaccacatgtgatgggtaccccataatcctacaagtttgagatgagcaagtgtagaagggtgaacttcctgcttttaatcgttgaccacagagtggtacctggagatatgtcgcggtggtcaggagaccttgtggacgtcacgtggggtgctattgcccaaaaccaagcttgaccaatcccgacccaacccgggcatagtcagtcagtgagaacctgtgatgtacctaaacaggc

SEQ ID NO: 287180 - DNA, 462 bp, Glycine max
  unsure (1)..(462): unsure at all n locations
aaaactcccgctnttatctagccaagatcatacaaaagtgttactacatatcctaacggtttctaattatatgggccatcaaatctatcatgtgttgacggtaattgattagcccgtgaatttcctcgggggttgtacacacttcagcgatggcctttgctttgactagtagtcgcgggaggtcttgacttccattcaaggtcaaggcgaacctatccatccacatggtcgcttcttgatgtaatgcatcaatcaccctccctcttgcttccttctcggcgtacgcttgcacaaaatcttctactagcttttgttcatgggtcaaagactggtttaactcttccttgtactgccctatgatagctagcatgctttgctccatggtttccaagtgttgagcctaactcctgttggatctagagcaagcagctaactctttctttaagatcatgccatgcaccc

SEQ ID NO: 287181 - DNA, 405 bp, Glycine max
agcttatgactcttggcaatttctttaaaactaatcacttaaaaaagttgtgacttttgaaaaaatcttcagaaacaagtcacttgaagaattgtgacttttggaaatgtatttttcgaaatcagtcattggtaatcgaataccatttaggtgtaatcgattacacatcaacaaatgtgacttttcattttgaattttgaaaatcaaaatgtttagaaacactggtaatcaattacaagtattgtgtaatcgtttacacaagtttgaaatgatttgaaactgttgaaatttgaaatctaacgttttaaaacacgtgtaatcgattactattatctggtaatcgattaccagagagtaaaactctgtggtaatgattgtgtgaaaacttcttgcgctactcaatgt

SEQ ID NO: 287182 - DNA, 448 bp, Glycine max
  unsure (1)..(448): unsure at all n locations
tctagccaaatggacttaccttgaattaattcctttgatttcccttttgagccttgtttccctttccttgttttgaagctcactacaagccttaagtgaaaaaccatgatattaccatatccttaaggaattttggagctttggaattgttttgggaataagtgtggggggtttttgtttcattggacaacttgttttgttggctatgcttcatgatgtattttgggccatacttgatgtacattgtatattggttaaatgttggacatgctgaatgaaatgttgtttctcaaaggctaaaaaaaaaaaaaaaaaaaaaaattcgaaaaaaaattcggaaagaaaaaaaaaaagaaaagcaataaagttgagtgaataagatcttaaatggcacaagaatgatgaaactcttggttctactcttcatgtnntaattttatcccttctt

SEQ ID NO: 287183 - DNA, 414 bp, Glycine max
  unsure (1)..(414): unsure at all n locations
agcttattgtttgtttccatgttcaaatcaaattagtgttttgaaggttgttcttttatcaagtccatgcaaaaacatctaaattcatttggttatttgggaaatccattcattgcttccattctcaatgttttaaaaaaaaaatcactttgttgtgttctgatcatcaaaagtaagtttcaaaaacattggttgttgattctttccaaagaatgttatgtccaagaaaaatttcatgattaagtcccaaaaagagttatatataatctacaactacactaacgtaacaaaatatatcaaagcacgtgtaaatcagacaaaaagacaatctcgcataagttttcaagcaaaaaatccaaaacaataaataagatactaaagtactaaaaattntagtacaaagcgataaataaa

SEQ ID NO: 287184 - DNA, 452 bp, Glycine max
  unsure (1)..(452): unsure at all n locations
ntagccgctntaaactctgcatttagttcatcatcttggtttaagacttttactcctaggccatctggaagaggtcaaggatcacaaagagctgcagcagtggctgctctttcacaagttcttacggccgaaaagaaaaaatcacctgatggttctcctgttgctagcaggagtcctatcactcaaggtagcgctactggtaagaaaaacagttcttgtctaaatatgatgttgcattccctgaatacaatgggttggctgggttgaatattttactacaccctattactttggtttatacttttgaaatttgaataattaatataatcctttttgtttagttctaattatttgatattttttaatcataataatagatactgctagtaaactactaagagtggagctctaagcgctacattgatgtactactaaggggtttattgagattc

SEQ ID NO: 287185 - DNA, 411 bp, Glycine max
  unsure (1)..(411): unsure at all n locations
agcttagctgaattcaaatcaaattgaagttagcttagcttaaccttggccaacttagcggactaaatcagccttagatgcaagggttgggcgctaagtgctcaagactcgtggcttagcacatgaacagagatgcgcttagcgcgaggcttgcgcttagcagaaggactgctttttttcagaaaatattttctgagttatttttcagtcctttttccatgaaattgaaacccttatgttaagcattcaaagataggctgatatactcctatgtacagcttacatagcaagttcctaatgatcaaatgcatganaaacaaacacaacanagattaaaactaggttgcctcccaggaagcgcttctntaacgttattagcttgatgcttttacctctctgggaaatctcatg

SEQ ID NO: 287186 - DNA, 463 bp, Glycine max
  unsure (1)..(463): unsure at all n locations
tactttagctagatgggtcgattgccaaacataaagctaggctggtggctattggattcatgcaacaagaaggtttagactatactgaagtatttgctctagtagcaagattggagactgtaagattgattgtttccctggctagctggagaaattggaaactgtggctactaaatgtcaagtcagcctttctaaatgggccacttgatgaagaagtttttgtggtacaacctcctggcttcatatgtaaaggtaaagaacaaaaggttttgagactgaagaaggccttgtatggcttgaaacaagcacctagggcatggaacaaaaggattgattcctttctcactggttttggctttcagaaatgctcagttgagcatggtgtgtatatcanaacagtaagtgaaactaagattgtggtgctatacttagatgatgatgatttactcatcactgatagtag

SEQ ID NO: 287187 - DNA, 395 bp, Glycine max
agcttctgagggtgcctattgtgtgctgctttttttttatgcaaattcccttacgaatcatccaaattaaggacttatcataacttgacaagtgtaccaaatttgtcacaagtagtaagggactctgcttgtacttggattaatgcaaatcaaatttaaaagcaatggataaagaatttaaaataaagataaagaaatatattagataagataaagatttaaagatgaaaataaaagatttaaattaaaagatgacaaagatagaagataaagaaaataagaaagataaaagattaagataaagataagataaaaatagaaaatatgataaaataagaatgtgataaggttgggacctgacctgccttgtttgcctaggatgtatgagtttatga

SEQ ID NO: 287188 - DNA, 458 bp, Glycine max
  unsure (1)..(458): unsure at all n locations
ttcggctgctgccaaacctttcaatccaggaatgttgtccttgtctcaccatctaaattcagcttccttcacaagcatgtatgatacagatgttagtcaaggcatgcacgtggagcctgtgcttccccctgctgttgctagggtcccttgtgggcctagatcacctctgtattatagaaccaactatacttttcgcatgaaacatggttctactaaaggtcaaacctctatcaaagaaagaagtggatttgggtctccaagaataatgaatccgcatgcgccagagtttattcccagaagtgcttctcaaatagaagccaaggatgccaattcaaatgtttccaatgagcataaccctttgtctgacgaaggcatgccagaaaanaacaagctagatgaaaattttgttgaaatcaaggggagctccacaaaatacagtatttctgaatctgagaagt

SEQ ID NO: 287189 - DNA, 406 bp, Glycine max
  unsure (1)..(406): unsure at all n locations
agcttttcactctatctatttttattaaaactcacataagacgataatgtgtatctattttaagaaaaaatgaaatttttaaaaatactattcaaccttccttgtgttatttgtctatgcacaaataatgtaaggacataaatagctcactagaaatgaagcttccatttgaacttcatttgaaatatataatttgtctttaaatacaaagaaatcacgttttctcaaaaattaataaataagtaaaaatgaaaatgacaaaacaatcttgttcccttttaattnttctttctccttttcaccttttcactaaatcatgtatttaattaatataattaattatgtaataaaaataaaggcatcctanaataaaggtctagtaataatcactttagatgcacttctg

SEQ ID NO: 287190 - DNA, 467 bp, Glycine max
  unsure (1)..(467): unsure at all n locations
tcaattgcagggatggttcacaatctttaccttcatctgcctcgaaggtatttatgccttgtaatacagcccgaatctattcttctggaaacatcccatatagctaacgagggtagaccctatcagcaaccatcttgatgtcagttgccctagatatatgtagactaggagggtatgtcatggcttaatcacacaattacatttgttcatgtaactggcatcagtcttataattggcgtcgacaggtgcaccttctttttgaattgaaccttaggatgttccacttcttgcaaaggttccttgctttgtttgccaaatagttcttgagagatactacattgggagttcttctggtcctttntttcttcatattgcaccaagcttatgaaggagtcaccttagtggagggtcaaacccactattgagtgccaagtgccagtcactgaggaggcatcttgaaaacaaat

SEQ ID NO: 287191 - DNA, 395 bp, Glycine max
agtttgtggccttgttagttctggttgctcagtgagggtggtcattttcttttattttgctgtataatatggccaacaacagaagccaaaatgctaggaaaggaaatcctaatgaaattgctatgactgaactgattgtgtggaatggggtatatatagttttgtaatcaagaactaagcacttgcatataataataataataattttttttttgctaaggcaactagtcccctggcttccattttgttggggttacaaccttgaagtttgaggacttttgccatgacttcatcaccttcaacacttcatccatgttcctcctagtagttgcaggtagagaaatctagcttgatctacaacactcaccaattaatatgttagcctcactactgaa

SEQ ID NO: 287192 - DNA, 455 bp, Glycine max
  unsure (1)..(455): unsure at all n locations
tatgagacacaatctttggaactgaatatttatttttataaatcaaaataacaagggtataaattcttctcatgactcaacaaccctccccatcaaaactttcccctctttccctcattttctattcaaaaaaccttcatcgttaccaccactagcggatgcaccttctatgttgtgggagcaattaccccaccagatttttttttatttgttaatgtatataaaaaaaattccctcataaaaaattatatattgccccattgaattttttttaactcacaaacaaacataagacattcaatacaaaaattacatgctcaagcccaaatcatttaatccaatttcattattgttatagtaacacaaaaaaaaaacaccacacactacacggagcacactgtttcatgtaacatctaanaaataatccaataattatttagataaagaatatctaa

SEQ ID NO: 287193 - DNA, 402 bp, Glycine max
ttcttggatttccttttagtagggaatctatccttcctaagatggagccaaacccagtcaccctcattaagaactagctcttttcttcctctattgcctttagttgaatacacctttgtttggttctctatttggttcttaaccctctcatgcatcttctttacaaattctgacctagattccccttctttatgtataaaagaagtgtccagtgggaggggaatgaggtctaacggtgttaggggattaaacccatagacaacctcaaaaggggactgcttggtggttctatgaacccccctgttgtaggcaaattctacatgaggaagatactcatcccaagacttatggttgcctttcagaagagcccttataagggcggataaagacctattcactacc

SEQ ID NO: 287194 - DNA, 441 bp, Glycine max
  unsure (1)..(441): unsure at all n locations
tgtagggatagtagtaggcattgttgcattcatttgttacttggatcggtcacattcacatatatgaagagaaagaagctcgcaaagagaggtgagtttatgaaaaagtagaatttgacacttaatgatatactcaaaaattagaatgtaaattaactatgagaatgaagagaagttttcaattcttaagtctcattcatattcttccttatattaaattgtgaatgataccaaattggtatctcctacctttatttcagagatgctaaaaatatttcactggaaatacaaaagggagaaggaagatgtggagttatcaacaatatttgatttttcaaccatctctaatgctacagatcaatcttcacccagtaaaaagttaggagaaggtggctntggaccagtatacaaggtagttaaattntacatcaaataagcttc

SEQ ID NO: 287195 - DNA, 397 bp, Glycine max
tagtttacaaaaacaggttctgaggatcttgttgatcctaccttgtatcgttatgtggttggtgctctacattatgctactatcacacatccaaaaattagtttctctgacaataaagttttccaatttatgagtcagccaacagaacaggattgggttgctgtcaagagaatccccgggtatctaaagggcacacttcattttgggctgaaactggaacccaatttttctacaaagcactactctgttcatgccttttgcgatgctgactgggcttcagaccttgatgatcgaagctctacctctggggctgttgtgatcttacgcccaaatcttgtctcttggtgatccaaacagcaatctgttgtggccaggtccagtactgatgcagagtaca

SEQ ID NO: 287196 - DNA, 453 bp, Glycine max
gtcatcctatccaaaatatccaatgcttccttctacttgactctctcttacagaaactttgaatgacagatgtataagtgacaacatttggagtacaaactccacctttctccatttcatccaacaattgcaatgctctttccatagacccagacctacaaaagccatctaaaatggccgataaaatcaccaaattgggcgaacatccatgtagtctcataaccttaagcacagagtaggcctcctcagatcgacccgcgttagagaatccctcaactattgccatatacgtaataagatcaggacaaaggccattggaactcatctcactggtcaacttcagagccgtttcaatgtcacccttcttgcaacacaaccttataaccagattatacatgacagtgtcagcgtggaggttgaaagtgtcctccatcttcctcaacacccacagag

SEQ ID NO: 287197 - DNA, 399 bp, Glycine max
tttttgtattgtatatagcatgtgcctaccaaagaagataatgggcgagttttcttatgcgtattgtactatccagcttgacctttccaagaaagggactttggcatttggtaattttttggtttcattattcaaatttaacttattcctcattgctttgaaagaaaagcaggtgaatccaattggctaaggttcttatccacttccacatgtggaaacgcggcaaatacacattgaatgcacaaaaagttgattgaatgtgatgtgtggaaaaaaagacaaaacgaatacttaaaatataaatactcataaaatttaatgtcagaatatatgaaattaaagataacgttgatatcacacaataatgatgtttggtacatataagtaataaaatgtgct

SEQ ID NO: 287198 - DNA, 453 bp, Glycine max
actcagcttttatgtaattatcggattcaagaagaactctatagttttatacatttaaattgaaattctggtaacatttaaataacatacaagttcagtagaatttctccaagcaaatgaatattctaaagtatattcagagaaatcttgagtaaaaaactgctacttaaattgtagtgtaaagttttttaacccactatctttgttcattggcaactagtataaaaatcattcacatacttaaaccaatatcttaaagaagttccaagtaaacagtctataaggaggtttgagtaatgatgacacgatgcagcagacgcaaggcctataaaaaaatgcagtaagcgtaagaataatttactacaaaacatatgaagcttactagaatgttaaaaacagaaccgcagaacatctaggaggaggttgtaagaaagagcatgatgaagagagtca

SEQ ID NO: 287199 - DNA, 255 bp, Glycine max
tgtttacactgacacgtactgaggattatattgatgcttccttgcgtggatatgtggttcctgctatacattatgctactatcacacactgaaactttattctctcagaacgtatagcatttcaaattatgagtcggccatcagaacacgattgacatgttgtacagagaaagcccctgtacgttaagggcacactagattttgggctgaaactggatcacagattttacacgagcactactctgtgctatgcct

SEQ ID NO: 287200 - DNA, 500 bp, Glycine max
  unsure (1)..(500): unsure at all n locations
agcggctggttattatgatacatcgaattccggacctatantactcagctgtattcttccgagactacgggcagactggacatgcctctcttacagacacatggtgtgacagatgtatgagtgacagcttttggtgtccgcactccacatttgtccatttgatcttccgaactccgatgctctgtccataaaccgcgacctactatagccatctaatatggtcgataagatcaccagagagcgcgaacatccacgtagtctcataaccttatgcgcagagtacgcctgctgagatcgacccgcgttatatgatcccgcgactatggccatatacgtcgtaagaccacgacgacggccgtgctaactcatctcactggtcgcctgatgagccgcatcagtgacgcccttcttgcgaccaaccttgtaccagacatacatgatactgcagaggagagttgaagtgtgctcatttgctcatcacgccagagccatattagcag

SEQ ID NO: 287201 - DNA, 401 bp, Glycine max
  unsure (1)..(401): unsure at all n locations
agcttcatgtcattcaaaagagactacgttgacctaaatgaagactgaacatgcattgtttatctaattgtattcattatgcgatataatttgttataagccattaaaggataattattaagtactcgttgcattaagaaaaaaattagttggtgcaaccaaaatcaattacgcatgtatgatacatcgttgtcataattgacaacacataatgatatgcatgcgtattaaagtttgagcgtgacacgacattgactgacttgacaacacattctgatgcacgacattggtttagtaggaaacataaacacgaaacatattcacgcatgttcttttgtaaaaaaatgtgaagcaatctgtcagtgagaaccatgtatatatatgagacacggaanatgcta

SEQ ID NO: 287202 - DNA, 439 bp, Glycine max
  unsure (1)..(439): unsure at all n locations
nttaattaattaagaatgcatatatgattattgtttgtgtagcctaatgtctctgtttggtttggtttttttctttcaatttttttatggaaaacactaaaaataaattttattgttttagttgtctctgcttcctataaaaacttttaaaaatagaaaataaaataaaataaaaattgaagtaatattttataattaaatataaaccagcacctggaaaattttgttatgtagaaataaggactattgaatatatagcacttgcctctcacttgctttggactctttgttggaccagtgatgtccatgccatgacttcccacatagtaaagttctgccaattntacaaagttatatacctganaaaaataaatcagaaagaactccaattaaatctctcaagaaaagaataaagaatcatntaatcacttccatgtca

SEQ ID NO: 287203 - DNA, 401 bp, Glycine max
agcttgcagacaaatcttcgttctggtttaatcgattaccctatttccataattaattacacaattctattgagaccatgtctatttcttgggtctctgctttaatcaattatgagggtatagtaatttattacattgttcttgaaagtattttcaaaagtgattaagaatagtttaaccgattaaatcaagaatccaatcaatttacattgttcttgaatgcttttcatgtttggggaagaacactttaatcgctttaaatgagaatctaatcaattacttcttcgagataatcgattacattggcaattcaattgattactagcgaatataactgtgtcctttctatatagccaccttgtgttcacactttcaacaatgattaaagaacgagctttcac

SEQ ID NO: 287204 - DNA, 425 bp, Glycine max
  unsure (1)..(425): unsure at all n locations
tcttatccaaggcaattcttggtggtgaagctccttttttcttggcttattccctagtggatggtgcctcccctatcctcttctcctttgccttccgctgcatctccatggtgaaaaatcaccattgaaggacctcattgaagctcaaagatccagcctccatagaagctccacaagcaagcttccatcaagtggtaataagagcacaagagcttcaagtaggtgctccttaaacctccattaattttttttctttaccttctcttccattgttgtttcttcatttttctccatgtatctcctcacatgtcttgttctaaatgatgttaacatgattctttagagtttccaccgattaaacttgctatagaagctagatttgattntctatggttcaaatntcttgttcttgttcttgaaccatg

SEQ ID NO: 287205 - DNA, 415 bp, Glycine max
agctttgatggtgtcgagaagaaatcacatgtttgtcatcatcaaaaagggggagaatgtgaatgtatgtatacatgattttgatgatgtctaaagaagaatcaaacaaggctcattttgcttcaagattaatacaagattgtttcaacaaacaaagccttgattcaagatttcttcaagatcaagccttgcctcaaaatgtagagatttcaagtcatccaaggcacatgtaatcgattaccaatacatgtaatcgattaccaaggcacatgaaagtgtgtaatcgattacacatcatatgtaatcgattaccatagactctgaacgttgggaattcaaattttaaatgaagagtcacaactgttcaagataaacaattgtgtaatcgattacactaattctgtaatcgattacc

SEQ ID NO: 287206 - DNA, 327 bp, Glycine max
  unsure (1)..(327): unsure at all n locations
tggacacggaaatatcgatatatgggacngnnnaagaggggatagctcaaccaccaaaanccaggaagaccccagagagcattttttgttagcaaggaaaggggtggctggtgaggccggagaaccacccatatgcccccgcgagggagggaaataaatactaggggaaaagaataagcggaaaatagatcaacataaaatttggaacaaaagggaaaaggggacagataaatggagggcaaggcacagccaaaggctttacgaaaacggatgaaggaacttaaaagtgaaacaacatcataaaagagaaatatgaggcgagagggc

SEQ ID NO: 287207 - DNA, 411 bp, Glycine max
  unsure (1)..(411): unsure at all n locations
agctttaagttttgattttagttttgatgtgcctcagttgataagtgccttcgaaaatatctagatcaatattgagaatatttataaatttcttgaatcaaattcaattagttaaatatttagttttgattcaagaaataatgaaagttttattataggcccttgaaaatagtttgaggattttgaaaattttaattgatctaactaaccaccattttggatccaggcatttttgtttaacaataatatatatataatttattatttagcagtagtaactagtaaatctatgtttaacgttggtcctactattcaagttaagtttgtttatttagtaatcataaatatattttctttgatccatgaatgataattataatgtatataaattanatacgtaaataattagat

SEQ ID NO: 287208 - DNA, 456 bp, Glycine max
actaagcttcatgttctgacacatcttcttgctctaattttctaatacttgctcctaaaaccaaaacaagaacccaaactgacaaattccaaaaggaaagaaaaaaacattgaagttaactataattcaacctatacgaagagaaaacatgtaatttgtcctaaccaaaaatgctatacaacatgaatgcatcaccaagttacaagcaaacatttttataatgctctaatcctataaaatacgaataagctgattaggtgaaatttagcagccgattggactcgtgcctttagtttgagacaaatgacaatagtatcgaatcttttcagtaaaattgttagtgactatggtacaattcaagcataaaaacgtcgtttccgttgtttataagtcatgtcatacttttataattccatggccatctatgtcgcctaccttcatttcatccagccatat

SEQ ID NO: 287209 - DNA, 333 bp, Glycine max
agtttgcccccttctttcataatttacggaaaagttacggaagtatataagactagctttccttcttttttctcttccttaccacccatattaagagaaatatgcttattgatggatatgggaattgtaccgaagcactacgggtgttccggaagccccgaaagcccattgtgtaacaaaacgggggaggcggttgccaccttaagcaagacaatgcccatagacctggcccgattttgaagattactatttgcaccccccattctacataatacacaccctttgcccctattttccataacattacggaacctcacgaattacgtatcgata

SEQ ID NO: 287210 - DNA, 440 bp, Glycine max
  unsure (1)..(440): unsure at all n locations
cataaccaaacaagaccgcccaccacaacacggaacnaataaccntnccaaggggagnatgagacaacgagacaccgaaaccgcgannaaaaaacccggagacaaaagcaaacaggggaaaacacataacagcagagccccaaggaggggcgaccaaacaaacacaagcccacgaagaacacaagggaaaaacacacagaagacccgcagagcaaaagaacacacccaacagacacacaacaaaaccagaaggggacaaaagacaaacagaagaagnggccaaaaccacaaaaaacagaaaaacagaaggagaagaaaagaaagaaaccagaaaaccacagaagggaaaagaggaaagaacgacaagagcaagagaacagacaaaacagaaaacaccaagacaaaaccgacaacacgaaaaaacgggaacaaagccccca

SEQ ID NO: 287211 - DNA, 307 bp, Glycine max
agcttgtgatatatttactatatacgtgtgagacctcgcttatccctacctgttcaaaaatgtgataaatcactcctcatgtgttgcccatgtctggaacatgtgatgatcttaaaccttgcgcacgtgagagcaaatgactaggtgaatcactttaagaaaccttgtgatggaagactctgagacacaataatctgataggatgtaacattggaacaagagcacctatcgtaactcgcatgacgtatcaaacatgccattcgactttatttgatagacccgaacagactagctctaaggcacaaac

SEQ ID NO: 287212 - DNA, 443 bp, Glycine max
  unsure (1)..(443): unsure at all n locations
aagaagatctccaggatgtggatcaataattaacaactatttcgaaagtgcaaattaggttatgagagccttctttagggttctcaaagcgtattagaggcttcttttcaatggctactagatgtagttaagtctttacagaactgagtgaatgaactaacaatattagaaaattacaggacacaagaaatacctccattattatcagttaatggtacaagagtcttcaagtgcacatgcagtgcatacaataatcaaaatcaagacaagcacaaaacatgcaaaaagtgcacaaacatatacaataaaaaaaaacattaaaaaacccaaaaacagcctgtacagtgaaaaggtgttctcgctctccaaacctccaaacagcgaatcaagcaagcaatngattggtagtggcggatgaacctgatttcaaaattgattggtat

SEQ ID NO: 287213 - DNA, 405 bp, Glycine max
  unsure (1)..(405): unsure at all n locations
agncttgcgaaaagcttgccgctggagctgacccattaaccgccctaggctcttgaccttgaccttgacttgatagaacttatttttaagtgaaggcatttgaattgatcccatgttttactaaagtgaacaaaaatcggtgcgaatcaaaactccgacatcaatcatgagtggaatggatgaatgcatgaagaaatgcatatgacacaaatgcaatttatgaatgcgggagcctgggaaattatctctttcttagatacaacgtcttgtggtagcacagtgcccgacgtatgtatttaagaaggtgacacagaccctccattggtttgccaaagagaggggatcaagacanaacccgtgcatgatgcatatgcgataggcgcaacacgggaatgtacagatgac

SEQ ID NO: 287214 - DNA, 436 bp, Glycine max
  unsure (1)..(436): unsure at all n locations
tactaagcttgttgggcatgccgggttctacaggcgattcataattgatannctaaangtcgccaaaccacttagcagtttgttgaataaagatgttgctattttgtttaatgaagagtgtatggatgcatttaatgatttgaacaccagattagtgtctgctccagtaattatagcaccaaattgggggcaagaatttgagctgatgtgtgatgcaagtgattatgccatatgtgcagtgcttggacaaaggaagggaaaaaattttaatgctatatactacgccaacatggttctaaatgatgcacaagtgaactattctaccacagaaaaagaaatgctggtaattgtttatgcacttgtaaagttcatatcttatctggtaggctcaagagttatcatctacactgatcacgcagctattacatatttgctc

SEQ ID NO: 287215 - DNA, 405 bp, Glycine max
  unsure (1)..(405): unsure at all n locations
attattatgtatatgtgatttattgcctatgcaaacattttagaggttacatttttcactttttgagtccataaaaaaatattttaaatattatacttttttggataatatataaaataacattagagaaacttaatatcatggcttaataacactaaagtttaaaataacacatttttataggtctttaacactcggagtatacataaaaaaattataatacttagatctaagttacaacaatacacaataatattcattaaaaataacaatttaaatatacgataataacgaaaatgacaaatatttgagatgatttttttaaggaaaaaaccaaaatgacattgtaattgatacaagagactaaatcgaactntgtgcattatgaaacgcgcatggacaaag

SEQ ID NO: 287216 - DNA, 448 bp, Glycine max
  unsure (1)..(448): unsure at all n locations
tttattntgatgttagattaaattgatcgttttttctgttttttttttaacactaacattaatgtgtggcaaatgttcattttgataatggcattctctcactataggtgatcaagttagtgtaataaattgacggagatattaatttgatcttaatattaataccttgaaggattaaagcaaaatttttaaacttggataatcaaattaaaccaaaaaaatgaaggtaaaaattatatcttagccatgttatgtcatgcatgtaaaatgtaatagaaaaacgatggggaggggtgttttggagggatgagaagaaatggttgatggggaccaaagttgggttctggggtaacattntgcgtttctactgtgccaagacgtgggtggaggaattttggggaattaatgaacagcagggttggggccacctatctgtcatctttatgta

SEQ ID NO: 287217 - DNA, 338 bp, Glycine max
atttttggagatatcaagtgccaacacgacatcttcttttgaccagacatcatctggctccaattcattagcgggcctaacttcagtgaccaacatcatgggatgtacccagcctttgatgaccgctttccaagttctgctatccagagatctgaggaaggccaccatccttgctatccagtattcataacaggatccatccagaatagagggtctgtaaactgatccaccttctatcaccatgttcaacagacaagatctccctagatctcactcacagataccgagtgccacgactgataccaatcgaaattatgataccaaagccacatgacgta

SEQ ID NO: 287218 - DNA, 380 bp, Glycine max
actcggccttcttctatgatcagattgggaatgcctctaacagcacctttgtcaatgattatcttcatgcctcttaagtgcatatgtccaaatctttgatgccatatattgacttcatcttctttggagactagacatgtggaggagtaactggtttcttgaggtgtccatatgtaacagttgtcctttgatctgctgcccttcattatgacttcactcttctaatttgtcaccaagcattctgactttgtgacagttacattgagtacttcatgacacaactgactgatgctgatcaagctctcagtcagtccctttaccagcagtactttgttcagactaggaagtccttcatggactacctgtaccattccagtgat

SEQ ID NO: 287219 - DNA, 473 bp, Glycine max
  unsure (1)..(473): unsure at all n locations
cgacattctagcaaacagcaaaganaccgcaaggacctgatgaccgccgacacgcaaacaaanccaacaccgtggctacggtatgagcatcacaatgctaggcgcaaggactaccggaagccagaaacacgacaaggctaaaaganggacggacgaccacctgcgacgagacgaacaggcgcaacatacgagcaacatacgcggaactggacacgaacgcaacaagacaagaagacgcacgccgacgacacgcgcgatcataggaaggcgagcagaccaggaaacagccataccgacacaccgaaacaagcgacaagcgcgacacgaatggacccgatatccagaaactgcacagcgagaccagagacacaccgaggagtgaggcagatgacaggcgcatgaccagcaaacccgcgacctgatgacaccgcgaagacaccgccactggactggagcacacggacaacattgcc

SEQ ID NO: 287220 - DNA, 656 bp, Glycine max
  unsure (1)..(656): unsure at all n locations
gaggtcaactgtacaggacacntgacgcaaactcacacacgaccnagacgacgttnacnnnannnannnannaagaggggagngcgnatgatgacgatcggtagcacctncggngacactannagaanacnncanagcgaggccgcgaggaggggcgcgcncncagacagagcgacacagtaataagcaagctcggaacggcgcgcacgaagacgacgcggcacgcggcagagcggacacgaagacgcccgacaacaccgacgccaacaagacagaggaggacaggccagccgagaacccgaagccgagacagacagcagcagtagacgagcacccaacgcgcgacgacaggacggacacaagcgaggcaggcacctgagcaccaagaagccctgaccacgaaagaaggaggccaagaggggcagaagggagcacagaagcgaggggacccacccgacagggtataaccgggggggaccaggggaatagagaaccccaaacgcaccacggaagcgacaacacaagagaagagggcgacccgagacgcaccaaccagacgagagcacgaaccacgggagcgcacaagtgaccggcgcaagcgaagccacaagaaacaagagcggcacacaatgaccgaaccgacccgcgactcgccg

SEQ ID NO: 287221 - DNA, 388 bp, Glycine max
tgtctttacctcatcgtctctcacagcctttagatttgggagccaatccagtccttgtgttcggactctcagccacttacgatagccgccgatgatcccattactgcttcccctaagctctctgtcctttcttcacgccgcatcccatgccttgcgaactccttggagtaccctcgcgttgtggtcactaaaaccccgtgcgatgaaaggcgtgatgctttcgtctaatggcgctcctctcatggggtagccaagctgtcttatggcgagaacgggattataattaatacaaccgcttgttcccatcaaggtaacatttggacatccttcgcatgaagatagtatcttgattcttgcctctttctagcgagggaaccaataaacagac

SEQ ID NO: 287222 - DNA, 425 bp, Glycine max
  unsure (1)..(425): unsure at all n locations
tctatagaaggttcattcctaatttctctacatttgttctcctctcaatgagctggngaagaagaatgtggcatttacctgtggtgaaaaacaagagcaagcctttgctttgctcaaagaaaagcttactaaggcacctattctagctcttcctgacttttctaaaacttttgagctagaatgtgatgcctctggagtgggagtcggagctgtattgttacaaggtggacaccctattgcttatcttactgaaaaactttatagtgccaccctcaactaccccacctatgataaagagctctatgccttaataagagctctccaaacttgggaacattaccttgtttccaaggaatttgtcattcatagtgatcatcaatcacttagtacattagagggcacagcaagttaaacataaggcatgc

SEQ ID NO: 287223 - DNA, 397 bp, Glycine max
agtttaatttcaatcaattcaaaattaaatggggttaagtggggaatgatttaaatattcttaatcgaactcttattaaacaataatgatggtattatattctattaccaggacaggtgtatcattggctttccttgcctttgcaagagcgcagattttctccacctaacgtcctaaagttgcgcctattaatgttcttatctttgcatatatataagtattgttaatgttatttttaatttaaattagcttttttttaataattactgtcaattttcaattataaaaaaatgtcaattttgacaaataaaaaaaaaagaatgacaataacggtgaaatgtttatgcgggttcacaataattaaggatctagaactaacttttatcttctctttagt

SEQ ID NO: 287224 - DNA, 461 bp, Glycine max
  unsure (1)..(461): unsure at all n locations
tgtcaattctcttgtgcagctcgggatcagaatgtgtatcaacttgtggcggagcaggagcagaatcataaaacggagatggaacaagaggaggaggataatgcgaagggtatgcaggtggtccttggtgctgctgctgctgctgctgaagtacaagatgaggcgggggaggggcatgagggtgtaatcgtggaagtggctgttgctgctgctgcacggcaggatgataatggaattgttgcataggggggtgtgcatgaccaggacctgtggggataaaaggagaaccgngcattgacgaaggaaactgctgatgctggcgatgaaatccaaactgctgctgtcgttgcatattagcagcttgtcgttgttgctgagcatatgccatagcagatgcagatgcataatcatgaccctggcgctccataacctcaacagcacttaagaagtagtattatctt

SEQ ID NO: 287225 - DNA, 410 bp, Glycine max
tttcatgcaagcttaaccaccaagcataagctatacctcaaagtttaaccacttggcagaagcaacgaggcttaaccatcaagagcagaagcaaaacaacaattcaatgcttgaccatacatgacaaaagcttaaacaatgcttaatcaccacatacagaagcttacatcatcacaatagaagaatcacaaaatctggcttctatgagaactttttgtgacaccctctacccctcacatatatactgataaaggaataaaaatctaaatattaattaatagtatctttaaatacaagcctttcaaatgggtaaaaggctcatattcactttcttctacatcatattcacacttgtccaaataaataataaagatatctcggtttaagcaagaccgactaagacttcatac

SEQ ID NO: 287226 - DNA, 433 bp, Glycine max
  unsure (1)..(433): unsure at all n locations
ccgcttcataggtggaatatgaaccaaaagattatttcatgttctncnagnatgactgccacattgtgtggaatttggcttctccaatttgcatattatggcaatcacttcgaatctgtaaaatccatgcatattgatagcttgcaaaatctaattagtggaagtaaagggaatgactactgtcaattctgcccccacccccttttttccttttctttttctaagatctattttggttcatttgtgtatcacttatattgggtttttcgttcttacagcttcagaaatgaaacttctggtagcaaatgaataatgaaagaatntctgatggtggcactaagagccacaagagaatatcctagggtctaaaagtctactacagagaagataaaatgctgcatttaagatatccgtcattcatatgtgctccaca

SEQ ID NO: 287227 - DNA, 400 bp, Glycine max
agcttattccaagccacgattgatcagatggatactgctgcttcaagaatttgatttagtcatcaaggacaaaaaatgttctaaaaatgtggtagcagaccacctatccagattggtgaatgaagatgtcacttcaaaagaggttgaaataagagataaatttcttgatgaatctttgtttctgattgcagggagaccctggttagctgatatggctaattacaaggcagcaggtgtcataccaaaagacctcaattggcagcagagaaagagattcttctatgatgcacacttattcaaagtaagtgtagataatctccttcgaagatgtgtgacaagtgaggaggccgacggcatattgtggcattgtcacaattcaccatgtggcgggcattatggc

SEQ ID NO: 287228 - DNA, 445 bp, Glycine max
tctcgtcatgactgttggattaaggcgatgcttactgtgttacatgctcttcaacagaaccaaacttggactcttacctctctaccaccacataaaacaaccattggttgtcgctaggtttacaagataaagtatcatgttgacggctccgttgaaaggtacaaagcacgcctagtcgcgaaagggtatacccaaatggaaggtttggactttctagacaccttctctccggtagcaaaactcaccactgtgcgtttactcctcgccctaactgcacttaataattggcacttacgacaactagatgtgaataacgctctccttcatggcgagcttaatgaagaagtctacatgcacattccttagggtctttctgtggataatcctcatcttgtttgtcgccttcaacattccttatatgggctcaaacaagccagtcgacaat

SEQ ID NO: 287229 - DNA, 658 bp, Glycine max
  unsure (1)..(658): unsure at all n locations
gatcgagacacgngtcgtccggttaagcgagatacacgaacagacaaaggaccaccaacnannaaagaagcagganttgagacgcngntacggcannggncaacaacnnaaancgcaggcgccganacaanacaggcncaccggcaaacacaacaatgtttgcaagcaggacgaancncccacacgcggaggaggacgacacagcagcaaagacacgccaccgcacngacancgcaacaacgaaccgaagacagaaaacacagcgaagaagggccggcgagaacgaagcgagacgaacaccacanaggcaacgacaccgacgcgcgacgcgacnacagacaagagcaaccagcgcagcagacggaacaaacaacaacaccaaagcgcgcaacacaacganacgcgggcgacaggagcagacggacngacaaacaacgnaacggaaggggcaccacgaaagaagaagcaggaggcacgccaacaccccacgaaaacaaaggcgacgcaacacaacaacacggaacgacagaagcaacccngaggacaacgcacaggcaacagacggcacngaagcgcgagngccgcagacacggcaagagaacggacgacggaccgaagagcagacgccaaacaacagcgacaaacgaggaagaggccc

SEQ ID NO: 287230 - DNA, 492 bp, Glycine max
  unsure (1)..(492): unsure at all n locations
ggacgttttatgtgcttgtttccgcgcctcgaatctaagtgggaccgggtcccagactatatcgaccgacgatttattgggaccatggtcccagactaataatcagaccgacgatacgagtgggaccgtggtcccagtctgattatcagaccgacgatacgagtgggaccgtggtcccagactaataatcagaccgacgatacgagtgggaccgtggtcccagactaataatcagaccgacgatacgagtgggaccgtggtcccagtctgattatcagaccgacgatacaagtggaacagtgggcccagagagaatattcaggccagttatgctttctggcctgtaacaaaggacattaagtaaagacagataaacgtagactaaaacgtggtcgcatcagggtgctggctnttcaagttccttaagaatgggcctcaatttctctatacactcagttggaacacgagacctgtccaggttaagcaccattt

SEQ ID NO: 287231 - DNA, 412 bp, Glycine max
  unsure (1)..(412): unsure at all n locations
agcttggttcaaccccataacccagagaatggcaattttgatcgccaatacttcaacaacatttcatagggatgaaagactcgagaatacgcatgctatgcatggaaaatgtaattatgagattgagatgcccgaagagacatcctttcttaattaaccacgcattaggtaccatgctcaatcattttgttttgttgtttgtgtgtttttttttttaattttagaaatgggtttatgatcccaacatggttggctcatggtacctaacacatgcaactaagaatgcatcatgaattttcatgcttcctttnttttttgtttttgttttgtagaggaaaataaaaacatgtagaacaaaaagtatgttgaacgcatatgcatgatgatgcaatgactcatgcacaatgggaat

SEQ ID NO: 287232 - DNA, 539 bp, Glycine max
  unsure (1)..(539): unsure at all n locations
ggagccacgaacacacaagcaattctagacacccacccgcacacaagcaatcaananatnnananannaagagnnggggnnnatgatgactcgaagcacgccgacaaccaanacnacaccgcaggcnaagacagaccacacgaggcggaagacccaacttacaagggcgacccccgacaggaagggggagagacagacctggaacaaaccggacaccagcgggacggcacgaggcacaagaacacagacgaggaccgaaacaggcgcggaaagaacaccgcaccgaaagaacaccacaaacaggcgccaagcgggcacaaaaagaaacaggaggtgacgccaagagagggcccagaccagaaaccaggcacaccgaaaccagaaacgtgcggaaaaagggggagagaaggatcgcgagaaagaagaaccaccgggacggacagagacacgcggaagccgagaaaccagccaaggaacaagcaggaagcacgggcaggcgcacggcaaactaaaaaccagcacaaacaaggaaaaaccgc

SEQ ID NO: 287233 - DNA, 406 bp, Glycine max
  unsure (1)..(406): unsure at all n locations
agttttgctaatgttgactgctgnggataagatcatgagtgtttggagggagcagtttgtgtcctatatggatgttagttcaaggaggtgatttgttgggctgtgacctaaatccataaagaagtttattctgttattttttgttttgttttgtcatctacctatataaggcaaggatgtcctgtatttcaaagatagaataagcttccacttgtatactgcaactataataaaagctttctgtttttccctcccatggatgtagcctttctcaaggtgaaccacgtaatcctatgtgtgttctttctcattcttctctctttcacctttgctgcacaattcggtgtgtatgacatttctggtctactgcattntctgctgntgntctttgcttgtcttcatcact

SEQ ID NO: 287234 - DNA, 458 bp, Glycine max
tagcgcgttcttctgttggattttaggcttagcgcgtgtgttgcggcttagcgcgttcttctgttggatcgcaggcttagcgcgcgcttctgttggatcacgggctcagcgcgtgtgggcctgcttcagattttcttcttttcttcaattttctggcctttttgcttgttacacctccagtttttatatctgcagccaaaattcaacaaaatatcaattatttaatatttaagcgcaaataactgctaaataattatttttaaagacaattttgccttattttctattatcaaaatacatttatttagcagttatcaacatgcttgaattattaattgtattttcctttgcatgatcaaatgagacttaataaaaatgcttgtatgtgccttgcatccttaatgtgtgttataccatacatccactattgagtcatgagttatgagactggccatctc

SEQ ID NO: 287235 - DNA, 399 bp, Glycine max
  unsure (1)..(399): unsure at all n locations
agctttattcccctaggcaattgttgtagtggtttatcaccaccagaatgttgttgtagcagttttatgcaaccagaaaattttctctgctgtcattgttagagactaaagcttaactttcaagcatgtgtaagaactaaaatttacaattttctcgaaactaaactataaaatggaaacaaccaagggggaagatgaataatttaacatcaattataacataccttttgaaaattagtctccgcatcattttcttcttccgccttgatgatatctgtgaggtggtcaatcaggttcaactcccacgtatttttctgattaattntctgcaagcacacaaaataaaaaaaataaaaaaattatttcttctttttgtttttttttgtggggggggggggg

SEQ ID NO: 287236 - DNA, 460 bp, Glycine max
  unsure (1)..(460): unsure at all n locations
tagcatcaatgtatataggtgctggatgattccattgttatatttcttacaataatatagtaggaatattggattgtctccttcagcaagaagtttatagaagagacaaggcacagtgtccgtaaaccgacacaagtggctccaaaagacatgaaaaagatagaaaactagcatggacttgtgtggatcacacaatgatatagataaatgtggtaatcaattaaacttaaactcacgtttttggctgctgagctgaaagcctccctgtggctgatatctggattactagccttaatcctttgaatttcctccctgcaaaaccagacagttgaaaagacttactatntgtttttgctgaatggaatcatctttagtctattctcatgtttgattgtttattntttatcttttgaaatggaatcacctatatacctgtatattctaatatattnttttaata

SEQ ID NO: 287237 - DNA, 337 bp, Glycine max
  unsure (1)..(337): unsure at all n locations
tgtttccattatgatgaaatcctcccaaggagaggacccatcaccaaagccatggctaggagactccaagaagattcggccagaaatacaggagaaggtcctanagttctcatgagccttacggtagattctgngtcaatggactaagtatgagaccacttatttttgtacatattagtttagggtttcattatttttgggtcttgtatttacggctccatagtgtagggagggtaccctaataatgtaggatttttcaacccttgtattttagggcacttgactagttttgtataagggtagttttgtaatttacatgcattaagtgcactatttg

SEQ ID NO: 287238 - DNA, 471 bp, Glycine max
tgtagattcatcctaactagaccctaacagactcttatctctaacacactggtatgctacccatctcacctcatgagcatgctcgcggctactctcgaactgccacaagcatgccattctgcatggcatttgtcgtagcactacaagatacctttggggcaggacgcttgtacactatcgagagaggagccactaccttagctgtcctgcaccatacacttgctacatgacagacacgtgccattgagtctcctgcatgcaacaactatgttctcatacgcggtatgtgcagtatggaagaccacatcaggggcacatctttaacaacttgcagtgatgccatatacgagatacacactggacatccgtcagcgactgcagacgcgaattttttgttgtcttttctgaattcctttctttcattggcgttggcaaatccaatgcaacactatgatcaatatcaccagctat

SEQ ID NO: 287239 - DNA, 406 bp, Glycine max
  unsure (1)..(406): unsure at all n locations
agtttggttcgaggtacttacccgtcgaagatcgaagaacgatgaagaacgaatgaagaacgtcgaagaacggttgaaacctttgcgaaattcttcacggaaaacgttacaaaaacgtttcggaagcgcgtcggcttagattttcttcacggaaacaatttttccaagcaaattcgaaagagagagaagtgcctaaggggctgaacccttttcttcttcacttcctcccctatttatagcaaaataggggagatgcttgccgcccagctcgcccaggcgagctcagctcgcccaggcgagccaggttgcttcctccagaagcaacagccttctggaggaatattctggagggcccaagtgggcctgggtgctatttgcacccncatttttactaagtacacccccc

SEQ ID NO: 287240 - DNA, 454 bp, Glycine max
  unsure (1)..(454): unsure at all n locations
tgcatgatttacattctccccctttctcaagcaatattcttaattcttcttgacatcatcaaaatctttatgatttacaggaagagcctccggcacgggctgaaaagcttgagtgatgtgcatattggtgggtaccgtgggaggtttactgcgacttangccacgcaggcattgaagtgacggcgtgggcatctccctccttcctctttgccccagctattccagtcctcctatggctggtaccggcaggggagacgtaatcaaatttccccctcttcaaacccactccgatcctttcttcggaggataccaagtccgcaaagctggagggcatgtagcccactaacttctaatagtagaatacagacagggtatccactatcattgtaatcatttccctctcgaccatgggaggggccacttgtgctgctagatctctccaacgttgagcata

SEQ ID NO: 287241 - DNA, 389 bp, Glycine max
ttcttctatgaactacaattatgaatagagaattggcggtaaggatgcaacttcaaataaacccattggccttctgtgaatgttttgtctgtgcgcttaagattgctctgttgggtcatacgattccttgctcgaatgagatttgttttcagtagctacaatatctctttcttttgagaaagtaattcctctaacaaagaaattttggacacactaagtacatgggaggcaatacaaggaggcaatatgccatacaacggttcacatagggacatacctatggctgaatgataggaggaattgtaccaaaattcagccaatgggaggaaacggatccaccattgtggttcatcactcacaaagcaacacaagtacgtctttaaacatct

SEQ ID NO: 287242 - DNA, 459 bp, Glycine max
  unsure (1)..(459): unsure at all n locations
tcttatccaaggctcatcttggtggtgaagcttctatttcatggcttattccctagtggatggcgcctcctctcacctcttctcctttgtcttccgctgcatctccatggtggaaaatcaccattaaaggacctcattgaagctcaaagatccagcctccatagaagccccacaagcaagcttccatcaactttagacaaattcttccggttatcccaagaggatgtcgttcagacataatcaatgcaaaaatcaattcatcatacctttggggcaatattgtcatgtgttaaggctcacaagaaatatgtgtctacaaaatggtccaaacaatgatagtgaaacaaagctcanagaattttctcaatggcttttagatctgggtgatggaatagcttagccaaatgatggttatgcatcaatacaaattcctaaatcacttttgacaacagagtttga

SEQ ID NO: 287243 - DNA, 368 bp, Glycine max
  unsure (1)..(368): unsure at all n locations
attttcgagacttatcctgacgacacccgaggatccagataaatttcacactttataaaacgtccattcggaattcgttggcctccattgtgagggcaaaggttttgtctatctccggatttgctcaccttgagtctgtgtttgttgggagagattttggcatcgaggtaggtttccacggcattgtagatttggttgtttacgaggccatcgaactcatcgatgattanggttatgtccaacgagaagcgcgagaacatgttgcggatgtcgttggtgatgtaggactggagcaccattgtgctggcggtcactgatgccaccgagtgatgcaatcctaccccccatgggcattggatagaagactc

SEQ ID NO: 287244 - DNA, 423 bp, Glycine max
  unsure (1)..(423): unsure at all n locations
cgacttanatccactattctttgtcctaccaagttaatgttgtttctaaatagattaataagatttgttggaattttgcacactgatcaaatttcttatcatcttacaaatggatatcactcggtactattagtttttttctcttaaggtatacaaagtgttctgagaaattagtatctttacaagaatttacataaagctttatatgaaagaatgaaagagtttgttcacgtagatgattcgtatcttgattttcaaagcttcttctatatatagccttcatcttcaagtattatttgtctcacaatggttggattcttcactatgatctatgatcgatgtcttgagtatgatggagtatttaatgcttgcattagatgcatgtcgattcttcatacaaagtccatgctaataggctaacat

SEQ ID NO: 287245 - DNA, 308 bp, Glycine max
  unsure (1)..(308): unsure at all n locations
tgtttgagatgaagaagngctgacaggcgaaacttcctgctgttattgctgaccacagagtgggacctggagatatgtcgcgggggtcacgagaccttggtgactgcatgcggtgtgctattgcccataacctaacttgaccaatcccgacccaacccgggcatagacggtcagcgagaacctgtgatgtacctaagcaggcgagctcctggcagtcatctgatataaggaacctagaccactaagcaaggatgctcgtggtggctggccagctgtgaatttagtgagacatgtggtttgtgcgctct

SEQ ID NO: 287246 - DNA, 366 bp, Glycine max
tgaaacaagtgactaacaacaattccttctctattgctaatgtttacactgcattatggagacagacatggtttcttcaatactgtgtattcacgtgaatcccaatatatataccaattgaggcggttgccttctgaacgggaacggaggtttcagagcatcaccgaactgttcaagtgagacatcagcatcggcctcgatgaacatgacccgcttgagagtctatctcagataggatcgtaatttcgccattataggtgatattagctacacataggtagcgtgactcatggagtacgcccagcgttattgtataagcatggaatcgatcaatatccacatgtgtggacaaagaatcttgaaagc

SEQ ID NO: 287247 - DNA, 407 bp, Glycine max
ttgcttgcaaacttgatcatcctgagataataggtggtcattctcattcgaagtggatggtgcaacatatttctttggcctaatactaacttcaacatttttacagcttctaatgttatgattggtttggccacaccttccacatgtaaactcaaccaatttcctctttaacttatgtactgagacattggcctcatgtacagatctccttctatatttcattggccttcctgtatggacccttttatgtggaggaacagggcgagtatattgagtctgggtccaatattgcggtccttggactgggtcaataaaatgctggtatgtcttatgatagacttctattgacagccactcatgacacgtgtcctcatgcttccctcctttgagagttattgccgcaatgg

SEQ ID NO: 287248 - DNA, 364 bp, Glycine max
ctcagctaagagaatcccagaaggcgcctcagtgttctcacgtaaccgccaacgatatttggtgcatcaagaggcatagaagttgatacgaacaaagaaaaggcagtccaagaggcaagtgttggatcacgtggcttcgaaataattaataaggaggggctgaattaattatgaacgtatcttgactaattaaaaatttatccttcttaatgttactagattcaattatgctttactactaagttatgagaaagtacagatcagaaacactaacttagacacacgtaactgcgtaaataaaatgcacacagcggaaaagtaaagagggtagggaagacgaaacaatacacaagttattatactg

SEQ ID NO: 287249 - DNA, 388 bp, Glycine max
agcttgagatgaggaaatgttgaagggtgaaacttcctacttttattgttgaccacagagtggtacctagagatatgtcgcgggggtcaggagaccttggggacgtcatgtggggtgctattgcccaaaaccaagcttgaccaatcccgacccaacccgggcatagtcggtcagtgagaacctgtgatgtacctaagcaggcgagctcctggcagtcaacagataaaaggaacaaagaccacaaagcaaggaggcttgtggtggctggccagctgtgaactttgattgatatgtgggttatggcctctggtaatcgattaccaagggtgggtaatcgattacaggctttaaatgaaacaggaggctaagaggtctctgtaatcgatac

SEQ ID NO: 287250 - DNA, 453 bp, Glycine max
  unsure (1)..(453): unsure at all n locations
tccacaatatccaagcaattcaattccaaataccatgtaactatcctaaaccaagaaaacagggcagaggcaaaaaactctgcccaaaacatattcacatatcacagctttccttactcatatatccaagtaacattcttttctttctgatttgttaaccattggatcgacttgaaaattttactggagtttcctagtacataaatctacattttgaccgttgggatctgctataaaatgtctagaacccaaaatatactacctttcccataaccagcaatgcacaagcatttttctgcacacatcaaaaatttgttgcacaattcaacagcatttttctgcataatagggcagatttcgaaatccatcttgcccacatccaattnttctcanatnggatcctacaagtcctaaatcatgtataaatcatatttaaaccaaaaacaagcatca

SEQ ID NO: 287251 - DNA, 411 bp, Glycine max
  unsure (1)..(411): unsure at all n locations
agcttagctagcaacgatatgaaacaccggatgccatattttctgtttccggagtccaataatgaagagaacagagaatcaaagtaatcaatttatgtctatttcaacgttagagatcattgcacatttgtagcatttcttttacatttttgtcatagttaatgttacaagaaaaagagagactccataacaacaaaaaagaagagaaaaaaaggaaacagtcgtgtaagcatgatataataaacttagtatagaaataaaaatattattgctaaataaattaatttaaaatgtccagtaaaactaattattttataaatttcctattntaatgattaaactntatttattcattattctggaatggcctaaacggccaaacaagacanagtancctttatataatcacta

SEQ ID NO: 287252 - DNA, 438 bp, Glycine max
  unsure (1)..(438): unsure at all n locations
tctgcattgaaacttgcaattcttggaggtccatacatgtgtatttttcctggtttgcaatttttccaatgttttttttttcagtggaggtggtgactactgattgtgaataatacttctgggaatttggattttaaccaaaaacaatggtatcatgtaattcatgtatttgacatcacctgggataaaatcatcatgtttgttgttggggagtgactattggttgattatggtaatgttttgttttgttttgttcactgttctgtctttgatggattctgttgtaacttgtaatcacctcttccttttacttaagctgtgatttatattggtaaaatggtgttgatttcttatcaagttattctgatatgtaacagaattgcaatggaatggattttcaatgatatttntaagttnttgcgtgttctagtttcttca

SEQ ID NO: 287253 - DNA, 398 bp, Glycine max
agcttatgttgggcaacaatgatgtaaaaaaaaaaatagaaagcaaattcgccaaaggagaacaaagtaaaaatagacaaaagatctccaaattttacaaggaaggcacaaaagtgcaataaggattaatgtataagacaaatggagtagagcccaacccgaaaaaattggaatgaataaaagtgcaagaaaaactctcaaggttcttactcaatataacccttaaactctctttgagcctctttgatcctttctttcatagccttcttacccctgaccacgttacaacgccaataaagtccatgtggatcaaggaatgactaattttgcttttgtgtttggattctggaatggaatccgcacgcttatgaatgtaaaaaaataaaaaaaataaaaga

SEQ ID NO: 287254 - DNA, 457 bp, Glycine max
gtgtcggaagttgtgttctactgcctcgatggattgttctttccacagagttgggtcctataatctgttgtcctaacctaaagttgaccacatgaagtgataaccgttaggtttgagcagtgataatttgatggtgaaaaaatgagttacgcatgatagccaatgtcttaaatcattatacattttatgacatacatgtgtaatagaaggcttttgaaatatacgaaagcaactactttagtggttcaccatacgtggggctaaaggctaattgcttcgaaactgaaagtagttataagttccttagaaaaaaaacctgtaaagcgtgttttcttgctcccttttctttcttttagcatttttaacatgctatattgggcactagcatttggtacctttaaatggaggtttattattatctagctacattcttatgtttgactgatgaaagtgcatg

SEQ ID NO: 287255 - DNA, 406 bp, Glycine max
  unsure (1)..(406): unsure at all n locations
agcttatttatgttaaacttcaatctagatgggatgaacctttttttattactaatgtttttccccacagtgtagttgagattataaatgaagttattgacaaagtcttcaaagtgaatggtcaccaactcaagttttttcatgagagcccccaagtggaggaagaatttgtggcgaacctctctttggtcttgccaattttatgtgattatgtgccttgaatgacacttgaggagtttcctttccttttcttttatatgttatctctttgtttgcatttcattacatgctcacattgngggacaatgtgcatttcaagtgtggtgggaaggtttagataaaaaattggttggttcttttttacgtttctttgtatttggtttattagctatatctattcttctat

SEQ ID NO: 287256 - DNA, 287 bp, Glycine max
atcctaaaccaagaaaacagggcggaggctaaaaactctgcccaaaacatattcacatatcacagctttccttactcatatattccagttacattcttttatttctgatcagttaaccattggaacgacttgaaaatgtaactggagatgactaccacataaaactacatcattgccgatgggatctgctataaaaagtctagaacccacaacatactaccttatccataaccagcagtgcacatgcatttttctgcacacaacaaagatgtgttggacaattcaac

SEQ ID NO: 287257 - DNA, 374 bp, Glycine max
  unsure (1)..(374): unsure at all n locations
gcatgatcaagacaatgcctattgaacctgatttatttgtgtggggtgcattgctggctgcttgtagaaatcataggcatgtggagctcgcggaagtggctgctatgcatctaatggaattagagcctgagagtgctgcgaaccctcttctgctgtccagcgtatatgctgatgctggcaaatggggaaagtttgagagggtcaagaaaaggataaagaagggaaaactgagaaaacttcaaggtttgagttggatagaaaatttataacattatangtacgttggttggtagaggccatangttttgcttcttcatgaagagaagggcacacctactggtataatttttgatgtatcgnttgtgctcctcatg

SEQ ID NO: 287258 - DNA, 446 bp, Glycine max
  unsure (1)..(446): unsure at all n locations
tctagtttgttatttcatctctatccttctaacttattattcttatactgattgacgcttcaagagttttacaccggactttactattctttgttggtttgttttacttttccattaataaaaaaacacatcaagtcacaaataacttttaagataattattctaaaagtcaacaaatttactatatgacgaattgcgattgaatgataatgtaaaaatattttataaggatgtttatgagtctgaattaatccatgatccaaccctgctcaatatagatccaattatattcggattggataatgggttgtaaattgtcaacttgtaatccaatccgacccggtcatataataaaaaatattaatattattaataagaatataataaagactaaattatgattttgattntttttaatttttaaatntatgaatttggtctcccta

SEQ ID NO: 287259 - DNA, 409 bp, Glycine max
agcttgtacaatcaccatagccatgggtcaatgattgattggtaaaattctatttttcttttttccccagtttttcaaaaagcaaaaagagttgaacagaccaatgaataagaattcatatattcagaaaattccctctcctttaagataaaagacgaggatgcacttttggtttccgtttgggggcctcacttgttctttttctctacccttcacccaccattttctcttccatgcccaaaatgcatgtcctctttctttttttgtttttccattttcatttcgctgaaaccctttctaccctaatcttagagtacaatgccctgctctctccgttcagccattaccgactcctcaccacccattctttcttcgtggaacaccttcatcccttactactcctagctcg

SEQ ID NO: 287260 - DNA, 458 bp, Glycine max
  unsure (1)..(458): unsure at all n locations
ntggagtaaaaggcttactaaagaaggcaatagggtgttctttctgcgataagactgcacccatgtcgacaccaaacacgtttgtttccaaggaaaaagggataatgaagtccggcaagagtaaagtaggggctatagaaagcacatccttcaatccagtgaaaacttgttgcgccttagatgaccactcaaaggggtacttcataagtaacctggttaaataagctgcaatggaggcatagccacgaataaatcggtgatagaaacccgagaggcccaaaaaactgtgcaaggccttggaggaatgaggtgtgggtcactgctaaatggcttggaccttagccgacactggttcaactccttgtgcaaaaaccaggtgacccaagaactcaacttgttgctgggcaaaggtgcacttggatagtttgaggaagaactgaccatctagaaggacctga

SEQ ID NO: 287261 - DNA, 405 bp, Glycine max
  unsure (1)..(405): unsure at all n locations
tgttttaaagcacaacaacacagaatctaggtgtccaacacccctccattcaatggcttttctaggtttgaaaggtgaaatttagaatgaggtgaatttgaggcaaactctcacctcacaccagtccataacgtcaatctaaacttgcccaaactggaattacacctaaaattccaccaaatcaaaatttgactcttcaacacccaattttgccctagaaatggctcttggttcactttggtcatttatttttctctctagctcagcctaacctttctcacatgttctaaatgacatttcaagctagtattgactcactctaacctccatttaccacagaattccgacttagccttccaactctcanagtctcactctttntccactcataacatcacattctca

SEQ ID NO: 287262 - DNA, 447 bp, Glycine max
ctatagaaactcagcttgaaatgggaatgcactagcatcctactctttctccaaactcgaaggtggaggacacatgaacgaaaacacaattcatggggctccgaaaaaggggttgagaatggagaattacactaagcaatcactacgcatagctccaaactcgaaggtggaggacacatgaaagataacgcaattcatggggctccgaaaagattgagaatggagaattgcactacgcaatcactacgcatagctccaaacgcgaaggtggaggacacatgaatgaaaacgcaattcatggggctccgaaaagattgagaatggagaattgcactaagcaatcactacgcatagctccaaactcaaaggtggaggacacatgaacataacgcaattcatggcgcttcggaaagagtgagaatggagagaggaactaatcaatcacta

SEQ ID NO: 287263 - DNA, 387 bp, Glycine max
tgcttctagccatatggacttaccttgaattaattcctttgatagcccttttgagccttgtttccctttccttgttttgaagctcactacaagccttaagtgaaaaaccatgatattaccatatccttaaggaattttggagctttggaattgttttgggaataagtgtggggggtttttgtttcattggacaacttgttttgttggctatgcttcatgatgtattttgggccatacttgatgtacattgtatattggttaaatgttggacatgctgaatgaaatgttgtttctcaaaggccaaagagtaaaaaaaaaaaaaaaaaaaaattcaaaaaaaaataaaaaaaaaaagaaaggcattaaagttgagtgaataagatctta

SEQ ID NO: 287264 - DNA, 455 bp, Glycine max
  unsure (1)..(455): unsure at all n locations
ntgagggtgcgcagcccaccatcttttcatagtatagtaccgataatgtgtctaccattacgattatcgtctccctttccatcattgggggtaccaccggggccgccagatccctccaccttttgggcgtgttctttgaatgatccgtccccctttttgcacatgttctgtagttgcatcctatccggaaccatatcaaaattgtactgatactgcctaacaaaggcaaccattatgtccttccaagaatggactcgggaaggttccaagttagtgtaccaggtaacagctaccccagtaagactttcttggaaggaatgtatcagcaattcctcatcttttgcgtattcccccatcttctgacaatacatctttagatggttcttgggacaagtagtccccttgtacttgtcaaagtcccgcaccttgaacttgngaggggtgatgatattggg

SEQ ID NO: 287265 - DNA, 409 bp, Glycine max
tttcttaatgtctcctaagataagaaaacaaccaagaattcattgcaggaaaaaagcacaaattattcaagaaaaaacaatcttagaactttaaattctgaatttgataatgttatcaaactttacctgaattttttttaaccaagcaaagcataagaatatgttaatatctgtcaacaaagtcggtacaagatgtaccttgatcaaccaacataatggtgataaagaagcagccaaagaattgttataaaccccttacccaagccaatatattaatatctcatcttaattaccattattaatcattttaattaaattgcaagaataattaaagttattttatgttggtgaaaatataaattaagtgcgtgatattctacgttttatgacaaatgagtattgttgtatg

SEQ ID NO: 287266 - DNA, 459 bp, Glycine max
  unsure (1)..(459): unsure at all n locations
ntatttgattaaatcgattgcttatttcaattattattaagttactaagttcactttttaataatttcaagagaaattttcttgcacttgtcgcactctctaattaagaaaaataaagtaaaggtgttatgcacatatcatttgcaatggcagatcaactccaagtgtgaacaaaccaaaagagaaatggttcaagaacaccatggacaatttgtacaatggacgaagcacacaaggaaaatgagtgacaacaatttcactccttttgtgattgagaaagaattgtgaaactaacgggtaaagagacaaaataggatgtttcggctaattctttcatttagagtaccagagcaatgactatgatcatatatacaaaattacatgttaatacataattatntgctacctcatcctttcatagatnnttaaatcgacatattataagttntgaanatatac

SEQ ID NO: 287267 - DNA, 409 bp, Glycine max
  unsure (1)..(409): unsure at all n locations
tgtttggacttcctgtgttttgggaacctctccttcctcaggtgtacccaaacccaatcacttggttcaagcacgactttctttctgcttttgttggcttgccttgcatagctcgcatttttcttttcaatttgaaccttcacttgctcatgcaacttcttcatatactcagctttagcctgtgcatccttatgcttaaacatagcaatgttaggcataggcaacaaatcaagaggagtcaaaggattaaatccatacactatctcanatggtgaacaattagttgtgctatggacagcccgattataagcaaactcaacatgaggcanacaggcttcccaagatttaagattnttctttaaaacagtcctaagcagtgtgcctaaagtcctatggactacctcagttt

SEQ ID NO: 287268 - DNA, 425 bp, Glycine max
tcattgcctaacaagccaacttacaacagcaagttcttatagactcagcataaggatgcacaggtcaaagttgagtatgtgaaaacattgtatgaccaagtgaaggtgcaaattgcaaagaagaatgaaagttatactaagcaagccaacaagaaaaggaaggaagtggtacttgaacctggtgatgatcctggacatttgagggcaaatgttttccaagaaggagggaatgatgagaatcctgaaattggccaaatacaagctaaaagcccaagtggagaaggacgaaggctcaagtggagaaggacaaagcccccgagtggagaaggatgaatgcctagaggcaaagacattatcaagactattaattgttgctgatggcccaaactaatttgaaggctcaagttaaataagtttttagttat

SEQ ID NO: 287269 - DNA, 401 bp, Glycine max
  unsure (1)..(401): unsure at all n locations
agcttcctcggtgccattcctgcgaaggcaaacatttggaaagttagttttagtgggccattactcttaaagcaaaaatggcatgtaacctcctcccatcaatacaaacatcaatgtaaatttagagcaagcttatgcgcatatttccctacgaacgttcacttgcactagacatcctattaactaagaaaaatgcacccatatacaatcaaggcagctttgttacctagattatttacacgtacttccaaggtgtatttgttacttacatcacacacatctccttggctaaattcacatacatgcataccccaagcattntggggtaccaaaaattgcacatgtgcacatcttggtatctctaatacctatacatacacaaacttcatgatgaatcttga

SEQ ID NO: 287270 - DNA, 454 bp, Glycine max
  unsure (1)..(454): unsure at all n locations
tctagattaatgtaccagatgaccactgctttagcctagctatcttggaagaaatgcatcaacaacttctcgtccctgcaatacgcacccattttgcgacaatacattttgagatgattcttaggacaagtcgtccctttgtacctatcgaaatcaggtaccttgaattttggggggatgacgacgtccggcactaagcaaaggtcagtcatgtccacgaacggataatcgccaaagccttcaacagccctcaatctctcttcgatgaaatcgagtttcccattntcctctgctgccaggggtggccctcctgcggacaaaaatattggctgtgttgggtggtttcggggttctcccgtgaggttgggctgaggtagcgcgttgggtgccggcccctcggcggngaacagggagtaggaatcgatgtctccctgggcatgctctcgacgatcct

SEQ ID NO: 287271 - DNA, 397 bp, Glycine max
  unsure (1)..(397): unsure at all n locations
tcttcatgcaagcttgacaaattctttntattttttctttcaaggcactgcattcctgtgtcgagtgaccgtaattgcaatgataccggtaatgttttgagtagtcggctttcaatggggtgttagccctttttggcatggccaaaatgtctacagctaaggcctcatccatgatatgagatctattggctgtaaggggagtgtagcaagcataacacggttctcggggtggtcgatccctcttctcgttgtcgcgagctttgttggagttgggcttatcatgtctttcttggccgaaatggcatccgcccacacctggtgaggtcgactagtgacaaattatgtgcttaaacgggctgccaaggtgtcgaatgaatccatggagttgggggggagg

SEQ ID NO: 287272 - DNA, 446 bp, Glycine max
tgtggaaacaaaaaagtgcaacacatttgattagtttataggcttctgaagttggctttagtcttgccggtagcaactgcaagcgtggtacatgttttttcagctatgaagtttgtgaagagtcagctatgtaacaaaatgggtgatcaatggttaaatgatctgaaattctgatactggggacagatgtcgtacaggatgtcacgacatcgcgcttcagaacatgcagattatatgtgtgtccgtatgaacagattaaacaagtaaataacacatgagaattgttaacccagttcggtgcaacctcacctacatctgggggctaccaagccagggaggaaatccactaaaatagtgttagttcaaggtctaacagccactgtttacaaccttctcacctaaccactacccatgcgacctctacctatgagccactcttagatatg

SEQ ID NO: 287273 - DNA, 395 bp, Glycine max
ttgcatgcaagcttgaagatgcgtaccccaccttttttcatagtaaaacaccggtaatgtgtctactattattgtgatcatctctttctccgtcattggaggtgccacttgagcttccaggtctccctacctttgggcgtattctttgaaagattcatgcccctttttgcacatgttctgtagttgcatcctatccagagccatatcaaaattgtactgacactgcctaacgaaagcaaccattatgtccttccaagaatggactcgggaaggttccaagttagtgtaccaggtaacagctaccctagtaagactttcatggaagaaatgtatcagtagtttctcatcttttgcgtatgcccccatcttccgacaatacatctttagatggttct

SEQ ID NO: 287274 - DNA, 442 bp, Glycine max
  unsure (1)..(442): unsure at all n locations
tcaatatagaaaagtaaaacttaatttggttttggcattgattagaaaaatgcaaatctttgaactagtgtaatttggaaatcaaatgttgccttgtagaacttttaggaaattttgtagatttttgctagaaaattgggataccaagttagaaaacagagtcaatgaactttgattttatgtaaaaagtttgtgaaaggatgtgactcttcacatttaaatttaaattccaacgttcaaacacactggtaatcgattaccaaatcattgtaatcaattacaacattttgaaatcaattggaacgttgtaaattcagttgaaggctttttgaaaaacattttgctactggtaatcgattacaacaatctggtaatcgattactagagagtaaaaactctttggtaaaagggttttgagaanaattcatgtgctactcagttt

SEQ ID NO: 287275 - DNA, 411 bp, Glycine max
agcttgttcaatcactatagccatgggtcaatgattgattggtaaaattctatttttcttttttccccagtttttcaaaaagcaaaaagagttgaacagaccaatgaataagaattcatatattcagaaaattccctctcctttaagataaaagacgaggatgcacttttggtttccgtttgggggcctcacttgttctttttctctacccttcacccaccattttctcttccatgcccaaaatgcatgtcctctttctttttttgtttttccattttcatttcgctgaaaccctttctaccctaatcttagagtacaatgccctgctctctccgttcagccattaccgactcctcaccacccattctttcttcgtggaacaccttcatcccttactactcctagctcggt

SEQ ID NO: 287276 - DNA, 447 bp, Glycine max
  unsure (1)..(447): unsure at all n locations
ntggagtaaaaggcttactaaagaaggcaatagggtgtcctttctgcgataagactgcacccatgtcgacaccaaacacgtttgtttccaaggaaaaagggataatgaagtccggcaagagtaaagtaggggctatagaaagcacatccttcaatccagtgaaaacttgttgcgccttagatgaccactcaaaggggtacttcataagtaacctggttaaataagctgcaatggaggcatagccacgaataaatcggtgatagaaacccgagaggcccaaaaaactgtgcaaggccttggaggaatgaggtgtgggtcactgctaaatggcttggaccttagccgacactggttcaactccttgtgcaaaaaccaggtgacccaagaactcaacttgttgctgggcaaaggtgcacttggatagtttgaggaagaactgaccatcta

SEQ ID NO: 287277 - DNA, 388 bp, Glycine max
  unsure (1)..(388): unsure at all n locations
agctttagcttaagcccaaaaacactggtgcttaagcctgaggtttgcaactttcaatgaatttcaaaaatcaatccatggctctccaaaatggcactataatttcaaaaacacatcttataacatctaaagccagagatcaacatttaaaacatcaaacacatcataaaacatgaatttaagcttccattacctctatagaaccaaaaaaagagctttgtgatgaagtagtagaaaatgatgaactttggatccaagggaggatatttcctcaactccaacagcatgtccatcttagcaacatcaccccanacccaaaaataaccacaaacaaaatccaatccccaaaaaccaagctntnttatgagttcccctagatgctntatga

SEQ ID NO: 287278 - DNA, 458 bp, Glycine max
  unsure (1)..(458): unsure at all n locations
ntgttgctacacttggagagcgagctcttgcagtgttgttgtcacattccccatctgtgtctccaaagcgtcaactcggtcacccatcttaggcttccttgacatctacaatcttcttcattgtgtgagattgatcccgcaggtcggaccaattgatgggtcttaatgcacaaaaataatgataaaatggatataatagtgtaatatgagtaatgaaattgcaatggtattgctgtgagatccacaattacaggaagaaaagagcagaaaaaaagaaaaataacaaactggtaatagcaaccaattcccaagcacgcagtgctcccaaatcacccagaggcgaccccaccaaatcctaattgaattccttcctaattattcctttccagcaatagctatctatagccactctcatgcgttcacaggcacgtcatcatctttcattccttttgtctttt

SEQ ID NO: 287279 - DNA, 414 bp, Glycine max
  unsure (1)..(414): unsure at all n locations
ttcattaagaggcttcctctagaagcttcctcgtggcttctttgagaagctttctcaagaggcttctttgagaatctagatccttatctatccacccctctattaactaaattaacttccttaaaaataattacggatgaaaataacgcaacaaataatcaaacatcaaacataattactaataatatatagatatatatatcagggtgttacaggtcctgctgatacaagaatttgacatcatcatcaaggacaagaaaggatccgagaatgtggtagccgatcatttatcccaattaaagaataaagaagtcaccaaggaagaaccagaggtaaaaggagaatttcatgatgagtttcttttgtaggttaccaccagaccttggttngtagacatggctaactacaaagccn

SEQ ID NO: 287280 - DNA, 544 bp, Glycine max
  unsure (1)..(544): unsure at all n locations
cacacgcacacacancacctcagccatcacagcaaaccgcaacaatcancgaaatgctaannannnaagggggggagntnnataatgacctcgtagacacncgcacacacananaanacgcnagcnggccgcaacaagaaagagcccncagacacaaagccctagggctcacccncaaaaaccacagcggggcgagagccangcaaagcaacacgccccgcagaggaccaacaccacacccacaacagcacaaacggacgacgaaagagcncccacgagaaaaaagaaaacggcgaagcacaaagacaagaacaaacgacgacaagagagggagaccncgagacaaaaaagagggacaaacacaacaagaaanagaacaccaccggcaagcagcgaaaagaagaaaagaaacaccaggcacaccataagacagacaccagacgcaaaagagaagcgcaaaagaaaacacacaacaaagaactaccgaaccaagacagactgaccgaaacgcggaacaagagaagagacggccgcgacacacacg

SEQ ID NO: 287281 - DNA, 404 bp, Glycine max
  unsure (1)..(404): unsure at all n locations
agctttattaggattcttccctcttagtcatgtttctttccatctacaaagacttgaatttgagaatttacttaggaaatctaatatcattctcatcaatgacttataagtgatctcgtgtatatatatatatagtggtgtgtgtataaaatatagtcatctgtcactattttcatgccaacaatatagtaccaaatagataattaaattacaaaaattaatgaggttaataattatgtagatgatgtaaaaatttcttaaggggtttcctagactatcaatgataggaaacaacaggatcttgaaacctatggttctcacaaacaatcaataaacaacaatagataatgatgtgtacctttctccataggaagacttgtnacttctccatangaacttctctc

SEQ ID NO: 287282 - DNA, 462 bp, Glycine max
  unsure (1)..(462): unsure at all n locations
actacgctaagctcttaactgcacaagctctaatattgtgttatccttgtggaaccttcacttgatgaagacactgacaaaaacttatcttctcctttgtggacaaagtgtgacaagcctgnggcaagtaaattttcttcccatcagaccttggatgcaactgtgctcgtatccccatgtcagctagatcttgacggatattcaagccatccttcgtcttgccttgaatgtttaggagcgtcccaatcacattatcacatacatttttctccacatgcataacatcaatacaatgtctaacgtccagatcagaccagtatgggagatcaaagaaaatggacctcttcttccatatgcaagtcttactcttatccttcttttgggtctttccaaatacaatattcaggtgttgaacccgctggtatacctgttcaccagtcaacagtatcggtgcaatatcgt

SEQ ID NO: 287283 - DNA, 391 bp, Glycine max
agcttcctacctgtttgtgttgcagtggctgcccccaaaatccgctataatggctagtgggagtttgactattctaaggttttgacatagacatcaaataatttatagtaaacatacctgtataaaattataaatgatattcatgattaatattgatattttaatgattgaaagtcattgaagaacaacacggcagaaagatgaaacatgaaagacctgttccatattgtggaatgagtataatagagaacagaatatagagctttggaggtcagcaagattgccagatactgacatggtctggctggaaatactgctggaaaaagggttggtgtaattagtccgtacccagaagagtgttgcatgatgatgggaaaacaaggaataaact

SEQ ID NO: 287284 - DNA, 447 bp, Glycine max
gtaatgtttcaagaatgtccttatgtatattatatacattgttatgctcatcaattacaacttgctcttgttgcttcaactagatgggtagttgatgtacgcgcttttttttaaacttgaatatgattgtaaatgttgtgtgttcttcttgtaaacacaatcatgagttacaagttgcttatgtaactaaaatttctcatttgattgccaatgatgagattgatattggaaggggaactaatcaaattgacacattacagagactgggagataccagatggagttctcatttcaattcgattggtattcttttatgcatgtataatgcatctacagcagttcttgaagaattagctgctaaatgatctactgctactcaatgaggtatgctactgattggccaaaagcatattgtcatttgatgtattttactctatatgtatgaaa

SEQ ID NO: 287285 - DNA, 412 bp, Glycine max
  unsure (1)..(412): unsure at all n locations
agtgagctgatcatttgtagccagtgatgagaagaggaaaggttgcgtantgaacttaccttaagttttgtcaaggaagaaagattagtcaaccactctgcatccttagatttgacatcaaaattgccaccaagtccaagagtgtgcaacaaaggaagattcccaacctggaaagggagtgctcccgaaaatgaattctcaccaagatcaagatacctcaactgtgagagattttcaagttgatatgggagttccccatctagatcattatcacttagatcaagatattgtaaatgcgtaaggtttccaagttgataagggagttccccatctagatcattatcacttagatcaagatattgtaaatgtgtaaggtttccaagttgataagggaattgtccatggagataaa

SEQ ID NO: 287286 - DNA, 378 bp, Glycine max
  unsure (1)..(378): unsure at all n locations
gtgttgctacacttggagagcgagcactagcagtgtatatttcacattccccaactgngcctacggagcgtttactaggtcacccatcttaagcttccttgacatctacaatctgggtcattgcgtgagagtgatcccgcaggtcagaccaattggtgggtcttaatgcacaaaaataatgataaaatggatatacctttgtaatatgacgcatgagattgcaaggggattgcggggagatacacaattacaggaagaatagagcagactaaatgatgaataactgctggaaatatctacgattgccaagcacgcagagctgccatatgacccagaggcgaccccaccagatgcaaagtgaacttccttctaaatatt

SEQ ID NO: 287287 - DNA, 410 bp, Glycine max
  unsure (1)..(410): unsure at all n locations
agtcttcccaatgtcttcaagcattaaatcaatacaatgagctgcacaaggagtccaataaatgtttccttttgtcctctaacaacttacctgctaaaacatagttgctcccattatcagttacaacttgaacaacgttctcttccccaacttcctccacaatagcatcaagcaactcaaaaagcttttcacctgtctttacaaaatcagagtcatcaacagacttcaaaaacattgtaccaacttgagagttaataaaaaactaatgatgcatctttgtttccaatcagtccatgcatcggacataatagtacaaccatacttgacccattgctccttgtggcctttcatcaaattntcagtgtattcaacttccttcttcaggagtggaactctgatgtcatgatagc

SEQ ID NO: 287288 - DNA, 451 bp, Glycine max
  unsure (1)..(451): unsure at all n locations
tctaactntctaagttgtaattgcagttcagttatgtttatcacttgattattgcctattggtaatgactaatgaatggtaggcgccatgttttctttgggggcggtggggagtgttcaaacggcgccacttataaagaaggggctaatgggctatatatgcatcagtgcctgcatctgctggatccaaattttagcatatcatttttgctggcactttctttctcgtaccttttatttttcttacaatgccaatttccgaatccaaaataactagccctcttctgctctttgcacataataataatgatatagtattattaatagtaaaccaaaataagaagacctaccttgggttcaaaacggacgttttcaccaacagcttacttttacctaccttcatatgaataaagaaatgaggatggttntaactaaatctatgagaagtgggt

SEQ ID NO: 287289 - DNA, 406 bp, Glycine max
  unsure (1)..(406): unsure at all n locations
ttcttccaaagttttactcaaattgaaccttttacatcaattgtcaagcactcaatttaaaaaaaaatagaacgttttgcattagttgtgttaataattgataaaaaaaatatcaatttcgtcaaataattaatgaatatgagaatatgactaaatgagtataattttttcatttcaaacaattcaaggaccaaattaaaccttcaatatgattaagccaccacttatatagttaaatagtataattattgtaatttattttttgcatttaatacagttaaatctatattaaagaatagttcatcgaaaagtcttaaatagatatcctatattgttgacacgttacttanacatgggtaatttggacttttcaccaatgcattccatcttctcctttctttntctt

SEQ ID NO: 287290 - DNA, 459 bp, Glycine max
  unsure (1)..(459): unsure at all n locations
tcccacaattggatcatcctccagactctggtgttttggctaccctccaaacctctccatcatgccagacaacagcatctatgacaggccctttatcatcatagctctaaaacataaaacagcatttccttttcaatgtaaggaattcaagttgaaaaaattctcagtgggagcacaaacacaagtataaatgtctcttttagtttgagtcattgagacgagtcagagggagaaaaaacaagaaattcattgtttatgtgtggccaggtggaaaaaaaaattcaacattatttcatacagagacaatcattctatcaatatcctcattccaccacttatgagtgtcctataatgatataaattcaaatcaattgttcattacctatttcaaggacagganaagacacaaatacccgaagagcaacanaggaagatgacatgctcagcactcacctcaga

SEQ ID NO: 287291 - DNA, 410 bp, Glycine max
  unsure (1)..(410): unsure at all n locations
tgtttgtcatcttactttcatgtttaaataaccctaacacttacaacatatcgcttgctagctactacaacaaaaaacaaatttacaaaacttttaagacaaaattagtccaatggctaacaatttctctctattttttcctttcattcaaacttgttttctccatcttcatggttgcttccatctcattcatctttatcattagctcattttttaagcaatccaagaataactctcttctcatgaatattcatttcaagatcttaccaataaaaaaaaagttacatcctcttctatccgatacatgtaaaacaacaaaaaatgaaccagttacatccttatccttagcanacccattacaacaaaatccanagaacaaccaaaaaaacacaatgtagtggtgcatacct

SEQ ID NO: 287292 - DNA, 448 bp, Glycine max
  unsure (1)..(448): unsure at all n locations
cttaggtggatttgacttttaaagctgacataattatatttgttatnnnnatnnnannnngtcaaatacaagaataaagagcaaattttacaaagggtggcttttaaaattgtgacatgatgattaattgtcatcttttaattattttaccaattttaagaataaagagaaaaatgtttacaaatgggatttactctcgtgcatcccgtgctcatgcatattgtattctcttgattcattgttcctattttatgttttaattgaattagtctttctttatgaataattaaatcagtatttagttagcaattccaatatataatagactaaattatactctattagtcgttttttcaaattgcatcccatacttttcatgttttcacccacaaaaaccccttatttgttagctctcattacattcatgtatcatttcagtgtttaatca

SEQ ID NO: 287293 - DNA, 399 bp, Glycine max
agcttttgaaacagttttgagatactgcttgcctcataagccctgttaggccttcagccactaaatcaaagagaaaaggggccaaaggatctccttgtcgcagccctctttgaggtttaaactctgaagtagggcttccattaacaagaatagagatggaagctgaagagaagcaggcctttatccatctaatccatctctcatgaaaccccattctcttcatcatataaatgagaaattgccacgaaacagaatcataagccttctcaaagtctaccttatagaccatacaagacttcttggatcttcgagcctcctcaatcacctcattagccaccaaaactccatgaagcaaatgtctgccttttatatatgttgtctgcctttcatctataagac

SEQ ID NO: 287294 - DNA, 456 bp, Glycine max
  unsure (1)..(456): unsure at all n locations
tagacgaagaacaagagaggttagatgtaaaagaatagatacgcgagcaaaatagggttcgcatctgatataatttaaaatgtaagtccaacatcagttttcaataaataaataaaaatcgatgttaacaaaatgatgttaacattaacatcggttttctgcaagaaaccgatgttaacttatcacacattaacatcaattttctaaaaacccgatgttaacgaacttacgttaacatcggttcttccaaaatcgatgttaactaataaatgttgacatcggtttttcaagaaccgatgttaatgaaaagtcacttcattaacatcgaattttcaaaaaaccgatgttaatgaatacacattatttgcaattatgtcaccgcatttatcttaacatcggttntgtcaaaaatcgatattaatttgccgatgttaaatctgctntgtgtagtagtgt

SEQ ID NO: 287295 - DNA, 392 bp, Glycine max
  unsure (1)..(392): unsure at all n locations
agcttctcccctaattttctataaatagggggagaagtgaagtagaaaagggttcagcccttttggtaattcagaatcacttaaaattagtgagaaaaattggttccgtgaagaaaatccaagccgaggcgcttncgtaacgtttccgtgggtgatttcgtgaaggttttcgaccgttcctcgacgttcttcattcgttcttcgccgttcttcggtcttcaaccggtaagttccctagattgaacttttcaattcattctatgcacccttagtggtcctcatttgtttttacgtgctttcatttacatttcatttacttttcgtacccccttttgacatgcttaagtcattttatttaagtcatttctctgctaatctaaaaataaaataaa

SEQ ID NO: 287296 - DNA, 450 bp, Glycine max
tctttgagaaaaatttcttgagaagctagagtttagttacacacacacctctcataactaagctcacctccttgagaagcttccttaagaggattcctaaagaagctagagcttagctacacatacctctctaatagcaaagctcacctccttgagatgagaagctagagcttagctacacaccccctataatagctaagctcacccccatgacaaaatacatgaaaatacaaaaaaaatccctactacaaagactactcaaaatgcctcgaaatacaaggctaaaaccctatattactagaatggccaaaatacaagacccaaacgaaaggaaaaacctattctaatatttacaaagataagcgggctcatacttagcccatgggctcaaaatctaccctaaggctcatgagaaccctagggccttcccttggatctctggtccaatct

SEQ ID NO: 287297 - DNA, 346 bp, Glycine max
  unsure (1)..(346): unsure at all n locations
agcttctcttggaccctaggcaaatcctcaattcatccttcaagatcaaactatctactcatgattggtccctttcctctctccggagcttaagctcattgttactgccccacagagcccctcggaatttgttctggccatgttcttccctacgggcccttttggtctcttgttccaaggccttggtggtggctatatttacgtctctcagtttggcattctcctttcggatccttatagctgttgatttgaacttttctttggctgtttgggctttcttgagttcttccctaatggcctgaacctcttcgccctcctccgaagctntaacttccacccccttagt

SEQ ID NO: 287298 - DNA, 449 bp, Glycine max
  unsure (1)..(449): unsure at all n locations
tgaccttggtttagacatgattgatacatgatttgtttcttgtaggatttgatttgggcaagattggatgaggggaagtgtggttttcgaaatctgcgttttgtgcagatttttgctgtgaaattgtgcagcaggattttgcacaagtgcagaaaaatactaggcatttgctggttgtggaaagagcagtgcagaatgagttctggatgtttgctagtagatcccaacggtcaaaatgtaggcttatgcactatagacttccagtaaaattttggagtcgatccaacggttaacgaattggatcgaaggaattgttactggggtctttaagtgagaaaagctgtgattntggttgatgtgttgagcagagttttctgcctttgctctgttntgcttggctgtgatagcttgtgctgtttgaatgttgttttgctttgatgttggggaag

SEQ ID NO: 287299 - DNA, 396 bp, Glycine max
  unsure (1)..(396): unsure at all n locations
agcttgttgagtgttttgtgaatccttggttgggaaaagttaacaaaaccaagtacagtgatgcttacaaaaccacaaatggtacattgttgttgttaacaaaactgttagagattggtagtatactaagagagttgccaccttactacagaaagcaaggcatccataaactcaccatatttgcaaaaaaacaaggcagatataacattgcaattaaaaaggctgatataacattgtttgatattgtgcagactttaattacaacaactggtaaaaacttaatgagtgcattacaaggcctctgaattaaacattcagatagaaccangttcctaaattaaattagcctacacaaaatggaaaatagagcagctataacatagttgtgcccaatct

SEQ ID NO: 287300 - DNA, 395 bp, Glycine max
tcaagtgtatccttattatgccattgagaaactgaattacttttatgaatgttccaagctaaggttttattggagatattccttattgcttagggttgcatatcatatcccaaaaaataataaatttatgattaaataatataaacctattaaagtaccaagaaatagacataatatttatatatcatctctatatattataatatctttccatttttttacaactatctttcaatatttttaatactcattgatatatcgagaaatgttttaaaaagtgaaatattattatatttgggttaaaatattcttattttaagcatattacaatggttgtgtggaaatggatcacaggacaaatcaatattacaaaagaaatggtcatgggaatatgc

SEQ ID NO: 287301 - DNA, 401 bp, Glycine max
  unsure (1)..(401): unsure at all n locations
agctttgaaggcatctacctcttgaagaggcagaggtaagggcatagggataagtggtagaggtagaggacggggagatcaaacactattagaaaatacactttcaacatcggttatttggggccttctacatcggttgtaaaaccgatgttgaaagcatcgatgttgaatgtattgttgttaacatcggttttaaaaactgatgttaacataaaaatattaacatcagttttataaataaccgatgttataaagaaagaagtacaacaaaataagtgtatgcgtgagggacgttggcatcagttttctgtaaaaaccgatgtgaatatgttatattaacatcagttnttagaggaaaccgatgtgaacgttcatcattcatgcacctattntgctatagt

SEQ ID NO: 287302 - DNA, 428 bp, Glycine max
taatactcaagctttgcagaagatactgagaaatttaacaagcattatgtggttatgtttttcattattatttgtaatgtgagttttagggggaatgtatcttaggtaaaatgtgtaatagcatattttgatattgtaattgttgttttgctaaagaatttgtagtaagaagtaattcgttgctactgtcaattacccatttcaattaaatataatttgttggtgaaatttgctactgaaatttgtagtttattaaatataatttgttgttgtataactttttgaagttattgaagtagcactaaactaggtggtcctactccaactccaaatccaacacagtgtataatttataaaagaaagagaagaaacatgacattatatcaatttcacataatgtttgacatcccaaagtgtggtagttaata

SEQ ID NO: 287303 - DNA, 390 bp, Glycine max
agcttttatggagttccatgcttctcattagaaggaaggaactcccgagcagatgactttactgctgcaatatttccatcagatgaaaaacgtgagctgctattcaagataggttgcatattaccagcaactaaggtagatagtagtaccccactctgaactagcctactggcataatcgatggctggagatacctcattcacatcctgtacaagaatgggttatgcacccatgctccctacaacatttgtagcacccatggtatattttgtattttgaaaaccatcaccatctgtatagcttgaagctgaaattgcacaaacatcatacttttatgggaatgaaaatgattcacccggcatagaagctctttgtgagtaccttgaacta

SEQ ID NO: 287304 - DNA, 418 bp, Glycine max
tgtccctcattacagcacctgcacctatgttgggtgaagtctccctgatagcaaagtctagtgcctctgtcggtttatgcattttcctcttagacattatactcatcgattaacctgcaccaatgtaaggaaaacacttcaaataaagaaagctaagataaatatttacaaagactaaaccatacaaggaaatgcacaattatttacctgttgtgtttaaagaagcattcgattcagaacaagagtgtgactattgcatatatattctaaatttgctcaagagaaacattccatccaagttaaaggaaaaagttgagcgtgttgtgcatcatgtatgtcagtagaaatcaaatgagactgttatgtgtttaaatgatctggtttataaataaaagtttctataagagtgaatcatgtt

SEQ ID NO: 287305 - DNA, 404 bp, Glycine max
agcttgtgtactattttttttaatccctttacatgaactgaactatatgcacttcacgaaatatacctgttgaaattttacgaacaatgtcttataataactggattttatcaaactatagtaaaagtattgaaacaataataaacaaatgattagttctgatctgctgtcaatgaaactttatcagaaacataacaaataaagtctattgtattgatatttaaaccaataaaaatatattaaatgttagaaaataaataaatcatataaatttaaaaataaataactaatataaacaaaaaaaattttttattaaaatatattcattaaaaaatatacaaaggataattgaccaatatgtccttagtccaagtggaatagcataagatttttgtaagtttaat

SEQ ID NO: 287306 - DNA, 417 bp, Glycine max
tattttgttctccccattgatagcttcacatgcaaaaccctttctactacttcactcttgtccttgggatcagaccctagcaagtccaccatcaaatttggggaatgcccttttgagtacttgaaaggttccaatggaagggtgttgataaaggtcatgcccgagttcatcacaaggctaatcaatagaagtaaaagaccttgttgccccagcagcaacgacaacaacaacttgctatgcagcactcctgacttgagaaaacactaccaaatgctagtgaaatccaaggaccaattttggtcacctaagcttgaaaccatttcggaaaacaatgttaggttttcaccgtgtagatttatatacgtttagaaaggaattaagataaagagatggcagaggttgtatctactagatagt

SEQ ID NO: 287307 - DNA, 392 bp, Glycine max
agcttgtgaaatatctcgtgattccaatgaggagccaaatgttctaatttcagtggttgcaaaaaaacataactacaaatgtctaatttactcatgtaaaaaaaacataacataactacgaatgtctgaattcaacactcttgatgaagtttgatataacttttggcataacattgccaaaattgtatcgtttttttagtagatgaaaacagtgtattgttgcacacaatggagaaggtgtgttatgagtacaaattggtgacaagtcttgacggagtttttgaaggataacttaaatttatctaatgaagatgaggttcaaaataggatttaaaggacaataaagatataacaaatataagattcttgataggatttacagagcaataatg

SEQ ID NO: 287308 - DNA, 391 bp, Glycine max
agcttgtgactcttggcaatttttttaaaactagtcacttaaaaagttgtgacttttgaaaaaatctttagaaataagtcacttgaagaattgtgacttttggaaatgtattttttgaaatcagtcactggtaatcgattacacatcaacaaatatgactcttcattttgaattttgaaaattaaaacgtttagaagctctggtaatcgattacaaatgttgtgtaatcgattacactagtttaaaatgatttaaaattgttaaacacaagttgtaactcttgaaatttgaaatcttaacgttttaaaacactggtaatcgattactatcttctgataatcgattaccagagagtaaaactctttggtaatgatcttgtgaaaacttcttg

SEQ ID NO: 287309 - DNA, 396 bp, Glycine max
  unsure (1)..(396): unsure at all n locations
tcgcaatgctntcactgattgcggtagaggcctctcatgaatagcctgtaacttttctgggactggttcaactccattgccggagacgagatgtcccaggtactccagttgggactgggcaaaagcgcatttgggtcgtttcaaggagaacttccctgaaagcaagagcttgaacgctgtttcgaggtgacccacatggtccgccatggttttactatagaccaacacatcatcgaagaagacgatgatgaatctgcgtaagcagggctgaaagagctgattcatagtagcttgaaaggttgatagagcattacacaaaccaaagggcattactcagaactcgtaatgcccttgatgggttctgaattccgttttgtgaatatcatcatctttcat

SEQ ID NO: 287310 - DNA, 392 bp, Glycine max
agcttgtgactcttggcaatttttttaaaactagtcacttaaaaagttgtgacttttgaaaaaatctttagaaataagtcacttgaagaattgtgacttttggaaatgtattttttgaaatcagtcactggtaatcgattacacatcaacaaatatgactcttcattttgaattttgaaaattaaaacgtttagaagctctggtaatcgattacaaatgttgtgtaatcgattacactagtttaaaatgatttaaaattgttaaacacaagttgtaactcttgaaatttgaaatcttaacgttttaaaacactggtaatcgattactatcttctgataatcgattaccagagagtaaaactctttggtaatgattttgtgaaaacttcttgt

SEQ ID NO: 287311 - DNA, 390 bp, Glycine max
tcgcaatgctttcactgattgcggtagaggccactcatgtatagcctgtaacttttctgggactggttcaactccattgccggagacgagatgtcccaggtactccagttgggactgggcaaaagcgcatttgggtcgtttcaaggagaacttccctgaaagcaagagcttgaacgctgtttcgaggtgacccacatggtccgccatggttttactatagaccaacacatcatcgaagaagacgatgatgaatctgcgtaagcagggctgaaagagctgattcatagtagcttgaaaggttgatagagcattacacaaaccatagggcattactcagaactcgtaatgcccttgatgggttctgaattccgtttgtgaatatcatcatct

SEQ ID NO: 287312 - DNA, 379 bp, Glycine max
agcttgtctctgggccctctctttaaattccttgtttcgtccatttgggctcccttctactttatttgttaatgattaatggtgatgggtatttatatatccatttggaaaatgactaatagagtctttgggttagagttcaactgaacataacctactttttttaaaaaaaataaaatctactagtgttattacttctctattttgtgcattgaggtgtgcaaacagacattttgtgcttgcgagtgtgtttgttttacacaaatcatgcgttccaaagcacattgaacaagcgatttttgtgagagatctttggggttgaacatgatttaatgacagcctgaagctatgtttgttttggcgtttaccacattcaacg

SEQ ID NO: 287313 - DNA, 412 bp, Glycine max
tgcactgcccaaagtggacaaccttccagaaaacgttgattccaccattgatgtcccttatgatgtcgttcagtatctcaaaaaagcctacgatgatttgaaagaacccttgacctgttttctcaaatcttccaaagttgattggcatttctatgacctaattctcttctgggcagacactttggattctaaaattggtataaagagttccttttataacatctgtacttcaccatgtatgggcttcatcggacccccttcagtttgttagaccttgatacctcaataatcttaagagggataggcttagaatgcagaaaaagcaacaacaatcaatttaacaatgttctttaaacatgcaagacacaattgattgcaacaaaataaataagataagggaagagagaatgca

SEQ ID NO: 287314 - DNA, 146 bp, Glycine max
  unsure (1)..(146): unsure at all n locations
atttcacaccgcatatggtgcactctcagtacaatctgctctgatgccgcatagttaagccagccccgacacccgccaacacccgctgacgcgaaccccttgcggncgnatngaatataacttcntataaatgatgctatacgacg

SEQ ID NO: 287315 - DNA, 342 bp, Glycine max
tagcttgttaacccatggaagctcctaatatctcccacactttttggggtgggccattcttatatggccttgattctctcagggtccacttggaccccatttctaccaactacaaacattaataaaactatattatctacacaaaaagtacacttctctatattggcatagagagtgtttatcctaatgactgaaagaacttgccttacatgtcctaagtgatatatgctcttactatacactaaaatatcatcaaaataaacaactacaaatctacctataaaatgccttaatacatgatgcataagcctcataaatgcgcttgttgcattattgaaccca

SEQ ID NO: 287316 - DNA, 421 bp, Glycine max
atttgtaaactaacaaggggggcctatgcgattttagctagtgctaacaagagcacacgtcctactagctcaaatacaacacatatacacacagtgtaaaatggaacaaagaccccacgtcctatagcaggatattggtctagacaatctatcccaaacacgacttagcccccagttaggagttgcaataataagacattaacataagctgatagacgaagaagcttaattttaaacgaaaaaacacaatggtagaagtgcgaatagacaccctaaaagcaggcggcacaaggatgaacatgaacacaaaccagtggcctacaagacccacgacatactagcttatgcacaaataaggatgattgagtgactcaatacatccctacagatgagcctgaacatgaaccaaatgtccattgtt

SEQ ID NO: 287317 - DNA, 478 bp, Glycine max
  unsure (1)..(478): unsure at all n locations
cgaaactgaacctgatgcttgagaattcgaaactacaggncgaatncacctcggacctcggggatcctctaaggccaacctgctggcaggtaccctttttgcggaagaaggaaggaggcgccggaactcatgactttccttggccaccaggggtggaggatcaatggtctggatggtgctcttataaaaaaaccccatggaatcacctgctgccgtggattttaagcctgatcggtattccgtccccctcggggtggcatatgctgttattgcttgaacctttgcctagtaatggttgtgggacccacatttgatcggccttgcagatgttttaacgataccttttggggtcttacccaaactacacactttgcatttggctgagttatggcgcgatatataacatactggatggcatccggttgtgaatcgcatactcggactctttctgggggaactacaggacctgaatacactg

SEQ ID NO: 287318 - DNA, 402 bp, Glycine max
  unsure (1)..(402): unsure at all n locations
ggacacttagaatctcagcttctaaatagganaaaacaacatttaagatatttatagcttgatataacatttattctctgcaagcgaaaaaagtccttcttaataattaaaataaacccttttcggaataatgatacgtactcttctaaatgtttttttgagaagacactgaataattaagcattaagtacttattttatagatattcggctcaattgttattgaaagcaaataaagtgaaatttattggagtagtacataaaggggaaggtggggctgtacgtgaagcggattgcccatgggccatggtgactatcactatcaaagctgggttgcgccacctccgcatgattcatatatgaaaacgaaatgcatatatcttctcttgtgttcaatgaaata

SEQ ID NO: 287319 - DNA, 400 bp, Glycine max
agctttttaaaaggacaagcaccattgctaattccgcgtgacatggcatgcagtggggtttcttataattgagttgtggtctcaaatcaaaacattacctatgatcatttaaactcaagacagaacaagaagactacatgcatggaagataactttactcgcttgatggaaaactttacctatgatcctatggaaatttcttgatgtctagggattggttgaggcatgcatgagccactgcaattgaacgaaacactgaaattatttgtcgttccagcctatacaataatcttataggtgaatccttaagtttctatatatcattgacacctttcctggtactgttggattgtctttctattttaccacttttaatcaagacaacaaaaataaactagac

SEQ ID NO: 287320 - DNA, 435 bp, Glycine max
  unsure (1)..(435): unsure at all n locations
tactcaagcttcttcttcaacctgtccacctgaaaagtaagttggagacctcatctcagttgccaattagaagcaagaaagtgaaacccagataagaaattggagaagaaactatgccattacatcttgttgcaaagccagttttctgtctttgcttgaagtttttccacccttaacagcattatttgctccccctcgcgagcttccccgcatctctgccttttcattcaaggctttagaggttagaatcaaactatgcaattaaaagcacagtntgaaagtacgcgtatgtcttgtgccagattcgcaagtaaaaatggagaaaaaatattgaaagcttgagattacagaacccaacccaatcatgaattatgaaaataaagggtatcttttcttttcctcaattcattcccttattatgatacggtacttaat

SEQ ID NO: 287321 - DNA, 400 bp, Glycine max
  unsure (1)..(400): unsure at all n locations
agcttattgccacatcactgcactcattttgaatatgtgctgaaattaaagcagtccacatcacagtgcttttaaggttagaaaactccgacataaaagaattcgctaccacataaaagacccctcttcactatagcacaatggatcagcattcctaaaattaccttggcagaacccttgcaaacatctatgaggcttgcaaatgtaatctcagatggcttcagtcccaatatctgcatctcataaagaagattaatagattcttttgtgttttttagagcatatcctgcaatcagagcattcacagagaccacactctgctccggcatgctagaataaattntatgtgtatcttcgatgtccccgcactttgaatacatgtcaataagagaacttccag

SEQ ID NO: 287322 - DNA, 406 bp, Glycine max
agcttatcctgtgttttctacccgttattctgtgggtaaacattataatgatttctttctaaggcttcgttaacaatggtgttcgactaagttttcctttcacttgatgattttaattttatcagtgcagtgaagtatatggggaatgtttttaacagaattaccccccaactcacagtgatatatttatggttatcaaccaagtgctgtaaatgactgttgccattgggaagggatgtctaagctgcttctaacttttccagattagcctttgttgttctataaatgtaatgtcatattactcatgtctgaatgctatgtactgtgttcatccaacgggccattccgtatactgcagccgttcctatctctattacttaacgaagattagatttccaggatcact

SEQ ID NO: 287323 - DNA, 393 bp, Glycine max
agcttatcttcgatctcaaaaaaacaacacatttctattttgtgaggatgaaaaacatactgaaaattttgcaaggataaattccgaacattttgatatttataagaacaaaaaatatattttagccttgtttttattgttaaaaaaaaaaaagagaaatgctactaacattttctttaacacactccttcatacacactttctcttatgtgttaaaatgtatttagttgaagaacaagttccacaaaatcttgaacctaccaagtgtgatggttgggattggtatgagtgggatcatttgccacaccctttggttgggcctcttgagaaaatggtcaaaggagctttcgacccatttccaatttgattctggtaattggtatgaattttttt

SEQ ID NO: 287324 - DNA, 413 bp, Glycine max
  unsure (1)..(413): unsure at all n locations
ntaacaaccgaatattctttgtcctaccaagccactgttgtttctattctaatcagaagatatgttgtttgatttgctaactgattaaatcttaatcatcttacaaacaaatgtgaaatctaagcatttagttttttgtcttagagtattcaagatgttttgagagcttttcaaactttataagaatatacaaagagttttctacataaagaatttgaatgatagcgtgtaggttcgttactcatttcttcaaagcatctagtatttataggttttcattttcaagtgtttgttgtttctaaacgattataattttcctttgagcttgcatctgaagcttgtggttattagatcatttaatgcttgcattaaacgcatatcctgcttcatgcaggaaaaccactatgattggc

SEQ ID NO: 287325 - DNA, 362 bp, Glycine max
agctcttctccatctttaatgtttctaaggctgaaatagagaaacaatgtgaataacaaattaagatcgtgaaatcacataaaggtaaagagtatgttgattcacgaaagcggtcaggcatttggtccatgcgcaagatgtccttacatacatgggactgattgccgcacactatgcttggtccttaggatcacattgatgtgacggacagaatatatccaactttaatgtacatggtgaaatgtgcagggagtaatgccactgttcctctatacttgtggattaatgctcctatgacagctatgtatgcattaagaagatttctcagcaatgttatctcacatacaccttgtgagttattc

SEQ ID NO: 287326 - DNA, 321 bp, Glycine max
actcaagctacttgaggagatgtatccacaaggggaaaaggtggacactgttttgtctttgcatatatcaatatcagtatgcaatggttctcccacttattgatcctgtatgaatgcaggctgagacaacatgggcactaacagtgctagggtatatggcaaaattcgatatgggaatattagggtaagcaacgacatgagaatcagagttgcttggaatgctggatgctgtatgaccctctatgcatagttgtacggatcttatttcttactaccatgggtcatatattgctgatgggcgcatttgttgaactgagctgt

SEQ ID NO: 287327 - DNA, 379 bp, Glycine max
tcaagctttcatcaagtggtatcagagcacaagagctttaagtaggtgctccttaaacctccattaattttttgctttaccttctcttccattgttgtttcttcatttttctccatgtatctcctcacatgtcttgtgataaatgttgttaacatgattctttagagtttccaccgattaaatttgctatagaagctagatttgattttctatggttcaaatttcttgttcttgttcttgaaccatgaattgagttgagtttaggttcctttgagttctgtcttgttattatttgtggctaaaacctataccataaaattcttacaaaaacattaaagtagaataaaacctcataaatctacagtgacttgttcaccta

SEQ ID NO: 287328 - DNA, 342 bp, Glycine max
tcttcttaaggaatcttctcaaggaggtgagcttagttatgaaaagggtgtgtgtagctaaactctagcttctcaaggaagttttctcaaagaagcttctcaaagaagttttctcaagaaagcttctcaaggaagctacctattctataaatagaagcatgtgtaacactacgtgtaactttgatgaatgaaagtcttatgagatacacttcaaagttccacttctttccctcttttattcccttcaatttgtgctccccccttctctttttcttttcctccattaaaagcatcctcttcaagcttcttatccaaggcaattcttggtggtgaagctcattc

SEQ ID NO: 287329 - DNA, 388 bp, Glycine max
agctttttcctatggctgaggccaaatgcagtgttaacttggtttgaatttgaggaccttatgagggccaccgacaatttttcacctcagaacttcattggaagaggtgggtttgggttggtttacaagggcattctacctgatggctcaatggttgctgtgaaaaggcttgaagaatcagattctcaaggtgatgctttgttctgcagtgaggtggagattgttagcaacttgaagcaccgaaatctggtaccgctaaaagggtgttgtgtggttgatgaggggaatgataatcacaattctgagtacggaagaaggtatctagttcatgaatatatgccaaatggtagccttgaagaccatctctttccaaccaaactagacaatc

SEQ ID NO: 287330 - DNA, 414 bp, Glycine max
tgttaagctctcaaattgttacaaataaaatataagcattctattatttttcactcgtcagcttgacggttcagtgattttacctgtatttcattaaattttttaaattattttataagcaatttccaaaataaataaaatagaagcaaacttatttcatgctggaactgtttgataattcagatgaaactgaacactttaacttcagttaagaaaccactgcccatgctatatctgtattggaacatattctacaaatttaactaaatacatatatttttaatatgctgcatgtaaacttacatgtctgacttccgacccaactgtttctgtggtaaaataatttgcaccgaatgggaatcatcagtgctggggattgggtgactcattatggctattgctcttgcaacccta

SEQ ID NO: 287331 - DNA, 366 bp, Glycine max
tgctatatatatgatgtactttctaacatgaaaatttctggactgattcatactgaaatggatcagcttcctttctttctgacggatcttgtacaaataaagacttgaagggtgaaaatatacctttcttttacttcgctcagactattatattgaatattttttcctaccctcgtttttacttggggtgttcctcatgtcttgaaaggtgggtgagataactagacacaacaacaaagcttcatcccatcagacgaggtcgattacatgaatcacacgacaccattttgacacggctaaaacccatagtctcagtatatcgaaataaaagtagacatctgtttttctcttctggtactgcactat

SEQ ID NO: 287332 - DNA, 413 bp, Glycine max
tgtgttctgtcatgtccttttccggggttcctttcgtctgttgctcatttcatcctctattctaacttcaaagttttaactttgaatgaaatgtatagttaaaaatgacctagcctagattttaaattttgaatcaccaaggctttagtaatggacaatgaaatggccatttatgcatttactttttaggatcaacatatttgacatgaatactctacactaagtgtgtgttggtatagtggtcttagcagggaaattgtatttcaaaaggatggctgtgtcatcaaaactcctaaatttgggcagttttcctcttaaataacaagttaacaaagacacttcagggactctaccctgtaagccacctacgtcatgtcctgttttatttataaaatgcactaaacatggattat

SEQ ID NO: 287333 - DNA, 396 bp, Glycine max
tcaagcttttatggatttgcacgcttcacatttgagtatctctgcggtcgtccggtacattatttcttttagtttggttattgtctaaattatttttccagccaatataattattaaaccttattgtttggtttacttttattttttacttaaatggcaagttgatattgtgtgtttcattaaactcttcacggctcaaatgggtatgaacaactttcaagagttagttcatacttcatagatatgatggtacatttgatgattaaactctttgcattctgtggtttattctttttttggcgaccttgtagcatctattattgccttgaggtagagggaatgaaagtcttggagtacagatctagaataatgtaagacttattatgctaataatgt

SEQ ID NO: 287334 - DNA, 413 bp, Glycine max
tatccttatggcttgcctccgaacttcacccttcgtgccttcccggattatttaagccaagcccctactttcgaggggcaactcctaccttatgacgactatcccgggcaagacgatgaggaaggagatacccatgttggccccctgctccacctcaaagattcgtccccccatgaactaccccaaccgaacatagtccgccatatcccggcttcccccacacccgtgaaggaatctgttcccttcgcagaagataagggaaagattgaggcgcttgaagaaaggttaagagcagtcgacggccttggcaattacccattctcggatttggcggatttatgtctcgtacccaacatcgtcatccctcccaagttcaaagtaccagactctgataagtacaaagggacgacatg

SEQ ID NO: 287335 - DNA, 396 bp, Glycine max
ctctagcttttgaaagccctcctgattctgcaatacatttctgactctatggcatgacatgcagtgcatagattggacctcctgatagtcgttatcaaagaatagcttacacacttgtgctcgagtgaaacagctgctgtgagactgtggtttgagctactttccttgatacctgtcttatgattaacttcatctaactgtatagatcacattaagctctactctttgtctagctgcatattctgggaaaacaagtgatacgtacacattgcttcatctttcacatcatgcaatcaatcaattataatgcatacacctttcagcagtaaacactgcatgatttaccacttgatgacaagggagttgttctctgatgcttgaggacaagcataacta

SEQ ID NO: 287336 - DNA, 309 bp, Glycine max
taactgtgcatgcggtggatcaagcacgatctccggcaatgtcgactgatgatcgtgtggctccagtacttcatcactatcttccataatgagcacgaacaaggaggaagagcacttgtggccgcgtgaatacttttaatcacattggatgcataagccgttctctgtgcacatagctagttcctccagcgtgaggcgtttaaaaggaactgtggaagagttggtacgcgccggtgtctgtaataatggaggagtagttaaagatgtatatgttggaggttgtcgagagcttgaggatgctcctgtggt

SEQ ID NO: 287337 - DNA, 373 bp, Glycine max
ttgctttaatatagctgctgttacaaacacgctaaaaatcatttcatacaattctctcattggaacagcaaaagctatatagacaagagatgggaagtgctttggatagctctatccatgactatttggaagcatagaaattcagtggttttcaataaccagattttcaaccccgaaaaagtcatggatgaagctttattccacacttggtcatggttaaaatgtatggacaaagatttccatattcatttcaaccaatggtctactagcttgaaggaggagctgtcttaaggggttctttcctttctggtttcagctattgcgtttatgtatcttatagttgggatcggcaattatctgccttgcatctttt

SEQ ID NO: 287338 - DNA, 399 bp, Glycine max
tctttgtttttttactggatattttcttcttgtacagtcatgtaattcgagtatttatgtcatgtaatttcaggaatcttcctcacttgcatagttttgcaaaacaaaaaccttatttttaacaatgtttcttaattttagagaatatgtttagatacgtacgtagaaaaaggtttaaaaaaatatgaaattatttacatataaaacactaaacagggaggagttattataaatttaaaatagatggaacaaagtatattatcatattatatatatttgaaatgatgagaaaaaagatgaaaggcagatgagtaagaagaagatagccagaagcataggctaagattgtccaacacatgtggatagcaggaaaaacgagtgtattgatcaacaacttcc

SEQ ID NO: 287339 - DNA, 381 bp, Glycine max
aactatataagtattaaaaaagcacttacaagtacaacacaatggtttacctgtgatcgaagaacttccttgtatgtaccaatttctcgtaaggctatggtgaatttggtcataacaggacctgtaatagaaactcagtcataaatcatttcatcaccattagacttttagagttaaaggtaacatacagacttaaaatcaaattatgaagtcagtttagtcccaagcacagtcagtagtcactaaattatagagaaaaactgcaagcaaattatctcagtaagaattgaaattaatagaatgaaatgttaactgagtcaagtattagagtcatcgtttttatgattgacagctcatctggggtgctaaaaatggaaacat

SEQ ID NO: 287340 - DNA, 398 bp, Glycine max
  unsure (1)..(398): unsure at all n locations
taggcccatggtcattttgatatgaccaacatgatgtagtatgccctaaacctagtgcctatgcttgttaaagggcatccaatgtcaatgacaggatagccaaacaaaaatgtggaagctacttcagtgtcctttccatgtctttaaaatatcatgaattcagtgcttaacaaagcaagctaaaaactcatttgtgacagcttgccaccttgtcatatgtgtttgtttcccattgtttttgttgctgctgcattttctaactgcatgtaaagttaattggttacccattttctgccataaatttatgttattacattttggaatttcaataatggcaggacatttttttttccattcctttattatccatacttcttgtaccatgttgctnttgctgg

SEQ ID NO: 287341 - DNA, 402 bp, Glycine max
agcttgaggggctcttctctgagaagattctgcagacaaaggaaaacagaaaattttgaacaaattttcaaaactctggctaaaatcatctaaaaacttcaacatagcaaaagtaagtaactgacattgctaaagcatgcaagaacccgaggaacaccctcacttggaccatcaatgccaggaatgaaatccattcgaggtccaatccagttaaaaggcctcacaattgtgaactccaagccattttcagcaccctcagctgccaataatcacacatcagtgagaattaacaaaattgaaaaagaaaaaaaaaaacaacacctaaacaaaaacaaatcaaaactcaccataaatcagcctctcaatcaactgtttcgcacaggcataagaccacctctgttt

SEQ ID NO: 287342 - DNA, 431 bp, Glycine max
  unsure (1)..(431): unsure at all n locations
atactcaagcttgcagaccagtgatntgtttgaggtaacaaatccgggatgctgttgcatgtagacctcttcctctaagatgccattaaggaaggcattgttcacatccaactgctgtattggccagttattagtgacagcaagagtaagaagaagtttcagtgataggcttgataactggtgagaatgtttctgtataatcagtaccaaactgctgatgaaagccttttgccactagtctagctttgtacttatttacagtaccatcataattttctttgacccgaaacacccacttgcaaccaatatgattactatcaaggctccatgtattgtttttaatcaaggcatcatactcagtttgcatagcagccaaccatgtagtatcgctaaggcttgtttagtagatatgggttccaaatgagtcaaaa

SEQ ID NO: 287343 - DNA, 395 bp, Glycine max
  unsure (1)..(395): unsure at all n locations
agcttgagatgatgttttgttgaagggtgaaacttcctgcttttattgttgaccacagagtggtacctggagatatgtcgtgggggtcaggagaccttggggacgtcaggtggggtgctattgcccaaaaccaagcttgaccaatcccgacccaacccgggcatagtcggtcagtgagaacctgtgatgtacctaaacaggcgagctcctggcagtcaacagataaaaggaacaaagaccacaaagcaaggaggcttgtggtggctggccagctgtgaattttgtgtaatatgtggattatggcctctggtaatcgattaccaagggtgggtaatcgattacaaggcttanaattgaagacaggaggctaagatggtctctggtaatcgattacc

SEQ ID NO: 287344 - DNA, 421 bp, Glycine max
  unsure (1)..(421): unsure at all n locations
ntataagcgcgggtctgggagacaaaggtcaagtggtcgctatatgcgaatatgatgttccgagtacattggatttggtacgaccatgccctcctgatttccagctgggaaattggcgagtggaggaacgccccggcatttacgcaatgagcataatgtaaacctttacggtttttaaaagctctatagttgggcctaggctttagagtttttccttttgttaaggctctgtgtcttttgttgttgaatttctaatacgaggacctttcttcatctgttcctgcgtctctacccattctcattcatttgcatgttcacttctttntttgaaacggcagatccgatgacgagtcccccgaaggtactaatacctgggacccgcttatcgacttcgagcaagaaatgaatcanacggaagatg

SEQ ID NO: 287345 - DNA, 397 bp, Glycine max
  unsure (1)..(397): unsure at all n locations
agctttatatgcatgttcaaaggaaaattataatcgtttagaaacaacaaacacttgaaaatgaaaacctataaatactagatgctttgaagaaatgagtaacgaacctacacgctatcattcaaattctttatgtagaaaactctttgtatattcttataaagtttgaaaagctctcaaaacatcttgaatactctaagacaaaaaactaaatgcttagatttcacatttgtttgtaagatgattaagatttaatcagttagcaaatcaaacaacatatcttttgatttgtatagaaccaacagtggcttggtaggacaaagaatattcggttgttaaagcttgatgataaactntgttgtgagagctaaaagtaacttttgtgaaattagtgaaa

SEQ ID NO: 287346 - DNA, 413 bp, Glycine max
  unsure (1)..(413): unsure at all n locations
gaggtctttntatatgtttcctcggaatgtttttgcataagattttatgattatgcaacaaaatctgctttttcaaatggaaagttttcttccggcatgaaaatagattgtagatactacaaagtattttaaaccttggtgtgagttagactaatatagatacactatagtatttgatgatacactgcaagtgaaatggtcatccatttattgttctattaatgcactcacaatgtctttacatgattagctgaagatgtttctatatgatttgttcttctagactacgccttgtcactgttatatcctcaaagatatctttgatactctctcaatccacttttaagacttgatgatcacttctttctcttcagaaagtaatgatgangacgatcaccatgagcactggaatg

SEQ ID NO: 287347 - DNA, 402 bp, Glycine max
agcttgatcgtcttaaactgagttataattaaccttctctgaagcgatcaatctagatagggataaacaccatatgatgcccagattttacttccataacaataaatttgttgattactaactgaatctatttcagttgattaaaaaatgtatgttttgttgtacatttttagtattgaagttcgatcatccctttaaataaaaaatagcttatttatttttataataattaacttaaaaatcatactaataaacatctagttaattgataatataaatatatattaactgtgctcttatatcaatattattattattttatcatgattacataatatttttggcaattaattccgtagatatatatatatatatatatatatatatatatatatatatata

SEQ ID NO: 287348 - DNA, 417 bp, Glycine max
ttagttaggcatacacaatattaacttttgtaatattagacacaagttattattagctttaggtatatatacctaaaattttgacacacgtaaattttgagctttgttaatactagggtaaataatttttaggttttgtaataatattaggctaaacaattttgagttttaaataaatgagttgattagttatattatttgatttagttatttttagtttgaatttttttaatatatatatatatatatatatatatatatatatatatatatatatatatatatatatatatatatatatatatatatatatatatatgagagggtagtgtgcgtgagtacctgaggtgttatatatttagtgtgtacgagaatatactatgtgttaggagatatacgttattaaatatatgatac

SEQ ID NO: 287349 - DNA, 391 bp, Glycine max
agcttgtctgttgttattttatccaaccacgtcagggccttctttgtctgagaatttatcaaggagtagtgctccttaagcacgctagtgaaaaaagaaacattttgtttctcacctccacaagttcctttcaaatgaaaccctggcaagtgtgttatcttacagatattatgaaaatgttgttcagggacactacaactttgatacagagggtcagtgttcatactacaaaaccatgctgcactagaattagccatactattgtctacaagctttcgccacttgtgacaagcatcacactgaatccatgtatcattgtactcaaaacagtcacctttaggcttcccaagcgacttgttttgagatacatgagatgtaacatctaatgcat

SEQ ID NO: 287350 - DNA, 436 bp, Glycine max
  unsure (1)..(436): unsure at all n locations
tactccagcttctgaacagggttctcaaccaacttctgaagcacaaccatttagtatggctatttctcaagcactaccaacttctcaagcaacttctaaaatagtaagagggttgtcttttgagagtgcaaagtccaccaagttggtgagattaagtgatgttgaacttaaatatgttgttggtcaccatagaggtcttaaattaatatattgtacatcatatttgcagggaactagagcacctaccaaaaaggtcaagaagtctaaaagatcaatagttgttgcaaatgtattccctactataattgacagcttgaaaaagttgtcagagctgacaaaatgccaatctataaatgatgtgataaaaaggaaaatttgcaatcaacaagattgactaaattgtgtgacaggctgggttntccaaaacaaccaacat

SEQ ID NO: 287351 - DNA, 239 bp, Glycine max
agcttgtttgtgaagcttctaaggaggctagatctttgagcttcaatgaagtcctttaatggtgattttccaccatggagatgcagtggaagataacggagaagaggtgagaggaggcaccatccactagggaataagccatggaagaaagagcttcaccatcaagagagtgccttggataagaagcttagaaaggaagcttcaatggaggaaaagaaagagagagagggggggggggg

SEQ ID NO: 287352 - DNA, 425 bp, Glycine max
  unsure (1)..(425): unsure at all n locations
ctttaggatatacaacagaagaaccatgacaattgaggaatcaatacatgtttcttttgatgaaactaatattacctctccgagaaaggagtttcttgatgatattgtagattctttggaagatatgcacaatcaagaaaggaatctaaaaaggaagagaaatgaagagaacaaggatgttcaagctgacaatgactcatccgatggttcggagaaggagatcaaccttctatccaaggactatgaaagcaatgagaacatctctcaagaagtttaagcaaaaagcaaaagtctgacttccatctttaaagatctaggcacttaaatcatgaaagaggtaacatcaaaaccattctcttttaaattaagttggttgaaactntcctttcaattaacttgtgtatatgatgactaacaaaatttta

SEQ ID NO: 287353 - DNA, 375 bp, Glycine max
ttgtgcttgctatgagaaatgttagccagtctatggatcgatcgatacagataagcttgaaccatatcccggggagagagtgatcttagattgcgagtaaatgactaacatcgagcagtatcctttgtatcagactctgaatgaaatgcataagttgacatgtgatgaaggccattgtcctactttcaaactactttagtagaaagcttaccttgaattataattgtactcctttgcaccctttgtgagctgaattaaattttcaaattgaaccctgtgctagactgactatctccatctaccttgcttaagtgctacgagagcatatggttcaaggcgattttaacctactatgggggagttagttgggatgtg

SEQ ID NO: 287354 - DNA, 412 bp, Glycine max
tgtaatcgattacacacatactataatcgattaccagattatattttcataaaatattctcaattgtcacatcttttcatttggttcttgaatggctatcaaaggcctatatatatgtgacttgagacacgaatatgctaagagtttttaagaacaaaaaggtcttatcctcttaaaaagcaaaatcgtattatcctcttacaaattccttggcgcaaaacacttgtgattcaataaggaattatttgagtgctcaaattgttcaatctatctctttcaagagagatttcttcttcttttcttctttattctgaaaagggattaagagaccgagggtctcttgttgtgaaagaattctaaacacaaaggaaggattgtccttgtgtgtataaaacttgtaaaaggaatatac

SEQ ID NO: 287355 - DNA, 350 bp, Glycine max
agcttgaaatgtaaaatagtaattaggagatcgaaaaaagtgggagttattgtttggacaagtggaagaggcgtattccaaatggcaaagccaccattatttacttttaattaattggttgagtttagcatcttgtttttggtgctacctattgcttgccgtgtttgcagcaatctcgcgttgcccagtagaggacacgcttgtcacagtctctccatgcatcttggatgaaaatttggacttcctcgatcaaacttatgtaagtttcaaacaagaggattcattgaaaaaattatgtcaaacaatttcgtaatagggaaactaaccgattaaacaagtttccccttcac

SEQ ID NO: 287356 - DNA, 403 bp, Glycine max
tgaagctggggtaatcgacggtttgctgattgggcaaagctctgcgacgcaaaacaaaggaaccaaatgagagaatggaatgaatgtggagagaaaatggaagagcagagagagagagagagatcaatagcataccatgttttgtgtaggggagaaagaaagagcgaacggtgaagaaagtgatatgtattaagagagattggaaagaaatgaagccaagggtttataaaagatcgtgtttgtttctagagagagccactcttagcgttaacctcacgcacctcttccacctggactttgctttatcacttttaaatgggcctgcaaacataattacacggacagcccaaactagcaattaccacatataaatatctttttgataaaatcattctgttttgtt

SEQ ID NO: 287357 - DNA, 393 bp, Glycine max
agcttatgacgaggaagtaatttttctagtgtacaatacaatacaaaaacattgacttttagattaatataatttcatagtattatatgcatccttcatatcttatctccatttctttttcagttgcattgtaatacccgtcatcctcggtcatgagcaccacctacctcctccgagtgccgccacctccaccacgtcatagatctgagtgagtgcattaacatctaccccaccatatctgcgcttgcggcatcaccaccgacctcatcaatgccgcgctacccaaccaggtccctgtgcgtgggaccatctccgaccatgtacccccatctgttgtgcacgcgctccagctccacagcatgctacaccgtcacacgcgactgcaccagcaac

SEQ ID NO: 287358 - DNA, 418 bp, Glycine max
gtttacatagatacatagatacaactatcatattaatgtatcggaaatgatgaataaaaatcagaagaattggaatgaaatgactaagacaatgatgaagattaacagagcaccagaggaaatgttcaacatagttcatattaaggatcatgttatgaatttcaagactattcttaaataaacatggcataatatgacacatcagtatcgcttatattagtatactttaaatgtaacctcatggtgaagtgagtacgtcctttgatgcatgatggaaggatcaactagagcatatttagcatctgctcgacagtaatgacaatatgcactttgttaaatacaacctagatttggtgaacccaactacattggctggatggatagaactcatatatttgtatggactcataggaaaaca

SEQ ID NO: 287359 - DNA, 356 bp, Glycine max
tcttgcttctattagttatgaagaacatttttagtacttatcttgattgagtcttctcttgattcttgaatctggatctcgattattcttgaatcttgatgcttgaaactacattgtatcttgtaacctgattattcttgaatatgattctttgaaacttgattcttgaagctttttgactcctgattctgtgggacttgcttagctctagattctctggcatcatcaaaatgatcttggaaagcattgcttccacattaatcaatccaacgatccatgttaagcaataaggaattcgagttttggttaagtgtttcgaaatctgtagcgaatggtcatcctgttctcggattcta

SEQ ID NO: 287360 - DNA, 413 bp, Glycine max
  unsure (1)..(413): unsure at all n locations
tcatcaattcctcatgaaaacatagagcagcttanaagacattgacgataatgttttttttttttttttgtctttcctacatttaatttatagctttgtggatctgatattttttttttttgtttgtctgacatgccaattgctcgattttacaagaattgtgcattatttatcgaggggtctagctcacttggttgagctggaggtgtaagtgctataaactttctaatattgtgtttaatgcttacgaataaaaataatattagcaaagaaataaaggtgaagtgaatatgaacaacgtcatgttctctaagcataataatacgatggagtaaaacacgtgtgatttccattgggctttgaaacctgatcttgcttgtgtgcatatgactttgtgttatacaatatcttct

SEQ ID NO: 287361 - DNA, 295 bp, Glycine max
agcttcctaggggccattgctgcaaatgcgaacgtttgtaacgcttgctctaccatagggacgatactcttattgctgacatggcatttgacctactcccatagacacagacttcattgtatatctagagcaagcttatgcgcagatttccttacatacgttctcttgcacatgactttttattatccgaataaaactatgcacctatatacaatctaggcaactacgctgcctagattatttacgcgtacttccactgtgtattagttacttacatcacacacaatctcttggc

SEQ ID NO: 287362 - DNA, 322 bp, Glycine max
tgccgtgtgcgcacttgtaagggtctgatcactgcccttctatggcagtctcaaatcgtgactgatatggctgccgaccgcactcaactagcaaaaatggtcgagaaagagggcgccacccataaggaatatgcgcatcggaggaagaacttggccgcccagatgactcctgccatggtatgcgagagagatgaccaccatgatggaagacactctggcagagttctactatgagaagctcgcgagttacatgcgcgacagctgtgcagatctagtacttggcggggaacgaaccagagtctgattgatcagaggaacgtca

SEQ ID NO: 287363 - DNA, 400 bp, Glycine max
agctttgagccaaaatcctgactcaccataaaccttgacccagggtgagaatgtcaatccttaccctcggaagcaaaaaagaaaagaaggaaaatttccaatcaaagagaaagcaaaaagaaaagaaggaaaatttccaatcaaagagaaagcaaaaagaaaagaaagaaaattcccaatcaaagaatgggagaaagtaaaaaaggaagaagaagaaggaaagaaagctcctgatcaaggatcgaaagaaatcagaagaaatgtgcagaaaagtctttggaccagacaatatctgaacagtacaaaattgtcaccaaataaacaaaaaaggaaaggaaaccacgacctgaaagtggtcttctccctttgattaccaaccaaaatcctgtgcgtcggtgac

SEQ ID NO: 287364 - DNA, 434 bp, Glycine max
  unsure (1)..(434): unsure at all n locations
tacttgcttcgtggactntgttcttttattggttgactgccaggagctcgcctgtttagttacatcacaggttctcattgactgactacgcccgggttgggtcgggattagtcaagcttggttttgggcaatagcaccccacctgacgtccccaaggtctcttgacccccgcggcatatctccaagtaccactctgtggtcaacaaacaaaagtaggaagactgactcttccacgctttctcacatcaagcttagtggattatggggcacccatcatatgtggtactaggtggcgattgggcgatggcacaaatcaactctcccatttccacaaatcatacataaacataccatccccagttgcccaccttcatattgagctcacgcactcccacctagcccttatactcgttcctctcagcaccgggtcccca

SEQ ID NO: 287365 - DNA, 393 bp, Glycine max
agcttttcgattcattctatgtacccgtagtggtccacattgtgtttcgtgcatttttattctcgttttgtttactttttataccccctgttgacgtgcttaagccattttacttaagtcatttctcgcttaacttaaaaataaaataaatttccaccgaacgtttgaattgtattatccattaacttcggttaaaataaattccgaccgttcggtcgtgccgtaaccacgttggaaatcaaaaagaggtaagaaataatataataatcaaaaagacatcttttagtaaaataaagcggaaaatcaatcggacgttttctctttgggatttctcattcttaatcgaattgattaataactaaagtgagactaaaggctaaaatcaattcgcct

SEQ ID NO: 287366 - DNA, 431 bp, Glycine max
  unsure (1)..(431): unsure at all n locations
tgaagcccttagttntgctttgataattatgcaatgccaaacatgtttaatggatgtggcatttgtattgaatgttttagactaggcatgtgtgtgatataagtttttttcatgcttagtagtgatcaaatgtgaagtgaatgaagtatcctttgtctctaagtttcctaagtaaaagcaataggacttacctctacttgaaatttggctgcaaccatcgaattaatcgatttcctagcttggtaatcgagtaccaaagtcagtttcagaagaagaaaggatctaccgcttaggataatcaattgccttcctagataatcaattaccctgcttctaaaaacaatgggaagctctttgtgtgattcatcgattactacaagtgataattgattatcccagaaagcacagaaacattagaagtattcagactg

SEQ ID NO: 287367 - DNA, 319 bp, Glycine max
agccttgcccgcatgcctgtccaacatctggtccatgaacggcaaaggagaatgatctttccttgaggcttcattgagcttgcggtaattgacgcatattctcacaaccaacgataaacttcgttgggattaggacattcttgtcattgcaaatgactaccgtaccccctgtattcggcaccacctggactacgattacataaccactgtgggaaatggggtacatacgcccaacactaaaaagctgaagcacctgtttcctcacctcttacttcattgatggaggaagcacttgtatgaggctggctgactggtctat

SEQ ID NO: 287368 - DNA, 417 bp, Glycine max
  unsure (1)..(417): unsure at all n locations
gtacacagattttagtaatgacccactaacctagaattattataacttatggccattaacctagggaattaaaataacttaatggttgagtgtaactgaaattgtggcaaccaaaagtcacccccaacagccatcaatcagccaccatatggtctcccaaaaggttgatgcctaggttgccaattgggcccttattacaacttgaactaaacctaactaaagcctttttagttgattaacccaaaacatatttttggtcagccaactttacaaggattgggccattatttagacaaactaaacactctaaaattgagacaaagtggtgccatttagtcctcctccatttgggccatgatacaactcacaaccttggactnttctccttgaaacttgngcttgtattcaaatagtatg

SEQ ID NO: 287369 - DNA, 387 bp, Glycine max
agctttgcgaaaagcttgccgctggagctgacccattaaccgccctaggctcttgaccttgaccttgacttgatagaacttatttttaagtgaaggcatttgaattgatcccatgttttactaaagtgaacaaaaatcggtgcgaatcaaaactccgacatcaatcatgagtggaatggatgaatgcatgaagaaatgcatatgacacaaatgcaatttatgaatgcgggagcctgggaaattatctctttcttagatacaacgtcttggggtagcacagtgcccgacgtatgtatttaagaaggtgacacagaccctccattggtttgccaaagagaggggatcaagacaaaacccgtgcatgatgcatatgcgaaaggcgcaaca

SEQ ID NO: 287370 - DNA, 422 bp, Glycine max
tcttagggcatgccgggttctacaggcgattcataaaagatttctcataggttgccaaaccacttagcaatttgttgaataaagatgttgctattttgtttaatgaagagtgtatggatgcatttaatgatttgaaaaccagattagtgtctgctccagtaattatagcaccaaattgggggcaagaatttgagctgatgtgtgatgcaagtgattatgccataggtgcagtgcttggacaaaggaagggaaaaaattttaatgctatatactacgccaacaaggttctaaatgatgcacaagtgaactattctaccacagaaaaagaaatgctggtaattgtttatgcacttgaaaagttcagatcttatctggtaggctcaagagttatcatctacactgatcacgcagctattaaatat

SEQ ID NO: 287371 - DNA, 392 bp, Glycine max
agcttgctgaggtcggtggcagactcaagaataatggaatgtgtagtggctttgtctcatacctccattacacttcatttgtacctgagcttgcttccctatttttattaattttgttcatgtttatgtgtgagttgaatcttccccgcgaggatcaaaagatataaaaaattgtaaatataagaatcaaaatgaatgtcttaaactatagggactaaaaaaaattatcacaactataaggactaaaagggtaattaaatcaaaattaaataaactagagcaaaataatggtggtgtggttagacacttttaatcctaattgtctccttgtagacatatatacctctacatatgtgtgcattttgcaaccaccaccattagtggaaaaaaat

SEQ ID NO: 287372 - DNA, 441 bp, Glycine max
aatactcaagcttgttagatatgcacgatcatcttccttgacaactccgtgattaagattgccgtcaatatgaagagagaacaatttagagagtgatcgaagactttcaaatggatttccactgaatttattcatagagagatcgagatatcttaatgatgaaagttttccaaatgatctaggaagagcaccaccaattgagttgttggaaaaaagtaacgtgtcaatatttttaaatgccccaatatgatctgtcagattgcctgaaagtcgtgaactctgaactgcaagtcttgtgagtccatgggaaatacaaggagcacgaatctctaaaagttcattaacctgttggttgagtttgagatatgataaatctatcacccttaagttgcagagattacccaaagaagttggaatgtttccttcaagttgattatgtga

SEQ ID NO: 287373 - DNA, 393 bp, Glycine max
agcttcttgcagttggacaacagtggttagcctctcgaaatctccacctaagtagtgtttgattctaatgccattcacagtccatgtccttttggtggttgggtcctccaatatcattgctccatgtggcataacttttttgatgaagaatggtcaaaccacttgcacttcagcttacttggaaacaatgttaatctagaattaaataacaatacttgttggccaagctgaaaattcctttttgacaactttttgtcatgatagattgttactctttgcttataaagattggaattctcataagcttgaaccctcagttcctccaattcatggagttgaagctctctgtgttcaccatttgcattcgagtcgaagttcacaaattataatgcc

SEQ ID NO: 287374 - DNA, 419 bp, Glycine max
tcatctgatgtattagtagataatttttaatttgcttatttatcattatagaataaaatatggtatatgtttttgcgggacaattttagatttattatcttttttttctaagcagatgtgatcgactacactagacattagcattggtgacaaatatattgttcaacctttgtaccatattattattattattattattactattattattattattattattattattattattattattactctctcttttcgttaatcttttctttctccaactttcatgcatcttttgttttagttattatgaaattttaattttgtttttgaaataaataatcacggctattgttcccaacaagtgtgttgcatctttggcgggcacaatcaaacaagagaatcacaatatcaaatgagtgagt

SEQ ID NO: 287375 - DNA, 379 bp, Glycine max
agcttttggcaaatgaagaagaagaagaaattcaagaggatgttcaaagagattcaaaggatgtaacagattgtaatcaatgtatttaaaatgcaagttaagttcttgcctttatagactcttcaagtctggtcaagaaaaccattacaagagttataacctttagaaaacctttggaagagttacatcttttgatttttattcaaaacttatcattggtaatcgattaccaaatcattgtaatcgattatacaaagcatttttgtaaaacgatgtgactcttcacatttgaatttgaatttcaacgttcaaacacactggtaatcgattaccaatatattgcaatcgattacaccattatgaaattgaatggaacatt

SEQ ID NO: 287376 - DNA, 417 bp, Glycine max
tgcaccactcgagatcttgagcagattcattctgggcaatgtatagtgagttgctagagaactctatctctcactttggtccttcaaacagaaagtgaatcgcatgtgataatgatatttgaggtggagtattatattttgtggttgcggcatctccaaatgcaccaaagtgtgatgcttaatctacacttaagctccatggggagggtttcaagaaggtgaatagttaagtccatagctggttctgcatggttcatatataaactaacctggttctagattcctgcttcttcccacacgtttctaacttgttggcagccaaagaagactcgtgcaatggactcctttcctttagattgcagcctggtacttgtagggagacagcattttaatgtacgccatagaaagtgcttgact

SEQ ID NO: 287377 - DNA, 308 bp, Glycine max
agcttgatggaaaactagacgccttggtgcaaccgagtaactcatcgagccttgaatcagacatctgcgcccgtggcaagagtctgaggtctatgtacttctacagatcaccatacagatcttaggccttctttggcgcatttagaagtcgacgagcaacctaaagctgatgctgcaaacatttataatagacccacctcgcagctaaatggactacagcagaataattgtgatcttttaggccacatatacactccacgttggagaaatagatcgaattagacatgggcgagtcctccagaacgaca

SEQ ID NO: 287378 - DNA, 413 bp, Glycine max
tggcttagcgcgaggataagaccacttagcgtggtttgcttatcagaaaagctacaactctcgctaagccaggctctggccggcttagctaaaatgatgcatcttaagtacaaaggagcatgcgcttagctgataaggactcgcttagtgcttacattgccacatggaatttagcttaactgccatgagtggcgcttagcttcatgaacctctgttctgaccgtaaggaatttagcttggcgacaataggtcgcgcttagccaaggataagttgttgcttagcattttagctgtcgcttagccaaattggattaggctcagcttcgccttggctagcttagcggaatgaatcagcctaagatgaaggggttagacgctaagtgcttgagactcatggcttagcgcatgaataa

SEQ ID NO: 287379 - DNA, 373 bp, Glycine max
tcaagcttatgcaatttacaattgtaggcattggtgcaattttcagatgcataaactgctacctccgcaaaggatgctttggatggaagaagcatacctaggtgacagttgtattatttgtctgacatggtatttagttcaactgtgatggacatattggctgtggatgtggtgcatatcctcagattggtcaactatagactgttgtaacttggatattcacactctcactttgggatatttattatgtagtgtatatgctgtttttgaaattgtaattatgaatcattgaatgtgtaacatacggttagctatatcattgcaactggaccaatcataagaataaatgtgctgagttcaaagtttttctact

SEQ ID NO: 287380 - DNA, 401 bp, Glycine max
  unsure (1)..(401): unsure at all n locations
ntaggctgctcaattgatccaggttgctgcataaaagggataaaggtttatatggtggtcagcagaggagcataaaccacagactcttgtaacaggtacaaattttttattcaaggctagctgggttaccaggttaaccaaggcatctagtttaccttcaagcttcttatttttagctgatgcagatgagtttgtggctacctcatgcactcctctaatgactatagcatcatttctggcactaaactgttgggagttgcaagccatcttcttaattaaattcctggcttcagcaggggtcatgtctcctagggctccaccactggcagcatctatcatgcttctctccatgttactgagtccttcataaaaatattggagaagaagctgctccgaaatct

SEQ ID NO: 287381 - DNA, 386 bp, Glycine max
tctgcatgctagcttctcccctattttgctataaatagggggagaagtgaagaagaaaagggttcagccccctaggcacttctctctctctcgaaatagctgaggaaaattagttccgtgaagaaaatccaagctgaggcgcttccgtaacgtttccgtaacgttttcgtgagtaattacgcgaagattctcgaccgttcttcaagattcatcgatcgttcttcgttttcttcagtcttcaacgggtaagtacatcaaaccaagcttttcaattcattctatgtactcgcggtggtccccatttgttttgcgtattcttattctcgttttcattcgctgtctatacccccttttgacgtgcttaagcatttatttaagtcttttct

SEQ ID NO: 287382 - DNA, 419 bp, Glycine max
  unsure (1)..(419): unsure at all n locations
tcttcatagccattgcctacaaatacacatccataaaaagttattttgcatgaaatacgtaaccattactttagctatcctaagtatagcaaccaagaagtcaatcaattttgtgtggtttttgctaattgcatgtgttaccgtacaactaataaaacaaatcaaaactcagtgcgcattattttgaaagaaagaattcgacattctacagcaatttaagagcaatatacccaccatagtgcaacaattttaaccaacaattagaccaattcaaaccaaacaattttaagcattcatgtaacccatgtattttcatctaaagcaaatgtctaaaattccaagcttactccatgctcttgacatttaatctatcaacctaagtttatcatacatctaanatgatggctagacatgcgtaa

SEQ ID NO: 287383 - DNA, 251 bp, Glycine max
tagcttcatagaagtgtatgtggctcgaaacatagcatcgatgcactggtacttgacgttatatgacttaatgatcaactcaggattcaacagatgtgacatggaccatctctgccgcgctaagatatatactaatagctatgccatccttgtcgagtatgtggatgacatgaatattacaggatctcgtatggcacaaatgcacaggttgaagcaccaattggcagaaaactttgatatgatagatcttg

SEQ ID NO: 287384 - DNA, 402 bp, Glycine max
  unsure (1)..(402): unsure at all n locations
tgtgaaagtccttctgattctatttatgcatttctgacttgatgacatgagatgaagttcaaagattggacctcttgctagttgttattaatgaatagcttaaacacttatgcttgagtgaaacaatagctgtgagactgtggtttaagctactttccttgatatttgtcttatgcctaacttcatctaattgtacaagttacattctactcttctctttgaataactgcgtgctttgtgaaagacaagtgatgagggcattttgcttcattcttttatcatgcaatcaataaatnctgtgcatacaccttcatacatagtcattgcatgtttttgtcacttgtgggaccagtgagatgttccttatttgcttgaggacaagcaaaactataaatttgaggg

SEQ ID NO: 287385 - DNA, 401 bp, Glycine max
agcttgtagccatcgtctccacaccccatcttaagatgaaattccccaccttaatgggagagatcgtcactgtcaaggcaaatcaaaagcaggcacgatgctatgccgaaagtttgaaggtgacaccttatcctcctactagggagtttgccaggcctcaccccgtagcgaatggtgacactcaagtcataagcatggatgaaaggtcttcattctgagccctgactgtttaccaagcaagcctggacgatgtatttgatgtaaatctgcgtaacgagactgttgacaaaggcccaaagcctagtgaaatttagctgaagtcacattatatttttttttatcgaagtcaccttactaaattttgattgtgaaattatatttttattattataatagaaatc

SEQ ID NO: 287386 - DNA, 428 bp, Glycine max
  unsure (1)..(428): unsure at all n locations
tcacacgcttctgcgtcttcaaaggtgccttctcgcggacacgaagctcttcaacggtggcaaatcagcatggtgatgaccattaagagaacaatatgtgtaagggcaaaccttcatggctgaagttccctctgactgagttcccccagagctaagcatgaggtatgcagggaactttgagtccttcaaagttgaagaacatgtagctctctgtggtgcagcacacataacagccctggtggattttctagaacaagctctagaagccttgaaactagtggttttggtcaatgttctcaccaaactcaaactattagatgttcttgtcaaggcttttgcaggtttcttaacacatgcagctntggaatcactggaaatttttctaggaagattcttaaaatcagaaccaggttgagtgttcctttggc

SEQ ID NO: 287387 - DNA, 405 bp, Glycine max
  unsure (1)..(405): unsure at all n locations
agcttgtgactcttgtcaatttctttaaaactagtcacttaaaaagttgtgatttttgaaaaaatcttcaaaaacaagtcacttgaagaattgtgacttttggaaatgtatttttcgaaatcagtcactggtaatcgattaccattaaggtgtaatcgattacacatcaacaaatgtaacttttcattttgaattttgaaaattaaaacgtttagaagctttggtaatcgattacaagtattgtgtaatcgattacacaagtttaaaatactttaaaactgtttaaacataagttataactcttgaaatttgaaatcttaacgttttaaaacactggtaatcgattaccagagagtaaaactctntggtaatgattttgtgaaaacttgtgctactcaatatttt

SEQ ID NO: 287388 - DNA, 410 bp, Glycine max
tgcccatattcttactctctatactattgatacttcttaccctcgatgatgaaccaagcaaagtgttacatgtatagtgataaatattgaaggaaatacattatactcgctatagagatacatacttacgaaagtgtacattacaagtcatgccattttatgggattttatttttcctccatgctaattatgttagctggtccacacgaatgtattttttgcgtaataaatttatctatcacctctcaagattttgtgtagcccttacaacaaattttgtggttaatgaaaatgaatatttggcttcttccccaaaatttttgtttccagcatgattgtgacacatttctagtaatacataagaatgcgcgtatcaagattccagatcattgtgacattggtccagcatc

SEQ ID NO: 287389 - DNA, 404 bp, Glycine max
agctttatacaaatttgggtcactctcaatagagagggttgaagaaaaaattacaaatttctcacacagagattaggctttagtttctctcactagaatccttcaacttgtattcaagatgctcttcaaacatgtcttaaagctctatggaagaccattgaaatgggctctacccaactgaaaaactcctggaacaagtggacaaacatgacaactatcatgaaatgacagctcgcacatcattctaagaaagacattctgaggaacattctttataatatttttgaagcatctttagaatagtcattctgatgtttgctgagaaagaatttatacttgcagtagattcttttgatgaattttcactaatatgcctttctaaagtaatgcagcttcatcaatca

SEQ ID NO: 287390 - DNA, 328 bp, Glycine max
ctcaagcttagtgcgcttaatcttcacatggataatttcttcgactactctggttctatagtggaataccctaaatgccttagatgtctcaaaatacccaagccatattccatcgtcacttctagaatcaaactttagcaagccatccttagtgtctagaatgaaacatcgacatccaaaatgatggaagtataagatgtgggattttttttcctacccaagccatgaattacccaaagtcgcgaagtcaattcgaggccaaaaattgagtccacaacttgccatgacttatccacaaacggatgatggagcctatactgagcatgag

SEQ ID NO: 287391 - DNA, 401 bp, Glycine max
agcttatgaacccttacttgtagcttcaatgcaaggaaacatgcttaaatttggttttagagttagaaaaacatgaaaattaggattttcttgtgagagtttttgctcgaatttgggttgccccatgtttgatactttacatagaggtagcatggaaaacaccttgcaatagtgtgtatacataggtaaatataagaagtatgaaatccctagcaaagtgtgaatgattgtcttcctagatgaatgtatgatagtgtggaatgccttttttgaatgcaaatatgtgcaggatgtaattagttttccaatatgcatataaataaataggagtgaaacagtaaaaatttgtatggtgtacttcaaatgtatgtaagtagtttgtgataacagatgtttaggat

SEQ ID NO: 287392 - DNA, 429 bp, Glycine max
gacacttagactctcagcctattgattattgaccactcaccagaatttataagctattgccattaacctagggaataaaagaaaacttaatggctgatctgtaactgaaatcgtggcaaccaaaagtcacccccaacatccaacatgtcagccaccatttggtctcccaaaaggctgatgcataggttgccaattgagaccttattacaacttgaactagacctaactaaagccctttaagttgattaacccaaaacatatttttggacagccaactatacaaggattgtgccattatggatacagactaaacactgtacaattgggactaagtggtgtcatttaatcctactccatttgggccatgatacaactcacaaccttggacttttatccttgaaacttgggcttgtattcaaatagtatgga

SEQ ID NO: 287393 - DNA, 394 bp, Glycine max
tcaagcttttagccaactcaaacgataataactttttactcggatgtctgattgagtcccgtaacatatcgagacgctcgaaattgaatgttgaacctctgagccaattcaaacgacaataacttttttcacggatgtctgattgagtcccgtaacatattgagacgctcgaaattgaatgttgaacctctgagcaaattcaaacgacaataactttttactcggatgtctgattgagtcccgtaacatatcgagacgctcgaaattgaatgttgaagctctgagccaatacaaacgaccataactttttactcggatgtctgattgagtcccgtaacatatcgagacgctcgaaattgaatgttgaagctctgagccaatacaaacgaccata

SEQ ID NO: 287394 - DNA, 351 bp, Glycine max
  unsure (1)..(351): unsure at all n locations
tcaacattcaatttcgaccgtcttgatatgtctatggactttatcaaacatcccgaaaaaangttattgtcacctgaattggctcaaatcttcaacattcaatttcgacacggctcgatatgttaacggactcaatcacacatacgagtaaaaagttgtggtcctttgaattggctcacagcttcaacatataatatcgagcgttctgatatgctacgggactcaatccatgtccgataaaatagttctcgccctttgagctgggtcacaggttcaacatgtcaatgtgagcgcctcgatatgttacctggactcaatcagacatgcgagataaaggtattgtcccttgca

SEQ ID NO: 287395 - DNA, 395 bp, Glycine max
agcttgaaggtatactagatgccttggttaacttggtaacccagctggccttgaataaaaaatttgtacctgtcgcaagagtctgtggtttatgctcctctgctgaccaccatacagacctttgcccttctatgcagcaacctggagcaattgagcagcctgaagcttatgctgcaaacatttacaatagaccttctcatcctcaatagcaaaatcaaccacaacaaaacaattatggcctctccagcaacagatacaatcccggatggaggaatcaccctaatctcatatggtctagccctcaacaacaacaacaacaacctgctccttccttccaaaatgttgttagcccaagcagaccatacattcctccaccaatccaacaacagcaacat

SEQ ID NO: 287396 - DNA, 399 bp, Glycine max
tcagctttaaagttcatgcagtacagtttttaccattcgtaaaggtttgtcatcagcaccagccctatacaaataaaacaatagaaaataagtgattcgagtttttttttttttttaaaaaggagagtagtaactctatccaacaaagttatatataccttctcctaatttcctccattcccaagtcttgcaggtacaaatggatgctttgaagtatgcgatcaaggtcaacatcatagatagtgctctgaagaacctgcaagcacaaaaaaataaatgttaatactgaacaaaattttaatgaacaaaacatatcaagatagaatttggcaatttcaactctgcttcttgacaatgaataataaagctaacaatggattaattaattgaatatctaat

SEQ ID NO: 287397 - DNA, 382 bp, Glycine max
tcgatcatttagatgactataagattaattttttattcatatcttaattacacttaaatcacttattttcaagaatgtattttaggatattgaatcaggttctttcttataaacttagtgtatatgattaattgagatacaccaggttttgtaaaaactagtatttaaaaagccacataaatttgttttcatacttaaaagttaaaaatgatatatagattatttttttttttttatcattgtaggctttaatcttacgaagtggaaatcctcgttctcacggaaagcatgatataggagcaacatttgtgctaagtgcaaaccacgccagaatttcattatttccattaacacccgattctgcttaaattggcacaccacc

SEQ ID NO: 287398 - DNA, 146 bp, Glycine max
cggtatttcacaccgcatatggtgcactctcagtacaatctgctctgatgccgcatagttaagccagccccgacacccgccaacacccgctgacgcgaaccccttgcggtcgcatcgaatataacttatattaatgcatgacttcc

SEQ ID NO: 287399 - DNA, 249 bp, Glycine max
tctagctttttgactttcggcgaattacgtcatctgccgcgctcacatgaacaagcatactgacaatcgagccacgcagaccggcggaaacacccgactggttatccccataaaatttttgctgactgtaagacgaaaagcctgattacacgcagagactaaccgacgtttgtgcgcccttcgtcaatcggggccgacaacctcgttgacatgcggagatttacgtcatctttcgtgctcacaagatct

SEQ ID NO: 287400 - DNA, 204 bp, Glycine max
ttacggctgacagacgataaaaggatcttacacacacccactcggaggtttgcgtcggtgctcgccacttatgaatctttatagatatcttgatgctgcctgtagtaatccattacccacggttgatcatgcattacagggttaaaagcgaagaccggaaactaccatggtctcctgtgagcgcttccagtggagtgacttcca

SEQ ID NO: 287401 - DNA, 388 bp, Glycine max
agcttttcagatttggtcttcgccagtgaaaggatcaatgtgggtccgaaaagaggcaaatttgatcatcctactaggacgactgagaaaactggggcaaataaagagggtgaggatgagggagaaacccatgctgtgactgccattcctgtacggccaaatttcccaccaacccaacaatatctttactcagccaataacaaactttctccttacccaccacccagttatccacaaaggccatccctaaatctaccacaaagtctgtctaccgcacttccaatgacgaacaccacctttagcacaaaccaaaaacaccaaccaagaagtgaattttgcagcgagaaagcctgtagaattcaccccaattccagtgtcctatgctgac

SEQ ID NO: 287402 - DNA, 410 bp, Glycine max
tccatcaagtggtaatcagagcacaagagcttcaagtatgtgctccttaaacctccattaattatttttctttaccttctcttccattgttgtttcttcatttttctccatgtatctcctcacatgtcttggtctaaatgttgttaacatgattctttagagtttccaccgattaaacttgctatagaaactagatttgattttctatggttcaaatttcttgttcttgttcttgaaccatgaattgtgttgagtttaagtccctttgagttttgtcttgttattatttgtggctgaaacctaaaccataaaattcttacaaaaatattatagtagaacagaacctcaaaaatatatagtgacttgttcacctattgtagtttcttcatagaagtcatgtctagtcatga

SEQ ID NO: 287403 - DNA, 385 bp, Glycine max
tttgcttcttttggaccttgaacaggcaactaactcctctttcaaaaccatgctatgtgctcgcgactggtccctttcttcccttcgcaacttgagttcattattgctaccccatagagctccgcgaaatttgttccggccatactcttccttgcgagccctcttggtctcttgttcaagggctcttgcagtaattgcattctcttcccgtaacccggcacactccttccgaacgtgtgtagcagccaacttgaacttctccttggcgagttttgcctttcctaactcgctcttgagagcttggacttcttcgtcctcttccggtgcttcaaaattctctgtgctgacgacttttaacttggcgagccaatctaaacctcgtatg

SEQ ID NO: 287404 - DNA, 397 bp, Glycine max
tgccacgccgtcgtcgttctgacccaaacccattttgggctcgtacccatgtcccaacattacagggctaccattaatacaacatcggatgagcggggttgcaccgggggagacccgacataagcattgcttaccacttccaaagcttgaaaggatttctccaagcactcctccgcgacttctacatatagcgtataagaaggacaacttacaaggatgtcttcctcccccgagagtatgattaactgcccttccaccacaaatttcaacctttcgtggagcattgaagggactaccccgactgagtgaatccaagaccggcctagaaggcagttataggctgggttgatatccatcacttggaaaatgatctggtagacgtggggtccaatatgaa

SEQ ID NO: 287405 - DNA, 403 bp, Glycine max
agcttttgtcccatttaacctatcacgtggagtggtttaaaattattattattatatacaaaactgtatggttgatttatgggaaaaaagtgtaagaaaagaaaaataaggaaggaaaaggaatagaaaatatataaatgatatttttttttcaaattgtatgataaaaaagaaataaaagataacaaaattaataaaaactgtgtttaaaattataaaaaaatttaaaacaaaaaagataaaaaaaaattagaaaaaatttgtgccttgaaccctagcttcagtgccatgtgcatgagaataatttgtaattaaatcacatgcatgactcggaaatcggaaattatatgcgttgcttaaacacacaaatgagataaggttttaaaaatctagcaaattaaaa

SEQ ID NO: 287406 - DNA, 426 bp, Glycine max
taactcgacacacaagtatcctccaattagatggcagtcttgagtccttgagagcagtgttatgctatggttacaaacaaaagttaatacaactcaagtgttgccgatttgtaaccttgacaaatggtgatactgttgataacgtaatggagcaggctcataagaaagcagggaattttgggataccatgagccactctagtatgtattatttaagagaaaagagaagaatgaaacctcaatacagttagataaatacagaaaaacaataaagctgcatgttgcttccaaataaaaaatagacattaatctgttgtctcaaaacaaagcaaggcagcatttccatttggttccaaggcagtataaaaccacttcgcaacaagtagagaattatgagggaaacttcatcacaagaacagcatacctc

SEQ ID NO: 287407 - DNA, 402 bp, Glycine max
cttcttatccaatgctcatcttggtggtgaagctccttcttccatggcttattacctagtggatggcgcctcctctcacctcttctcctttgtcttccgctgcatctccatggtggaaaatcaccattacaggatctcattgaagctcaaagatccagcctccataaaagctccacaagcaagcttccatcaagtggtaatcagagcacaagagcttcaagtaggtgctccttaaacctccattattttttttttgctttaccttctcttccattgttgtttcttcattttttctccatgtatcttcttgtaacaccctgatatatatatatatatatatatatatatatatatatatatatatatatatatatatatatatatattattagtaattatatg

SEQ ID NO: 287408 - DNA, 418 bp, Glycine max
  unsure (1)..(418): unsure at all n locations
tgtaatcgattaccagagcagattntcagaaaatattctcttcagtcacatctttttatgtggttcttgaatggctatcaaaggcctacatatatgtgacttgagacacgaatttgctaagagtttttcagaacaaaaaggtcttatcctcttataaagcaaaatcgttttatcctcttacaaattccttggctaaataacttgtgattcaataaggaattatttgagtgctcaaattgttcaatctatctctttcaagagagatttcttcttttcttcttcttcattctgaaaagggattaagagaccgagggtctcttgttgtgaaagaattctaaacacaaaggaagggttgtccttgtgtgtttagaacttgtaaaaggaatttacaagatagtggaactctcaagcgggttgc

SEQ ID NO: 287409 - DNA, 402 bp, Glycine max
agcttgtgaatttattgtgcttggtgactaattggtgcagaaaaacaaagtaaagctcaaagaaacaaaattgaagaactgaagtagctcgctcagcacgtcttaggcgcttagcgcaacacagtggcttagcgggcaacagaagcttagcgtcaagaagtatggagaagtctggaacatgaaggcttgcttaacctgcagctcgtttctatgtttgggatgatccccacttattcaagattggagcggataatctattgagaagatgtgttaccatggaagaagctagaagtatattatggcattgtcacaattctccttatggcagatactacagtggggataggacaactgctaaggtgctacaagctgaattttttttgccttctatcttcaaggatg

SEQ ID NO: 287410 - DNA, 420 bp, Glycine max
aagctccttcaactgcacaaggctatcaatataagaagagtatgcttgtggaaccttcacccgacgaagacactgacaaaaacttatcttttcctttcctgacaaaatatggaacgctatgtgcaagtaaataatcttcccatcaaaccttggatgcaactgcgatcgtatgcccatatcagctatatcttgatgggtattgaagccatacttcgtctagcattgaatgttaaggaacgttccaatcacactgtcacaaacattactgtgcacatgcataacatcaatacaatgttgaacgtaaatatcacaccataacggaagatcaaagataatggacctcttcttacatatgcagctattactttcatccctcttttgagtctagccaaatacaataatcacgtgtggaacccgctc

SEQ ID NO: 287411 - DNA, 405 bp, Glycine max
agcttttcacaaacttactctcttgcttgaccattaaccaccctccttagcttctgccaagactctgcaattggctcattaaccatatcaccaccaccagcatactctccttctcccaacctatcttctcttctcctctgcactatccctaatttacaccaccacttaccccacttgcgaaacctgttcaatcccttttggccatccccatatgcagcatcacaagcatcatccttagaagcagactccattacactatcagatagaacactattggacgtttgcaaattcgcatccctcaaatcattctcagttatcaatacctttgccccatagaacaactcactggaggcaggggaaaccttagcattagatatcactctcaattcatcaacatcccccatt

SEQ ID NO: 287412 - DNA, 420 bp, Glycine max
  unsure (1)..(420): unsure at all n locations
cttttcgcanagcttacagtaaaatctgggacctagccatggttgaagttttcacagaggccattgcctccctcgcctagtattatgaccagccgttaaggggcttcacctttggggacttccagctatcacccatggtggaagaatttgaagagatcctaggatgccctctagggggaaggaattagaccacaaaaagcaagtcaaaaatggggtggttggaataccgagaaaatgtttggaggcaaaagcaagaatcttggcaggtagaggcgaatgggccccattcatagacatcctcgcacttttgatcttcaaaggagtcctctttccaaatgtggatgggttggtggacctagtagcgatcgacacttttctcgcctatcatgaccgcaaggaaagctcggttatcgctatact

SEQ ID NO: 287413 - DNA, 400 bp, Glycine max
agcttgtttatttcatcgttgtttaccaagctgctcaatggtctggctatcttggagaagtccttgatgaatcttcgatagaaacctgtatgtccaagaaaacttcttatacccttggcatttactggtggtggtaacttctcaatgacatcaatttttgctttttccaccttaatgcctcaggttgaaattttgtggcccaacactatcccttctcaaaccatgaagtgacacttctcccaattcagcaccagatttatctcaacagatcttcatagcaccggctctagattcatcaagcaacaatcataggaaggcccacaaactgagaagtcatccatgaagacttctatgcacttctctaccatgtcagcaaagatggctagcttgcacctttgga

SEQ ID NO: 287414 - DNA, 436 bp, Glycine max
tactcaagcttgaccaatcccgacccaacccgggcatagtcagtcagtgttaacctgttatgtacctaagcaggcgagctcctggcagtcaacagataaaaggaactaagaccacaaaacaaggaggcttgtgtggtggctggccagttgtgaaacttgattgatatatgggatgtggcctctggtaatcgattaccaagggtgggtaatcgattacaaggcttaaaagtgaagacaggaagctaagatggtctctggtaatcgattaccaagggagtgtaatcgattaccaggcttgaaaacgaggtcaggaagctaggagggcttctggtaatcgattaccaaggggtgtaatcgattaccacgcttacaaatgagactggaagattatggaggtctctggtaatcgattaccagtctgtgtaatcgattacac

SEQ ID NO: 287415 - DNA, 396 bp, Glycine max
agctttattttggctcattacctgtcataggcttcttttaaaggctcggctcggcttacataagagtatgccttgacctacgagcctatttaaaagtctacttaaagacgtatttaaccaattaattgttttaaaacctagtaaaatactaactaagaaaaaaaacttataaaatttcctgtacaaatccaaaaataattgataaacaaaattatattgaattcaagttatttaaacacaaagtatatcaaaagaaaatgaaaaaaaaatgcataatattaaaaaatatatggattagagatgatttatactaatatagccaaataaaaatatttaaattatttgaaaatgtctttacaaaacattattgtctttgaaagtattaatctcgttgca

SEQ ID NO: 287416 - DNA, 415 bp, Glycine max
tacattgattgaatgctttgtttgactggtttttgcttgttatgttgtctttgggtgtggaataacttgtatgtatgatatatgatgtataattgataacggttaattatgagtatattttggggttaaactatatagaattttgcaatctttttctcttaatttttcctttttgaacaaataattgtccaattaatatcatttaagtttttgtgcagagaatattaaaagtgatggatttatgatgctcggtgagtaaaataaagcccaaaatatatgataattcaggaagacaagaataattatagaaaacgagtaaattaaggataatgtggctaatcaaggaaatgaggctaattaacataaagaaactaattacggaaaacagacatattaatgaaagcatgactaatga

SEQ ID NO: 287417 - DNA, 392 bp, Glycine max
agcttgtatgattatggggtacccatcacatgtggtactatgtggcggtcgggcgatggtgcacaacaagttttccacatccacaatgcgcgcataaacccaccatcccctgttgcccacctccaactgagctcacgtactcccacgtagcccatatcctcgtttctctcaacaccgggtccccatcaatcctcccaagcttccacaacatccaagcaaaacaacattcacacagcacaagctatcacagccaagcaaaacaaagcataggcagaaaactctgctcaaacaccaaccaaaaatcacagcttttcccactcaaagaccccagtaacaattccttcgatccaatttgctaaccgttggatcgactccaaaattttactggaagt

SEQ ID NO: 287418 - DNA, 416 bp, Glycine max
tcgccgacttagtattttacggcataacgatctaagtgggttggaacagaagctaatctggatatcctgctttgacgaacatgagacctaaggaaaacggagagagtaagatggaagatggatcccatgttgtgactgctgtcccttcatgaccaaatttaccaccagctgaccaatgtatacactcatccaatatcagctgttctcattacccatcatcctatgacccagaaacacctaatgctccacatggaaacccctaaatcagaatcaaaacccatctgccgcacatgcgataccaaacaccacctttgacacgaaccatagcaccaactatggaatgaattatccacataagaagcttgtgaaatacaccctaattccaatgccatatgctgacttactttcatatctac

SEQ ID NO: 287419 - DNA, 391 bp, Glycine max
ttagctttgtaaagcggcagaaaagaaaatcaaaagtgaacgagatgaagatgaaagcaaacaaaacatgaaatgaattgaaagtctcggattcgaacacttaccggttgaagaccgaagaacggacaaagaacgttgaagaacggtggaaaatcttcacggatttgctcacgaaaacgtctcgaaagcgttacggaagcacctcgacttgaattttcttcacagaaacactttttttttccacccaaaacaactgaaatgcatagcataagggtcagggatccttgaaactcagcctcctcctcctatatataggagaaatggggaagtgcttgccacccagaggcttcttgaggaagatttctaagcacaccccatatactaagttcac

SEQ ID NO: 287420 - DNA, 411 bp, Glycine max
tgaaaaccattgactggtcctttagatggtcctaaatctgtgctgttattacaatgccaatgccacacctaaaatattttatgagaacttcaagattccaggccatctaaaatctaattgcattaatcaattaataaagaacaaacagacaatccagtgcttgacttgcaacacaacaaaggaaacatgtccagaacaccttgctaagcaccaataacaaagtgagcaacaggggggactctgggcaacaaggaaatagatgaaagaattaccttgttctccagatacctgactgagcaaaatattggagacagggaacatggcttggatatggtccgaaatttgggagatagaggggaggcaaaaaatgaggtagtatcaggggaaagcactgatggctcttctgattac

SEQ ID NO: 287421 - DNA, 369 bp, Glycine max
  unsure (1)..(369): unsure at all n locations
ttcnnagcttctactacttttctgaggagaggcgaaacgacgcgttattgaaatcggagagctgcatgggcgacacggtgacgctgctggcgagaatcgtgcgagtcggactacaaattgagattgatgacacaagagattgaggaggcggagatgaagcgggtcgaccctagacgcttccatgctttctttagcgatggcggcgttacgtctccgctttacccattcattcattaatggtttttgtaagtcccctttactccttctatcatcattggtaagtctcttttgctcttgattgtgattggttgtgcacgtgagagttattatttttccccatttggatatattgtcgagcacctgctgcat

SEQ ID NO: 287422 - DNA, 389 bp, Glycine max
ttgggcctctatcagaagtgtcattgcatgaatctagatttatttcattgtcaatgcttgcttggtagaaggtcagggctcggactaaagacctttcgtctatgcttatgacatgagtggtactatccactatgggacaaaggctccctgtgtgaggatagggtgccactttcaggctttcctcttaacactgttgtgcctgcttttgatctgccttgatagtcacaatttctcctgccaaggtagggaacttcatctttagatgtggtgtagagacgatggcttcaagctcgttgagtgatttcttgccaatcaaggcatagtaaaaagtatttgcatcgacaattaaatacctgattgtaaagcttctggttagttggccttgaccg

SEQ ID NO: 287423 - DNA, 394 bp, Glycine max
agctttatctcacctactattcgggttatgtacgcaaaacgatctggctgcaatcctctattcagcatctcatcaaacaattccttagccattggcaagttccccaacttgcaaaatcctctaacaagaattgtaaaagtaaatacatcaggatcaggcccatgtttgatcatttcatcttttagccgcatggcaacatccaagtcccccattctgcaaagaccatcgataagcgtattataggtcacaacactgggaacaagacccctgaatcttaactcagcaaataagagaaaagcctcccctatgtttcccaatctggtgtaaccataaatcagagtgttatacgaaaccaaatccggcatcagattctggttcaccataacatccagca

SEQ ID NO: 287424 - DNA, 408 bp, Glycine max
  unsure (1)..(408): unsure at all n locations
agtaggattatggcgtatccatcacatgtggttctacgtgttggccagtcgacggngcaaaacaagttctccacattcacaaatcacgtacaaacccaccatcccctgttgcccaccttcaactgagctcacgtactcccacgtatcccttatgctcgtatcacgcaacgccaagcccccatcgattctcccaagcttccacaacatccaattaattcaacatacaatcatcatgaactaactcaaccgagaaaataaggcacaggcagaaaactctgctcataacacaaaccaacatcacagctttttcacactaaaataccccagttatattctcttcgttccaattcgctaaccgctggatcgattagaaaatcttattggaagtctctagtacataagactaca

SEQ ID NO: 287425 - DNA, 379 bp, Glycine max
  unsure (1)..(379): unsure at all n locations
tctgcatgctagcntttatccaatacaaacgaccataactttttactcggatgtttgattgaggctcgtaatatatcgagacgctcgaaattgaatgttgaagctctgagccaatataaacgacaatgaccttttactcggatgtttgattgagtcccgtaacatatcgagacactcgaaattgaatgttgaacctctgtgcatattcaaacgacaataaatttttactcagatgtctgattgagtcccgtaacttatcgagacgctcgaaattgaacgttgaagctctgagccaatacaaacgaccataactttttactcggatgtctgattgaggctcgtaatatatcgagacgctcgaaattgaatgttgaacctc

SEQ ID NO: 287426 - DNA, 410 bp, Glycine max
  unsure (1)..(410): unsure at all n locations
tcaacattcaattgtgagcgtctcgatatattacgggactcaatcagacatcagagaaaaaagttattgtcgtttgaattggctcagagcttcaacattcaatttcgagcatctcgatatgttacgggactcaatcagacatccgagaaaaaagttattgtcgtttgaattagctcagaagttcaacattcaatttcgagcgtctcgatatgttacgggactcaatcatacatccgagtaaaaagttattgtcgtttgaatttgctaagaggttcaacattcaatttcgagcgtctcgatatgttacggggctcaatcagacatccgagtaaaaatttattgtcgtttgaatttgctcanagattcaacattcaatttcgagcgtctcgatatgttacgggactcaatca

SEQ ID NO: 287427 - DNA, 389 bp, Glycine max
agcttgtgctcttgcctcactcatcgcctttttggtttcatttctagctatcttatacttatcccaagtttcagaatttctacacctagaccactccttgaaacactccttttttactctaactttgctctgaacattttcattccaccaccacgattctttacccctaggtccaaaacctctagattcacccaacgtctctttaaccactttaataatctcttgggacatcttgttccacatatcatttgcacttccttgtgattgtccacaccaaccctcccatatcttttgttggaagattccttgtttctcacccttcaagtgccaccatttgatccttggtgctaccataggacttcttctctttgccctatctctaattctta

SEQ ID NO: 287428 - DNA, 406 bp, Glycine max
  unsure (1)..(406): unsure at all n locations
tgcttgcggagcttctatggatgatggatctttgagctttattgtggtccttcaatggtgatttttcaccatggagatgcagcggaaggcaaaggagaataggagaggggaggcaccatccactagggaataagccaaggaagaaggagcttcaccaccaagaattgccttggataagaagcttgaagaggatgctntaatggaggaaaagaaagagagaaggggggagcacgagattgaaggaataaaagagggagagaagtggaactttgaagtgtgtctcataagactctcattcatcacagttacaacaagtgttacacatgcttctatctatagactaggtagcttccttgagaagctgtcttgagaaaacttccttgagaagcttctttgagaaaacttc

SEQ ID NO: 287429 - DNA, 400 bp, Glycine max
agcttattacaaatcgaacatgtgcaaggacactgaacaattttcccacttctgagatgttttgatcaaagaaagcaccaataactagttccacgcataaaacatcaattttgtcctgaaaattagtcctgaatttggcaccacccatcagtttggaccttgatgttttcgaaaagcaaaatccatttgatccccaaaatttactgtcaatttggtcttaccattatcaaatcagtcaattagtccttgaatttgacaatcattagtcaatatgctccctaatgttaggaaccaaattgattaataattgcaatactaaaaaactaaattttttgtaatgtcaagagtaagattgattgatattgttaaagtaaaggactaaatttccttttccgtaatg

SEQ ID NO: 287430 - DNA, 425 bp, Glycine max
  unsure (1)..(425): unsure at all n locations
tagggctgaaaggtttgttgaaatacgcaatagggtggccatattgagaaagaactgcacccattccgacgctggaggcgtccgtctccaccgtgaatgggagctgaaaanttggtaaggtgagtaccggaactgaagacagagctgccttaaggtgttcaaaagctgattgtgcttggggtgttcactaaacaggttcttttgtggtgagctttaccaagggagcagcaatggtggcatatccctttatgaaacgccgatagaatccggcaagtcccaggatgccacgcacaacccttgaagattgaggtatgggccattgaaggatggcctctaccttcgaggctaccggttctactcccttcttcgagaccatatggcctaaatattcaacctgcaactgcgcgaataagcattttgataat

SEQ ID NO: 287431 - DNA, 400 bp, Glycine max
agcttgtgttgcattctcaaacaccttcacaggtggccaaagatcaacaaactatgaaagataagagggataaggaaaataatagaaagagaaaagaagaactaactttaatagttaaggaggagtgtaaggaggtaagtgtctcctccaaaaggttagctaagaaggaaagtcattttgcaataaagacaaatattaaagaaacttcccttcttagacaacctccacattttctcctctataaaagaacacttgttagcactaccatacctcttgagcttgaggttattccttaagtaaatgagtttttggatgagggtttgggtcgtaagagcttaaatccttgtgcttttggtggtatgatgaatgtgttgagtggtgtgcaaccctcttttgtaaa

SEQ ID NO: 287432 - DNA, 423 bp, Glycine max
  unsure (1)..(423): unsure at all n locations
tctacaattcaggtcagttntgtagctgtgaagctaactttatactttgacaaatcttaaagctctccttgaaaagaaacaaaaaagaatgtgtgttgggactaaaaagtaaaaaccattcacacacgaaggagctataaattaagtgggttaagaaaagtgttgagtggaatgacttgtgggctttttagttcatatgggggcagctctaataacatctgctaaaaagcccaaacaagaaccacaagaaaacctaactactgaaatatcatatcagctatcaactagaggttcactcttctgcttttcttattaattagtcatatgcttgtgttagtttatttctaattttatcatattgtagttggggtagggggtattttaaatcgtcatattctaaggcaacacaacattccaataagt

SEQ ID NO: 287433 - DNA, 394 bp, Glycine max
  unsure (1)..(394): unsure at all n locations
agctttcagcaaattcaaacgacaataacttttttcctcagatgtctgattgagacccgtaatatatcgagacgatcgaaattgaattctgaagctctgagctaattcaaacgacaataatgatttgctcggatgtctgattgagtcccgtaatacatcgagacgctcgaaattgaatgctgaagctctcagctaattcaaacgacaataactttttactcggatgtctgattgagtcccgtaaaatatcgagacgctcaaaattgaatgttgaagctctcagcaaattcaaacgacaataactttnttcctcagatgtctgattgagactcgtaatatatcgagacgatcgaaattgaattctgaagctctgagctaattcaaacgacaataa

SEQ ID NO: 287434 - DNA, 425 bp, Glycine max
tcagaattcaatttcgagcgtctcaatagattacgggactctttcagtcttccgagcaaaacgttattgtcgtttggattagttcaaagcttcagaattcaatttcgatcgtctcgatatattacgggtctcaatcagacatctgaggaaaaaagttattgtcgtttgaatttgctgagagttcaacattcaattttgagcgtctcgatgtattacgggacttaatcagacatccgagttaaaagctattggtgtttgaatttgccgagagcttcaacattcaatttcgagcgtctcgatattataccggactcaatcagacatccgagtaaaaagatattgtcgtttgaatatgctgagagcttcaacattcaatttcgagcgtctcgatgtattacaggactcaatcagacatccgagcaaat

SEQ ID NO: 287435 - DNA, 400 bp, Glycine max
agcttgatgtcattttaaagagactatgtcgacctaaatgaagactgaacatgtattgtttatctaattgtattcattatgcgatataatttgttgcaagtcattaaaggataattattaagtactcgttgcgttaagaaaaaaattagttggtgcaaccaaaatcaattatgcatgtacgatacatcgttgtcataattgacaacacataacgatatgcatgcatattaaagtttgagcatgacacgacattgacttagtaggaaacataaacacgaaacatgttcacgcctgttcttttgtaaaaaaaaagtgaagcaatctatcggtgagaaccatgtatatatatgagacgtggcatacgctaataaatcacacattatcttgctttcacatactc

SEQ ID NO: 287436 - DNA, 423 bp, Glycine max
tgaagacaagactatacgaggtatcttccttgggtatagctttatctctattggctaccgtgtctacaacttgcaaactaagaaactcgtcattagtcgagatgttgaagttgatgagtacgcttcttggaattgggatgaagaaaaagtggagaagaacgttcttatacccgctcaactacctcaagaagaagctgaggaagaaaacccaggtgaaccaccttcgcctccaccacaacaacaagatcaagaactatcatcaccagagtctactccaagacgagtaagatctttggtggacatatatgaaacctgcaacttggccatactcaaacctggaagctttgaagaagcgtcaaagcaggaagtatgggttaaggcaatggaagaagagatatagatgatcgagaaaaacaacacatg

SEQ ID NO: 287437 - DNA, 401 bp, Glycine max
agcttctacttatgttgcagggcgggtttccttcactttcttgtttccaacgcgagctctgaccaccgttcttccttcccgcgatgcttcttttcatgtccgcctgagtgggcttatatcctaaaccatacttcccacgattcccttgggtttttatcagactagtcatgccgccattgtctttgcctaaacccatcccgggttcataaccgttccccaacataactcgggccatcattaccgccgcctcggatagacaaggttgcccaaagagtgagtccacggaggaaatgctgaccacctcaaaagactggaaagcggtttctaacgattcttctgcggcttccacataaggcatggaggatgggcagctcaccaagatatcttcctcgcctgacacg

SEQ ID NO: 287438 - DNA, 436 bp, Glycine max
tactcaagctgtaaaatttgaattaaaacgttcaataactgctggtaattatttaccatatatgtgtaatcgattacacagtgcaaattttgaattcaaattttaatagctgttgtaaatcatttttggccattggtaatcgattaccagagagtaaatctcttgaaaaagactttttaatttaaatttcttggccaaaccttttgctacttcaattggaattcccttcctatttaatatacccttcctaagactctagagactgtcttgatcatccatcttgaatatctttaatttctttgtcttgcataaatctttgagaagcatgtgatccatgtgatcctttggcatcatcaaaacattcagcttgatcctttgtctacaatctcccgctttgtgatgatgacaatctctgaaatcaagacaagctatatac

SEQ ID NO: 287439 - DNA, 390 bp, Glycine max
agctttattagtcttatccttgggccgaccagcatacatgatgaagggaagggcaaacaagcaaaagtcatacctcatgcatatatttatctccatccatattcaacaaatcatggcacatagcatcataggtccattcatgaatgacaggtgcaatctgtggtgcagattcaatacagtcatcaaaattgagagctataaaaggagacattcatattcatagtgaagagacatttttaacctgatctatggatctgtcaacaatgagcatatcacaagtttcattatgtggaaaaccgggaatggtagatttatatttagaaaccatgtcccaaacagcattagcaagcttggtaggaactaattcacgaaccgctgctgctgtagact

SEQ ID NO: 287440 - DNA, 415 bp, Glycine max
tgagcatgatttgttgaacgagaaagcaagatttgacactttatatagcgcatgatacgacattcaaaagtgaatgaaccagcaaacaattgaccaatcatatcagcattttcattgcaaaccatattgcaggcatcatgatttgaataaatatgcttccggtcatcaaccaaagtgctctcaaaaagtacaccttgattgcttaattttgtaaatgaataaaataaagactgatcaaccacaatgggaattttatgcacctcagaagagataacatcatcccgaattttcagattattataaaagatacggactaactcatgatagtatggcagtttgagagtcataaaatcgattaattcagaattttgaaagacttgataacaataaaaaaaatctctctttcaagaattat

SEQ ID NO: 287441 - DNA, 384 bp, Glycine max
agctttatcatggttggacatgatatatgtcagggtttggtttagttaaaggataaaaggggatgtcccacattatttccatgacacaaatgcaacaatgatgatttggaaattttatgcaaaactagtcatgcatgcacctatgtggacactcaagtgtcaaacttttatggtcatgtgatgctagggctcaagattcatttcctctattttagtcaacccagtgtttccaaaatacgttcctttatcaatttgtgcattcatccgagtctattttcgggtgttcgaataactttcacagcatttacccttcaggtgtatacacattatttcaaaaactgggtatgatcagtgaattggaaattatctcttttacaagcatgt

SEQ ID NO: 287442 - DNA, 415 bp, Glycine max
  unsure (1)..(415): unsure at all n locations
ntattcccttaaaaatcaaatgcggaaaacgtttcnatgtgtgagtaattacacatgttgggcaacgcgggcagtgcgggcacctagacattgatactataccctatggccgccgtcaagggcccagcctcggactctgaccctgaccttgaccctcaccaccatcctattccattccattctctctctctctgttccattatgccacttgtttttatttttcatcaacttagtttcacttggcgcctgataatgttcaacttttccttcaatttgttctaaacattcacaatgtaccactttggtacaatataacttaacgatgcatagtgatanttttacctacatgattgacacttaattntgcttcttagatatgtagttaaactctaatctagattttagagaaacattt

SEQ ID NO: 287443 - DNA, 395 bp, Glycine max
agcttttacacgagctagacgcatggcaatgaaggttcaactacaaactctaacaaaagggtatctttctatgcttgaatatattgagcacaaacactccattgctgactctcttgctgaaaatcttcatccaatttccgatgaggatcttattggttatattttaagcggccttgattcctcttatagtgctttctcaactgctttcatgatgaagtctgatgatgtctttgttgatgatcttgctggccttcttcttcaagaggaggctcgcttagagcaggaacatgttcatcaagctgttgttgtttcacagcccactaacccatccccacttttgtctactcctgctatttacactacaaatcggttctcagaccggtcctcttccacca

SEQ ID NO: 287444 - DNA, 417 bp, Glycine max
tgaacgaatgtgagacacatcttattcaaccttgtgtgattttgactccatctcattgaagcgcatatccacttgtaatttcaaagtgtcaaacctttcaccaacaaaggtttgaagaccattaaacctatccaaaatctttgaaagaagagatgaatcttctccatcatgtccttcttcaccaacatgtcgagcacccttcttcacccaagagccatcatgctttttttgataaccaaaggatgctatgactgaagcgcctgtaaggaaggatctcttgattggaacatagggttcataatcaagagggatgttgaagtgttgaaggaaaagggtaacaagatgaggataaggcaatggagcattcaatcgcaatgccttgtgcatgcgatatctaacaagatgtgcccaatcaat

SEQ ID NO: 287445 - DNA, 384 bp, Glycine max
  unsure (1)..(384): unsure at all n locations
agcttgtagacttcgcttattttcttcttcaatctctttcatgacttgttccctaatggttactactatttcagccaactgttctttggtgaatgctatggatgaggtacttgaggcacgtgatgtcctcccatagtattgactaattgtgaccccagacccagctgcacgaacacaacctccatgatctggtcttcctatggccatgttaagtatatcttgacgaccctgggggacaaactcaccctgtgtcacttgttcttccaacgagtcctacatgaagaacaaatttcacatcgttagatttcactgtcattgtaaacaacataacaagtagtaattatatgtgaaacaacatgtcacatttaatccanaattgaaatt

SEQ ID NO: 287446 - DNA, 391 bp, Glycine max
taagctccttcaactgcacaaggcttttatgttagcttcttatgtcagggttagcattattttgaaaattttgactaaatttcgacagcatttcgcattggtctccaagtacacaacatgacatcggtgaaattaatttctcgataatcaagtatgcactcaaagaacaacttgaaatgcattgtaccgaaatttcatcaaattaatcaaaataataataaccttaacgaatgaatctaacataaaaataccagtctccccaaactgtccaaacggacaattaaagactaaatacaatgactaatgcaaattgtccgctagaattattgcattcagtctcaaacgggaatctaaggtgcactcatcatgaagacaatttgtatagcatata

SEQ ID NO: 287447 - DNA, 392 bp, Glycine max
ttagctttgaataataaaatcgaagttcttaaagttccatccgttggtccagaattatggcaattgagagaatgacattattcactccaatacttgccattttttttccatcatgtttgttgtcaagttccctagctcttaatgttggatcgagtggcctcagaataattaaaaagggagggttgaattaattatttctaaacctttactaattaaaaattactcttctaaggcttttactaaattgttaaaagaatgaggagtagaagagaaacttaacagaaagtaaaagcggaaattaaatgcacagcggaaagtaaaagagtatggaagaaggaaacaaacacacaagagtttctatactggttcggtaacaacctgtgcctacatcc

SEQ ID NO: 287448 - DNA, 403 bp, Glycine max
tgtacacatactaaggtttctccttatcttcaaatctatgtgtatgcttcacatacacttcttcatttatgaatccattcagaaaggaactattgacatccatctaatagagcttgatgtctttatgtgttgcataggctaaaagtattatgatggcttcaagtcttgctattggtgcaaaggtttctttatagtcaattccttcctgttgactatacccttgagtaactagtctagccttgttttttactacttctccttcttcattaagcttgttttggaacacccatttggttccaatcgctaaccgattcttaggagggaaacaagattccaaaccttgttcttagtgagttgacgtattttctcttccatagaagtcacccaagaatattcatgcaat

SEQ ID NO: 287449 - DNA, 380 bp, Glycine max
tagctttgttatgtcaaattttggttcattacttttactttcttgtctttttatacttctcattataaccattgattacttttccttaaaattgatccaatggctgataaaaaaaaaatcttaagttattatttttttaaaacttcatagagaagcatttttactttctctctctttgtcaactcttgacaaaacccatttccatctctccttcgcatcccatttcttcttcttctcttcccatttcgtttattttcccgacaattcccaacagtgtgccgaggtgagttctgaatctcatccttcctttttctgttttccatttccacttttgggatactaatgtcaaagcttcttgatagttttgatttgacaatcat

SEQ ID NO: 287450 - DNA, 360 bp, Glycine max
  unsure (1)..(360): unsure at all n locations
ntgagccaaaatcctgactcaccataaacctttcccatttgagaatgccaatccttaccctcggaagccaaaataaaaaagagagagagagagaagagaaggaaaatttccaatcaaaggaaaaaggagaaggaaaatttcaaatcaaaggaaaaaggaaaggaaattcccaatcaaagagtgggagaaagcaaaaagaaaagaaagaacattcccaatcaaagaatgggagaaagaaaaaaagagagaagttaaaaaagaagaaagctcctggtcagagaaaccagaagaaatgtgccgagaggtccttggaccagacaatatctaaacaatacagaattgttcccaaatgaataaaaa

SEQ ID NO: 287451 - DNA, 404 bp, Glycine max
  unsure (1)..(404): unsure at all n locations
agctttactaagcatgagatatattgggtaagcaacaagtggaagtctcattattacaatttgttgatgataccatcttttttgcggagaatacactgcaaaatatcatatgcatcaaatctatcatgagaagttttgagttggtatttgtactaaaagtcaactttcataagagtagcttgggagggattgcggtgaatgctcactttattcataggtatgctcacttattgaactgctcgtccatgtctttgccttttacctacctcgggatccctattagagtcaatctaagaagggagtgtgtgggaaacatttttagataagtgtaggaaaagattaagcaaatgtaagcaaaaatttatttctatggggggagagtctcttanataaattcagttttt

SEQ ID NO: 287452 - DNA, 434 bp, Glycine max
aatactcaagctttgacttgagttatcaagagattataaatatgtggatatggcatgaatttcaataatctataatctatctttaaatcttctctcaacatcattcaatatctttcaactctttctacacaattttctgattcatttctcttcatctttctaaaagtttttgttcaacactttcttttccgagaaaagttctttgttcaaaaacttgtgctattcatctttttcattctcttctccctttgcccaaagaacgaaggactaaccgcctgaattcttttgtgtctctcttctcccttacaaaagattcaaaggactaaccacctgaaaattcttttgattcttcccttccccttaagcaaaagatttcaaaggactaacctcctgaaatattttttgtttccccttacaaagattcaaaggactaa

SEQ ID NO: 287453 - DNA, 404 bp, Glycine max
agcttctacattcaatttcgagcgtctcgatatatgacgggactcaatcagacatccgagtaaaaagttattgtcgtttgaatttgctcagagcatcaacattcaatttcgagcgtctcgatatattacgggactcaatcaaacatccgagtaaaaagttattgtcgtttgaatttgcatagagggtcaacattcaatttcgagcgtctcgatatattacgggactcaatcagacatccgagtaaaaagttattgtcgtttgaattggctgagagcttcaacattcaatttcgagcgtctcgatatatgacgggactcaatcagacatccgagtaaaaagttattgtcgtttgaattggctgagagcttcaacattcaatttcgagcgtctcgatatatgacgg

SEQ ID NO: 287454 - DNA, 421 bp, Glycine max
  unsure (1)..(421): unsure at all n locations
ttgagccaattcagacgacaatatctttntactcggatgtcttattgagtcccgtcatatatcgagacgctcgaaattgaatgttgatgctctgagcaaattcaaacgacaataactttttacttggatgtctgattgagtcctgtcatatatctagatgctcgaaattgaatgttgatcatctaagtaaattcaaacgacaatatctttttactcggatgtctgattgagtcccgtcatatatcgacacgctcgaaattgaatgttgaatctctgagccaattcaaacgacaataactttttactcggatgtctgattgagtcccgtcacatatctagacgctcgaaattgaatgttgatgctctgagcaaatttaaacgacaatatctttttactcagatgtctgattgagtcccgtaa

SEQ ID NO: 287455 - DNA, 403 bp, Glycine max
agcttttgatgaggtagtgttgaagggtgaaacttcctgcttttattgttgaccacagagtggtacctggagatatgtcgcgggggtcaggagaccttggggacgtcaggtggggtgctattgcccaaaaccaagcttgaccaatcccgacccaacccgggcatagtcggtcagtgagaacctgtgatgtacctaagcaggcgagctcctggcagtcaacagataaaaggaacaaagaccacaaagcaaggaggctcgtggtggctggccagctgtgaattttgtgtgacatgtggtttgtggcctctggtaatcgattaccaatggtgggtaatcgattacaaggcttaataatgaagacaggaggctaagacggtctctggtaatcgattaccaaggggtg

SEQ ID NO: 287456 - DNA, 408 bp, Glycine max
  unsure (1)..(408): unsure at all n locations
tgaaacacgtcactaacaacatttccttctcttttgccaatgtagacatcttattatggagacagccatggtttcttcaatactttttattcacgtgaatcccaatatatataccaattgaggcggtttccttctgaacgggaacggaggtttcagagcatcaccgaactgtgcaagtgtgacatcagcatcggcctcgatgaacatgacccgcttgagagtctatctcagataggatcttaatttcgccattattggtgatattagctacaaataagttgtgtgactcatggagttcgtccagcgttattgtataggcatggaattgatcattatccacatgtgtggataaatttcttgaaagccgacaagaaaataacgaanacatattcaaattaagttttgaat

SEQ ID NO: 287457 - DNA, 385 bp, Glycine max
  unsure (1)..(385): unsure at all n locations
agcttctgaaacaggtttgcttacaattggtcctcgatttgggggtgccattgatgatgctgctcgctacttcaaggatgctcatgacagggtatgattagttctttcctgtgaagctggttggaactagaataaaaacatcggggagtggtagaatgaacctaatgggttaaagaattattttataaaataaacttagaaccaggggaaaaattcaaaaacctcagatcccctccagccccaaaaaaataaaaataaaaacaccacgaaccttgtctttcatctaatgtgtggtactttttactgtgtcttgtcacaggcgcttagtccttatgagtttgttgaaagtatgaagaagaagggaattngtgtgnnaggaataggg

SEQ ID NO: 287458 - DNA, 415 bp, Glycine max
attataatggctggaaagttcgagaatactagactagtcacattcgagaatccaaatgactttatattgatatcattcaaaaaataaaaaatctttgtgattttgagctgagaatattcacttgcaggctgcaccatggcggaaaattcacgtgaaagcgcttcatggagttggtattcacgtaattttgtaatcctcttttctatttatttataatatatctattgtatctcttctagatgatatatttatgatggaacttgcatgccaattaagaagcaataatagaactatatagcaattcacaattgtaatttgcattccaccaaacttccctatgtagagggtactgtacgtgtaatgctataattaagcaattgctatatatcaactgacgtgtcaatccacctttcta

SEQ ID NO: 287459 - DNA, 367 bp, Glycine max
agcttcaaactcgaaggtggaggacacatgaacgaaaattcaattcatggggctccgaaaaaggttgagaatggagaattgcacaaagcaatcactacgcatagctccaaactcgaaggtggaggacacatgaacgaaaacgcaattcatgggctccgaaaaagggttgagaatggagaattgcactaagcaatcactacgcatggctccacactcgaaggtggaggacacatgaacgaaaacgcaattcatggggctccgaaaaaggttgagaatggagaattgcactaagaaatcactacgcatagcttcaaactcgaaggtggaggacacatgaacgacaattcattcatggggctccgaaaaa

SEQ ID NO: 287460 - DNA, 410 bp, Glycine max
tctacttatgtggcagggcgggcttacttcactttcttgtctccaacgtgagctctgaccactgttcttccttcccgcgatgcttcttttcatgtccgcctgagtgggcttatagcctaaaccatacttcccacgatttccttgggtttttatcaggctagttatgccgccattgtctttgcctaaacccatcccgggttcataaccgttccccaacataactcgggccatcattaccgccgcatctgacagacaaggttgcccaaagagggagtccacggaggaaatgctgaccacctcaaaagactggaaagcggtttctaacgattcttctgcggcttccacataaggcatggaggatgggcagcttaccaagatatcttcctcgcctgacacgatgaccaagtgcc

SEQ ID NO: 287461 - DNA, 391 bp, Glycine max
  unsure (1)..(391): unsure at all n locations
agctttataagcgcgggtctgggagacaaaggtcaagtggtcgcgatatgcgaagatgatgttccgagtacattggatttggtacgaccatgccctcctgatttccagctgggaaattggcgagtggaggaacgccccggcatttacgcaatgagcataatgtaaacctttacggtttttaaaagctctatagttgggcctaggctttagagtttttccttttgttaaggctttgtgtcttttgtttttgaatttctaatacgaggacctttcttcatctgttcctgcgtctctacccattctcattcatttgcatgttcacttctttntttgaaacggcagatccgatgacgagtcccccgaagtactaatacctgggacccgcttatcg

SEQ ID NO: 287462 - DNA, 383 bp, Glycine max
  unsure (1)..(383): unsure at all n locations
tgagatgaggaagtgttgaagggtgaaactttctgcttttattgttgaccacagagtggtacctggagatatgtcgtgggggtcaggagaccttggggacgtcaggtggngtgctattgcccaaaaccaagcttgaccaatcccgacccaacccgggcatagtcggtcagtgagaacctgtgatgtacctaaacatgcgagctcctgtcagtcaacagataaaatgaacaaagaccacaaagcanggaggcttgtggtggcttgccagctgtgatttttgtgtaatatgtggattatggcctctggtaatcgataacaaggttgggtaatcgattacaaggcttanaattgaagacaggaggctaagatggtctctggtaatc

SEQ ID NO: 287463 - DNA, 391 bp, Glycine max
tcaagcttgatcgatgtatggcggttggggttgtgacagctctagcagacttgattagacaatccatcttgctcatcctttatggtttcatcctatagttcctaagaatggaactcttgtaggcttgatcaatttgtaatttagttgagtaacatatccttgtccattatataaaataaaatctaatttatttatgcatttgcgccaatgtcccattctcttttttatgtttgtgttcgcaagagtttaatatcattatgagacctagtcggtttcttgataaaattggtctttgttaaaaatcatcttatggatgatttatcgcttgcaaggcatagtaggtctccttgttctctaataacatcagtccttactaacatcaacttgtgga

SEQ ID NO: 287464 - DNA, 415 bp, Glycine max
tgaaggagttgatgagctaggccatccaaactccggagcttcaccgatatttggcacgattgttaggattcgattactctatccaatatcaaacaagaaaaatgaatgtggttgcagacgcgttgtcacggtgtttggagttgcccaatgcttcatgtttcatcctctcaatgccacattttgtgtttgtggaagatctctataaggagttgcaatcgcataatgacttcatcactctgagggagaagatccaggcgaacctagaagattacccggatcacgtgttaacaaccaatttcgttttgcatcaagggcgtatctggctaccttcagactacaccatcatcaaggctctgctcacagaatttcatcaaactccaacagggggtaatatgggttttcgaaaaaccttgaa

SEQ ID NO: 287465 - DNA, 326 bp, Glycine max
tcaagcatttccagtgacgagtcgtgaaaggagtgccagctacaaaccaaacacacgctatcccacacaaagcaacattcgacaaggtatgacaggataaagagtgtgtaacgggttagaacaataggaggaacgaaatgaaatggaacaaagagcacagaagcgaaacataataaaataaaagttctactcatagcaagagatatcataatggaacggaaaaaagctcctgatcaactagaaggaaagtgaacggacgagaccactgacaaccatctaaagtgcgatactacctacagtgtataaacaccagacactaatccata

SEQ ID NO: 287466 - DNA, 344 bp, Glycine max
tggtacttctactgaagctgagtttctaccctcctcctgttctgacatagaatctctagtgcagctgaaggatgctatagggttcttgatccttcagattcagtctttgtttcttgtttgttctttttcttggatttatctctcattaaaaaaatatcaatgaaaaatatgatggattaactggttttcctttttctggtatcggagaaaagataatgattttcattggtctcattattcagtatttggatttgtacattctttattggttattatctattcattcattatatcagtaaatcctactttttcttgataacaatatttgatgcaaaaataaaata

SEQ ID NO: 287467 - DNA, 393 bp, Glycine max
tctgcatgcttgcttattgtcattcaaagcttgtttgttggtgtgtattgcaaccacagtagatgaatgtctgcgtatagaatgtagccatgattggagatgaggttgtctaggaaaaaaaaagttaaaaatcacaggtcacatcacatgacacatgaagtaaatggaattaacaaaagtgttagttttaaaaaaaaagtcaatactaagggagttttatatatgatgtatcacgatcggacgacaatataaaattaaatattttttttaaaatagaaaaatttggagaattgtcattaatgtgtatttaagaaaaaaatatgaaaaaactaaaataaatgaggaatgatctataatttgagaaaaaaaagaagatctaggaatcatctacgt

SEQ ID NO: 287468 - DNA, 373 bp, Glycine max
tgtagaatggctagacatgatacatgtcatgttttggtttggttcaaggataaaagggatgccccacattatttccatgacacagatgcaaaagtgatgatttggaaattttatgcaaaactggtcatgcatgcacctatgtggacgctcaagtgtcaaatttttatggtcatgtgatgctagggctcatgattcatttgctctattataaatcaacccaatgtttccaaaatatgttcttttatcaatttgtgcattcatccgagtccattttgggcgtctgggaaaatcttcacagcattcacccttcatgtgtatacacattagttcaaaaactagttatgatcagtgaatttttccaaagacaagttgg

SEQ ID NO: 287469 - DNA, 446 bp, Glycine max
  unsure (1)..(446): unsure at all n locations
tntttcgctgcaacaaatgccgcaatcgcttccagcactcgtatgatctctttctccttctcaaatcataaccatcatacaaaaatcataattacatgcacttcatattaatactccaatatctctctttatcataacacaatcatctttaattttcacaatacctctaatctctattggtttcataattaaccatcatacacaaatcttgatcatcatggcaatacttatgctattgctctactttttatgttcatatatgtgtagcttcataaaacatgtatgctntttttttggtacttttcaatgttggtgttacttangagtngaatanngcttanagttatttaatatatatatatatatatatatatatatatatatatatatatatatatatatatatatatatatatatatatatatatatatataatatgnntttn

SEQ ID NO: 287470 - DNA, 565 bp, Glycine max
  unsure (1)..(565): unsure at all n locations
gcacccagcacgtcacacancgcgagaccgccataaaagaaaccataanntactcccccccncccccccccccccggagaggatgatgcatagaaagccgaanncancncnnnncccgnaganccngnagagncgaacngcacgcacgcaagcgctgtacttatacctgactcaccatagaccaggacccgaggtgagaatgacaaatcttacccccggaagccaaaagaacagaaagaacgccgcccaccaaacagaacgcagaaaagaacagaaggaacactcccaaacaaagagggggagaaaggcaaaagaagagaaagaaaattcccaaccacagaatgggcacaagcgacaacgaagaagaaaaaggacgaaacccccgacagggaacaaagagacagaaaacagggcagaaggcagtgaccggacataccgaacaaacagaatgtaccaatgaacaaaagaggaaagaaaccacacctaaacggcctcccctcgataccaccacaaaccggcgctacgactgattcggctgaacaaacaaaaacagaaaaaaaagccn

SEQ ID NO: 287471 - DNA, 341 bp, Glycine max
  unsure (1)..(341): unsure at all n locations
ttacgtccttggcacaattcataagaatttcttctaagattggcctaatataaattgtatcttgaaataatagacaattgttattggttcagcccataagtgtttaagggttgagtgatcactaagcatggtcctagccatttcctgaagaaatatacttttcatttacctctaaacataatctaatttggtggtcttggagttgaaaatngtggtgaataccattctctttacaaatatttacaatatcttttcaattctccccatgttactttaattgagagatacatgatatgactattgattcttcaaaaaataaacttaaatttgcatacagatta

SEQ ID NO: 287472 - DNA, 399 bp, Glycine max
  unsure (1)..(399): unsure at all n locations
agctnttaggtttgtggtcagcaaacgcatgacctagccacttttaattatttacacgatgaacaaagacgatcatagacaatgaccgctgttgagttcatttaatgtaattacaaaattgccactatgtgattttctaagacggttctttatgaccgtcttagaacccgcgaagtaaatagcacttataatggaaataattacaaaaatgtcaccgcgttgctttctaaggcggttttacagaaccgtcttaaaatagttgtcttagaaaactgtttttgtagtagtgactgcccagaattagctgagagagatcgctgcaccaacaattggttctcatggatgatgcaaatagttcatccctantttttccttgatgatcttcatccttccagctat

SEQ ID NO: 287473 - DNA, 403 bp, Glycine max
aattcattttgctatccgacttttaaataataataataataataacctaaagggttatattaacatttacatttatataataaaataatctggtaggctttaaaatattttttgaatgacttaaggggtaacatttttaactaattatacttttataaaatcattaaactaatttatttcctaaaaaaagtgtggtatgacttgactggacgtaatctgtgtataaactattatttacattatcaataaaaaattatcctttatatgattttggtggtaagtaattaaattacttatcatatattatttggaatgagattaaagtataaaaaatggtacatgcatatattatttatttaataattatatatcctattagaattttcattccttttctatatct

SEQ ID NO: 287474 - DNA, 445 bp, Glycine max
  unsure (1)..(445): unsure at all n locations
agcttcttcctttttttcctacaaatagggggagaagtgaagagaaaaaatgttcagccctcctagtaaatcgagaaccacttgaaattagtgaaaaaaattggttccgtgaagaatatccaagccgaggcgcttccgtaacgtttccatgggtgatttcgcgaagatcttcaaccgttcttcaacgttcttcgatcgttcttcatcgttcttcggtcttcaaccggtaagttcccgaaatcaaacttttcaattcattctatgtaccttagtggtcttcatttgtttcacgtgcttttattttcatttcatttacttttcataccccattntaacgtgctgtagtcatttgcttaagtcattctcttgcctaatcaaagaatacaataaaattccaccgatcatttgaatgtaatatccgtaatttctgttaaaaagaatccga

SEQ ID NO: 287475 - DNA, 374 bp, Glycine max
tctgaactttgatgaagccgcatcttaagaacaatgattttgactgcatatgaatcttcaaggctggataaaaagaagggtaaaacttaccatgataaaaagctgcttaagaagaattttcaaccaggacaacaagggttactattcaattcaagggtgaaattggtacttgggacgctcaaatctaaatgggtagtgaatggacaaaggttaaagctgtaccatggtggaactattaaaagattaaccactattctatccttccaagaataacaaagaactatgcatcaagctaatgacgttaaacgagcgcttactgggaggcaacccgacactttttaaattttgttttcttgcattctaattcagttgga

SEQ ID NO: 287476 - DNA, 220 bp, Glycine max
cgctatggatacattttggacagaccaaagtctggtttagcgtgtaggtgagaccgcttgacaattgttgacagcttgatcctctctatctgcttcttgagctgccaatagttgacgaaggcctctatccattctggcatcacgcgggctactagctccttcgataacttcaccattgggttatcacagttttgtgggtgcacatatatattaaaggagc

SEQ ID NO: 287477 - DNA, 342 bp, Glycine max
cggaaagtttagtagatcgccactactttcctttcaaagacaaacccaattcttggaatagctccgctatgatgatgcgtggtgggtgagtaggtgaagcatcttttactctatagcaagaatggcaactcttgtatacttaacgaagatataaatggagctgctaacggcagatactttgcctccataggaaaactaacattttcttatcctgaatttttattctttctattggatcttcttcagtcggaatctcaacaccagcttctgaagaggtgcaccaccactgtataatgccttcctcgacgataagagacagatggaacaaacgtaacaataatt

SEQ ID NO: 287478 - DNA, 239 bp, Glycine max
ttctttgtttagatacttacccgttgaagatcgaagaacgatgaagaacgaatgaagaacgtcgaagaaccggtgaaatctttgcgaaattcctcacggaaaacgttaccgaaacgtttcggaagcgcctcggcttagattttctttaccgaaacaatttttccaagcaaattcgaaagagagaaaagtacctcaagggctcaaccccgttcttcttgccttcctcccctatttatagc

SEQ ID NO: 287479 - DNA, 413 bp, Glycine max
  unsure (1)..(413): unsure at all n locations
tatctgcngctggaacagtcaatggagaccttttacaacctccatcgtcctttgtgcccaaattccttcgatctgtcagaacatcatgcaaggcaagttggtcttcgatgtcatggaaacaacttcttgctacctcggtactttctcctaaacggtgattttgctcgccaattgttcattagatgactccattgaagctcatgtcacgtattcctgcccataacagatataagatacaagctactttattcatttgactagtccactgcgcaatcatagaaaatatttcaagcaaagctttatgcatagcaaagacataaagtctatcttaatatcacatacagcagcaccaatgccagaaagttcggctgcatacgaatatatttaaaagactattctagcaagttctttaa

SEQ ID NO: 287480 - DNA, 437 bp, Glycine max
  unsure (1)..(437): unsure at all n locations
ctaaactcaataaccaaaggggagaatttttgtgagtgatccttttgtagatttagcttgcattccgttcctgatttcaaggnttgcatcatccaaaaaggggagattggagaaagcatcctcatgatgatgaaccaagcaattttgatgatgcccaaagccccagtgattgactcaagatcgatttaagacttccagatcaagcatcaagaatcccatcccagattcaagattccagagaagaaatcacgaagcaataagtcagacttcatatgtgataagtattaaagaatttttcaaaaaccaaatagcacagtttttgtttaccaaaagatttttttaaaattttcaaaagtaccaaaaggattactctctggtnatcgattattgagtattcagtatcgattaccagtgaccactttgattttcaaatgttn

SEQ ID NO: 287481 - DNA, 444 bp, Glycine max
  unsure (1)..(444): unsure at all n locations
agctntttctagttgatcattgcgggtaattagttgcaccataatagcgaaatgttccttagatgcttcaattntatatctaggcatcgaattgaagtttctacaagcatcatcaacaaatccaactttgtcatatagatagagtactacaaattagaagagtaaacaacccacgaatttcgatctacaaagttgaattgaaacaaaaattagaaatggtggtttgacgaanattggaaaagttgaattaaaacaaaggcttaattataaaatataggtttaattatgtntaaataatttaaaaatcanaattgatgtattttttatagaaatattcanaacttattttatataatanaagtataatatattaatanaataaaacttatatttaatataatattttaatttatgtgaaaatagaatttaatttatatattatat

SEQ ID NO: 287482 - DNA, 448 bp, Glycine max
  unsure (1)..(448): unsure at all n locations
gagtgcctgaactgattgaacctgatacggccttaatctaactgactataaagtctctcatttttgagaataattatgagagcttcatccaaggagaaaaaaaggtatctccacgccatacaccatatgggagattaaccaatggtatcatcacaagtccagggtaaaagattcaaacttttaataatattatggaaagatcgagcatagaaccaagaagatagttatatgagaagcacatataccaaattattttcagcaaaaatcaaagaattttgacattacaagtgtcacccattacctcaatgaaccggatgaaattccacagccaagaatgtcaaattagtatgtaaggaacctaacgcagattgatatacattggaatggttggatattgatattagggaccttatangaatatacaatgactccttagtacaattcactn

SEQ ID NO: 287483 - DNA, 418 bp, Glycine max
  unsure (1)..(418): unsure at all n locations
agcttttatgcttctccagcctggacaagtgttgtccatgctacttctgtcaactntntttggggtggatatgcttttggttttgcaagcaatgtatgatgtgtaaagtgagggaaacctttgtatttgataactcttcccattactgactgttggagagtgcgttgaagacaaacgttatgttttattcgttgtggtaagcgtgtgcggcgcatgcacagtactcttgcatatgtgtcactcatggagtgcgctcgtactgaaaacgtgatatgtgggtgaatggngatacatcgtggtgcataaaattagagcaccacttcaactcccaccagttatcaaagagcttatgtcctctgtaaatgaagtggacgtttaattcgtgatcactgtcactttcaatatctatcttctttct

SEQ ID NO: 287484 - DNA, 358 bp, Glycine max
ttcttcatgccttttctcacatgtcttctgctaaatggtgctaacatgattctttaaaatttccaccaattaaacttgctatagaagctagatttgattttctaccgctcaaaattaatggtcttggtcttgaaccatgaattatgttgagtttatgttcctttgagttttggcttgctatttcttgtggctgaaaactgaatcataaaattcttaacaaaacattaaagtagaagaaaatctcaaaaatctagagtgacttgtcacctattggagttttttcatagaagtcttgtctagtcatgaaacttggcacataaaatttcttatgttgcgcctgaatttattgttcttgttc

SEQ ID NO: 287485 - DNA, 446 bp, Glycine max
  unsure (1)..(446): unsure at all n locations
atcttgtcatatgtccccaagacaaactagtatcacggaagaagaaaaagatgggagaagaatgatgcaaagcagtcagagatgaagtatacaagctcctcaaagtcaacttcatcagagaattcagcttttccaccaggctcaccaatgtcgtcatggtcaaaaaggccaatggcaaatggggaatgtgcaccgactacaccgatctgaacagggtgtgtcccaaggatgcataccctctgcccaacatcaacaagctagtcaatggagtgtttccaagttctaagcttcctagacgcctactatggatacaactagatccggatgcatgctcaagacgaggagaaaatgacattcatcattgaagatgccaactnttgctacaaggccatgccttttgccttaaaatggaggcgctacatactagagatgggtggtcagatctt

SEQ ID NO: 287486 - DNA, 429 bp, Glycine max
  unsure (1)..(429): unsure at all n locations
tggtgtcttaccttttcggcttctatttccccctgaggttatgcgtcagtgacctggttggtctatataccaaacatccatccactgggaataatccgacttgagcaaacctcggtaacatcaatggttggggaggcgagggtctcctggataaacgtccgatgctgacctggtctcttaatgctcgccaggtaagataaaacatcaactcaatcgttctgttccctgtcaacgcggaccaattctttctgttcaaaatgctccaagagttgtttgaccaggtggtagtacttctacatttgtgtctctctagcttgaaatacctcattaacctgctcaatgatgatcttggagtcgctctancaccttaacttctntatgtcaacctcgatcgttagcttcagtcctacgatgagagcttcacactct

SEQ ID NO: 287487 - DNA, 315 bp, Glycine max
  unsure (1)..(315): unsure at all n locations
ttctngtctnctagcttgccaggcgagctcagctcgcccaggcgagcaaggttgcttcctccagaagcaacagccttctggaggaatcttctgaaaggcccaagtgggcctggttgctatttgcacccccatttttactaagtacaccccctacctttntttggtgattcttttttcgtaaagttacggaaacttacgaatttcgtaacgatactggttttctttccgtaatgttacggaaccttgtggattacataatcatcccctttntgacttacggaatattacggaacctcactaattgtgcaacgatgc

SEQ ID NO: 287488 - DNA, 438 bp, Glycine max
  unsure (1)..(438): unsure at all n locations
ttcttgtttaacagattntcacttactctcgctcaacgagacatgctcgctgagcgagccttcgtgtgctgagaagtccaagagcctttaaaatactgagattggtggaaaaccaaagggcaccacgacaaccacagcctagccaaccatctaccacgtgaaaaacagagagaagaagggcagagaggctggagaagacattctccttcatctttttccattntctttcaccaaaaacatttatttccttgtttgtatgaagctntgcttgatcacccatttgtatgtttagttaggctttntagtgttggaaaatgctttanaaccttagaacttgatagagcaagctagaaatctatgtgtctaggattagaatggcagtaatctagtatatttaaattgtatgcttagtggaactcttttagaaatgagttgtga

SEQ ID NO: 287489 - DNA, 366 bp, Glycine max
  unsure (1)..(366): unsure at all n locations
gagtgtaatcatgcatataagcctaaatccatctaatggaatgaacccctaattgagcttttagatcaaagattaatgaatgtgttatgagaaagaggatattggttcacctgatggttacgcttgagattcctcagacattctcttaactgttcagcttttgcttgtgtattataaacagactttgacttcttgcaattgaatcaagtaaaaatcatctaaacgtagataacttgtgctccacaataacagggtaaaacgagttacaggaaaaaaaaattagttatcatattgacaaatanaacctaggatctatgaattcagtgtataaataaatcgatcttaatcgtacctttttcttgtcta

SEQ ID NO: 287490 - DNA, 346 bp, Glycine max
aatcaaccacagcagaacaattatgacctctccagcaacagatacaaccctggatggaggaatcaccctaacctcagatggtccaaccctcaacaacaacaacagcagcctgcttcttccttccaaaatgttgttggcccaagcagaccatacattcctccaccaatccaacaacaacaacaaccccagaaacaaccaacagttgaggcccctccacaaccttccctcgaagaacttgtgaggcaaatgactatgcagaacatgcagtttcagcaagagaccagagcctccattcagagcttaaccaatcagatgggacaaatggctacccaattgaatcaacaaa

SEQ ID NO: 287491 - DNA, 116 bp, Glycine max
  unsure (1)..(116): unsure at all n locations
gccaagcccgacacccgccaacacccgctgacgcgaacccctttgggccgnnttgaaataacttngtatatggatgctatacgaaggtattatccatgagcttcgactttcattcn

SEQ ID NO: 287492 - DNA, 446 bp, Glycine max
  unsure (1)..(446): unsure at all n locations
agcttatgctgtaagaagtaagatgtgtgcttgagatgtgtttaaaccttatctcaacaggaaagcttgatgaagttgggatgatataccagttcggtgctggtagatggaagcttagtagaggaagcatggtcattgctcaaggtaagaaggaaggctccttgtacatcatgccagganagatatgcaaatggaagatgaatgttgctcaagatacaaccaaagaattatgacacaagagattgngtcacatgagtgagaaaggtttggagtttctaacanaggatcactgtccaaacataaagggccagccacttgaatcttgcgaagactgtcttgcangtaaaaagtgcaaagtgtctttccaaagatcggatgaggctagaaggagaaaaaaatcctagatcttgtccattcaaatggttgctcaatgtctgaaaagtctc

SEQ ID NO: 287493 - DNA, 407 bp, Glycine max
tgacttaatggtggaaggagataaggaatgaaaagattgtgtgtttaaatcttctgttagtaaaaaaggttgatttatctgccgacaatattatttaaatatttttggtccttcaattttatgtcacttttgtttttggtcctccaactttaaatttatttgtcttagtctctcaatatttctggtccttcaagtttatgtcacttttggttattcattatgcatgcagccttttatataatgtagctttctttacatgcataaccaacctaactaacaagattaaaaaactctaacaaccaacaactgaattaactaactccacgtaactaatctgcacgtgggttattatacttggctgcaacgttttcttcttcctaacatttcctaacccatcaaaaacacct

SEQ ID NO: 287494 - DNA, 444 bp, Glycine max
  unsure (1)..(444): unsure at all n locations
agcttataagatcatatttgcctaaatcatttccaaatatgcatgtgaattatgaagcatcaacaagaatcaagccaaggctattgtgcaagcaatcaatggggcaaaacacaccaaaagattatgatgatggatggctcatattctcacaaaggtaaacttatcactttcaaattgagctttcaaaattatcatgacatgtagaggaaaaacaaggatttcaaatcacaaaatgtcaagagacttttattgtcagaacaatgacccatctcttgaacatatcctataattcaaagaacaatatgagagttgtacatgcaaacataattgacctataatattatactagaaacccaacaaaactaacaaatgtaacacaaacgaaactaacanaactagcaaaaccacaaccatagaacactccctgccatactaaaacaacac

SEQ ID NO: 287495 - DNA, 442 bp, Glycine max
  unsure (1)..(442): unsure at all n locations
gcttcttcatntatagccttcaactntaagtatttgttgtccctcagcggatggttcttcactatattcttcattaaagtcttgaagctcttggagcatttaatgcatgtctcttcttcatgcaaagtctatgctaatagctaggttgacatgtcttatacttcaacaagaaagtcacttcttccatcagagcaagtatgcaccagcaaagtgcgtctttcgatgaagatcaacactntcaaactatggactntatttattattcataggatttaatagattctaggagaatgttttccgcaacaaagaatctcatacataanatattaaatgtaggtattaattaaatgcactacttaatgttatgacaagatcatcttatattgatgtaacatcagaaaactcanacccagaaatacaaaccataatctgataacacatc

SEQ ID NO: 287496 - DNA, 431 bp, Glycine max
  unsure (1)..(431): unsure at all n locations
attttgttatccagctcgcccaggcgagctaggttgcttcctccataagcaaccgccttctggaagaatattctggaagagcccagtgggcctgattgctatttgcaccctcatttgtactaaatgcagcgcctgatgagtgatggtgactctatttccgtgacattactaaactttacaaatatcgtaacgatgcttgtttcctttacgtaatgatccgtaatgtaacaatgcattgttcctttacgtaatgctacagaatcatacccttttgccttccggaatgttacagatctatacagattgtgcactaacactctcttttaatttccgacatgtcacgaagactcacggattgtgctacaatgctttcttttgactnccggcctgtcacgggacttaacgaattgcctaacgatgggtgtcagtac

SEQ ID NO: 287497 - DNA, 393 bp, Glycine max
  unsure (1)..(393): unsure at all n locations
ggcactcagaacgggaacattgctgttgaccaaaaaacgagaacctaaaaatgggtgcttcccttaaccataacccccaattccaaggaaattaattggagttaatttctaatcccttttaagataataatatcttacacttctcatttatactgttaatcaatcagaaatatatatgaaaacacttttaagtattttatataacagtaacaaactaatatatgtacatacataactgctactcataattactatnttttangaaatgtttaagcttgtaatatctatagtttgtgaattttccagcatatttgctatactataaatgtcaatatgtaaccaaatagtgttgtttngtaataatgangaactgcacagaaggaaaacaaaaat

SEQ ID NO: 287498 - DNA, 248 bp, Glycine max
atgaatttataggtaagaaagccgaatccacattcaggtaattcaaaactaacaatgatgatcactaaaatcccaaggtaaaggcagaaaaccagcatacgcctatgcttctatcaatgaagaaaatagtgttatttagtgaaatcggtatcgaaacgaaccggttcattgaaataaacaacgtaaaacacacgttactaacaagaggttctgatatgtgtaaaaatcgagccgaaaaagagactttg

SEQ ID NO: 287499 - DNA, 436 bp, Glycine max
  unsure (1)..(436): unsure at all n locations
ttcttctctaatgtgatcaatacattcattggcagattgaaggatgaagttgtggtgcgtgatctgtttttgtgtcacccagatccagtaaagttatgcaatgcatgtcatctggtgtttttttttatagacagtacctacaaaacaaacaggtacagactcccactacttgactntgttggagtgacaccaacggtgatgacattctctgttgggtttacatatctggaggctgagcgtgttaataatattgtatgggctttggaacaattttgaggcctatttttaagaaacgatcgcctccctgttgttattgtcactgacagagacttagcactgatgaatgcagtgaaaactgtgttccccgagtctactaattttgtgtgcangtttcatatcgataagaatgtgaaggcgaagtgcaaatctttaatcg

SEQ ID NO: 287500 - DNA, 483 bp, Glycine max
  unsure (1)..(483): unsure at all n locations
tgcaggtgccntttgacacccttggatttgataccctagctattacgtgacctatagaatactcaagcctgttaattctcctaacaaagtggccatctttccatcatcattggatatgcgccttaatggcacattcagaatatttggcattatacccttattgaacctaccttaaattggaattcattaattaagaattccttatcctaccgaatccatcaagcttggaccatttattataattaggggatggctttcattgggtaggccaagccaaaaacccagaattttagtttttaactctaaggacacttatcccattccttgagcttttatttcacaggtatatgtatctgtattatgcctaggcatctagaaaattcgatttactgtctattgattttgcgaattgtcagactctttacgataagtaaatatttttgtcacactactttaacaagtgaaaatagatctcactgagtn

SEQ ID NO: 287501 - DNA, 431 bp, Glycine max
  unsure (1)..(431): unsure at all n locations
atcttttataatatgaaattgtctgtaagtcatttgagaattnttggttgtacaacatatgcattagttgatttatggactaagttggatgataaatctatcaaatgtgtatttattggctatgctactcagtcaaaggcatacagactgtataacccactaactggcaagataattgtcagtacaaatgttgtatttgatgaagatgcaggctgggtttgggaggaatgtgaaatcagtcaaagtgttcagcagaaatcagtcaattttgatggtttagaggaggtctcanatgtgccacataatgatcacactccaagccctccttcaatgccatcaagccagggatcattaactccttcaagccaggtatcatctagctcatcaagtgantttgctccaaggagatacaaatctttggcagacttgta

SEQ ID NO: 287502 - DNA, 383 bp, Glycine max
tattcctgcattctactaatatatggaattgcccattgtcttgctttataataacaattgggtgaccacaacagcgctgggggcggcaacggacaatggtctttcaaataaacctgttgtacatgaacaaacattatatcatgcgctgaccgtgccaaacgaacaagcgaagtcattgcataattggtacacttactatattcaatggacctgaacaaaatgattttcaaacacgtgaccgacacatatgatgcggtggccagaagaatcaagtggggggtgacttctaagagggaaaaatgtcatgccttgttgttgggacaacgataccatgattacgttataccgtgaagcaatcacatatcccatgtcttgtatattca

SEQ ID NO: 287503 - DNA, 443 bp, Glycine max
  unsure (1)..(443): unsure at all n locations
agcttattcttcagagtaaacttaccacaaacatcaagttcttcaaatattttggatatagtttccattacttccttgatgctcacctcgggctcagataacccttggtctaaaaaattgagtctcctccaaaacatatggattgaatccagtgggatgcaaccaataacatatttggatagctcacaagcacaaggaagatcgtgtgtggttttcatcacacaaccactagtggaaggattcttgccagcatagtgaacacgctcaaattcagcagcaatatgatttanagcataccttgaaaccattccaagaagcctcttgtataaagtttttttgaagacatgtccaacgacatgtgtaccagtttcaaaggatgctctaatttcagtgtgctgcaacatcatcatgttgttcatggcatcccagacactgcataagtc

SEQ ID NO: 287504 - DNA, 428 bp, Glycine max
tgtgactcttggcaatttctttaaatctagtcacttaaaaagttgtgacttttgaaaaaatcttcagaaacaagtcacatgaagaattgtgacttttggaaatgtatttttcgaaacccgtcactggtaatcgattacacataaacagatgtgactcttcattttgaattttgaaaattaaaacatttagaagctctggtaatcgattacaagtgttgtgtaatcgattacagaaagtttaaaatactttaaaactggttaaacataagttataactcttgaaatttgaaatctcaacgttttaaaacactggtaattgattactaccttctggtaatcgattaccagagagtggaactctttggtaatggatttgtgaaaacatcttgtgctactcaatattttgaaaaaactttttagtacttatc

SEQ ID NO: 287505 - DNA, 293 bp, Glycine max
  unsure (1)..(293): unsure at all n locations
ttcttctgatgcnaggtcgccggagcattataatcgcttataaacaacagacacttgataatgatgacctatgaatactagatgctttgaacaaatgagtaacgaacctacacgctatcattcaaatcctttatgtagaaaactctttgtatagtcttatacagtttgaagagctctcggaacatcttgaatactctaagacaaataactaaatgcttagatcacacatgtgtttgtaagatgatgaagatctaatcgagtggcagatcaaacagcatatcttttgatgtgat

SEQ ID NO: 287506 - DNA, 396 bp, Glycine max
tgaaggctatactatatgtatcctcggattgttcttgctttttggaccctacgaagaggcaacaaaagctgctttttcaaacggaaagtctcctcccgcatgaaaatatattggaaaactacaaagtttttaaaccttggtgggaggtaagacctatatagatgccattatagttttgatgatacactgcaagggaaatggacatccatttattggcctattcatgccctcacaatgtccttacatgattatgctgaagattcttttatataaaatgttcttgtagagaccccccgtccttgaatacctaaaaaattgcgatctgtccaacactttaaacttgagaacccttttttttcaaattatgacgagagatacgtgcccccggatgattaa

SEQ ID NO: 287507 - DNA, 421 bp, Glycine max
  unsure (1)..(421): unsure at all n locations
tgcttattttgatgatgccaaagactcaagtcaagaatcaagattgaagcaaatttcaagaatcaaagggtcattcaatcaagaatcaagattcaagagaagactcaagatatgtaagaacctcaagaaaaacatcaagataagtataaaaagaatttttcaaagaaaagattgaatgacacaatttgtccaaaataatttttcaaagaaaaatcttttaccagagtttttactctctggtaatcgattaccatacagtaatcgattaccagaagtccaaaacaattntataactgttntacaaagtagtaatcgattaccatgggcatgtaaccgattaccaatgttnttgaacgttgaatttcanatctcaagagtcataacttgtgacanaatattttcaaaatagtgtaatcgacta

SEQ ID NO: 287508 - DNA, 387 bp, Glycine max
  unsure (1)..(387): unsure at all n locations
tgtaacgttgtctagttttctttacgttgcttattaagtttccagatctaatttgggcatcacgttggctaattttctttacattgcaaatttcactgcttgcacaatttggactatttcttgggtggtttgtcaaggtgacctcttataatattgtgtcccacaggccaatcaatctgcatttaagcatgatggtggtaatgatgtatgctttgggagatttcctaacacgttatagaaaaaaaagaaaaagtttataacatttattggtgcacctaattaaattattttgcttacttgtactgactagtgactcctctncatttcttattcttttattcttttggtcaattcaacttgtccttttctttaatagtgattattcgt

SEQ ID NO: 287509 - DNA, 359 bp, Glycine max
  unsure (1)..(359): unsure at all n locations
agcttgttgtattggnttcttcctcttcttctctggcagtgcaaatggattggattatggaactgttggagagcaatttggaagccaagtccaaaatttacaaggaccctgctttgagttatattttcttgatgaacaatgggaggtacattgttcagaagacaaagatagtgaattgggaaccctctttggagaagaatggatcagaanacacgctgcaaagttaggcaattccatgtgcactatcanagaagctcgtggaataagctattannggattctgaagtggatagtaatgggtcaatgccccatattaactttgcaaagtcaatgaaagagaaaactcagtcgttaacaca

SEQ ID NO: 287510 - DNA, 326 bp, Glycine max
acagtacacctcgtagcactcctgtgctaacccaacgccgattaccagctttatagttttgcgaaggtcattgatttttccccaaggtaacgcatcaatcacaaagttactgtcaattactactggtttggaattatcttcaaggtattccttcacaagcttaaaaagcatgttggtgacatttgaattgccctgccgaagtgccctgatacaagtcatgaattgtggcatgatactagcattatctgtacgtagcgaattgacatcaatcactactgaatgctcatcctggactccaagattctggtatggcgtggtatataaag

SEQ ID NO: 287511 - DNA, 333 bp, Glycine max
  unsure (1)..(333): unsure at all n locations
agctttttggtatgtgaatctgatataaaagcctcaaagtcctctctcactgtgtatggggaaattgagaaaagggtagcagaacttgagttcacaaagtctggaaaggatctcagagcccttaaacagattcttgaagcaatgcagagacataagtattcagtagacattgctagaggtcacgcttcaaattctccatctaacaataggaataatactaatctcaacgaaagctcanaaatacanagcccacgagtcagacaaacagacacagcatctgtaacggctgagatgtcaaattcaccccaggtagtaaattgccaatgtcatcat

SEQ ID NO: 287512 - DNA, 406 bp, Glycine max
agacagaacagtaattagatcatattataagtgttgatttatcaacttggctattgatatatagcatgattagtagaggacaaagcatttcatgaattacaatacttttgtgaataccagtatgaatggtttgagacatatacttgagcaaccatccataacctcaggtggtagaagtgatgaatcaagaatagtgaaacaatgtaattgagtccacagaatatccttgtaagaaaacaatgctgtaactcttcaaaacaatgcctactcaagtccaaactcaactaatgttctggacattttggtggcaatatatcgatagtcaactgaaaaaacaaatatgtaaacatacctttgaaacaagttgcacttttcatgattattaacatatttacacacatttttt

SEQ ID NO: 287513 - DNA, 370 bp, Glycine max
  unsure (1)..(370): unsure at all n locations
agcttgttaattatctgtttaaaaatcaagaacaagctngtgcgcacatcgttagcgtatatgatatccactccacaaggttcgaagtagatgagagcttcaaccctataacgcaacgtggcggacagaagtgggcaataaacttgaatggtcgtcattgtcaatgctgaaggtattctgcgcttcactatccatgttcacacattattgcagcttgtggttacgtgagcatgaactactaccaatatatagatgttgtttatacaaacgagcacatcttaaaagcttactccgcacaatggtggcctcttgggaatgaagcggctattccttcttctgatgacgcatggacactgatccctgacccaac

SEQ ID NO: 287514 - DNA, 441 bp, Glycine max
  unsure (1)..(441): unsure at all n locations
acttgaataggatatagtatatattttatgcatatttttataatgcgataatttgaaagtttttgtttacatgggaaaacttttagtttccaaaatcaaaaaatgcaaaagtcaaaaaagggttatttaagggaaaattaataattagaaaaaaaggtctcttaaatttattctaattattaaatatcccctaagtgtgagactagaacctaaataaatgggtatacttacatcaaatataccctatttttttataagtaaaaataatttctccattcctttgtcttttagaactttgaaaccctttcaaggtgaataaaatttaatatgccttcttaaaaattattaaggcaaattangctttctttctatatctcagactttgaaaacactattcttttagatgtctactatgagcttataaaataaacttgatgataa

SEQ ID NO: 287515 - DNA, 192 bp, Glycine max
  unsure (1)..(192): unsure at all n locations
agctnttgcatttacgtgccgctggagccggccgcttaagcgccctacgctgttcgacttcaccgtgacgtgatagaactgaacttgcaatgcacgcttccgagtgagaccccatgttatactaacgtgagcaaggatcgatgcgaatccaaacttcgacatcgatcatgagtgataaggatgaatgcatga

SEQ ID NO: 287516 - DNA, 233 bp, Glycine max
cttatcacagcgatgtattgtgctgtagggattacgccctacgaacaatggctggattccttcaatgattttactatcgcattaagggctgctcctctctctacatcaccgatatgcgggcgccaacctgatctgacccctcatgcacgtgattgtcccatatgtgcttatcttggactacggaagggacaactttttcatgctatatactacaccgacaaggttctacatga

SEQ ID NO: 287517 - DNA, 289 bp, Glycine max
  unsure (1)..(289): unsure at all n locations
gctcggccccgggatcgataatgtgactgcatgcatgcaagcttttaatcaatttcgattgtctcaatatattacgggattcaatcacacatgcgagcagaacgttattgtcgctagaattagctcagagcatcagaatgcagtgtcgattgtctagatatattacaggactcaatgagacgtgcgatgaaaacatcatcgtctattgaatcatgtgagagcttcacaattcaccttcaagcgacgtaatagaatacgggactcggtganacatccaagctaaacgtta

SEQ ID NO: 287518 - DNA, 410 bp, Glycine max
  unsure (1)..(410): unsure at all n locations
ttgttcggtattgcctaaaaaatttgcaatgtagttttgctaggtttcttcgtgcgagtctaaccgaagttgtatttcggccgacgccggcattntgtcggccaggaaaacattagcccacctcggcaaaaaaaaaacatgattcaccggtattgacagaaaaaaatgctggccttagtcggccaggaaagatgaccgatcgaggtctaaaaaagaagcatgaccggattacgccgatcgaacatttcctaatagatatcctccaagcattattcagggattgaatggaaaaaacaatagccgacatcggtagttaaatagccgtgactgatattnttcagccaacactgcgcaacttctttcacaaacgctggccgataatatttctttacgggaaaggatgctttcgt

SEQ ID NO: 287519 - DNA, 266 bp, Glycine max
  unsure (1)..(266): unsure at all n locations
tttctacttgttccggatcaacatcaacagaaacagaaccaccactctgtcttgccttagtcttcttatttgacttgcgctttgaccttccagtcccagttccttcatctgcatcaatttcctctatctcaacattactatagccatcttcctctgtgacccatccacgacttcgggtattcttttgcgatgagcccacgtctccatttgcagcaccagtgggtgtcctaaatgaataaatnggaactgcagtagataccggagct

SEQ ID NO: 287520 - DNA, 204 bp, Glycine max
ggggagttaaaaaaaaaaatgatcacattcagaaaattaatatattggagcggtgtagaaacaccatgctggaatcatcaaacttcagtatcataaattaacattagagcgagccaattaaaaccaaaggtgaataatccaaacttacatggcactttcataattctaacaactcctaagaaaacaaaatattctctggcgatg

SEQ ID NO: 287521 - DNA, 299 bp, Glycine max
  unsure (1)..(299): unsure at all n locations
cccctctaatactaagctcacctcttgagaagctttcttgaaaagaatcctaaattagctagagcttagctacacacacctctctaataactaagctcaccttcttgggatgagaagcttgaacttagatacacaccccctataatagcttagctcacccccatgaaaaaatacattgaaatacaaaaaaagtccctactacnaagactactcagaatgcctcgcaatacaagggctaaaccctatactactagaatggccaaatacaggcctaaacgaagggaaaaaaacctattcta

SEQ ID NO: 287522 - DNA, 234 bp, Glycine max
acttacccgttgattatcgaaaacgatgtataacgaatgaagaacgtccaagaacggttgaaatttttgcgaaattcttcacggaaaacgttaccgaaacgtttcggaagcgccctggcttaaattttcttcacggaaaccatttttccaggcaaattccaaagaaagagaagtgcctaaggggctgaacccttttcttcttcacttccttccctatttatagcaaaatagggg

SEQ ID NO: 287523 - DNA, 299 bp, Glycine max
  unsure (1)..(299): unsure at all n locations
ttctttttctgttggctgannattatcatgcagacttttctgatgatgaccgatgaacaattatggatcaacttgaaacttatgtgcttcgagtgagaagaaatgcttctttttccacttgtgaagatgttcaaagtgtggctatgaagatggttcaaactgagaaacatttggtatttccattggtttataaacttattgagctagctttgatattgccggtgtcgacagcatccgttgaaagagccttttcagcaatgaagatgatcaagtctagattgcgcaataagatcaacgat

SEQ ID NO: 287524 - DNA, 249 bp, Glycine max
gaaatagctcaatagtcattcactcttattaaaaaaaataaggacttatcttcattctcctctcctgcgccctttcttctttctaagaaccgcttctttttccctttttggtcggggcttctttctcccttcttctccggagtcagtgggtgttggtccctttttctccgaccgtggctcttggtcctgttttcgcggtggttcgtggttggtactgtggggctttcgaccttcctcgtcgctggtcct

SEQ ID NO: 287525 - DNA, 448 bp, Glycine max
  unsure (1)..(448): unsure at all n locations
agcttttacatgaaataatttacctcactcaaaatgacaccttgcaagcaaaaacctaatccttgcaagagcacgacttccacaaaccaactccttgcaacacacacaaacaaacatccttgcagtgagcaaaagttccccaaacaaagaaacaaagaagaagaagaagaagaagaagaagaagaagaagaagagaacaaatactaaggtccttgcggttacaaagaagaagaagaagaagttgtaactaggtaagatggttaagtgtcacggtcgcgaagaagttgtacaatgaagctgaagaagttgtactcacgatcatgaagaagaagaagtgaagaaaaagcgaagaacanagtgcgaggaaagtagtagggctcgggttctgatattntaaaatatatgtccaacatcggttttcaatcaaaaaaccgatgttaatccaatg

SEQ ID NO: 287526 - DNA, 388 bp, Glycine max
  unsure (1)..(388): unsure at all n locations
gtgcctcttcatgtctggaatatgaatgtagcatatagattcaaagactcttagatgctttgctgatggcttcttcccgttccaagcttcaattggaatcttgtctcttacagacttaattggacatatgttgagtatgtaaacagcagtgtagacttgttcaatccaaaatgtgttaaggagtcccttctccttgaacatcgatctaactatttccataactgtgcgattctttctctcggacactccattntggtgaggagaatatgcgactataagttgtcgctctatgccttcatcctcacaaaatatttcaaactcgcgagaggtgtactctttgccgcgatcacttcttagtacttttatctaatttccactttgattttca

SEQ ID NO: 287527 - DNA, 419 bp, Glycine max
  unsure (1)..(419): unsure at all n locations
atctttgtaggattgatggagacccggtgttgagagaaacgaggatatgggctacgtgggagtacgtgagctcagttggaggtgggcaacaggggatggtgggtttatgcgcgatttgtggatgtggaaaacttgttgtgcgccatcgcccgaccgccacctagtaccacatgtgatgggtaccccataatcctacaagcttgagatgaggaagtgtagaagggtgaaacttcctgcttttattcgttgaccacaaagtggtacctggagatatgtcgcggnggtcaggagaccttggggacgtcaagtggggtgctattgcctaanaccaagcttgaccaatcccgacccaacccgggcatagtcagtcagtgagaacctgtgatgtacctaaacaggcgagcttcttgcagtcaaca

SEQ ID NO: 287528 - DNA, 435 bp, Glycine max
  unsure (1)..(435): unsure at all n locations
tatgcgcatatttccttacaaacgttctcttgcacaagacattctatttaaccgaaaaaaaatgcacccatatacaatcaaggcagcttcgttacctaaattatttacacgtacttccaaggtgtatttggtacttacatcacacacatcttcttggctaaattcacatacatgcatactcaaagcattttcgggtaccaaaaattgcacatgtgcacatcttggtatttctaatacctatacatacacaaacttcatgatgaatcttgactatctacacaataaggtgctacatttcatgctcttttcaagtttttgctacctaaagccgcatgcaaattcaagtatattttcctttgctgactaaaattgtattcaaattaaaagggatacattntttggtaatgtatcttctttacataacatgcaacatat

SEQ ID NO: 287529 - DNA, 326 bp, Glycine max
  unsure (1)..(326): unsure at all n locations
atcttttataaaaatggcctcagcaaacttcttatttccagaaagaaattcaatcaatagacctccaatctttaatggagaaggttaccactactggaaaacccgaatgcaattttttattgaggcaatagacttaaatatttgggaagccatagaaataggtgtcgcaacctacccttcggcgggagggcgacgcgagactcgcgggatgcgtgttccacgaaaggaatacgcgcggagtcgccaccaacgtttatttgaggaaaacgtcgaanaaaccggaaaagacgcgatctacgaaactttacgtganagggtcgggagtt

SEQ ID NO: 287530 - DNA, 240 bp, Glycine max
  unsure (1)..(240): unsure at all n locations
tcgattaaaagttatattttgaagggtcatgactttcgaatttgaattttaagaatttcattggtgggaatcgattatacacatctagtaatcgattacgggttcaaatttccaaattaaaacccttttaaacaactatttttcaaacttgtcttctggtaatcgattacactgcctggtaattgataccagagccttacatgtctttgaaacacttnntttttaggcaggcatgatctt

SEQ ID NO: 287531 - DNA, 292 bp, Glycine max
tttcttttagaagaagatacacacatgttttgccatgccaaaatcagcaaccttgatcataccattacgatctactagcatgcttgagccctttatatccctgtaggattggacacattagtgtcagatacttggaactagaaataataatgtatattatcatttgttacatattaacacctgtgcacgcgatctcttgcatgcatgtaggctatagcatgaagaatctgtctggtgttacatttcgcaagagatgtcttgaaagggccatatacctgatgcaaattgcgaa

SEQ ID NO: 287532 - DNA, 282 bp, Glycine max
ttatttcttcatcagaagatgggtcgtctaattctttccatgtgctcatcagaacttatgtggcctttggcttcttctttctcttctaattcctgcaatggtttattccttcttctaactacaccattttgttatggtgttctataattgacgagttatgaataattccattttcttcatagaatagatgaaagctcttcatttcaaaatcttcaccatgatcacttatgaatgaagtaatgcttctcccttttcattctgaattcttttatagaattaaag

SEQ ID NO: 287533 - DNA, 383 bp, Glycine max
agcttgatatctacatttgtgtgaaaagttatgagcatttgaatttctcaagagcttccattgttcaatttccagcatctcgatatattataagcctgaatcggacattcgtgtgaaaagttatgaccatttgaatatctgaagaggttccgttgttcaatttcgagcctctcgacatattatacgctcgaatcgaacatccgtgtgaaaagttatgaccatctgaatctgcaagagtttccgatggttaatttcgagcgtatcgatatattataagcctgaaacggacattcgtataaaaagttatgaccatttgaatttctcaagagcttccggtgatcaatttcgagcctctctacatattatgcgcccgaatctgacat

SEQ ID NO: 287534 - DNA, 446 bp, Glycine max
  unsure (1)..(446): unsure at all n locations
gctgacacgcggagatntacgtcaacttttgtgctcacaatatttgtcatactgacatttgagtcacgttgaccggcggagataccctagtggttatccgtataaacattcttttttgctgtctgtaaaacgaaaagcctgatagcatgcagagactaacgtcgtcttctgcgcccttcgtcaatcgcggccgacaagcccgttgacacgcagagatttacgtcattttccgcgctcacaagatctgtcatactgacatttgagtcatgctgacggacggaaatacccaagtggatatccgtataaacattcttttttcctgtctgtaagacgaaatgcctgatagcacgcagagactaacatcgtcttctgggcccttcgtgaatcgtggccgacaagcccgttgacacgcggagatttacgtcatcttncacgctcacaagatc

SEQ ID NO: 287535 - DNA, 473 bp, Glycine max
ggtgttgactgcatcgcacagcgaaggcgaactcggactccggagatcgtgttgacgtcaactgcacgcgtgcgagcgcgaacttttatgattatcacggcccaatgacatgtgtggctatagggtagtctgttgattgcgcacaacatggtttccgcatacgagatggcgcgaacaccgagtaataattattgtattccgacaactgcatcttcttactcacatatgacgaagatgctcttttggctaacgacgggggccgcacttgcctttagcttaccctcacccagcatagcacttcatgccaacaagctagtccagctctatatcgaggtaggtttaatctccggaaacctcttcccctatcttgtgtcactcctgatcctgcgacatcttgcgcatctataccgatgttcgttcggactcctgaacttctatctaaccgggtttcacgacgggcacagaacgtcccg

SEQ ID NO: 287536 - DNA, 442 bp, Glycine max
  unsure (1)..(442): unsure at all n locations
agttagatcattcaactgaatttgtgcagattaggttttggggattggagtttgcttttcatatgacttatcagttatcatcttgcttttgaagtgattgttaatcctttaaaggtcatttgttgagagtgatggaaattacttgatatttctcagaaagtataaatgcctttatcacaaactcactcatgacccacaacacaagtctttagtttctataatattctaaattgctcttcagtttctgccttctggtaacctggtttaaaattatctaagttgtcaatcttaataccttccatggactacacactgtttgcaaagagcttaagacatggaaagtgtcagggatttttgtgagttataatctcaatattggaacaaaatgctnttctgggtttcaatgttgctatcctattcaagaaatctgattttaatacat

SEQ ID NO: 287537 - DNA, 447 bp, Glycine max
  unsure (1)..(447): unsure at all n locations
tattaattatttgattattaaacccccatacttcagacactcaatcatcatcccacaataaagttgcaattntagtcttaggagtgataaaagcaaccaaaggttaatcggtctattcaaggatatgatttgcaaatgtttcttaatagaaactggttaattcatattttaacacaagcacaaaggaatctgagcaactaatgccatacaagaaatatgccaagcaaatctaccaatttcataccatgcaagaaacacaacaaaaaccatcacgcaataagtatgcagtttacatatacctgaactgacataagtatacagttttaagaggcttaatatgcaaaataaaatcaaacctgaaaaatatcattaaaaatgatgatcttaccaggaatacacccataatggatagagtctgctatccgagcactattaacctgtgatcca

SEQ ID NO: 287538 - DNA, 438 bp, Glycine max
  unsure (1)..(438): unsure at all n locations
agcttcctaatcatcattgaaaagagaatctgaagagttgaggtgaagctgaagaagatgggaagtgacgttgtggcagaggactccataccagtggcaacagttggtattattatgattccaagaccaaagcctattggaaggatctatgagattattcttaaacttcaaaagtgtctcacgctcacttgggatgcacacactctctctgcatggtaagctcaacaaccaaagctggacaaagacaagaatataaataatggaggaggaattcatgatcacacaagaatatatagaaaacaagtgtagttgttggttccgcatataaatcatcaaacttctattatttatactgctgccctgcctgtntttttcttcactttcattattntnntacctttttattattgtgccanatactanaatattcttccattc

SEQ ID NO: 287539 - DNA, 429 bp, Glycine max
  unsure (1)..(429): unsure at all n locations
tatgagagatcccagtttggtggagagataagtccttgntttgctgatttaaagcatttgaattacttggacttgagcgccaatgaataccttggagaaggtatgtcaattccttctttccttgggacaatgacttccttgactcaccttaacctttttcatactggattctgggggaagaatcctcctcaaaatgggaatctctcaaatttggtgtatcttgacctgagttcaaatgttgccaacggaacaataccctctcagatcgggaatctctctaagcttcgatatcttgacttgagcgccaatatatttcttggagaaggcatgtcaattccttcttttctcgggacaatgacttccttgactcacctcgacctctctggtactggattcatggggaagattccatctcagatttggaatctc

SEQ ID NO: 287540 - DNA, 325 bp, Glycine max
  unsure (1)..(325): unsure at all n locations
agctttaacctcatcgtctctcacagtctttagatttgggagccaatccagtccttgtgttcggactctcagccacttatgatagccgccgatgatcccattactgcttcccctaagctctctgtcctttcttcacgccgcatcccatgccttgcgaactccttggagtaccctcgcgttgtggtcactgaaacctcatgcgatgaaaggcgtgatgctttcgtctgatggcactcctctcatgggacatccttcgcatgaagatagaatcctgattcttccttccttctagcgagggaaccatntaacagaacgcccctcatgc

SEQ ID NO: 287541 - DNA, 336 bp, Glycine max
tgcctcgaagaggtccaggaaggacaaggcagccgaaggatctagttccgctccggagtatgatagtcaccgctttatgagtgctgtacaccaacagcgcttcgaggccatcaagggatggtcgtttctccgggaacgacgcgtccagctcagggacgacgagtatactgatttccaagaggaaataaggcgccggcggtgggcatcactggttactcccatggccaaatttgatccagaaataatccttgagttttatgccaatgcttggccaacagaggagggcgtgcgtgacatgagatcctgggtaaggggtcagtggatcccgtttgatgc

SEQ ID NO: 287542 - DNA, 312 bp, Glycine max
  unsure (1)..(312): unsure at all n locations
tcttcttctgtcacttttttaaatgaaggaccagaaaacatgccaccccattgtggaaaagagattaaacatattggcagggtgcatattatgatcatggctcccattagagtgattcctctttcttttgaaaacttggatcctttgaagaaaattaactgggtcacaactgcacccacattgcctcctcctcctgtcattccagatatgacccctaatgacctgaanatatatgtgtatgctaatgcatnatngtagaattaatcacaaaagaattattggcatagaagctatgcactntgttatatatct

SEQ ID NO: 287543 - DNA, 250 bp, Glycine max
  unsure (1)..(250): unsure at all n locations
tttttctcaccaagtagaaatggatcattttaagggccaaccccttaaaaggaccaccttccaagttagaagaatcgcttgattcgccctttaaaaagaactacctaagtttgatttcctcttcgatgagggtacgtangagcaagaaccccgcttttgtcgacctcaaaaattaaaaagaaataaaagtttaggtacacaatttcacataattctaaaattaaggcttgtgtcctttgggacaaacgtg

SEQ ID NO: 287544 - DNA, 335 bp, Glycine max
  unsure (1)..(335): unsure at all n locations
cagcttgtatgattatggggtacccatcacatgtggtactaggtggcggtcgggcgatggtgcacaacaaagtttccacatccacaaattgtgcataaacccaccatcccctattggccacctccaactgagcttacgtactcccacgtagcccatatcctcgtttctctcaacaccgggtccccatcaatcctctcaagcttccccaacatccaagtaaaacaacattcaaacaacacaaactatcacagccaagaaaacagagcaaaggcagaaaactctgccaaaacaccaaccaaaatcacagcttntctcacttaaagaccccagtaaca

SEQ ID NO: 287545 - DNA, 310 bp, Glycine max
ccaaagtcctattaacaacttccgtttgcccatcggtttgtgggtgacaagtggttgaaaataacaatttaatgcccaacttgctccacaaagtcctccaaaaatggcttaggaacttaaagtccctatcactaacaatgctccttggcaaaccatggagtctcacaatctccttgaaaaacaaatcagccacatgggaagcatcatcaacttttttacatggaataaaatgagccattttagaaaacctatcaacaaccacaaaaatggaatctctaccattgcttgtttttggcagcccaaaacaaaa

SEQ ID NO: 287546 - DNA, 358 bp, Glycine max
  unsure (1)..(358): unsure at all n locations
ttcttgtctcanagaggtccaggaaggacaaggcagccgaaggaactagttccgccccggagtacgacagtcaccgctttaggagcgttgtacaccagcagcgcttcgaagccatcaagggatggtcgtttctccgggagcgacgcgtccagctcagggacgacgagtatactgatttccaggaggaaatagggcgccggcggtgggcaccactggttactcccatggccaagtttgatccaganatagtccttgagttttacgccaatgcttggccaacagaggagggcgtgcgtgacatgagatcctgngttaggggtcagtggatcccgttcgatgccgatgctatcagccagct

SEQ ID NO: 287547 - DNA, 387 bp, Glycine max
tactttgagacaaggaaactcttgtgttgattggttgactatatgaaagagctcaatcactggtaccttttagcttttctggttcatgcccagctgtgatgcccctatgtagttggcgatgcagtgggaacttttgtccctaaaccctagctttctgtctgttacacttcatactaataaaaaagagctatattttgtggatctggttgtggaaacattttctcttgtttcattacttggtggtaaaataggatttgaacccaaattcacgcgtccactatgatctattaattaatagaacctaggctgctaaactatcaattacgagaatatcataatttaaaaaccaaaaacaaacatatttaacacacatttacctaacattat

SEQ ID NO: 287548 - DNA, 477 bp, Glycine max
  unsure (1)..(477): unsure at all n locations
tattattctttaaganaaaanagtgaggagtagctagagaattatatttctaaaattgtacgatgtcgaccatcatgtctcttgtatagggatatcacagagagctggctagttaaggtgatcataagtgaagtttcgttaagtcgatcctctatagagtgagagattacaatatctgcgttatgtcatactcatcatttagatgtaatgaaacatcactatatgaagcgcatgaaaagatctcatgaggaattagacacagtatagcgattgattatactgagatataattacgaggccacaattcttggtgctatatcagtgtgatcaactacgatacactattaaggtgtgtgtaataatctacccactacaattatgataatgaacgcctgtgggaactatatcataatgtattgttatgatctaaatgattagactctgactccaagcaagtgttagtctctaaatcataag

SEQ ID NO: 287549 - DNA, 423 bp, Glycine max
  unsure (1)..(423): unsure at all n locations
ntatatacctaagacaatagactccttattatccaaaatataatcggtcttttattatttggctccttcatcaaaagtcaataatacaaaataaaaaactttgtaacaactacttcaattctgtgtatggaccacataacagttatatgctaacattcttccacttgactcatatattactaatataatctttattttgacaaacaaatatgactataacttgtcaatttaaacttgatattgtcactaaaaattaattacacatgaatcacgacggttatattttagattaaacattttctttcatgaattacaatatgtaaccttttcttagtgaaatatagggtcttaacattatngattcaattngaatgcttttatgactaaactaatgtgcacaagtcatagaatgaaaaaaaacat

SEQ ID NO: 287550 - DNA, 444 bp, Glycine max
  unsure (1)..(444): unsure at all n locations
agcttttatcatgtggtatcaaagcacaagagcttcaagtaggtgctccttaaacctccattaattttttgctttaccttctcttccattgttgtttcttcattttttctccatgtatctcctcacatgtcttgtgctaaatgtttttaacatgattctttagagtttccaccgattaaacttgctatagaagctagatttgattntctatggttcaaatttcttgttcttgttcttgaaccgtgaattgtgttgagtttaagttcctttgaattttgtcttgttattctttgtggctgaaacctaaatcataaaattcttacaaaaatattaaagtagaagaaaacctcaaaaatctagagtgacttgttcagctattgtagttntgtcatacaagtcatgtctagtcatgaaacttgtcacataagatntcttatgttgtga

SEQ ID NO: 287551 - DNA, 426 bp, Glycine max
tatgctgcaaatatttacaatagacctcctcaacctcatcttttaaatttatcacagcagagcaattatgacctctccagcaacagatacaatcctggatggaggaatcaccctaacctcagatggtccagccctcagcaacaacaacagcagcctgctccttccttccaaaatgctgctggcccaagcagaccatacattcctccaccaatccagcaacagcaacaaccccagaaacagccaacagttgaggcccctccacaaccttccctcgaagaacttgtgaggcaaatgactatgcagaacatgcagtttcagcaagagaccagagcctccattcagagcttaaccaatcagatgggacaattggctacccaattgaatcaacaacagtcccagaattctgacaagctgccttctcaagct

SEQ ID NO: 287552 - DNA, 330 bp, Glycine max
  unsure (1)..(330): unsure at all n locations
tgctattcgtcttacagaatgcanaaattgtatacggataaccactcgggtatttccgcccgtcagcgtgactcaaaagtcagtatgacagatcttttgagcacggaagatgacgtaaatcaccacgtgtcaacgggcttgtcagccgcgattaacgaatggcgcagaagacgacgttagtctctacgtgctatcaggcttttcgtcttacagacagcacaaagtttatacggataaccacttcggtattttcgcccgtcagcgtgactcaaaagtcagtatgacagatcttgtgagcgcggaagatgacgtaaatctccacgtgtcaac

SEQ ID NO: 287553 - DNA, 312 bp, Glycine max
tgataacacgcagagactaacgtcgtcttctgcgctattcatcaatcgcggccgacaagcccgttgacacgtggagatttacgttatcttccgcgctcacaagatctgtcatactgacttttgagtcacgctgacgggcggaaatacccgagtggttatccgtattaactttttgcattctgcaagacgaaaagcttgattacacgcagagactaacgtcatcttctgcgccattcatcaatcgcgggcgacaagcccgttgacacgtggagaattacgttatcttccgcgctcacaagatctgtcatactg

SEQ ID NO: 287554 - DNA, 379 bp, Glycine max
tagctttttatattgtttgtgaaggacaaaagtgacttagtgataaagaatacttgggtcttaatcttaggggaagattaagtgtagtgccaggagtgacctatagagtactcattgtagctagaagtggcatagagaatacttgattgtaatcaaagaattaattagtgaaatccttcaaagtttgaaggaaaactggacgtagcccaagagttgggatgaaccaatataaaacttgtgttttctttactgcttctatataactagttcttttccatatgttactcctacactactctatccaagttttgtgaactgattttctaagcacataatgatttcaaaccccttggacgaaacccaacgtctattaatatct

SEQ ID NO: 287555 - DNA, 363 bp, Glycine max
  unsure (1)..(363): unsure at all n locations
tntatgtgaaaggatgtgactcttcacatttgaatttgattttcaacgttcaaaggcactggtaatcgattaccaaaacattgtaatcgattacagctttttgaaattaattggaaccgtgtaaattcaatttgaaaaatttttcaaaacaattttgctaccggtaatcgattacaacaatctggtaatcgattaccagagagtgaaaactctttggtaaacatgttttgagaaaaatcatgtggctactcaattttgagaaaaacttttcatacttatcttgattaagccttctcttgattcttgaatcttgtgtcttggatcttgatcttgattcttgagatcttgaaccctgaatcttga

SEQ ID NO: 287556 - DNA, 393 bp, Glycine max
  unsure (1)..(393): unsure at all n locations
agcttcttatcttaagcttttcttggaggtgaagctccttcttccttggcttattccctagtggatggtgtctcccctctcctcttctcctttgccttccgctgcatctccatggtgtaaaatcaccattaaaggacctcattgaagctcanagatccagccttcgtagaagctccacaagcaagcttccatcagttgtaatcgattacaacatttggtaatcgattacactcttcctgactgtntgtaatcgattacagtattgtagtaatcgattaccagagaacattntagcaaaacttaaatgctggaagaaaatctatggtgaaaggatttgagagggggtcanaatactttatatgtaanaactcttatatgaaaataaatatatat

SEQ ID NO: 287557 - DNA, 437 bp, Glycine max
tccttaagaagattcctaaagaagctagagcttagctacacatacctctctaatagctaagctcacctccttgagatgagaagctagaacttaactacacaccctttataatagctaagctcacccccatgacaaaagaaaacatgaaaatacaaaaaaaagtccttactacaaagactactcaaaatgccccgaaatacaaggctaaaaccctatactactagaatggccaaaatacaaggcccaaacgaaggaaaaacctattctaatatttacaaagataagcgggctcatacttagcccatgggctcgaaatctaccctaaggctcatgagaaccctagggcctacccttggatctttagcccaatctacttggagtcttctacccaatgcccttgcgggataggatggcatcacaaagcatcaaaattcaat

SEQ ID NO: 287558 - DNA, 390 bp, Glycine max
  unsure (1)..(390): unsure at all n locations
agcttgtatgttgttttgtatcattccagaccatattcacaataataatcattctttcttcgcagtatcagagaattcttctgatactgtctgactctgatcccttgtccatgatgttaagtgtcaaaatgggacacctctactttctttaataacataattgcagagaattattgtagcatanaatgcatagcttatgtccttgtgaaacgcaatgcagagaggcctggaactatntattgcttctcactcagctttcatagtttgggttgcattgtttcagccaattggagatnttaatcatatatctctcgaagctaactgcaagaaagttgactaatgtattatgctnttgctgtcaggatatcttgcatgtgctcgctgttcaag

SEQ ID NO: 287559 - DNA, 439 bp, Glycine max
  unsure (1)..(439): unsure at all n locations
tcatggaattntatgcgatgacatgggacttggaaagacacttcaagcatcagctattgtggcctctgatatagctgagcatcgaacttcaattgggaatgaggatcttctgccatctttaattatttgcccatcaactctagttgggcactgggcctttgagatagaaaagtatattgatgtttctgttatctctagtcttcaatatgttggttctgctcaagagcgaatgcttcttcgggatcatttttgcaagcataatgtcatcataacgtcatatgacgttgtccgtaaagatattgattttctatgacagctgttgtggaatcactgcatcttagatgaagggcatataatcaagaatgccaagtctaaagttacacttgcttgtaaacagttgaaagcccaacaccgcttgatattgagtggtacacctata

SEQ ID NO: 287560 - DNA, 291 bp, Glycine max
cgcttttttttttatttttatagagcgaggagagagacagaaggagactcgcgataaaactgtcttgggacaccctccaatggatagagatcctcatatgcctataacgaggttaacagactagtgcataagaagacttcccctcaagctggatccttcgtatatagagaccatgtacattagaactttgttttagcagccttagagatactaagcggtagtgggtggaacaaccactacgtatcgtgtatttattagattctgaccttatgatctacgattcaactcctc

SEQ ID NO: 287561 - DNA, 213 bp, Glycine max
gtggatgaatcatcccaaccttacatgggcgatatcttcacaactagtagcaacaacaaccttattttcaaaatgttgctggcccaagtataccatacgtttcctcaccaatgtagctgcaacaacagcaacagccctaaaaacagtaaacagtcgaggcttctccgcaaccttcccttgagaactttgaggcaaatgatatgcaaaacatgc

SEQ ID NO: 287562 - DNA, 415 bp, Glycine max
  unsure (1)..(415): unsure at all n locations
agctttcgtatataatataagacaatacatagcaacaatatgtcggtattggacaagtttaaaagcaacatctaaacagaataacttctaatttcaaaaatagctatttctaacttttcaggtgttaagtgaatcgaataaactcattcaaaaacctgaagttatctccactttcataaatacatatgtcatcaagtagcaggtaatccctacaaaagccaaatatttggtagtaggcttcaaaaaaagtgttgaatcccggcccatgttaagcttcatacaagagaactgaaagtctttgttgataattatttggtagcagtgatggttttcaattctattctctgactntgacaagctgctctcatttgaccagattctacagaagatagatgaatatatttaccagacatat

SEQ ID NO: 287563 - DNA, 398 bp, Glycine max
tcttgaacgagatcagtatattcattggcacaaattaaatgatctaagacgtggtttttgatatcttttggtgtcaccctgatgcaatgaagttagtcaatgcatgtaatttggtgtttttgataaacagtacctacaaaacaaacaggtacagactctcactgcttgattttgttggggtgacaccaactgggatgacattctttgccggttttgcatatctggaaggtgaacgtcttaataatgtggtttgggatttaaaacgcttttgaggtatatttttaagatgtgatgtccttcctcgagttattgtcactgacaaagacctaacattgatgaatgtagtgaaaattgtatttcctgagtgtacaaatttgttgtgcaactttcacacaaac

SEQ ID NO: 287564 - DNA, 528 bp, Glycine max
  unsure (1)..(528): unsure at all n locations
agcnacaatgtgttgcatcattganagcgaanncagctcggacccgggatgcttagagtcgacctgatgcgtgcaagcttgtatattcacacattcacacacacacacacacgcgcacacacacacacacacacacacacacacataaacccttactctattttctttcgtaaaataattaattccaacgacattcataatacttcataggaataaaagaagtgaagtaaatttttgtgaaaataaaaactttgtatataaacttctgaaactcgttctcctttatgaagcatacataattttctaggttgtatacacatggtgtactaaaaaacaaataagttctagaataaataaaccatacattctcaggtgataaatatggataaacaagtctatctccatggtcaccacatatagataaataagtttcataagtaataatagatagcaagatgtaagtgtctcaatggaaagattaagtagcatatacgatcccataatatcgagtatagagatgtagagtag

SEQ ID NO: 287565 - DNA, 436 bp, Glycine max
  unsure (1)..(436): unsure at all n locations
gcttgatgcaacattnggagagattaatgaaacaacgatatgattcgctccatgatttgttggatcaaatggagaatagagatcataatgaagaagaaaggaggaggagagggaatgatggtgttcctagacaaaaccgaattgatggtattaaactcaacattcctccctttaaaggaaagaatgatccagaggcctacttggagtgggagatgaaaataaaccatgttttctcatgcaacaactatgaggaggaccaaaaggtgaagctcgccgccacggagttttccgactatgctcttgtgtggtggaacaagttacataatgagagagcaagaaatgaagagccaatggttgatacatgtgcagagatgataaggatcatgatgaagcggtatgtgccggctagttacttaagggatttgaaattcaagct

SEQ ID NO: 287566 - DNA, 421 bp, Glycine max
  unsure (1)..(421): unsure at all n locations
nngtatatgctcgattaaagacaagtgttgtatatactagatatgactcttataagtgaaactgagtgactcgtaagagaattcttaccaagattgatgcacaaatattggattaatcagtagagttgatcttggaatgccattgagagctctttgggaagaaacattttatgctctacaaacatacgtctgggtatgagatatggacataaagtggatggcatagccgactaccgcatatatcgttgtactctgctgcgcactcgattcgagacggagtgctgtaatcgctcctctgctgtgcattaaatgacaatgcacatgctgcagccattcgacaccctggcagcgatacttgcctatgtgttggaacactatcaaggtgtatgtccatggggaagccccccttcctgaggatggg

SEQ ID NO: 287567 - DNA, 359 bp, Glycine max
atcttgggtgatgttgcgcgtactgatgggtaccatgaggtgttgcttgagtttgacccacgcgggtgttgaagagacggcatgggcatcttctttctttctttttgcccctgttggcccgattcttttggcattcgcgtttgtggaggaaacgtaatcaaacttttctcttttcaatccaacctcgattctttccccggcaaacaccagatccgcaaagctggacggcatgtaacccactagcttctcatagtagaacactggcagagtgtctaccatcatggtgatcatctctctctcaccatgggaggagctacttgttgccgcaaatcccttcatcgctgcgcatattctttaaa

SEQ ID NO: 287568 - DNA, 312 bp, Glycine max
ggacacttttagcacttccttacatgaatacaataatcattcttcatcacgagcaaaaaatatccagcccttaaaatctttcaggccatggcatgcccattggcataggggccaaaggaaccttcatgcaccttccttagtatttgctcaacttcacttacatccacgcaccggagtaacaccatatcatggtttcttttgtatagcacgtccccattcaaaaaaaagttaactgccaacctccgtagtgtcctcttgtcattctcaaaggcctcatataggtactccctatctttgatatatctcttgata

SEQ ID NO: 287569 - DNA, 439 bp, Glycine max
  unsure (1)..(439): unsure at all n locations
agcttctttaggaatcttcttaaggaagcttctcaaggaggtgagcttagttatgagaggggtgtgtgtagctaagctctagcttctcaaggaagttttctcaaagaagcttctcaaggaagttttctcaagaaagcttctcaaggaagctacctagtctataaatagaagcatgtgtaacacttgttgtaactttgatgaatgagagtcttgtgagacatacttcaaagttccacttctctacctcttttattccttcaattntgtgctcccccctctctctttctctccctctntcttttcctccattgaagcatcctctccaagcttcttatccaaggctcatcttggtggtgaagctccttcttccatggcttattccctagtggatggcgcctcctctcacctcttctcctttgtcttccgctgcatctccatg

SEQ ID NO: 287570 - DNA, 431 bp, Glycine max
  unsure (1)..(431): unsure at all n locations
tcatgtcttnttgaacttccttatcttctaacctgcaaatatatgcaagtcagtaacaattgatcccaccaaatcaaatggtcaaaaatcaacaacttgagcaagtcttactttcttccgataagtctcttgacatcaaagatggtcctttctgggttgacagctgcctgattcttggcagccttcccaatgagtctctcactgtcggtgaaagcaacccacgatggggtgatacggttaccttggtcgttggctatgatttcaacatggccattcttgtaaacaccgacacatgaataggttgttccaagatcaatgccgatgaccgtccctaacttggtggcttccttcttagcaatggaaatcgcaaatagacatcctatggagaaatttctcaatgttagttacatagttaaatttttacaacactt

SEQ ID NO: 287571 - DNA, 302 bp, Glycine max
agcttgtatgtatatcaaataaggcctttaacgaatatcagaattggacctaccaacatctattatcttatttacactcttactgaaaagaatatccatatcgcactttctgctatacttgcttatatgtctattaatgaaatctatacagcatttattaacatatgcaagtttcaagttctctttagagagtccaatatgttgcttttgcgagtgctttactgagtctgatataatactcaattgataacaaatcatgtattagttgttaaaacaaacactaacattatattatacaaatt

SEQ ID NO: 287572 - DNA, 311 bp, Glycine max
agtaggattatggggtacccatcacattgtggactatgtggcggtcgtgctatggtgcacaacaaggggtccacattcacaaagcgcgcataaacccaccatccccttgtgcccacctacaactgagctcacgtactcccacgtagcccatatgctcgtttctctcaacaccgggtccccatcaatccttccaagctttcacaatatccaaacaaaacaacattctaacagcacaaactaccacagccaagaaaacagagctaaggccgaatacagctttctcacttatagacccaagaacaattgcttcg

SEQ ID NO: 287573 - DNA, 244 bp, Glycine max
atctgttaccatatcgtctctcacagactttagatttgtgagccaatccagacctggtgttcggactctcagccacttacgatagccgcctatgagcccatgactgcggcccctgagctctctgacctttctgcacgccgcataccatgccttgcgaactccttgcagtaccctagcgttgtggtcactaaaacctcgtgcgatgaaaggcgtgatgctttctgctaatggcgctcctctcatg

SEQ ID NO: 287574 - DNA, 410 bp, Glycine max
gacacttcgaaactcaagcttctatagaagtccattcctaattgtctacaatagcattttctctcaatgatctggagacaaagaacgtggcattgacctgtggtgaaaaacaataagcagcctttgctttgctcaaagaaaagcttactaaggcacctattctagcttttgctgacttttctaaaacctttgagctagaatgtgatgcctctggagtgggagttggagctgtattggtacaaggtggacaccctattgcttatgttagagaaaaactttatagtgccaccctacactaccccacctatgataaagagctttatgccttaataagagctctacaaacttgggaacatttaccttgttccaaggaatttgtcattcataatgatcatcaatcacttagtaca

SEQ ID NO: 287575 - DNA, 250 bp, Glycine max
  unsure (1)..(250): unsure at all n locations
ttgcatctttttctggaggcactnttgaaacaatatttctttagatccaatccccacctacaggtaaaaaaaaagtcacatgttaactgaaaatacacattttgccggctattaaatggactacaagaatagatctacaaaaaaaaaggtaaatatgctaacggctatactgagtaacccaccaaaaacaacatgaaataggttgcagccatgaccaaaaatcaataaaactggataaactcatatcaca

SEQ ID NO: 287576 - DNA, 357 bp, Glycine max
  unsure (1)..(357): unsure at all n locations
ggatcttttaggtttttatctttaatcttttatccctgaacgaactattcaaagttgtaattcgaactttaattatcttttaattcgctcctaaagatagatcgccaaatctgttgctaactgcacattaatctgttaaagatataacagatttatgtgtccagtattttcgggcaagatgttctggacatcgtatccgacatcgtggatcctgcagcttcaattcttcattngacattttatcttgccttgtgcattgtgcagcccaatctgattccttgacataaccgtggacatcatgtgcagcaactccagcttttcttcattggctaagtgcctatgttttaacaaaattta

SEQ ID NO: 287577 - DNA, 436 bp, Glycine max
  unsure (1)..(436): unsure at all n locations
agctttttccanaactttgtttatcctgcacaaagcaatcttgtttggatcatgtctacagctttgaacttattcccttttcatgatccccatgttaggttattaactgtgcttctagacaggcatgttgaaagaatttctcggagaatggtatgtctgactatgctacagtttcttaattagagggacattctttagcatcaatggatgaaaaactaattgttgatactttgtgcagtgcaaccttccatatgttactatggtagtgactgacaatctacaggttattctcacttcagttctattcaatcgctcagtgtctaacatagttcgataggacatgttgactntgtagccatattgcagtttctgcgttataaaattgttnttgggctctaacttagttgttagtgtttaaaatttatttttgcaatta

SEQ ID NO: 287578 - DNA, 311 bp, Glycine max
tcttatccaaagcaattcttggtgttgaagctccttctttcttggcttattccctaatggatggtgcctcccctctcctcttctcctttgccttccgccgcatctccatggtgtaaaatcaccattgaaagacctcattgaagctcaaaaatccagccttcatggaagctccacaagcaagcttccatcaagtggtaatcaaagcacaagagcttcaagtaggtgctccttaaacctcccattaatggtttgctttaccctttcttgcattggtggttcttcatttttctccatgtatctcctcacatgtc

SEQ ID NO: 287579 - DNA, 405 bp, Glycine max
  unsure (1)..(405): unsure at all n locations
agcttgttagttgtaaattntgtaagacttaattcacccccccccccctcttaagttattgaagccacttgtccaacaaagggggatggatcccaaggtgtgttcaaagtatgtaaaggaattacaaagataatggaaaatctcaagtggattgtttgaggactggacgtatgcatgggaagtggccgaaccagtataaatcgagtgtgaaattctctcttcccttatttatntattttattgcaatcaattgtgtcttgcacgtttaaagaacattattaaatcgattgatgcttcttcttcttcattctaagtctatcatttaaaagaaggttaacagcttgttagtgagaaattatgtgagacttaattcaccctccctcttaagttattgagaccacttgt

SEQ ID NO: 287580 - DNA, 126 bp, Glycine max
gagagacatttgggagacgctgcttaccctgccttcagccttagactttctgggcctgaacgatgttattggacaaagggatgaactccgatacttttcttatatgggacatgatatatgctaaaa

SEQ ID NO: 287581 - DNA, 222 bp, Glycine max
  unsure (1)..(222): unsure at all n locations
agctnttcgtcttacagacagcaaaaagtttatacggataaccactcgggtatttccgcccgtcagcgtgactcaaaagtcaatatgacagatcttgtgagcgcggaagatgacgtaaatctccgcgtgtcaacgggcttgtcggccgcgattgatgaatggcgcagaagacgacgttagtctctgcgtgctatcaggcttttcgtcttacagccacaaaaa

SEQ ID NO: 287582 - DNA, 442 bp, Glycine max
acacgtggagatttacgtcatcttccgcgctcacattatctggcatattgtcttttgagtcacgctgacgggcggaaatacccgagtggttatccgtataaactttttgctgtctgtaagacgtaaagccttataacacgcagagactaacgtcgtcttctacgaccttcgtcaatcgcggccgacaagcccatttaaaagcggagatttacgtcatctttcgtgctcacaagatctgtcatactgacttttgagtcacgctgacgggcggaaatacccgagtggttatccgtataaactttttgcattctgtaagatgaaaagcgtgatagcacgcagagactaacgtcgtcttctgcgcccttcgtcaatcgcgatcgacaagcccggtggcacgcggagaattacgtcatcttccgcgctcacaagatctgtcatactg

SEQ ID NO: 287583 - DNA, 324 bp, Glycine max
agcttttactttaatataagtcctttattctaaggttcataacacaaattaaagtgcaaagttgggattacttacttggattgcaataagacatgatcaagaggaagtcatacaagcagagagcataatgtgagcatagtgcaaataaatgcaagatgcaaaggatgatagtgagaccatgtttgtaaatgcacgacagactactgcctaaagcaattaagccttatttttggtagttttgactgcctcgcttagcgcaagtcactcgcttagcgagcactcaaggacttttaagttttcagaatacacactcacgagctcagc

SEQ ID NO: 287584 - DNA, 434 bp, Glycine max
  unsure (1)..(434): unsure at all n locations
ttatcactggcattgcacttcctgttggttccgacaaactttattctggcatcactgatgggacagttaggatatgggactgccatactggtcaatgtgctaaagtcatcaatcttggtgctgaaggtacctctttgatcagtgaggggtcatggatttttgttggtctgcaaaatgctgtcaaggtaagctcttatctggcattggtttggtttgatgtatgataatgtctaatcataagagtagtacatgcaaactgattatgtggctgtggttggtgtgaaagcttggaatatccagaccatgtcagaagttactctcgatggacccaaaggccgaatccctgccatgacttgtggcaacaatacactctnttctggcgcagaggtaactaaccatgttattaatattgcgcaatgatattcccctaaccg

SEQ ID NO: 287585 - DNA, 421 bp, Glycine max
agcttgttggttacagtgacaacaattgggctggagatgaagatgattggaaaagtaccagtggatttgtgtttttcataggaaacacaaccttcacttggatgtcaaaaaagtagccgatattcactcttttgactcgtgaggcagaatacgtagcagctacttcatgtgtttgtcatgcaatctagcataagaatttattaaaagagttgggcatgtcacaagaagagttgaccaagatctttgtggataataagttagtcattgctctagcaaggaatccagtgttctatgatcgaagcaagcatattgataccccttaccactacataagggagtgcatagcaagaaaggatgtacatgcagaatatgtgaagtctcaagaccaagaagctgacatcttcaccaagctgctcaagca

SEQ ID NO: 287586 - DNA, 446 bp, Glycine max
  unsure (1)..(446): unsure at all n locations
ttgacagaaatccgacatcgtaacattgtaaagttacatggtttttgttcacattttcaatactcatttttggtgtgtgagtttctggagatgggcgacgtcaagaagattttgaaggatgatgaacaagcaattgcgtttgattggaataaaagggtggatgttgttaaaggtgtaacaaatgctttatgctatatgcatcatgattgctcacctccaatcgttcatcgtgatatatcaagcaagaatgttcttttggattccgattatgtagctcatgtctcagacttcggaacagccaagtttcttaatccagattcatccaattggacctcctttgcaggaacctttggatatgctgctccaggttaatttcctttctctatactatttgagtaaatcatgatattntagtttgtcttcgttagccatttacaaatatatat

SEQ ID NO: 287587 - DNA, 360 bp, Glycine max
  unsure (1)..(360): unsure at all n locations
agctcttccttantattcaagtgtatggaccatatcgtagccaaagtgctcatcgataatggttccagtttaaacgtgatgcctaagagcactttggagaaattaccattcaatgcttcccacctaaagccgagttcaatggtggttcgtgccttcgacggcacccgccgagaggttatgggagagatcgatctcccagtacagataggccctcacacctgtcaagttaccttccagataatggatattaaccccccctacagctgtctgttggggcgtccgtggatccactcagtgagagttgttccctctacactccaccataatgtgaaattcttagtggaagggcatctggtcatt

SEQ ID NO: 287588 - DNA, 443 bp, Glycine max
  unsure (1)..(443): unsure at all n locations
tctaagaatagccttgataactntaacataatccattgattcttccccaaaaaatatagtgtcatcagcaaattgaaggatattcactgcaaccttgttcttccccaccataaagttgtggaagcagtgtttggatattgcttccttcatcattcctgtcaaacgttcaacaaccaagtcaaacaataaaggggccaaaggatccccttgtctcaaacctctttgaggcttaaattcagtagttgggctttcattaactacgatagatatagaggctgatgtgaggcaccccttgacccaactaatccacctgtcatgaaaccccattcttctcatcatataaaaaaggaatttccaagacacatagtcatangctntttcgaaatccactttaaacaccaagcaagacctctttgacctcctaagcccctcaacaacctcat

SEQ ID NO: 287589 - DNA, 443 bp, Glycine max
  unsure (1)..(443): unsure at all n locations
ctttttttcctcatatnagaacatacctagctaccatatgtcggaattggaccagtttaacagccacatctaaaccggatgacttctaatttcgaaaataactatttctaacttttccaggggntaatgaactccaataacctcattcaaaaccctgaactatctccactttcatcaatacatatgtcatcaagcagcaagtaatccctacaaaagccatatattgggtagtacgctacataaatagtgtcgaatccaggcccatgttcagcttcatacaagagaactgagagtctctgtcgataattacttggtagcaccgatggtctcaattcttttctctgactatgacacgctgctctcatttgaccacactctacagaagatagatgaatatattgaccacacatataanggaatngntggaatagaannagcaacat

SEQ ID NO: 287590 - DNA, 176 bp, Glycine max
taatccatgcatggaatttggtgtttttgataaaccgttcctacaaaacatacaggttccgactctcactggttgattttgttggggtgatccctactgggatgaacttcttttgcggatatgcatatctggtaggtgaacatcttaataatgtggtgtgggatttagaacgcttt

SEQ ID NO: 287591 - DNA, 331 bp, Glycine max
  unsure (1)..(331): unsure at all n locations
agcttgtatactcttgaacagaggactnttcaagtccttgttagattgagggatgaacgagatgaggccaaagaggtatcttttataaagaaactagttattcatttcagtttacacaaaaaaattaactattttttcctgttcaaagcataattntgtattttttttcttaagttatactgagttcctaaattatgtttatatgtaaggcccttgaagaagtactttctcaaaattcttcaaagcagtatgactcatactttgctaatacacgtgaatctgttntccaggtaataatgtaatatacttaaaagaaccatgtcatcctttc

SEQ ID NO: 287592 - DNA, 355 bp, Glycine max
  unsure (1)..(355): unsure at all n locations
tgcatcaataaagaggtcttattggttcaaatntatgttgatgatataatctttggatctactaatgaatctttgtgcaaggagttttctattgacatgccaaatgagtttgagatgtccatgatgggtgagttaaactactttcttatattacaaatcaaaccaacaaatgatgggatctttgtcaacccagcaaaatattacaaggaactcatcatgaaattcggaatgaagaactcaaaacacttggctactcctatgagcactggttgctacctttgacaagatgaatccggtcaattcgttgatgaaaagcaatatagaggtatgattggatctctactttacttatatg

SEQ ID NO: 287593 - DNA, 382 bp, Glycine max
  unsure (1)..(382): unsure at all n locations
atcttattaaactttaaacagagttaattattctcaaaccaaaatgaattctagcagattgttctggaggacctanggataattctaacagattgttcttctggttttaactgtgaggtcaatgttctcccatacataatatttagaggctataagatgttaaattttattggaccaattgaaaaattcttggcatgcttggttagggataattttagcatattgttctggttttaagtgtgaggtcaaagttccctatagcatattctaacatatctttgatatcattggctttgtctatcaataccttaagttgttgcgtgaagatactccaccagaatgggatattaaggaaattcaaaatattggaaacatggatttc

SEQ ID NO: 287594 - DNA, 432 bp, Glycine max
  unsure (1)..(432): unsure at all n locations
tgaagcttaaggataagcttgaagatgttttgacttttacantgcctaactcccttgagtggcatttggattggtttttatcttggatgtcgcatcttaatacatatgatatttgtattgcatcattcattatcatggttagggtgaagaaaagtttcttcaagaaacaaaagctcttagttttaattgattacaagtccattgtaatcaattacaacatgttgtttgaagcttgaagagttaagtcttgtatcggtttaatcgattacagttgtctcataattgattactctgttctttgagacaatgaccaatttattcaggagtctctgctttaatcaattgccaagtggattaatcaattacttctctctcatttaggttgttagaagtgaanaataacactttaatcgattacttagagcatctaat

SEQ ID NO: 287595 - DNA, 388 bp, Glycine max
  unsure (1)..(388): unsure at all n locations
atcttgtgaagtatggtggccacattgatttggtgatgatgatctatctttgtttgaggtgtcaaagggcataaaaaagtttgtggttagtctaaaagaatatacatgttcttgtagaaagtgagagttaactggaattccttgccctcattcaatagcatgcatatggttgaatggtgtccaacatgaagctaatgtcaattcttattataggtgttgttatgtgtttattgttatattgtagtttttggattctatgtggtaactattntttaatttaaattgtttggattgcatttacaagaaatctacttcttgcaacatattcattattggtttcatgtattgaccaacttatggctctaacaacactatcttacttccctgg

SEQ ID NO: 287596 - DNA, 424 bp, Glycine max
  unsure (1)..(424): unsure at all n locations
tccatcaagtggtatcagagcacatgatcttcaagtaggtgtctccttaatcctccattaattntcagctttaccttctccattgatgtttcttcattttttttctccatgtattttctcatatgtcttttggtgaatgttgttaacatgattctttaaaatttccatcaattaaacttgctatagaagctagatttgattttctatggttcaaaattcttgttcttgttcttgttcttgaaccatgaattgtgttgagtttaggttcctttgagttttgtcttgatatttttgtggccgaaacctaaaccataaaattcttactaaaacatcaaagtagatgaaaacctcaaaaatctagagtgatatgttcacttcattgagttttgcataaaagtcatgctagtcatgaaacttgcacata

SEQ ID NO: 287597 - DNA, 337 bp, Glycine max
tttctttgttcgtggtacttacccgttgaagatcgaagaacgatgaagaacatcgaagaacggttgaaacctttgcgaaattcttcacggaaaacgttacggaaacgtttcggaagcgcctcggcttagattttcttcacggaaacgatttttccaagcaaattcgaaagagagaggagtgcaaaaggggctgaacccttttcttcttcccttcctcccctatttatagcaaaatatgggaggtggttgccgcccagctcgcccaggcgagctcagctcgcccaggcgagccaggttgcttcctccagaagcaacagccttctggaggaatattctg

SEQ ID NO: 287598 - DNA, 378 bp, Glycine max
  unsure (1)..(378): unsure at all n locations
tgcctcanagagatccaagaaggattttttctctgaaagaaccagttccgctcctgaatatgacaaccatcgttttaggagtgctgagcaccagcagcgcttcgaggccattaaaggatggtcatttctcccggagcgacgcgtccatatcagggacgacgaatataccgacttccaggaggagatagttcgcccgcggtgggcatcgctggttacccccatggccaaattcgacccagacataatccttgagttttatgccaatgcttggcctacagtggagggtgtatgagatatgccatcctgtgtgagggggttagtggattccattcgatgcggatgctctcagccagttcttgggatatcccttagtgctgg

SEQ ID NO: 287599 - DNA, 92 bp, Glycine max
  unsure (1)..(92): unsure at all n locations
gatatacaactccactangctttccattctatacctcatattcactgggattaaatgagcagatttggtgagtcgatctactatgacccaca

SEQ ID NO: 287600 - DNA, 344 bp, Glycine max
  unsure (1)..(344): unsure at all n locations
tgagaatggagaattgtactaagcaatcacttcgcatagctccaaactcgaaggtggaggacacatgaacgaaaacacaattcatggggcttcgaaaaaggggttgagaatggagaattacactaagcaatcactacgcatagctccaaactcgaaggtggaggacacatgaacgataacgcaattcatggggctccgaaaagattgagaatggaaaattgcactacgcaatcactacgcatagcttcaaacgcgaatgtggaagacacatgaatgaaaacccaattcatggggctcccaanagattgagaatggagaattgcactaagcaatcactacgcata

SEQ ID NO: 287601 - DNA, 362 bp, Glycine max
  unsure (1)..(362): unsure at all n locations
ttgcatctttcntgtgtagcttctatggaggttggatctttgagcttcaatgaggtcctttaatggtcgttttccaccatggagatgcagctaatgacaaaggagaagaggtgagaggaggcgccatccactatggaataagcctgcaagaaagagcttcaccaccaagatgagccttggataagaagctcggagaggatgcttcaatggagaaaaagaaagagggagagaaagagagaggtgggagcacgaaattgaaggaagaaaaataagggagagaagttgaactttgagttgtgtctcacaagactctcattcatcaaagttacaacaagtgttacacatgcttctatttatagact

SEQ ID NO: 287602 - DNA, 313 bp, Glycine max
tgggaggattgatgtgtatctcggtgtgatagaaaccagtatatgggcttcgtgggagtacgtgaacctcacttgaggtgggcaacaggggatggggggcttatgcgcgctttgtggatgtggaaaacttggtgtgcaccaatcgccgaccgccacctagtaccacatgtgatggataccccataatcctacaagcctgagatgaggaagtgtagaagggtgaacttcctgcttttattcgttgaccacagagtggtacctggagatatgtcgcgggggtcaagagaccttggggacgtcaggcggggtgcta

SEQ ID NO: 287603 - DNA, 430 bp, Glycine max
  unsure (1)..(430): unsure at all n locations
agcttgttacctatctcttcaaggcgagcaaggtggcttcctccagaagcaaccgccttctggaggaatcttctggagggcccaagtgggcctggttgctatttgcacccccatttttactaaatacaccccttgcctttttttggtgattctttntttcgtaaagttacgaaaatttacgaatttcgtaatgatacttgttttctttccataatgttacggaaccttgcggattacataatcatcccttttttgacttacggaatgttacggaacctcactaattgtgcaacgatgcttccttttgacttccggtgtgtcacagaaccttacnggatgtgcatcaatactttcttttgatttccgcacgtcacggaacttcacanatngcctaatgatgggtgccaagcacctcanaatgaccaaacac

SEQ ID NO: 287604 - DNA, 454 bp, Glycine max
  unsure (1)..(454): unsure at all n locations
tctattatcttaagttagaggtgttcgtcaaaatgaanattgtttagccaaagaataaaacaaagaacaaaaaccacatggaaagaaagcaaaagaaaaaaaacaagaaaaagagagagagagagagagaaagaatcaatccatccaagatggaagaagagagaaggaaaatagaaaagaaaaacaagttctttggaccagacaatgtctaaaaaatgtgcagaattgtcggaaagaaaaaaataaaagagaagagcaatagttatcacatgctttagttacaaaccaaatctttgtgtctgccctcctgttccacaccaaacaaaagagaaagggaaacagaaagagaaaaggccgaaacaaccaaagccaaatttcctaccaaaatccaaccttataaagacctattgatccatgatgattatgcatattatctttgatttgatgggaaatg

SEQ ID NO: 287605 - DNA, 367 bp, Glycine max
  unsure (1)..(367): unsure at all n locations
agcttcttccttctttcgtgctctgntccttccttatttctggaggtgctagacctcgaattctagccttgatacattgctctaacattttgttttttaaatttttatgttgatttgctaacagattcgatatttagatttttatgttgatttgccatggatntgggttctcttgttctccttgattntggatttgtaactcctaaatctgagtaaatgttaagttgtttttgttgtctaaatatgagatttgagttntttttttttttttttttgtgtttctagtgtgctttntatgttgtatntatgcttttgttggtgatgaacaaagaggggacggcgggttggtggtgtaaaagatggagag

SEQ ID NO: 287606 - DNA, 434 bp, Glycine max
  unsure (1)..(434): unsure at all n locations
tgtctacattcattagtaagtgcctagataagcaggtcggtgaacagatgttactagaagtgaacaaactttctttctctccttgtgctatgaacctatcattctttggacaaaacttatcaaacttaaatagttgatcctttcttatttataagaacatattggtttttttttctttcaaaattaacatggaagaatccttggttggaatcataattggttaggggaaccattcgtgttgaagggagaatgggcgtaatttaaattaacttaacccatgtataacttgtggtcttttttgcttatgtttcccctcccattnttaacttagttatcttggtaaaaacatagttttgcaaaagggtttctcaaaatcatatacagattattcaacccttcttctaatgtgtttctttgtttttcaagagaaaaca

SEQ ID NO: 287607 - DNA, 428 bp, Glycine max
  unsure (1)..(428): unsure at all n locations
agcttttgtatgccctagtcattcatccctatgagaagttgtcgaagtattggcaatcagaattgccattcctttgattatagggttgaaccaagctcatgcttttacaaaaaggttcatcaagtcaagttgaaatatggaagtaaccgtcctgcaaaattggggcaaaagatgaattgagtcacatcactgcttcgtctactgccaaacatatttaggattgtagatgtccttgttacttccagtttcaccttgacaaagatgtcatggaccatgttgaaaatctaaattgattcaaccccatatcctgcgtaaaaattcccaatacttcgactgtacatcattcgcatgcatccatgcttttcattggttgcattgctcattgcattctttccttganaaataaaataaaatanaatgaacttatc

SEQ ID NO: 287608 - DNA, 428 bp, Glycine max
  unsure (1)..(428): unsure at all n locations
tatgcgcatacttcttcacgaacgttcacttgcacaagactttcttataactaagaaaaatgcacccatatacaatcaaggcaccttcgttacctaaattctttacatgtacttccaaggggtatttggtacctacatcacacacatttcctttgctaaattcacatacatgcatactctaaacactttggctatcaaaaattgcatacgtgcacatcttggtatttctaatacctatacatacacaaacttcatgatgaatcttgactatcgacacaataaggtgctacatttcatgctctcctttttttcaagtatttttactacctaaagccgcatgcaaattcaagtatattntcttttgctcactaaaattgtattcaaattaaaaggtatttttgtaatgtattttctgcaacatatttata

SEQ ID NO: 287609 - DNA, 437 bp, Glycine max
agcttttactatcctattcaaatgttaacatgactgttaccctaaaataaaatcaccaaacaaaagattgccaaaagtatctcccaccaaccccgaagatcaaatctcatactccctccgtttcaaaatacatgtccatttttgaaaaattgcggtaaccaaggacaggctaatttgacacaaaagttcctattttacccttgtcctttattttctccattttatatttatttatcccacctcataattactcccaataccaaaattaattaaagttaatcaaattacaataccaatacatactggcaataccaatactactaaatggcattatgtttgcttcggtattgaaaagctcaatgggcatagttcggttatcaaaagtttttaaaactcaattgaaaaaacttccctccattattacatatactctaatc

SEQ ID NO: 287610 - DNA, 388 bp, Glycine max
tctttggcctaacaggaactccaatatttttacagcttctaatggtatgaatggtttggccacaccttccacatgtaaactcaaccaatttcctctttaacttatgtcctgtgacattgtcctcatctacagatcttcttctatttttctttggccttcctctttggacctttttatgtggtggaacaaggtgtgtatactgtgtctgggcccaatattgaggtccttggactggttcaataaaatgctggtatgtcttattataagcttctattgacagccactcatgacacatgtcctcaagcttccctcctttgtgagttattgttgcaatggcatgtcggcatggcatccctacatcaaagttgtaaaatcagcacacatgtag

SEQ ID NO: 287611 - DNA, 428 bp, Glycine max
  unsure (1)..(428): unsure at all n locations
agctttttattatgaaactgccatgccattcgcattcccaaaactggacttgtttgcagcacaagctcaagtgcaacggcagattcctttgccttttctccaacaacagaaaggaggtatctactgtttggttttccttctccttgcatttgggaatgggctctatgctaaactttccacaacacttgctcttgctcaattctctttactgcactttttagcatttcgtggcactatttgtccaatcatggtttttacattccttctctaactttttttataatggcttatcaattggagaggaaagcaaacatggataaccatgcatttcctcttgtttggttgaagagaaattgaaagaaaagggagacaaaatttgtcttctagaaacaaatttattntttcctttcattctcttatcaattcaa

SEQ ID NO: 287612 - DNA, 449 bp, Glycine max
  unsure (1)..(449): unsure at all n locations
tatgaccaaaacaaaataaagaanaataaaatgctacaatgttttacagcacaaggatttgaaagggtaaccaccaagaatccccaatggactgtgatttcaatattattttttgagaaaaatatgtataattaatttttaaaatttaaatattataataagtttatatttaagcgaaagtaataagtataattataaaattaatttgaggaaattgagatttgaaaaaaaaaattaatttaaaaatctgatacaaaattataaatcattaattatttgatagttntaataaatatataattaataaacatttataaataattaatgattttgaaagtttaataaatatatataaacataagtgctaaacaatcataaagccatgtatcacaactcaaaaagaaaatgagtataataaaatatgtctttatattaaaaaacaaataata

SEQ ID NO: 287613 - DNA, 509 bp, Glycine max
  unsure (1)..(509): unsure at all n locations
acgcacccatatgatgaatctatcganagccacggcgaattcgagctcgnggccctgtgatactntagagccgacctcgaggcatcgcatttcnatatgtatatctatagaagcctgaggaactagcttcagtttctaccacacaattaatttaacaaccctatgggccaagggtttcacttttcaacctcataaagactcggtcttttatcttttctcccactagaaagaagtaaacctataaatggaaataagcgcttggtttctaatttcttccaaaacctttaaaattttggaatgatgtctgagacaaaaccatntcagtatttaaagggcagcgtaaattgtgcatgccaatatcagtctccttacatccaaggtcttacgaacaacatacatgctgtataaagctatgggcccctgctgctcacgggctgttgcatacataacagcgaggaagaggcccacaaacgatggacgccaatagcaccacaagatgtgaccgcgcn

SEQ ID NO: 287614 - DNA, 482 bp, Glycine max
  unsure (1)..(482): unsure at all n locations
cgcagctgcctttgatgcgttgattgccacnttgaaaaccggaccacagaatctcagctgaccagcttgatcggaaatcatttttggctagttttataagcntcggggatgttgcccgtaatggtattttccctggagccagcacttgccctatagcatggaatctcttccagaagccgcttggtgttcctaaaaaagcttcctatatcactctgtgagttaatttggtaccggccagacaaatattttcttcatataatgtgccattttaatagttctctacttagtttctgcaggtttacacgtgaacaaggtgatgacaactatagctgtggctttaccactccatatgaaccctgccttctggagagatgtgtacataaaatcaaccaccgccatgcctcctgtgcctacacaatggaaggattatgaagaattgtgcctcccattttgatggacactgtcatcattcacgatattcn

SEQ ID NO: 287615 - DNA, 410 bp, Glycine max
atcttgtggttgtatatgaaatcctttgcgtcgagatcgatggtatatagcacaggtattcagcttcttctcctacccagaaagggtaagttatattgtctactttcacaccctccctgctctaactctttgactccatctttgtctatatggatgttacttagagcagtatgttttcatttgcgtgtgtctatatatatgtgtaatgttcagtgctgagtatgatattgtagatgttactgtacctcaatgtgattcttagatatcatataatctttgtagtttgtagcatcttctgttaatattatctctgcatttcttacctatatttggattgtcttcttctttctaaacttacatctggtcttatgtgctaatcaggtgaagttacatgacacagacattaacac

SEQ ID NO: 287616 - DNA, 384 bp, Glycine max
  unsure (1)..(384): unsure at all n locations
ntaaacctctcacaaaagggaagacttttatagaagatgtatctccaatttcttagaggtgagttcaaatccttacatataaaagagtcagaatccattttccattattttttaagatttcttgttggttcacatcaaataaaaagaaatggtgagaagttagaagatgttagaattatggagaaagatactacgcccgttagatcccaaatttgagcatattattgtgacaatcaaggaaaccctagatttaaaaaccatgatgatagaacaacttcaaggatcattgcaagcttatgaagagaagcataagaagaagcaacagatcactaagccactcttcaagatgcaactgatggagaaggaagaaagtcaacgaaatga

SEQ ID NO: 287617 - DNA, 340 bp, Glycine max
  unsure (1)..(340): unsure at all n locations
ttcttttatgagtaagtngcgaacggtgaaacttcctgcttttattgttgaccacagagtggtacctgtagatatgtcgtgggggtcacgagaccttggggacgtcaggtggggtgctattgcccaaaaccaagcttgaccaatcccgacccaacccgggcatagtcggtcagtgagaacctgtgatgtacctaaacaggcgagctcctggcagtcaacagataataggaacaaagaccacaaagcaatgaggcttgtggtggctggccatctgtgaattttgtgtaatatgtggattatggcctctggtaatctgatacctagggtgggtaatcgatta

SEQ ID NO: 287618 - DNA, 389 bp, Glycine max
  unsure (1)..(389): unsure at all n locations
ggctctaaatttacattgatgcatttttttattggaagatgttgcacgccattggggcnttaagaatagcattccttggtaaaactaattctccaaatgtttgccttcgcaagaaatggccccgaggaagcctgcctcaaagatggccaggaaggacatagcggccgaaggaactagttccgctcctgagtattacagtcaccactttaggagcgctgtacaccaagagcgcttcgaggccatcaanggatggtcgtttcttcgggagcgacgcgttcaactcaaggacgacgagtatacttgatttccaagaggaaatatggccccggccgtggacatcactggttactcccattggccatttcgatccacaaattagccttgatttt

SEQ ID NO: 287619 - DNA, 404 bp, Glycine max
  unsure (1)..(404): unsure at all n locations
agctattgnntttaattnctagagncnnganatatnacgggacttattcgaacattcgagttaaaagttattggcgnctgcatttgctcagagctttcgttttcaatgacgagtgtctcgatatgttacgggagtgatccgagttaaaagttattgtcgtttgaattttctacgagcttttgttttcaattttaagtgtcttgatatattacgggactcaatcggacatccgagttaaaatttattgtcgtttgcatttgctcagagcttatatactcaatttcaagcgtctcgatatattaagggattcaatcgaaaatccaagttcatagttattgtcgtttgaatatgctacgagctttcgttttanattatgagcgtctcgatatattacgggactcaat

SEQ ID NO: 287620 - DNA, 311 bp, Glycine max
ctcagcttgagcaagcaacacatacttttactcgatgtctatcatccgtatattcagacactagaaatgaaacgaactcgtacaattcaaatgacatacttttaactcgagtggattgagtctcgaatatatcagacctcgtattgaaaatggagctcgtacaatgcaacgatataacttttactcgatgtacgattagtccgtatatattgagacctcaaattgatacaaagcttgagcaatgcaaccacatactttactcgatatcgatgatccgaataatcagagctcgaatgatacgaactttacaa

SEQ ID NO: 287621 - DNA, 398 bp, Glycine max
  unsure (1)..(398): unsure at all n locations
ttcttattactcttccaatggttttcttgaccagacatgaagagtctataaaagcaagaccttgacttgcattcaaagaacttcttgaacaactcttaagaaaccttgaaacctttacaacctttacaattctttaagaattcattcccaatcatctttcttcttcttcctttgccaaaaagctttctaagttttttgttttccaaaccttattcttctgcaagtgaaaattctgcagaaaacaaaagtgtgctatatcttttcattctcttcttcctttgccaaaaagaattcaacaaggactaatcgcctgaattctntntgtgtctctcttctccctttttccaaaagtatagagggaccaaccgcctgaattcttttgtgtctcctttctcccc

SEQ ID NO: 287622 - DNA, 420 bp, Glycine max
  unsure (1)..(420): unsure at all n locations
tcttatccaaggcacattnttggtggtgaagctccttctttcatggcttattccctagtggatggtgcctcccctctcctattctcctttgccgtctactgcatctccatggtggaaaatcaccattgaaggacctcattgatgctcaaagatccagcctccatagaagctccacaagaaagcttccatcatacagttttttttaataccatatatacagagacattatgtgtatgtactgaaatagtgtgtgtatggtgtttactttgaccacttccattcttacccagtgcctcccccaaatttgggacaaatntgctttgaaccacgcttcctgtggatgatgctctcttacaacctaagtcaaggtagcaggagataatatngtataggctcatggttcaatcaatctattcattc

SEQ ID NO: 287623 - DNA, 375 bp, Glycine max
tctatccttgcttcatcttcataactcattcttctcatttgatcaccaagtttaatcatctctaccatgagcctagcggtttttggagatggtggagtagcatctcaacttgcagaagccatacctgcaagtaaagctagcacacaagtaataaacaaaataggacctcaccactcaacttagtgattcactcaagttcactcgtgtatcactctttcaaggctttctattttataatatgcgctcttgcattgtaccactcttgctcttcttcagttcttaagcaaaaccttcaaactcagaataaagaagtattcaatgtgaaatatgtcacaaatcagaactcaactcaagaagccaagaatagaaatactc

SEQ ID NO: 287624 - DNA, 354 bp, Glycine max
tgaaatacaataaaattattaaaaaaaatcttttattagatccatctttaagagtattataatatgtaaaatatttaatgaattacgttaactttttttggataactttattatatagtataaaatatttaataaattacgttaacttctctttcacactgcaaaacttcggaaaaagtattccacgaacaaaaaaatattaactgacaagcgttggttgttcaacccaattcaagtgtatatttcacgtgaattgtcatgcaatggctcgttgagttgttatgaatagatcaaaacaattataattggaagttaaaatggtcaattccacatcttggtgatgtgatccttaat

SEQ ID NO: 287625 - DNA, 308 bp, Glycine max
  unsure (1)..(308): unsure at all n locations
agcttatacttctatttttagcgtctcgagcagttacgggactcaatcagacatccgagttaaaagctattgtcgtttgaatttgcacagaggttcaacattcaatgtcgagcgtctcgatatgttacggggctcactctgactttcaagtaaaaagctaatgtcgtttgaatgttctcagagattctacattcaattacgagcgtctcgatatgtgacgggactcaatcagacatccgagaaaaacgtcactgccgntcgaattagctcataagttcaacattcaatgtctagcgtctcgatatatt

SEQ ID NO: 287626 - DNA, 416 bp, Glycine max
ccccattgtgatctgactacagcaatcgaccgacccggatcttaagtcactgccgcagcttctttatacacctcgcagcactgagtgactatcacgtagccatgacctcatagggacataagagcacagacagctgtagcattcttctggacaagacctaaggatttctcctgatatcgccgacacgttcataactagcactaaaacctatgggggaaggaaaaatagatctaatcttgacacaattaacagacattaattgacccgtagattgcactatcatagcaaatatgcctactaccgagactggcttgtgaggacccccaatgcgatcatggctttcaattatacagtactgaaactggcccctgggggaaatgctgacatatactgataaccatttttcgaaagtcatc

SEQ ID NO: 287627 - DNA, 441 bp, Glycine max
  unsure (1)..(441): unsure at all n locations
agcnnttnttaagaagtaatcnnnnnnncatacatgtggnttagtgtatttaacatcttanaaatgctgcaaaaaagcatcttanaaatatgaaaattataaaatactttttaagaagaaaaaaaatctaaaatacattttaactctcactctcacaatactgttaatgtttatacaagctttattttttcatccaggcggttcagtgtatttaacatcttaaaaatattaaatattttcttcattttaaaggaaaaaaaatgttggaattgaatttaactctcaaaatgctactattttaacttanaggattaactagtgagataagattctgtttgcatttacatatatntagtaagagaatntgtgtttaattcttaccttgtgcanannatatttatgacagagacaactgagagntaaanataggtaagttgaact

SEQ ID NO: 287628 - DNA, 470 bp, Glycine max
  unsure (1)..(470): unsure at all n locations
ctattcggacctatgatactcagcttgtaggtagttctcttgattgacctatttgatatttcatttacttgntatttcacattttggtaggtttaaatattaataatgggacagtgtgtccgtcaaatttaagaatgaaattggttattcaatatagaaaaaaaaagcatgggataatgaaggtaatgggacatgaaatttttcataactcatttcattttatccattttcatacaagattaaatttgaactattaaattaagttagcaatataaacttatcttattaagtcataaaatatatatatcaaaataagaaaaaagataagactttacttacttttcagttaaattaaaatttgaattaataagaatttttttcttctaatgaattgaaggattaaaataaataaaaataataattatctatattggtatcttgaacacgcgtacccttatataatgtgtcta

SEQ ID NO: 287629 - DNA, 394 bp, Glycine max
  unsure (1)..(394): unsure at all n locations
agcttttgattattcattattgattcaaagaattttttatgataacaaaggtgatgacaaaaagctcaaaggtcaagaacacttcatgataacaaagatgatgctctcaagaatcaaagaatgagttcaagattgaatcaagaacacttcaaggttcaagaggaaatttgatttcaagaatcaagaatcaagtttcaagattcaagttccgagaatcaagatcaagattcaagactcaagattcaagaatcaagagaagacttaatcaagataagtatgaaaaagtgttttcaaaaactgagtagcacatggattgttctcanaacttgtttaccacagaagttntaatctctggtaatcgattaccagattgttgtagtcgattaccagtagc

SEQ ID NO: 287630 - DNA, 107 bp, Glycine max
gcttgctctaaattacattggtgttggatttatgggaggatttatatgccattttttctttaagaataatggcccactggtaaaactaactttccaaatgtttgcct

SEQ ID NO: 287631 - DNA, 427 bp, Glycine max
  unsure (1)..(427): unsure at all n locations
agcttgttcaatcaccatagccatgggtcaatgattgattggtaaaattctatttttcttttttccccagtttttcaaaaagcaaaaagagttgaacagaccaatgaataagaattcatatattcagaaaattccctctcctttaagataaaagacgaggatgcacttttggtttccgtttgggggcctcacttgttctttntctctacccttcacccaccattttctcttccatgcccaaaatgcatgtcctctttctttntttgttnttccattntcatttcgctgaaaccctttctaccctaatcttagagtacaatgccctgctctctccgttcagccattaccgactgctcaccacccattctttcttcgtggaacaccttcatcccttactactcctagctcggtgtcatctatgacaatc

SEQ ID NO: 287632 - DNA, 425 bp, Glycine max
  unsure (1)..(425): unsure at all n locations
ntggagtaaaaggcttactaaagaaggcaatagggtggcctttctgcgataagactgcacccatgtcgacaccaaacacgtttgtttccaaggaaaaagggataatgaagtccggcaagagtaaagtaggggctatagaaagcacatccttcaatccagtgaaaacttgttgcgccttagatgaccactcaaaggggtacttcataagtaacctggttaaataagctgcaatggaggcatagccacgaataaatcggtgatagaaacccgagaggcccaaaaaactgtgcaaggccttggaggaatgaggtgtgggtcactgctaaatggctnggaccttagccgacactggttcaactccttgtgcaaaaaccaggtgacccaagaactcaacttgttgctgggcaaaggtgcacttggatagt

SEQ ID NO: 287633 - DNA, 275 bp, Glycine max
atctttttattggcatttggaatgcttttctatcacttcatgccacatcaaccatttaacacaattggccacataaattggattccaaaggtttttgctgtgtgaatagtacctagacgcttaaacacaaaccttcttttattcaagaaaacataaaccgtttcatgactcatttcaaccattaatgggttaaatgaataattaatttctagcaacaatcaacagttttcagagatgaatagctgacaacccgtactcttcaactattagtatgc

SEQ ID NO: 287634 - DNA, 276 bp, Glycine max
aatttgatcatcctgctttgatgaataaaaagcttggggaaaatggagagaattagaaggagggaggaacccatgttgtgattgccattcctacatggccaaatttctcaacagctcaacaatgtcaatacttaaccaatatcaacccttcttattacccaccaccctatcagccaaaaacacctaatcatccacaaaggccacccctaaatcagccacaaagcccggctaccacacatctgatagtagacaccacccttaacatgaaccaaaaca

SEQ ID NO: 287635 - DNA, 432 bp, Glycine max
  unsure (1)..(432): unsure at all n locations
agcttgtttcaagatctacaacaggaacttgaaatgaaagattcaatgagagtgaaggagttacataatgaaaattatgattcacagggtacttgtgatcattccttctgtgataaggagctaaatggattntcacctgaaaagcacacagataactctccaataactgactacaaaaaatcatatgatcaaaaggaagaagaaagatcagaatctatgagcaaaattgaagctgagcttgaagctgaacttgagagattgggattaaacatgaacgaatctagcccagaaagaccgctgtctgagcttgttgaggtaagcataaaatgtntatcttttgcatttcctagtaatgacatgatcctgtaagcanatttcattgtcttggaatatggctgctgaaatatactntctttanataatntcttatat

SEQ ID NO: 287636 - DNA, 435 bp, Glycine max
  unsure (1)..(435): unsure at all n locations
ctggactctagctagagaagctntaanaacctttattttcatagttatatatatatatatatatatatatatatatatatatatatatatatatatatatatatatatatatattttatatgagaggggggaaaatatattatattaaatcctaattctttatatatgaatctatgggctagatataattttctcatcttatataagatattttctcgtataagatatgtacttatatatgcacatattctttattttattgagaggttatttttaaattaatgagtttttttttttaaaaaaaatctctataaaaactattgggaaacaaattaacataatttcgtttgcttttgtgtcgcgttgatgtcaattctccttttataattatctattctactatgacggttcgcacgacataatttcaatcttaag

SEQ ID NO: 287637 - DNA, 437 bp, Glycine max
  unsure (1)..(437): unsure at all n locations
ttctttgcgcgtttttggaggctcagcgcggatctggagcttaacgcacatttggcggcttagcacacgatcacttatggcagcaaaactttgcatgtcgcttagcgcgcagtgtaagcttagcgtacaatcaatatcgaaaaacataactgtgctgtggagaaaaaagggagaaaccaaaagaaagcttttttggaaccaaataaggagatagggcacgagagaagatggagaacccactcaattggggaccatttcctccattttcttccacacctcttgtttcctttttgtattattaattntctcatgacaatgagaggttaaaccattcactgttggaagctcaacaaccaaacactctngatataatgatnctaactatctatntaatgatattttgatattatggggtctnttctatgctaaatatcatg

SEQ ID NO: 287638 - DNA, 398 bp, Glycine max
  unsure (1)..(398): unsure at all n locations
aaaacacaattttgcgagatgtgttacaattnttagtggtcttgatttcgagattaagtatatcaaggacacttcaaactctctacttgactatcttacccgtgaattcttacagaaaaattgccatgccacctaaggcatctagcacctctttatgaggaggaagaagttcaagtaaagatttcaaattgactctaccagagccattctccaaaaagaattcaccctcaaaatctgggtcaccaacccaagttgggttattaactcagaaaccaaaacaagaagggtcatctatccaactagtttcaattaaacctaagtcatccacttaggaatttcctaaaaatcaaacattaaaacataccaaggtcgactatgcctttctaatagaaacacta

SEQ ID NO: 287639 - DNA, 372 bp, Glycine max
  unsure (1)..(372): unsure at all n locations
tgcttttctcttagagatccaggaaggataaagcggctgaaggaaccagttccgctctcgaatatgacagccaccgttttaggagcgctgagcaccaacagtgcttcgaggccatcaagggatggttatttctccgggagcaacgcgtccagctcaaggacgacgagtgtatcgacttccaggaggagatagttcgccgatagtgggcatcactagttacccccatggccaagtntgacccagacatagtcctcgaattttatgccaatgcttggcctactaaggagggcgtgcgagatatgcgatcctgngtgangagtcagtggatcccgtttgtgcagatgctctcagtcagctcctgggatatcctct

SEQ ID NO: 287640 - DNA, 382 bp, Glycine max
  unsure (1)..(382): unsure at all n locations
tgctgcctcatgaagaatgccttgctcttagatagcatgattttagcccttttataatatggatgtatggaaatatgtagcatgaaatgccttgcaaaatgttgaatgaaatgccttgccaaatgttgaataaaatgccttgcaaaatggtgaataaaatgccttgccaaatatgaatatatatagcatgaaaatgccttgcataatatgaatatatatagcatgaagtgccttacaaagtggttgaatgggtagcgtanaagtgtttttaaaatatgtcatttatgataggtggaaaagaaccttccaaaaaatgtgtgtatatatataggatgtagcatgaaaaggtttgtcaacaaaatatatgtgtacatggatgtct

SEQ ID NO: 287641 - DNA, 381 bp, Glycine max
  unsure (1)..(381): unsure at all n locations
agctttgattnttatgtcaacaaaaatagcgattnttatcacaataggtgtgttttgtttgtagttctttcaaagcttaatttttttggttaattgtttgggtgttcttgatccttctcctactttgtttcgcatagaagcccgaagaacacactaaagctttgatttttatctcaagaaaagcagcgatttttatcacaacaagtgcgttttctttgtagttctttcaaagcttaattnttttggttaattgtttgggtgttcctgatccttctcctacattgtttcgcatagaagcccanagaacactanagctttgattnttatctcaagaaaaagcagcgattttatcacaacaggtgcgttntcttttgagttctt

SEQ ID NO: 287642 - DNA, 368 bp, Glycine max
tgtaatcgattacacacatactgtaatcgattaccagatgtatttttcagaaaacattctcaacagtcacatctttttatctgattcttaagtggccatcaaaggcttatatatatgtgactagagacacgaattgaacaagagttttgaagaacaaaaaggtcttatcctcttaacaagcaaaattggtttatcctcttacaaattccttggccaaaacactcgtgattcaataaggaattatttgagtgctcaaattgttcaatctatctctttctagagagatttcttcttctcttcttctttattctgaaaagggattaagagaccgagggtctcttgttgtgaaaggattctaaacacaaatg

SEQ ID NO: 287643 - DNA, 306 bp, Glycine max
tttttgtaaaactttttgaataaaatgtagcagaagttaacaataattcttaaaaaaaatgtgtggctagcacttgttattttagtatccaagctaaccttcatatcgtacttaaatccattaacggcgttattgtcttacatgcctttattgtgacaaactattagactaataataatattttaaaacatacttaaatgaattaataatataaaaatattctaatatttgtgacaaaataaatagattgagagaattagagatactatggaaatattttacattgctaccactattttacatata

SEQ ID NO: 287644 - DNA, 299 bp, Glycine max
gcacgagaaaacttcaatccacccaagaaggtgttaaaaaaccagagttcattccattatcctagtttaagagaatcttaccatgagaaccaaatctaaactctgaagaagccaaacaagataaaatctatgtctacatacactgatggctaaaccattccaaactaaatggcaactttagcttaagatggctcataatagttaaagcttggagaaaaagataacaatgatgggagggacagtatggtgcttatgattttacttttcactgctctatgatacataacccactgttgagc

SEQ ID NO: 287645 - DNA, 377 bp, Glycine max
  unsure (1)..(377): unsure at all n locations
tagcttcttcaaagacttgnggtccaacataggcatcatttcaagcctaatcaacgaggtaacacccccttgggtggtcctaacaattggtggggttctcaatttttttgggtatttcataatttggcttgcagtggccagaaaaattgctaagccccaagtttggaacatgtgcttgtacatcttcattggagccaattctcactgttccaccaacactggagtcattgtcaccagtgtaaagaacttccctggcacaaggagcattgtaattggcctcttgagtgggtatcttggcttgagtgcagctatcatcactcagatatactatgccttctatggaaatgattccaagnttctaattntgctcatggcat

SEQ ID NO: 287646 - DNA, 375 bp, Glycine max
tctcgaggaagcctcttaatgaagcttctctatgaagaattatgaagctgccttggtaaaaatgcttccccacctttggtaaccggtggctcttctcaaaatttggtctggcgcttcacagaacacttggccatgatctgaccggtgggatctttaagaaaatgtctggaatgtgtgccatgttttcgcttccgaaagcattgctcacttgtgcggtttgagccttgtagtctaagtacctttggaaaaatgccatttctttccctttctttcttccaaaaccattttcaacattccaagatctttctccatcacccacagccaccattagccaccacaaactgtccgtgttcttcattgaaaccccacaccgag

SEQ ID NO: 287647 - DNA, 383 bp, Glycine max
  unsure (1)..(383): unsure at all n locations
agcttgtacgctcatcgttcgcgtgtatgatatccactccacacgatntgaagtagaggagagcttcaaccctataacgcaacgtggcggacaaaagtgggcagtaaacttgaatggccgtcattgtcaatgcggaaagtattctgcgcttcactatccatgttcacacattattgcagcttgtggttacgtgagcatgaaccaatatatagatgttgtttatacaaacgagcacatcttaaaagcttactccgcacaatggtggcctcttgggaatgaagcggctattcctccttctgatgacgcatggacacttatccctgacccaactacagttcgtgcgaaaggtcggccaaaatcaacaaggataagaaatgagatgg

SEQ ID NO: 287648 - DNA, 380 bp, Glycine max
  unsure (1)..(380): unsure at all n locations
gagcgttagatgatattgtcttcaccgacgaaaggatcaaagtgagtctaaaaagagacaaatctgagcatcatactttgataaatgccaaagaaactatggcaagtgaagaggatgagaaggagggagaaacctatgttgtgactgccattcttatacgaccaagtttcccaccaacccaacaatgtcattactcaaccaataacaacccttctcattacccaccacccactcatccacaaaggccatccctaaaatcaaccacaaagcctacctaccgcacttccaatgacgaacaccacctttagcataaaccaaaacacccaccaagacatgaatnttgcagtgaaaaagcctggagaattcacccccaaatccag

SEQ ID NO: 287649 - DNA, 349 bp, Glycine max
acctacgatctttaatggagagggttaccactactggaatacccgaatgcaaatctttatcgaggcaatagatctaaatatctgggaagccattgaaatacggccttatatacccaccacagtataaagagtttcaatagatggtagttcatcaagtgaaagcataaccatagataaacctagagatagatggtctgaacaggatagaatacgagtacaatacaacctaaaagcctaaaacataataacatctgccctaagaatggatgaatatttcagagtttcagattgtaagagtgctaaagaaatgtgggacactcttcgattaacacatcataggaactacaga

SEQ ID NO: 287650 - DNA, 403 bp, Glycine max
  unsure (1)..(403): unsure at all n locations
agcttgtctctgtggaagaactatggtgatggtgttcaaaggcaaggtaggacaggacgcaattttcctgctgcaaggtcaccaacgccagtgacatctgagaagcttggaaatatagggactgtaaagcagcttaaaagttcaagactgggacttgagaagagtgaaaggttaaaatacttgtattgcttaagtttgacnatttgtttaggctcacatatgnnagctaatgttggtgattccatgtagcagggcaggtcgtccaccaaccaggaaactttctgatcgtaaagcatatgcacgccagaaacattcagcaattagtgcatcagcagattttcttggtactaatttctgcttctagaaaagagtaatgatctcaagttctcatgtgtataataca

SEQ ID NO: 287651 - DNA, 479 bp, Glycine max
  unsure (1)..(479): unsure at all n locations
tanagataaattaagaataataatagaatattccatcttatattctgattatatattctatcaaatacaaattgattagttagactaagaataccgatagactatcttatcattgataatatattctatcaaatacaaactgattagttaggctaacaacactgatagaatatcttatcatatattctatcagttattacttattagattgtacatattaattcttttatttaaaaatatcattgtcaaagtaggataaatatttaattatatacaattngttttattaattattaataaccttctactttatcctaataatttatacttaacagatgagtatttntctcattataactatgtactatccaatgtcttattagatttttaataacatattatccatttaatttacagatgactgtaatttgatcaatcattagtatatatatttatactatcgaccgattaagttaaag

SEQ ID NO: 287652 - DNA, 399 bp, Glycine max
agcttctcttgtaccttatgcaaatcctcaactcatccttcaagatcaaactgtctactagtgattggtccctttcctctctccggagcttaagctcgctgttactgctccacagagcccctcggaatttgttccggccatgtttttccctacgggcccttttggtctcttgttacaaagccttggtggtggcaatatttacgtctcagagttcggcattctcctttcggatcttaagagctgctgatttgaacttgtttttgactgtttggactttctcgagttctgccttgagggcttgcacctcttcgtcctcgtccggagcttcaacttccacccccttagtggttctcaaactcgggagccaatccagaccttgcatgtgggctttcaaccatc

SEQ ID NO: 287653 - DNA, 443 bp, Glycine max
  unsure (1)..(443): unsure at all n locations
ntaaggaagcaatgcattaccccacatggatcaatgcaatgcgattatctgctgaattctattgagaagaattcaacatgggaacttgttaatctgcctcttgacaagaaacccatagcactgaagtgggtttataaagtgaaggtgaaatccaaatgaggccagacttgtggcaaaagggttcttatgaaaacctggagttgactatggtgaggtctatgcacctgtggcaagaatagaaacagtgagattggtggtagcaattgcaaatatataaggttggtctatgcataaactacatgtgaagtctgctttcttaaatggacagctagatgaggaagtttatgtggaccagccacttcttgagacattgggacaagatgaaaaggtatacagattgaaaaaggaatatatggtcttaataagctccatggcttggaaca

SEQ ID NO: 287654 - DNA, 383 bp, Glycine max
agcttgtagggttcattccatattccgttgtcatatgctaaacttgatcccatatccactcaataattcaatggtagccataaccccaaccaaggttcctcaacctccatttttctgaggatacgactcgagcgcaacgtgtgcttatcatggaggagccccggggcattccattgagcattgtatgaccccgaagcataaagtgtgatgtctaattgatacgggctcgctgaaattcgaggagaatcgcttgttgaatcctaacattgacaagcaacaccatacatggggcaattctggaagctggtgttatgactcatcatgattatcaagtttatgccataaaccacagttactatgctaaatgatatggataagatgga

SEQ ID NO: 287655 - DNA, 465 bp, Glycine max
  unsure (1)..(465): unsure at all n locations
tctgtgagagcacttccttgagaagctagagcttagctacacacacccttttcatatctaagctcacctccttgagaagcttccttaagaagattcctaaagaagctagagcttagttacacaaacctctctaatagctaagctcacctccttgagatgagaagctagagcttagctacacacccgctataatagctaagctcacccccatgacaaaatacatgaaaatacaaaaaatatccctactacaatgctactcataatgcctcgaaatacaaggctaaaaccctatactactagaatggcctaaatacaaggccccaatgaagganaaacctattctaatatttacaaagataagcaggctcatacttagcccatgggctcgaaatctaccctaaggctcatgagaaccctacgggccttccttggatctctggcccaatctacttggactcttctatc

SEQ ID NO: 287656 - DNA, 377 bp, Glycine max
  unsure (1)..(377): unsure at all n locations
agcttttcatgtctatggtttctagagagagaaaggtccaagttctagagagagagaaaggtccaagttctagagagagagaaaggtccaagttctagagagagaaaggtccaagttctagagagttttgaaagattttgttgtgtgaagatcagaagagaccaaagcttgaaacaagagccggtttaagagcttgagataagtttgtgagtgattgtgagatcctagaggtgaaggagacatcctcaccacttgtatatttgcaatctttcatcttgttcttctctttgttcttaagaaggcttcctggtatggaactgtggctcttccctataggtacttgatgtaaatatatntctatctatntaatgatgttt

SEQ ID NO: 287657 - DNA, 368 bp, Glycine max
  unsure (1)..(368): unsure at all n locations
atgtactgccttangcgatgggatgcccatactaaagcacaacacgttctttcgagcaaggagtaattcatctcacaggtcgtgaacttcttacttaggtagtaaacagcgcgctctttcttcccggattcgtcatgttgccccagcatacaccccattgactcgtccaagattgtcatgtacaaaatgagaggccttccaggtactgggggcataagcacgggaggattcattangcactctttgatccttccaaaaagcctcttgcaatcctcattccaccagtcagtttggtttttacgcaagaagttatacaacggctcacaaatggcggtgagctgcgatatgaatctggccatataattcaa

SEQ ID NO: 287658 - DNA, 423 bp, Glycine max
  unsure (1)..(423): unsure at all n locations
agatactcagctctaaattgaattaaacattcagaaactgctggtaatcganatcatatatgtgtaatcgattacacaaggcagattntgaattcaaattataatagttgttgtaaatcagttttggccactggtaatcgattaccagagagtaaatttcttgtaaaagactttctaacttaattttcttggccaaaccttttgctacttcaattggaattcccttcctatttaatataccctttctaagactctatagactgtcttgatcatccatcttgaatatctttaattgctttgtcttgaataaagctgtgagacgcatgtgatctttnggcatcatcanaacatcggcttgatcctttgtctacaatctccccctttttgatgatgacaatccctgaaatcaagacaaactatata

SEQ ID NO: 287659 - DNA, 373 bp, Glycine max
agcttttgcctcttcatgtctggaatatgaatgttgcatatagatccaaagaaccttaggtgctttgctgatggcttattcccgttccaagcttcaataggtgtcttgtcttttacagacttagttggacatctgttgagtatgtaaacagcacagtagactgcttcagcccacaatgtgttatgtactctcttctccttgagcatcgatctaaccatatccataattgcgcaattctttctctctgacacttcattctcgtgaagagaatatttgactataaggttggcgctcaatgccttcatcctcacaaaatctttcatactcgcgagaggtgtactctttgccgggatcacttcattaaacttttatc

SEQ ID NO: 287660 - DNA, 477 bp, Glycine max
  unsure (1)..(477): unsure at all n locations
tcaagaaaaagatggcctcagcaaattccttatttccagatagtttctctatcaatagacctccaatctttaatggagagggttaccactactggaaaacccgaatgcaaatttttatcgaggcaatagatctaaatatctgggaagccatagaaatagggccttatatacccaccacagtagaaagagtttcaatagatggtagttcatcaagtgaaagcataaccatagaaaaacctatagatagatggtctgaagaggatagaaaacgagtacaatacaacctaaaagccaaaaacataataacatctgccctaggaatggatgaatatttcagggtttcaaattgtaagagtgctaaggaaatgtgggacactcttcgattaacacatgaaggaactacagatgttaaaagatctangataaatgcactaactcatgagtatgatatatntagaatgaatgcaaatgaaaata

SEQ ID NO: 287661 - DNA, 108 bp, Glycine max
  unsure (1)..(108): unsure at all n locations
cgcgcgcttgtatgttgagctttgtggncacgcaccctgcctggtacaacacttgtatatgttatggtatagttccgctcgcttgagaataatgccaccattactatt

SEQ ID NO: 287662 - DNA, 414 bp, Glycine max
cggtgcctatagtagatgacgaagcatatcttaagacagtactttatgtattaacggtggtaaatgaagtgaatgttatcataccaagtgacaaaattgtattcgttaccattggattcaatgttcaaaagtgtcattcaaataaaccaaagcaaaactgccaattcatgaacaatgggatgatggcagccgaaatgaagaacgtatgctctgaatggtactagaacacatgtccttaagtatggcagtatggtgcacgtctttctgcaagacatttatttgagagatgcttttgggtaatagggaaatgatggcagctgcacggaaatataaaatatgtcaacatcattctcattcattgtattgagtttaggtggtccctaatataatagggtgcacgacatttgctatcac

SEQ ID NO: 287663 - DNA, 331 bp, Glycine max
agcttttgattattatatcgacttacatgtaattcatgagtcataatttagtatgttacagtacattttaggcaatactaactactataaaataacattaatgtgtgccaccaagcacttatagtgaacttcaatgaaaacttttcatttattaacttgaaaccggcattgttaaaacatttattgacaagagtgctggtaaattttctatatgatacagaatcgagaggattaaactcaagttgcactttttctttcttacttatactattagcatcaattctgttgatgcaactggctttgatgttttgatgatgaacaagatgatgtg

SEQ ID NO: 287664 - DNA, 485 bp, Glycine max
  unsure (1)..(485): unsure at all n locations
tgatattntattgtttcaatcaaagtcataaagttcatgatgaattgtatcaaatagagaaagaagtaaaagctggcaaagaaagcaacaattgatcaaatggattgaatgaatctcattgaaagaaatgaatgatgaatacatgtgtttcatattatatacaatcaactttgggcaccaatctaactactagaaaatacaactaactataactgcttctaactgtcaaaacagaaaacagttagtgcataactaattctatatgttgagagccctcccaatatgaggaatgtatgttagacatttccaacttgagctgcaaaagacaaaaagcaataggagagaaagctttggtgaatatgtcggcaagttgataggctaaagatatagatagaagattgatcaagcctgaaagcaatctcttgcacacaatgttggaagttaattttgatgtgctttgtgcgctcatgaaacacagggttgac

SEQ ID NO: 287665 - DNA, 108 bp, Glycine max
gcaggtaagaactcgcgctacccggcttgcaaccaacacactggagcaaaggcgatagcgccaccgacaatgcatgacccacggcgtcacgcacacggttaaagagcg

SEQ ID NO: 287666 - DNA, 213 bp, Glycine max
  unsure (1)..(213): unsure at all n locations
ttttctatagaattattaaacaagcacttacaagtacaacacagaggtttacctgtgatcgaagaacttccttgtatgtaccaatttctcgtaaggctatggtgaatctggtcataacaggacctaggctataaacgtccgtcntanatcatttcatcaccattagacttttagagtcaaaggcaacatacagactctaaatcaaattatgaa

SEQ ID NO: 287667 - DNA, 220 bp, Glycine max
tatgcccatggacatgttgatatgaccaacaagtatgattatgtcctaaacctagcgcctatgcgtgcgaaagggcatccaatgtcaatgacaagatatccaaacaaaaatgtggaagctactacagtgtcctttccatgtactaaaaatatcaagaatccagcgcttaacatagcaagcgaaaaactcatttgcgacagctagccaccttgtcatatga

SEQ ID NO: 287668 - DNA, 376 bp, Glycine max
agcttgagcttattgttgctgttccacaaagctccacggaatttggctcggccatgctcttccttgcgagccctcttggtttctttttcaagggctcttgcggtagcttcattttcttctcgtaactcgacacactctttccagacgtctatagcgactaacttgaatttttctttggcaagtcttgcctttcctagatctgtttttagagcttggacttcttcatcctcttccggagcttcgaagttctcctcgttgataattttcaacttggagagccaatctaaccctcgtgtacgaactttcagtcattcatgataaccaccaatgatgccataacggatgcccctaaattctttatcttttcttaacaggc

SEQ ID NO: 287669 - DNA, 484 bp, Glycine max
  unsure (1)..(484): unsure at all n locations
cgtagaatggctagacatgatacatgtcagggtttggtttggttctatgttaatattgatgccccacattatttccatgacacaaatgcaaaaatgatgatttggaaattntatgcaaaactggtcatgcatgcacctatgtggacgctcaagtgtcaatttttatggtcatgtgatgctagggctcangattcatttcctctattntaaatcaacccaatgtttccaaaatatgttcttttatcaacttgtgcattcatccaagtccatttcgggcgtccggagaaattatcacagcattcaccctttaggtgtagacacgtttctttctttttcataaatcggttatgatcaatgaattcttttttcaaagaacagttggaaatcatctcttttcataagcatgtcggtatctagctagacaacttattttctctttgtcaccttgttcttacttgcttctttttacttattgctctctttt

SEQ ID NO: 287670 - DNA, 380 bp, Glycine max
agctagagtttttctttatatatgacatgcatgatgccctttcccactgtatccacttaaatttccatatgctagaaaatcattaatagtacaaaacaccattgtgcgtaacctgaatgtctactgcacatttgcatcccacacatctaccccttcttcccacaattgtttcaagtcttcgattaatggcgtaagatacacatcaatatcattccctggctgccttggacccgcgatcatcatacacaggataatgtatttacgcaaaatgcacaaccatgggggaaggttgtaaatcatcagtaaaacaggccaggaactgtggttgctgcttaagctaccataaggattcattccatcagaagcaagagcaagcctta

SEQ ID NO: 287671 - DNA, 225 bp, Glycine max
  unsure (1)..(225): unsure at all n locations
tgtgactcttggcaatntctttaaaactagtcacttacaaagttgtgatttttgtattaatcttcagaaacaagtcacttgaagaattgtgacttttggaaatttatttttcaaaatcagtcactggtaatcgattaccattaaggtgtaattgattacacatgaacagatgtgactcttcattttaaatgttgaaaattaaaacgttaatatgctctggtaatc

SEQ ID NO: 287672 - DNA, 400 bp, Glycine max
  unsure (1)..(400): unsure at all n locations
agcnagnnatttatcttatgattaatcaagaacaagcttgagcgcacatcgttcgcgtgtactatatccactcgacaaggtttgaagtacaggagaccttcaatcctataacgcaattctagtagatataaatgggcagnnaacttgaatggccattattgtcaatgctgaaggtattctgcgcttcactatccatgtccacacattattgcaacttgaggttatgtgagcctgaactactaccaatatatagatggtgtttacaccaatgaacacatcttaaaagcatacttcacaaagtggtgacctcttgggaatgaagcggcaattcctccttctgatgaggcatggacacttatccctgatcctctacaattcgagcgaaaggtcggccaaaatc

SEQ ID NO: 287673 - DNA, 398 bp, Glycine max
  unsure (1)..(398): unsure at all n locations
agcttaggttttatgatagcattcatccatagaataaccttcatnngnnnattcattcctaacccatactcaccctttagnnnggcacttagcttaattcattgaattacagcatacaaacttattaactttatttgtacttacagttttttttaacacaacatatacagagatattatgggtatgtacagacatagngtgtatggctgttactttgaccatttccatccttacctaaggcctcccccaaatttgggacaaatttaccttgataataactcccccaaaattggtacaaaatttctttgaacccagcttctgtggatgatgctcttctacaacctaagtcaaggtagtagaagatacaattgaataggctcaaggttcaatcaatcaat

SEQ ID NO: 287674 - DNA, 463 bp, Glycine max
  unsure (1)..(463): unsure at all n locations
tgtccttggtttagacatgattggtacatgatttgngacttgtttgattcattttgggcaaaattggatgagggaaagagtggttttcgaaatctgcactttatgcagaatttcgctgttgaaatgtgcagcagaattntgcataagtgcagacaaatgctatgtatctgctggttgtggaaagggtagtacatatggggttctggacatttgctagcagatcccaacggtcaaaatgtagacttatgtactagagacttctagtaaaattttcgagtcgatccaacggttaacgaattggaacgaagaaaatgttattggggtatttgtatgtgaaaagctgtgattttgagttgtgttttgggcagagtatctgactttgccctgtttcgcttggttctgtagtccatgatgattggatgtggaattacctggatgttgtggatagcttgggaggattgat

SEQ ID NO: 287675 - DNA, 381 bp, Glycine max
  unsure (1)..(381): unsure at all n locations
agctngccgttatggtgtgtttcgactatgctctcgggtggcggaacaagctacaaaaggagagagcaagaaatgaatagccaatggttgatacatgggcggagatgaaaaggatcatgaggaagcggcatgtgccggctagctactcaagggatttgaaattcaagctctaataactaacccaaggcaacatgggggttgaggagtatttcaaggaaatggatgtgctcatgattcaagcgaagattgaagaagatgaggaggtaactatggctcgatttcttaatgggtcgactaatgatattcgtgatatcgttgagctgcatgagtgcgttgagatggatgatctgcttcacaaaccactccatgtagagcaacaat

SEQ ID NO: 287676 - DNA, 393 bp, Glycine max
  unsure (1)..(393): unsure at all n locations
ggtgcatccaataccctgatgaggatgtcccatatgttcttaaatctgtactgattcatttgcttccaaagtttcatggccttgcaggtgaagacccgcacaaacatttgaaagaatttcacattgtctgctccaccatgaaacccccagatgtccaagaggatcacatatttttgaaggcttttcctcattcattatagggagtggcaaaggactggctgtattaccttgctccaaggtccatcacgagctgngatgaccttaagatagtattcttagaaaaaaatttccctgcttccaggaccacaaccatcaagaaggatatctcatgtattagacaactcagtggagagagcctgtatgagtactgggagagatataagaaactatgtg

SEQ ID NO: 287677 - DNA, 365 bp, Glycine max
agctttatctttcaatttcgagcgtctcgttatattacgggactcaatcagacatccaagtaaaaagttatcatcgtttgaattggctcagagcttcaacattcaatttcgaacgactcgatatatgatgggactcaatcagacatccgagtaaaaagttattgtcctttgaaatggctcagagattccacattcaatttcgagcgtctcaatatattaccggactcaatcagacatccgaaaaaaaaattattttcgtttgcatttgctcaaaggttcaacattcaatttcgagcgtcttgatatattacgggactctatcagacttccgagtcaaaagttattgtcgtttggatatgcttcaa

SEQ ID NO: 287678 - DNA, 454 bp, Glycine max
  unsure (1)..(454): unsure at all n locations
ctgagacaattcatacgacaataactgtntactcggatctctaatttagttccgtaacatatcgagatgctcgaaattgaatgtggaatctctgagccaattcaaacgacaataagttnttactcggatgtctgattgagtcccgtaacatatcgagacgctcgaaagtgaatgttgaagctctcagccaattcaaacgacaataactttttactcggatatctgattgattaccgttatataacgagacgctcgaaattgaatgttcaacctctgagcaaattcaaacgacaataacttctttctcggatgtttgattgagtcctgtaatatatcgagacgctcgaaattaatgtttaagctctatccaattcaacgacataacttttactctatgtctgttgagtccataatatacgagacctcgacatgaatctgaactctattcattcaa

SEQ ID NO: 287679 - DNA, 373 bp, Glycine max
agcttgtattttcttttattatggaattgatccttcctaagatggagccaaacccactcaccctcattaagaactagctcttttcttcctctatcgcccttaggtgaatacacctttgtttggttctctatttggctcttaaccctttcatgctacttttatacaaactctgacataaattccccttctttatggataaaagaagtgtccactgggaggggaatgaggtcaaactgtgttaggggattgaacccatagacaacctccaaaggggactggttgggggttctttgaacccccctgctgtatgcaaattctacatgaggaatatactcatcccaagacttatggtttcctttcacaaaaaccctta

SEQ ID NO: 287680 - DNA, 486 bp, Glycine max
  unsure (1)..(486): unsure at all n locations
tacggatatntgttagaaatggaactcattgtgcaattcatcgcataatgtagtcgtgtggttttcactagttttcattatatttcatctacgttggatcaattcacaccatggaatgtaatagcattatattccatttccctccattcgatccttctccaccaatcgaaacattagtgtgtcaagattgtatgcaataaagtggcttaagtttgagtccataaattgctttattcagattatatacaagggatttatcagaggactccacacaaacatggggcagccaataacctccttattccagacctctgaaaactacagcctctgacagttaggatgggaagtccatatctttagaaacttataaagagaaccaaaaaccttctcagtgttatgaaactggcacatgtgacatcctgagaattctactcggaatttctgtaagtattacatttaaataattatatagatatatattattcc

SEQ ID NO: 287681 - DNA, 363 bp, Glycine max
tgcgtcgtctgataacactgtctgtggcattagctggcattatatttcttgcatgtaggtcttgaaccactacccatgtagttcgaatgacatcaacggaatactgggagagtctgaaagcacaccgcatcattgtgttatagacgaataggcactccgtattattctatctaaacgcggatactaacgtttgacagaagtaaggtcagatgtgctacaatgtcatgagaacatttctgacggatgatttctcatatgatccatctaactatatgcttagcactaccttatctaagtaagtaaaatcaccacttaagatctatgatgcagtgctcccaccaacggccttggacatatgactcc

SEQ ID NO: 287682 - DNA, 358 bp, Glycine max
  unsure (1)..(358): unsure at all n locations
agcttattattattnnnnaaancnatatgaagcaaacaaataaatatttcactgtaatataaactttgcttccaattatatatactcgctgaacttcttacattataaattagaatagattcacagtgtttaacaacaacaatatgttgttattgtcgttgaccaccataataagatgatttaccttatactctgatctggaatgaaattaaacatttcatactaaacttgctcaaccttatgncgaagaatgagataatcataatcatactggacttggtagacactttatcatcattagtgccgatgatggaattgatttcaaagctgtaataagtggagatcttttaccaccata

SEQ ID NO: 287683 - DNA, 95 bp, Glycine max
tactaagctcttgcgtaccgtgctgggctcacagaatgccaagtcatttcttttttactagctatgtgaactgaatgatcctgacgtacgacctt

SEQ ID NO: 287684 - DNA, 297 bp, Glycine max
  unsure (1)..(297): unsure at all n locations
agcttttgcttatggatcattcattggngcacgtgacagttatatcatacagctatactcatatattgtgtgatcatgtacttgtttacatcagctgaattcttgtgattctattgatatctacttgatcatttgccagcattgtaggggctctatttctaaggcctatgcaactggtgaagaaacatgacgagtatgagaacatgatataactctggtccaccaaattcaacttcttgcagcttcaagcatatgcatgaaatatatatatatatatatatatataatctagaactc

SEQ ID NO: 287685 - DNA, 467 bp, Glycine max
  unsure (1)..(467): unsure at all n locations
cgtatttctatcgggtgcagcataatgaaccaccaggcctttatgattacccaacactcttctgaagtccttcaatccatccgctaaatagaatttgctaccgtctcttctaacctttataaaatgtttttcttcattgtaatcaaacgttacatacagtgggtaagtaagaccccagtgtctgtgatatgctaatggtatttgaatgaagttttggaattatacatcaattacatggttaaccccacaatagtagatataattcttgtgttcatttcatacaataaaatgaataagatagtcaatatgaaaacacatattctatcaacgtggaaaacacatngaaatttgtatataactgggttgccgaagaaactgtgtgttgcctaaatgacgaaatgtgtcatagtaaaactttttgcagacatgaagcanataagttgtctgatatatatggagataacaat

SEQ ID NO: 287686 - DNA, 376 bp, Glycine max
tatgctttggttatatgctaaccgtcaatcaccgaaaaatgagcagaataacaaaaaaaagatgaagagagaaaaaaaagggctatggtaaattaaaatgggttaagcccaataagctaagatgctccagccaaacaaataacataggtctcttctccatgacccgtcgtgtagaatttttgtgtgagagaagaatttagatataacgtaacaaatagagaaaaaattattatccaccgtaaaaaaaaattacattgtcataaaactattttatactgtaaggacatgactattaaactaacatatatttagtagtattgtttttaattaaaattaatcaagtgttgtattttaaaattgaaatctcactaaatag

SEQ ID NO: 287687 - DNA, 469 bp, Glycine max
  unsure (1)..(469): unsure at all n locations
cgaaggaggggagccaatgcctctacttgctcctagttgagaattgtntattttgtatagattgctagttagcatgcaattaatctcagttgtgttttcacaggataaaattcaaagacattgggagcatcttgagcttttgttttcaatagtcatgtcaataatatttgaaagggggtctttggaaaccgagaaaaatgtcaatatgctttcttcaagaattcacaatcctttatgtaaattaagtggctttcctaaaggtattgtggagaagaatcaaatcaacaatgttgacttatcaccaacaaanagcattangattccacacacggataaattaccacaatatacatcttgggtatacgtggctaggtgcgtctgactntcaagtttcattttttttttgtccaatagatgacctacgaattgcaatgcaattttgtcataagataaaatacatgcttcttga

SEQ ID NO: 287688 - DNA, 311 bp, Glycine max
ccccccccgggctgtcatgagcctgaaccaccgacccgggaccctaagcaccgagctcagctgaaatttgtcagaaaaagaaagacactattggtagcagggagagccgcagacagtgggcgagtgggcgggaatcaagataagaaaggaaaccaaaagagccccgccgtacaccgctaaaaaaatcgcctaacctcggtgcaggcagaaaccacaacgaggctcgccccgcggagacacctcaaggagcgacagaggaaaaaaacttactaacaatcaccaaaaaaggctccaatataaccaaacgggaa

SEQ ID NO: 287689 - DNA, 458 bp, Glycine max
tcttcttttgctgttgctatctgattgtccatgtcagccagtttttcagttggttcaatgtttcctgaatcaatcaaggccataatcttctcccgggcagcatctggatctacttctatatgagcacagacaaatatctcttcgagctctgcttgcttcttgaaagcaatttccttcatcctgctggctttcagctgatcaagtctctcaacttccacttcagcctttattattaaaggaaaaaaacagttaatatcatacttggaactcgaatctgtaaacttcataagttctttagtacctacctgctcaatcagatccagagcaagggcaccaggaacagtgacttcatcaacagaagctgacatattacaggtaacatggtcaaatagtctcctttcctcgggatgagtatccattagattccaaagatcaattaactgagaagctaattcttg

SEQ ID NO: 287690 - DNA, 381 bp, Glycine max
agcttagtctattatcatagaattcgtgggtagttttctggaccacaaaatttatgtagccttttgtctttttttttttttttccggatgtttaacttatttgtctagttcatagcaatttgtttgtgtaccatgaatattcgatgaatgtgttgtatggactcttcagcaattgacatttatttgttttatttcagttctaaggttgaaaacaaaaacttcgaaaatgacgctacaattgaaagcaatgttgtaaggatttgacaaaggaaaaaatgtttgatctttaatgggtgtcacccttttctgttgatgaaggtttgccatatgctctcaaagggtggcctaatgttggtgatatatggggatagaaagtgggga

SEQ ID NO: 287691 - DNA, 464 bp, Glycine max
  unsure (1)..(464): unsure at all n locations
tctttaaagcanaagataaatagcaataaataaaagaagtctaagggaagagaggtatgcaaacttgatttatactggttcggccacttctcgtgcctacatccagtcctcaagcaacccacttgagattttccattctctttgtaaaactctttttacaaagtctgaaccacacagggacaaccctttccttgtgttcaggaatcctctataacaagagacccacggtctcttaatcccttttcagaaaaaagaagaagagaagaagaaatctctcttaaaagagatagattgtacaatgaagatcaatcaaaattccttattgcatatgcaagtggttgaccaaggaatctttntgagaagataagacagttcagttcagaaaaactcttaatctttgaaaggataaaactttttgggcaatgaaaactccctttgaatttgtgtttccaagtcacctttga

SEQ ID NO: 287692 - DNA, 321 bp, Glycine max
gttgcctaaaagttactatcaagcgaagaagatactatgtccaatgggtatggagtatcaaaaaattcatgcttgcccgaatgattgcatattgaacagacatgaattagaagatatgtcaaaatgccttacgtgtgggatatcacgcgtcaaagtcaaggatgatgaggagtgtattagtgatgaatactcaacgaagggcccccctagcaaaggtgatgtggtatctgtcgaacgttccaaggtttaagcgtctttatgctaaaggatacgacgctaaagatcttacatggcatgcatatgacagaaactgcgatggaa

SEQ ID NO: 287693 - DNA, 237 bp, Glycine max
  unsure (1)..(237): unsure at all n locations
cgctgatactgtcatccagggattactaaaatatgggcctatnataaattgntccaaggaggttatgtttctacgagagctggaggaaatcttanaagtaactcaacctgcagagttgcaacgttgtatggtaccattgttccaccaaataagtcgttgtttgagcagttcacatttacaggtttgataactattactagtcttcagtagttactactgtctctcgtgatcatatat

SEQ ID NO: 287694 - DNA, 406 bp, Glycine max
agcttgatattttgtgtttcaagaataagagttaaaagattattttattgagttagacagtggaggaagtcggcaagacaggttgggtgcgtagttggtgtgtggaatattcaaagaataatagaaaatggaaaaaacaagaaatgagtcacctcgtccgttgactatctgcgtataataatttttcgttttttatttctgttgatgctctgtcttttataacccataaattgtgggcttttgccagctgccgtgaggttttaccttctaatgagtcatgacagtaatgaaaaaaaaatcttttactttaacatatttacagaatagtaagttcttctatatattaaaccaaatagctgtgtaagttattacctctatcttttttcttctgtaagacatgaatatg

SEQ ID NO: 287695 - DNA, 488 bp, Glycine max
  unsure (1)..(488): unsure at all n locations
ctttanattatatatataatatactttgtgttaaaagtatttagttattctaacttgacattatagtttaatatataaagtattttatatagcgtgtactgtaacgatactttaacacctaaatatatgcatgatagtattcaccatttaacacaacaaataattgatataagattaatttgatgaaaaaaaaaagaaaaagagattatacattcacatttttgtgctaacaaaaagaagctaacaaagacaataaattaataactgatattttttaattaaaaaaacactcaacaaacaaattaatagctaatatttttaattaaaaaaacactcaacaaatagtaactgatatttttcaattaaaaaaacactcaacatatagtaactgatatttttcaattaaaaaaacacttcacaaatagtgctagtagtgcatgctagatgatagaaggaaaaagtggaaaaaatgaaaaataattagcaca

SEQ ID NO: 287696 - DNA, 396 bp, Glycine max
  unsure (1)..(396): unsure at all n locations
agcttgtgcattcaataccctgatgaggatgtcccatatgttcttaagactggactgattcatttgcttccaaagtttcatggccttgcaggtgaagacccgcacaaacatttgaaagaatttcacattgtctgctccaccatgaaacccctagatgtccaagaggatcacatatttctgaaggcttttcctcattcattagagggagtggcaaaagactggctgtattaccttgctccaaagtccatcacgagctgggatgaccttaagagagtattcttggaaaanaatttccctgcttccaagaacacagccattaggaaggatatctcaggtattagacaactcaatggagagagcctgtatgagtactgggagagatttaagaaactatgt

SEQ ID NO: 287697 - DNA, 482 bp, Glycine max
  unsure (1)..(482): unsure at all n locations
tataagctgaacatcaggaaacactgtagtattnttctattntatacatttatatggngaacatagacaaaatcagaagcaggctcatatttaggaacagaaaagagaaatatcgctgtcagtgttcatcagaaattctaatttgcctcctaccaaaaggattacctcataaatggcttgataattgatggagtggtagtttttttaagcaaagctatatatgacaagcttaaaggcacataattgtaacaatctatactctaccacacgggaatccacaatgaagaacaggctaactaaagaatttagattataaaattcaccatcaacagtcgtgtagaaatgtgtctcttccaatatcccaaattaccgaaacaatcttttagtaacttaaagagcaactcatttccatcatcacagtctaaatctgaagaacagatgtgactgatgaaaaatgaaacacacacagaagcagaaagtaa

SEQ ID NO: 287698 - DNA, 142 bp, Glycine max
  unsure (1)..(142): unsure at all n locations
cattcattcacttcttataacttaatcaagcacagcatccacccagttgaaggcacaacatctgtcttataaaaattatggcccgccaatgtcgtcctatcagggtatatgggttacctaatccctgctcgcccactcggcn

SEQ ID NO: 287699 - DNA, 380 bp, Glycine max
agcttttaatttatatgggaaatgaacagaagttgagatcacaaattgctgaactacaggaacaactcaatgttttgaagtgtgtgaacttggaggaagctgatcatgagaataaaagaaagatagaaatagaagagatagaagaaaaattggaggacatgatttttgatatgtccgtaaaagatgatgaaaatcaagctttgaagaagaaggtacaagaagctaaaatcgagctaaaagatgctaggccacaaattattaaagtaaatgttctgttctgagaaaatccttattctaatccttatactaaagagacactttacttcataattttattaaaccttttactttaattattcaacttcacaaaaagtaattca

SEQ ID NO: 287700 - DNA, 412 bp, Glycine max
  unsure (1)..(412): unsure at all n locations
tcttgcgtagccgctcttggtgctcagaaaatccgcaaatctaattcctcttattactagctantttgaattctttagttcctgaatgtacaaccttcaaattgttgctcgttcccctctttcttttctgcaaaaaagaaaatcaatatcaaagaaaacatggatgaaatcctaagaaaatcaatatcaaagaaaacatggatgaaatcacaattaaaaaccacaactaccaatctttcagagtcctttggataatatgtcttgtctccttatgtggtggagttttgtttaataatattatacttttgccttccaaaaaaaacttatgactgatcctctcttcattaatcctattttagatgttattgtataaaagatcataggttctccacctgcctacactattcctcct

SEQ ID NO: 287701 - DNA, 374 bp, Glycine max
tttattttatattcctcactagcttatttctcaatgtattgcaccgaacttaaatttatattttattatttataggaatatttttaatatattattaatgatttagtgtaaattttgaaggatatgccaataaatcatttatcaaattcttaggtattataatcgatttaggattctattaaaaataaaataaaatttaataaatataaattttatattaattaaattatttagaaaaaataaatataaagtatcatgtcacatcactctcataaaataaaatcttatatatatatatatatatatatatatatatatatatatatatatatatatatatatatgcacaagtttagtgtctcataccttgcata

SEQ ID NO: 287702 - DNA, 350 bp, Glycine max
tagcaacatacacaaacatacatacacataccaagagacactatcctatactctatccggtcaattgtaaaacatcattaatattcttatcaatattaccatcatcgtcataagagaagcatatgaatcttattcgtcaatctgattcacactacatgattcaacacacaaatgcaatctatccaaaaatccttcaagtcttatggttcttacaacaaaattctgaaaagttttctagcattgaaaaccccccattttttttatcacaagcatctcccaatcctccttgaccaaaaaacccacctccacaaatgtgatggttgacaactatgttgttgggaccccccccc

SEQ ID NO: 287703 - DNA, 142 bp, Glycine max
attaggttacacagtggacgaagactgctctacaggctggatgcgtctatggtctgtgggatatgtccataataatattaatgcggagcactcaagactggattctcctcagacgtggactatctgacgtgcataaattctc

SEQ ID NO: 287704 - DNA, 579 bp, Glycine max
  unsure (1)..(579): unsure at all n locations
acgcggcaccacactcgaactgcgacactggacgggcacggatatcggaatcaacatacaaannnnnaaagagagtgcntttgatgcaatcgataggacanacgcgaacatananacccaagccacaggagtaacaagaacgcttcaggagaggcgatgatttcatctacacgactcataagctcaaacgcgtagctaagaagatgacgaccagagcgacgccaagatagaggcgagatcaccgcaagatgaaattcgccctccagaaccacgtgtcaagaggccagaaccacgacaagacccacgcgagagaggacagatagcaccccggccaaaactgggagcacaggagctgcccaaaccttgaccaaagagcgctactctctggaaccgacaccacaaacgagaaggacaccactagcaaaagggaacagaaagcattaacagagggacgacgggccaaccgaacgcaacacggggaagaccagacaaagaagccggaaacaacaccaaccggttggaccgcggcaaccccagcgacaggaaagagcagcgccccgaacagaaagctgcgtgccn

SEQ ID NO: 287705 - DNA, 130 bp, Glycine max
gacagtttatcttgttatgtgaagccattcctcacgaatgatcactcatgtaggcgtagcctccatgcaaaaaacgggatcaaacctggcttagaataattacaccatgtcctggagtcaccacaattat

SEQ ID NO: 287706 - DNA, 306 bp, Glycine max
gcgcgagcaagctttattgttagctctaaatgacagttcaagctagggtcatctcagtttaccgtgcatttaccacagactttagacttaaccttccaaccatcaacgcctaactctttgtgcactcataacatgacattctcgacttgatcaccctacgttagttgtacccttgctctctgaccgctttccatccgggatacctgcctagccacatgacatacataatcagacaaaccgtaccacagaatgggtatgtgtaactcatccaaacatggctatttcaacaggctctcaacaagagtc

SEQ ID NO: 287707 - DNA, 473 bp, Glycine max
  unsure (1)..(473): unsure at all n locations
cgaggctcaagganaagcttgaagatgttatagaagaagttttgtcttttacatgcgcaaatctnttgcgtggcatttgtattggttatcaacttgactgatgcatcttattacatttcatatctattttgcatgtggaagcaaagctaccatgatggtaatcgattacaccattatggtaatcgattaccaatgaatggttttgaagaaaatgttaagagttatagctcttaacatggttttctcaaaaggtatcaaggttctataaatataagaccttggcacgcattttatatatacaataacacagaaaaacacatctgattacacagaactgtccactgctattctcttgcataaactttgccaaattcattctaagatttttttcaatctttcctagacgaaaggaaaattctgccaaaacacaaactgtgctatccttctgtattctcatcttttcttcattctcc

SEQ ID NO: 287708 - DNA, 412 bp, Glycine max
  unsure (1)..(412): unsure at all n locations
agctcgnacccgggatctctaagtcacctgcagcatgctagctttcttatctcgcctatgctagntaccacatgattcgagcagttatcaatatatatttgcttatttaaaaaaatactccatttttttataagatattgcctctcataaaaaattgggcgaattaatctcttaacatagccaaccagcatgagatcatgctctcagacaaaaagatctcacttgctcaatcccagattgatatcttaagatgcattcttctcagggtacttaccagcctcagcctcacatagctcaagagctgttaaatttccctgaagaaaatctcacagttcaacacatccaacaatttttggggattgtaaattatatcagagattttatccccagatcagcccaatataccagttta

SEQ ID NO: 287709 - DNA, 304 bp, Glycine max
ttgctttagtgtttcatggtctagttcttcaaattttgattcactcgagagctctacattgacagatgaggttacttgtttaagggacaaattgacaacttctgaagagaatgtccagacattaaacatgtcatgcttgcatacatccaaatgaatgaagggcatattcattctgagttgggtgctatgcttggacataacactactactgcagtttgtaagtacttaccttattctttcggtaagcttactatattattaacacttgacatgatatgatatctattttataggatgaatgacg

SEQ ID NO: 287710 - DNA, 385 bp, Glycine max
agcttccatatcattgacaatttcccgttcttattcaagctttcggtatcaacaaacttttgcataataaagtgataaacgtttttaacattgtaatccctacttccaataaatctccatagccgaacatcttcttaagtaataaccagtgatggcattttcatgatcggataagcatctctatgacaaagaatttgattaataatatcaatattccaacatctatttgtagcatcaataaaattttccacctttttattctccacatcattaatgagaggagtttcaatgaaaagattactctctaacctcaaccacgactcactccataacgcaatatttgcaccaccaaccaatttccacctatagccttccttaacaacca

SEQ ID NO: 287711 - DNA, 473 bp, Glycine max
  unsure (1)..(473): unsure at all n locations
ntagaaggatcactatttctccgtgagagtgtcctacatgccacatagcctcctatgcctacaccaattattgttggataggtatcatcatatttatgctaagaaaatcatgcacatcagaaagaataagttaaaatagtataccaattggtacaatagcaccatctgagccaccacaaagcatcaagtcctgcaattacttacattnttaatgttttcaataaaataactatataattacactaaacttgttntaagaaataaaagattggtaaaatatgagaaatctaccatctaataagcaaatgctgaagtgagatacttacagcttcacctctaatgatatggtttgcagcattcaatatacaaaaattactagtagcacacgctgtagagattgaataaatanggcccatccacccctaaagttttcatatgataaataaataattggttagaagctatatatagac

SEQ ID NO: 287712 - DNA, 382 bp, Glycine max
agcttagtctattatcatagaagtcgtgggtagttttctggaccacaaaatttatgtagccttttgtctttttttttttttttccggatgtttaacttatttgtctagttcatagcaatttgtttgtgtaccatgaatattcgatgaatgtgttgtatggactcttcagcaattgacatttatttgttttatttcagttctaaggttgaaaacaaaaacttcgaaaatgacgctacaattgaaagcaatgttgtaaggatttgacaaaggaaaaaatgtttgatctttaatgggtgtcacccttttctgttgatgaaggtttgccatatgctctcaaagggtggcctaatgttggtgatatatggggatagaaagtggggag

SEQ ID NO: 287713 - DNA, 477 bp, Glycine max
  unsure (1)..(477): unsure at all n locations
tctntanagcaaaagataaatagcaataaataaaagaagtntaatggaagagaggaatgcaaacttgatttatactggttcggccacttctcgtgcctacatccagtcctcaagcaacccacttgagattttccattctctttgtaaaactctttttacaaagtctgaaccacacagggacaaccctttccttgtgttcaggaatcctctataacaagagacccacggtctcttaatcccttttcagaaaaaagaagaagagaagaagaaatctctcttacaagagatagattgtacaatgaagatcaatcaaaattccttattgcatatgcaagtggttgaccaaggaatctntttgagaagataagacagttcagttcagaaaaactcttaatcttttagaaggatanaactgtttgggcaatgaaaactccctttgaatntgtgtttccaagtcacctttgatggccattcata

SEQ ID NO: 287714 - DNA, 396 bp, Glycine max
  unsure (1)..(396): unsure at all n locations
agcttgagattatgaagtgttgaagggtgaaacttcctgcttttattgttgaccacagagtggtacctggagatatgtcgcgggggtcaggagaccttggggacgtcaggtggggtgctattgcccaaaaccaagcttgaccaatcccgacccaacccgggcatagtcggtcagtgagaacctgtgatgtacctaagcatgcgagctcctggcagtcaacagataaaaggaacaaagaccacaaagcaaggaggcttgtggtggctggccagctgtgaattttgtgggatatgtggattatggcctctggtaatcgattaccaagggtgggtaatcgattacaaggcttanaaatgaagataggaggctaagatggtctcttgtaatcgattacca

SEQ ID NO: 287715 - DNA, 477 bp, Glycine max
  unsure (1)..(477): unsure at all n locations
ctatgatactcagcttctatagaggctggatctttgagcttcaatgaggtccttcaatgttgatttctcgccatggagatcagcggaagataaaggagaagaggtgaggggaggcgccatctactagggaataagccatggaagaaggagcttcgccaccaagagagtgccttggataaaaagcttggagtgggtgcttcaatggaggaaaagaatgagagagagagaaagagagaggggggagcacgaaattgaaggaagaaaagagggagagaagttgaactttgaagtttgtctcacaatacgctcattcatgaaagttacaacaagtgttacacatgcttctatttatagactangtagcttccttgagaagctttcttgagaaaatctccttgagaaacttctttgagaaaaattccttgagaagatagagcttagctacacacacctctctaataactaagctcacctcct

SEQ ID NO: 287716 - DNA, 418 bp, Glycine max
  unsure (1)..(418): unsure at all n locations
agcttgccatttaatgttgtagtaattggctctcatactctgcttgacaatcggaaggagaaggtactgtctcattattagatcgtagtgatctcatgattggaggaatgtttttactgctgtatttactgactgcatgattatgtttccagacccaacctggtggccttctgtttaccaagtttgggagcaatcagacagcactacttgatcttgcttttccggtataagaaccactgccattgctcttcttaccttgatttaaagcttgtgtatttctagcatggaagttacagttcttgtctttttctgtaccttcacactattcatagcttttagatctaaatcattgttaatattgttatatatnaaatgtagcttggctgcttctggttccttaanggagtaattatcaatc

SEQ ID NO: 287717 - DNA, 457 bp, Glycine max
  unsure (1)..(457): unsure at all n locations
tgtgatatctgcanaaaggttgtgtttgtcaattttgggcatgtttattatctcaaccctaaaaatntaagcaatgtcgataattntattaacactacttttcatttcactggtgcagcattaattatgggcttaacattctacagggcattcaaaatgagaacaaaaacttaaaaaaatcactgaaggtaatttaatattagatgttacaattataaacctttctccatcatattttgtggagatattttgcattactactggtatccatctagtttctttaccttgtcatgatttgaattgtggaattgtcacctgtattctttgaattgttnttccaggatgtggttactgagaatgaatttgagaaaaaacttcttgctgatgttattccgccaaccgatattgggtcacatttgatgatattggagctntagaaaatgtgaaggacaccttg

SEQ ID NO: 287718 - DNA, 332 bp, Glycine max
  unsure (1)..(332): unsure at all n locations
agctttgaagagaattaaaactctagaaaaaaatgcttaaaaatctttggttagaatcgcagtcagcatatattctacaccataaagtatttgcacaatcattctcatccaaggctgccttatttatcaataaatatctaattagcaatgattaaatattccagattctatcaaagcatttatgagttattacgacacagaagcatcagatgggacttcaacattntaaccacaagcaggtcaataaaacccatttaatctgcaagtcagtgttggatgcctattcataatgtgctatactagtaaggtggtaaccatatctttatctttga

SEQ ID NO: 287719 - DNA, 468 bp, Glycine max
  unsure (1)..(468): unsure at all n locations
nggaacannatatttgaattcttggtctccttagagaatttgtaaagatgtctgctagttgatcattagaactaacgaattcagcaataacttccttagaaaggactttctcctggacaaaatgacaatcaatctcaatatgtttagttctctcatggaatactggattagaagctatatgtagggcagcctgattatctcaacatagcttcatttgttgagtatttccaaacttcaattcttaaagaagttgtttaatccaaatgagctcacatgtggctacagccatagctctatattcagcctctgcactagaccttgcaacaacattttgcttcttactcttccatgagacaagatttcctccaatagacacacaatatcctaaagtggaacgcctatcaatgcgtgatcctgcccaatctgcatcgcaaaattcaactatttgagtgtttcctttgtcttcat

SEQ ID NO: 287720 - DNA, 278 bp, Glycine max
  unsure (1)..(278): unsure at all n locations
agcttctttttcttgagactcgccaaggctntcttcttcttctccgcgaacaggttagttccccttaccctttgcttgtaatgtgcagcactagtcaccttagggtagaagacgagaggggagaagacgagagtatgccggaaaaagtgggggaaaaggctgacggcggagtcttccgatagacccgttccagatgaacctcttccagaaagtttccggaagaagtgttcttccggaagtacccaacctttttcggaagacacccggaacacctcttc

SEQ ID NO: 287721 - DNA, 485 bp, Glycine max
gctgccacatacctctgtctgtctctctctctctgatgtgctttgcatcactcatgaaaccttgatattgcaatgttgcaaataccataatccaatcgaaactagtcaaaccttatatatatatatatatatatatatatatatatatatatatatatatatatataaagcttagggaacactaaacaagagcgaccatgattacccagtggagcctgaaaggcccccacttacacatcacaactctcacacaaacaacgagcccctctctcgactaaaccaatacgtagccacaaccgaaagacagatcatagatctcatggtataccgtttcgtacactccatggatatcttccctcttcccttatgtataatactcgagtaacgctcaaacggataggaggtcactactctctatcactctgatctgcaggaatgattagtcgcatttgataaactataccacaatagaacagatgtgacag

SEQ ID NO: 287722 - DNA, 378 bp, Glycine max
agcttttcgtttttctcgcccaggcgagcaaagttgcttcctccagaagcaacagccttctggagggcccaagtgggcctggatgctatttgcacccccctttttactaaatgtaccgccccttctatttttttgtaattcttttttcgtaacgttacgaaactttgcgaatttcataacgatagttattttccttccgcaaggttacgaatccttacggattatgtatctactcttttttagctttcgaataagttacgaaaactcacggattgcgcaaaaacacctctgttcgactttcgccacattacagaatttcacggatcgcgcaagcctgctttcttttgatttctgagacgtctcgggacttcatttatt

SEQ ID NO: 287723 - DNA, 372 bp, Glycine max
tctggaagaagcctcttagtgaagcttctggaggaagtctcttattgaatgttctagagaaaactacatgaagctacctcggtaaaaacgctgcccagccttagttaaccgttggatcttctcaaaatttggtttgcaacttcacaggacaaatcgacataatctgaccgtcgggatcgttgagaatatgtttagagtgtgctagaagcttccgttctcgagagcatcttttatttaagcatttcagcctttgctttcgtgtagcatacgaaacacgccatttcttcttctttctttcttacaaagccatttataaagttccaagaactttatccatcacccacaaccaccattatccaccacaaatcatca

SEQ ID NO: 287724 - DNA, 578 bp, Glycine max
  unsure (1)..(578): unsure at all n locations
tacgacccgacacgaagcacatcgcacgcgatgcgatgcgattgtcantcancaaaaaaanaagagagggttgatgcatcgtagncngaccgacacaacacagccggcgaatctgcgaagacgaagngacngngacgcgcaaacaggttgatatctgaagcgccacaaatnacnccgaggacgagaacccgtatgagcaccaacgcaacacaccaactggngcagaactgacaaaaggaccaaagcagccaaacgagcagcgcccatgacaacaaaaacgaagaaaacaaacagaaggaggaacaaatgaaacattgcgctcgaaaaccgaaccgcgccagaacttgaagagagcagaccattacaactgcaaaacaacaacctacctcacctagacatgatcgaaaactggagaacagcacatggaaactcagaaacagcctaccacgacgcgagcactgagaatgaagatgggaaatacctacgcgccgggaaaaaacgccacccgaagcggggggcagagaacaataagaccaccaaagagggaagaccctcgaggaagcgcgacgcacccatcn

SEQ ID NO: 287725 - DNA, 353 bp, Glycine max
agctttttgatattattgagtgtgtaaaatgagatcaatgcttggtcatggacaaatgtgtgcttatgaatctaacttcttcataacatgtacagatttgatgcactaaggttgctaggaagaatgagaagaaagagaataatgctggtgggcgattcagtaatgagaaatccgtgggaatctcttgatcgcttagtgccaggaggtatttgtatttggcggaaaagagtgacttataacggacctggaatggccttccatgccatggtaagagtgccagacatgtatcacaacatgggttcttttccttctctgaaaaatagagaccacttatgtctacctgaaggattttg

SEQ ID NO: 287726 - DNA, 224 bp, Glycine max
agcttctaacattggattgcacccttcctcacttataccctcacatgtggctccctctttaacatttacttacttctgagtaatagaatcttcttcacgcaaagagatcgtaaccttactctcaccaatttccagcaccctaacagcggtcatttgtactatgcatcacatatggcgtttttggtatcttgcgcttactcatggatgcaacggttactcatgga

SEQ ID NO: 287727 - DNA, 407 bp, Glycine max
cttaatttcaatacaaggaagcatgacttatgcctaggaatctaaattttggttctgaatgtaaaaaggcatgaatattaggacatgtttgagaggtttttttacaatttaaatttggctgccccatgaggaataccttacacctacgtagcatggaaaatacctttcaacggtatgtatagatgtgaatataggtagcgcggaaatgccatgcaaagcgtgtgaatatatggcatataaataccttgcaaagtgtgaatgaatagcagaaaatgcctttcacaatatgtatatttgtggataggtagcatacagagcctttcaaaaaaatgtacccatgtcataaatggcatgagaatgctgtccaaatgaatatatgatgtggaattgcccctcaagtgtagata

SEQ ID NO: 287728 - DNA, 356 bp, Glycine max
ttaacaagccactcttctaggcctctacttatgttgcgaacacaataaggagtccaacagatacttaaccaaaagtaataacagaaatcaaaatgcacaccggaaagtaaaagagcacggaagaaagagacaaacactcacagagtttttatactgggtcggcaacaacctcgtgcctacatccagtccctaaacgacctgcggtccttgagatttctttcaaccttgtaaaaatccatttacaaacaaagatccataagggatgtaccctgccttgttctctttgaacctactggatgtaccctccactagaactgatccacaagagatgtaccctcttatgctctcacccaacc

SEQ ID NO: 287729 - DNA, 365 bp, Glycine max
tcaccaccaagagagtgtcttgcataaaagcttatattgaagcttcactgaaggaagagaatgagacgacagcagagagagtacagagcacacatgacagagctggctgcgtagaatgatatgagaagcatcgggagagattgttgaacctttgaagcgtgtctcagaagactctcatttatcacagttatcacaagtgttacacatgcttctatctatagcctaggaagctttcgtgagaagcttccttgatggaagcgcgcttacgatgctagagttatacgcctccaatacgtaagctcaccctcacgacacaatacatgaacgaagagagcgtcctcgagaagcttcctgtgggagcaagt

SEQ ID NO: 287730 - DNA, 401 bp, Glycine max
gcgatcagctcgtcccgggatctctaagtcactgcggcatgtttcttgctctttatttacatagatgtacgcatttatgggaggaggctatatgacattcttgctttaagagtaacgtcccactggtaaaactaactttccaaatgtttgccttcgcaggaatggccccgaggaagcttgcctcacagaggtccatgaacgacaaggcggccgagagaactatttccgccccggagtacgacagtcaccgctttaggagcgttgtgcaccagcagcgcttcaaagccatcaagggatggtcgtttctccgagagcgacacgtccagctcatggacgacgagtatactgatttccaggaggaaatagggcgccggcggtgggcaccactggttactctcatg

SEQ ID NO: 287731 - DNA, 338 bp, Glycine max
ctcgagagcttcctatgtggaatttcgagcgtctcgatatattatacgcctgaatcgaacctcagtgttaaaagttatgaccatttgaatttctgtagagcatccgttgttcattttcgagcgtctctatatgtgatgaaccttaatcggacctccgtgtgaaaagttatgaccatttgaatttctcgagagcttccgttgttcaatttcgagcgtctcgacatattatgcgcccgaatcggacatccatgggaaaagctatgaccatttgaatttctcgagagcttccgttgttcaatttcgagcgtctcgatatattatgcgcccgaatcggacat

SEQ ID NO: 287732 - DNA, 383 bp, Glycine max
  unsure (1)..(383): unsure at all n locations
agctntgatatttntaattatgtgccctatcgcaagattatgtgattatgggtttttaggatttttttgaagttactctttgtgtatgtcttatgacttgtttgtttgacacttacaatcaatttctcatactgtgcacatgtttcaatgtaaaatgtatggttgaaattaattagggcacacatctcaattacattaatcagttctatcaaaatcaattccactcaactttaaaccaatctgactcttagtggaacttctaccttatcccattgattattagactgggtttcatgattcgtggattgtattgtgatggtctgaaaaatggcacatccatgtgggtagttggaatgaatccaatcccctgcctgagcctgaac

SEQ ID NO: 287733 - DNA, 318 bp, Glycine max
  unsure (1)..(318): unsure at all n locations
tcttccggaagtcttccggaagaagcttcttccggaagttagttttcttatntaatgcgtatgtaatgacgattctgcccttgtgtaaatttctttaaattaacgtcttcaggctgtgttttactgcgctttctttctttcttcttccgtttgctttgattcttcttccgttcgctttgatgcttcttccgtttgctttgtttcttcttccgtatgctgatgattcggtggtggtcccttcagcaatctgttggtggtcccgtgaagcgaagaatttgaagatatggaggacccgtgttccctatttgaagttctatt

SEQ ID NO: 287734 - DNA, 424 bp, Glycine max
atcactcgacccgggatccttaagtcacctgcggctgcaagcttgcttttaattctgatcagaatcaattttctgatcttcaaaacctagctccggcttcctcttccccatatcaactatgcagcttgcggtcaacatgaatggccttcccaatattacagggatgtcagtatcttcagagatatccattaccacaaagtctgtcgggaagataaaatgttttactctgaccaacacatcttcaattactccatatggcctggtaatggagtgatcaactaattgtaaagtcatttgaatgagcattatttcccactcttccaatcttttgcacatggagagtgacatcaaattgatacttggacccaggtcaataaaagcttttcccactttgacttcttcaattgaacaaggaatagttaca

SEQ ID NO: 287735 - DNA, 327 bp, Glycine max
tgtaatcgattacacatatactgtaatcgattaccagaggagatttttatataatattctaaacagtcacgtctttgtctttggttcttgaatggctatgaaaggcctatatatatgtgacttgagacacgaatttgctaagagtttttgtgaacaaaaagatcttattctcttaaaaagcaaaattgttctatcctcttacaaataccttggccataacacttgtgattcaataatgaattattagagtgctcaaattgttcaatctatctctttcagaagaaatacgtcttctcttcttcttattctaaaaaggattaaaaactg

SEQ ID NO: 287736 - DNA, 411 bp, Glycine max
  unsure (1)..(411): unsure at all n locations
agaggtcttgtatatttgcatgtaattntaagttcaaaccctcatcgtaagaaaaacactaaacacttatgatataaatttaatactattattttatagtcattgtattcactatattttttattgtcatgttataaatatattattagcagcatataagctatccctatcaagaggaaggggcacacatttgagttcttatacacttagtaactatagattccttactatttggcaatgcagataacgaacgaaccccgactcttcaaataatttttaatatatgacttctactagtgcttaagttaccttcttttatttttgaatttatgttctagctctttagaagacattaaaccacaaatattttctatttttaaaaaaacaacaagtgaatttaatttatattaa

SEQ ID NO: 287737 - DNA, 486 bp, Glycine max
  unsure (1)..(486): unsure at all n locations
actaagctanatagacgcaggaagcagaaatagagtgctggaagtaannttctcaacttctgtttgctgcttaaaagtacaattcttaagcctaagcgagcaaattattttcaatgggcttcaaatccattagtgattcattgattcagcacaagatacttattcgagagtgttaacacactctctaatatacttttcctaattagataaatatttttttaagacaatcataagtattcttaacatatttctctgtccacttaattacattattagaaaaatataaaattacaagcaagattcattaaataaaataaataaaacacaaaattttataatttttaataaattttgattaatatcaacaatacgttcaatagactgtgataaaacatgttaattagtaacatttttcataattaaccttgtttatttgtagaaataataaatctttgcgagctagaacttgaaaaacaccatttactt

SEQ ID NO: 287738 - DNA, 422 bp, Glycine max
  unsure (1)..(422): unsure at all n locations
agcttcttatttaagttcatcttggtggtgaagctctttcttccatggcttattccctagtagatggcgcctcctctcacctcttctcctttgtcttctgctgtatctccatggtggaaaatcaacattaaaggacctcattgaagctcaaatattcagcctccatagaagccccacaagcaagcttccatcaagtggtatcagagcacaagagcttcaagaaggtgctccttaaacctccattaattntttgctttaccttctcttctattggtgcttcttcatttttctccatgtatctcctcacatgtcttgtgataaaatttgttaacatgaatctttagatttttcaccgaataaacttgctattaaagctagatttgattctctatggctcaaatttcttggtcttggtcttgaac

SEQ ID NO: 287739 - DNA, 481 bp, Glycine max
  unsure (1)..(481): unsure at all n locations
cgcttgtggggcttctatggaggctggatctttgagcttcaatgttgttctttaatggtggttntccaccatggagatgcagcgaaagacaagggagaagaggtgagaggaggcgccatccactatggaataagccatggaagaaggagcttcaccaccaagatgatccttggataagaagcttggagaggatgcttcaatggaggaaaagagagagggagagaaagagagaggggggagcacgaaatttaaggaagaaaaagggagagaagttgaactttgagttgtgtctcacaagactctcattcatcaaacttacaacaagtgttacacatgcttctatntatagactaggtagcttccttgagaagctctcttgagataacttccttgagaaaattctttgagaaaacttccttgggaagctagaacttagctagacacacccttctcataactaagctcacctgcttgagaagct

SEQ ID NO: 287740 - DNA, 394 bp, Glycine max
  unsure (1)..(394): unsure at all n locations
agcttgttttgtcttgtttataattaagttttgaataatttagaataactttaaaatagtttaaatgtttgatttttaatctaattttagtttattttgttgtagaaataaaggaaaaaagaagagagttgttgttggaacccaattgaaggctcttttaaaggacattttttaggctgatcaaattttttcctctttatggtatttggactcaatgtgtatggcttagcctacaacctcttaaattggtgcaacttttctatgcccacttagcgagcaggtgtgcattaagcgcacaactcaattacatagaaatgacaatactacatgtttgaccctatntaagcaccaatggtgcggatagaaggaatatttgattgcgagaactatctat

SEQ ID NO: 287741 - DNA, 471 bp, Glycine max
cgtacggttaaagtctcacgatggtcacgtgctcatgcaacaattgttattcgtggctatacgagacatcttgcgaaacaaagtcaggttagcgataactcgcttgtgctttttcttccatgctatatgtagcaaagtccttgatctagtcaagtttgatgagttggaaaatgaggccgcaattatactgtgccagttggagatgtatttccccccccgctttctttgacatcatgattcacttgattatgcatctggtcagagaaatcaaatgttgtggtcctgtttatctacggtggatgtacccagttgagcgatacatgaagatcttactagggtatacaaagaatctatatcgtccagaagcatctattgttgagaggtacattgcagaagaagccattgaattttgttcataatacttacagaatgctatacctgttgggcttcctgagtgtctgcatgatgata

SEQ ID NO: 287742 - DNA, 378 bp, Glycine max
agcttttaatgtcctatagggacaagtcacaggtggaatgcatggctttaaaggataaaatgaacgcttgtcaaacgtcaaaaagaagtttgaccgaacagctgagtagaacaaaagaaaatatgttcacaatcattgaccagtataaggaaaatgaaacctagctgctattcatgggcaaagactaaaggatgagcatgcgaaagtatcggctctacaaatggaaagggaagcaagagagagagtgatagaattattgcacggggaggcgatgaaatggatggatagattcgctctcactctgaatgggagtcaagagcttccaaggctgttagccaaagcctatgcaatggccgatgtatacccagctcccgatga

SEQ ID NO: 287743 - DNA, 97 bp, Glycine max
tcatcctgagatccctcttgttggactaagcccaatagttattttcctcttaggttcagacaaacttagactgagtttcgttcgcagatccttcttg

SEQ ID NO: 287744 - DNA, 414 bp, Glycine max
  unsure (1)..(414): unsure at all n locations
agctttatcgttattcccaaagcttcatgtagacttgtccagaatcgcgaagtgaacctcggatccctgtctgatacaatactggaaggaattccatgcaaccttaccacttctttgatatacaactccactagcttttccattntatacttcatattcaccggaatacactgagcagatctggtaagtcgatctacatattcagccacatctttcttcctgccatgccaccaaacacttctcttcaaatcttggcacatcttagacattccacgatggaaactaagacgacttttatgcgcttcttccatgatctttactgtcaaatcatctaaagatgacacgcatatgctccccttgaatttaattataccagttgagccctctcgaactctacctccttatcccccatta

SEQ ID NO: 287745 - DNA, 601 bp, Glycine max
  unsure (1)..(601): unsure at all n locations
tacgaacgcgtacactgcagnaggaagtatagtcacacctgatagcangagantaaacnnacaaaaccccnnaaagagtggggtttgatgccatcntaggacacacgngacaccananaacacncaagctcggagcgnaagcaaaccagaagaacncgaagctcggatattcgatcgagtcccgtagtatatcacgacgcgcgagcaggaagacagaagcgcttagcggattaaaacgacaatgacgattaactcggatgtccgattaagtcccgcaatatattgagacacacgacagagaatacagaagctgggagcaaatacaaacaacaataacacataacgcgaatgaacgagtgagggccgcaataaaccgagaggcgcagaagtgaaaaaggaagcttgcagcaaaggcaatacacaagaacgattaacgcgaagatccgatggaggaccgcaagataccacgacgctcgaaattgacacagagacactcagcacaagagacgacactaagaactacacgagggacgaacgggcaggcgaaagaagaatccgccgaacggactacagaacagaaagcaacaccaacaggccgacg

SEQ ID NO: 287746 - DNA, 248 bp, Glycine max
agctgttacctttatcttatctcacagacgctatatctgggagccgatacagtccttgtgttcggactctcagccacttacgatagccgccgatgatcccattactgcttcccgtaagctctctgtcctttcttcacgccgcatcccatgccttgcgatctccttggagtactctcgcgtagtggtcactagaaccccatgcgatcaaaggcctgatgcttggtgctaatggcgctcctctcatgggg

SEQ ID NO: 287747 - DNA, 393 bp, Glycine max
tctatagaaggttcattcctaatttctctacaatagcatttctctcaattagctggcgaagaaaaatgtggcatttacctgtggtgaaaaacaagagcaagcctttgctttgctcaaagaaaagcttactaaggcacctattctagctcttcctgacttttctaagacttttgagctagaatgtgatgcctctggagtgggagttggagctgtattgttacaaggtggacaccctattgcttattttagtgaaaaactatatagtgccaccctcaactaccccacctatgataaagagctttatgccttaatatgagctctccaaacttgtgaacattaccttgttgacaaggaatgtgtcattcatagtgatcatcagtcacttagcacatt

SEQ ID NO: 287748 - DNA, 223 bp, Glycine max
gacattatcattattacttcttccacggtgctggaacgtacttacatggacttgatggggcctatgcaactagaaagccttggaggaaaaaagtatgcctatgtggttgtggatgatatctctagatttacctgcgtcaactttatcagatagaactcacacacctttgaagtattcaggatgtgagtcttacacttcaaagagaataggaccgtgtcatcaa

SEQ ID NO: 287749 - DNA, 438 bp, Glycine max
  unsure (1)..(438): unsure at all n locations
cgtccttggtttagacatgattgatacatgatttgcgacttgtatgattgaatttgggcaaaattggatgagggaaagagtgattttcgaaatctgcactttatgcagaattttgctgttgaaatgtgcagcagaattttgtataagtgcagaaaaatgcttgtgtatggatggttgtgaaaagggtagtacatatggagttctggacatttgctatcagatcccaacggtcaaaatgtagacttatgtactagagacttccagtaaaagtttcgagtcgatccaacgattaatgaactataacgaaggatatgttactggcgtatttgtatgtgaatagctgtgattntgagttgtgttttgggcagagatttctgcctttgcttctgttagcttgagtttgttagtccatgatgattggatgtggaatacctgaat

SEQ ID NO: 287750 - DNA, 276 bp, Glycine max
tgcaagtttgcttttatttttacaagatgcacatcggtgggcagctacctcatgcactcttctaacgaccatggcatacttgctggcactaaattgctgggagtctgaggccatcttctcaattaaatgaatggcttcagtatgagatatgtgttcaaaggctacaccactggcagcatctatcatacttatctacatattaccgagtccttcataaaaatataggagaaacaacctgatctgaaatctgattgtgggggcaaccgacacctaaat

SEQ ID NO: 287751 - DNA, 307 bp, Glycine max
tttcttcactttaggagacggccattccggtgttggagaagatcaacgacaatgcctacaagattgacttgcctagtgagtataatgtaagtgccactttcaatgtgtctgatctatctctttttgatgcagatggcggagccttggatttgaggacaaatccttttcaagaatgagggagggatgaggacataaccaatgaccatgaagcactggaatgtcccatgaccatatgcagacttatacaagcccaacgcgtcatagagacacggctggtcatttgtatcgctgccattgatgatgattg

SEQ ID NO: 287752 - DNA, 384 bp, Glycine max
  unsure (1)..(384): unsure at all n locations
gttgcgtntaaatccaagccgtattggagtcatattgaagctgtttctagccttaggaagccgtatctaagccgtatcttgtattttaaaaaataaaaataaaataaatcttttttggatactcctaggatactatccggccgtatccgtggagtatcggtgtcggatacgggtgcgacaccgacacttttccttttttcacgtatccggacttcacagtagtttatcaatggattctctnttttcttttaaggaaggttatttctaatctaaaaataattaggtcttataaaaaaataaacatcattttaaatttgggtcttttaaataagaacaaaaggagtattgtgtgattctacatatccaaaattggtgggccgtgac

SEQ ID NO: 287753 - DNA, 389 bp, Glycine max
  unsure (1)..(389): unsure at all n locations
agctntgagcttattctagttggctcctgaaaatgtgtctacagctgtatgcttaataattagattctcatttgaaaacatgctgtctgtttgacttanataacaggatgtgattggatcatttgtgcaagtaacttgcactttttatgattgtcttttgcaccataaggtgttatggacaaactcttaaagaagagatctatctcatttgttatgttcttttgcaatcaagaaatacaattctttcttttctctattttctaatccagcttcttaacaaaatgtgttgtaaaatttgttcattgagaaagtagtgtcaaatctaagataacatgtttctattggcccatgattacactgataatatgcanggatagtatacctaattc

SEQ ID NO: 287754 - DNA, 489 bp, Glycine max
  unsure (1)..(489): unsure at all n locations
acctatgatactcagctgttctatagactaaatatgaaactcacctatgttagactttattaatcattaagtgagtcttgcaagttaccaaaaaataaatgatattacattnttcaaatttctgataactcgttggatttaattttcacgtgattttttcatgtttatggttcttttttatttgaacgtcccttagcttctacggtttcatataactaaatcaaacaaaacaaatttcacatctcgaattgataaaaaaggattcaaaattgaaaatgatcattgtttcagaagaattattttggctcacttaacaaatatgaatgattaaattcaaatgtaaaaaaataagatatcatactaaatataatcaaatatataaaggactaaaagtatatcttaacctatcttttataataaataattatttttattatatanattatatttttgaatttaaaaacataatgaatcttattatctaaatat

SEQ ID NO: 287755 - DNA, 377 bp, Glycine max
aaccggagagaacaacgcatggaaggaagaattgatgttagatgacacataaccaaagcattagaccaaaagatgacgatacagagaatggattttgaattgccgaccacgcctacagttgcagcgcattcgatgttgtagaatagcggccaacggacacactttaccatgattgcctgtgatccgtagatattaagaaaatatgcctacaaacggcgtgaggagatgaatcgcggacacatagaccccaaaaacctggacatggagggcggatgcggctgcacaacatgctttaaaaccttgaacacagtatggcagtttgtgaggtatctgcactgcgttcacagatgccttgggagagatcttaaattgtggtc

SEQ ID NO: 287756 - DNA, 587 bp, Glycine max
  unsure (1)..(587): unsure at all n locations
gatctcacgatcgtacacactcggatcacacggcacaggatagcataaccgaagtgatacgatgtaaaaaanaacannnnnannnaaggagaggggnttggatggcctccgnanagacangacacnananannacncaagcccgcaccggggggggaagcgangggacggccaancgaggagcntattactgcacaacaaaaaaagaccacggaaagcaagaaggacgagcaagacgagatacacaagccatagatgcgcaccgcaagacggaaccacaagagagaacaccggccacacgaggcgcaggccgcaagacaccacgcgaacacgaacaccgcaaatcaagaagagcaaacaaagaaaaaaacgcgcgagccaaaccacacaacgccccagcggccacagggcccacaaccagaggacccccgggaaaaaaaaggcccacaagaaccccgacactgacggcgggaccacacacgagaaaaagagcagcccaaaaaggaaagagcacaagcaacaaaaaacgaagccacaccccacgcgagcgcaagcctggacagcacgggcaaaacacagaacccaacn

SEQ ID NO: 287757 - DNA, 397 bp, Glycine max
  unsure (1)..(397): unsure at all n locations
agcttcaatgtatatctatactcttcctcctattcctcaataaaaagtcaggatcagatttcaacacattcaaaggaatattangaaattttcttttctttattcttccttttagtcaataatttattgaacaaagttatattatttcctaataaataagcaacctcaagaagtttgctcaaacacataccaaggagtcaaggactctaattnttagaggaatcgaaggatatatatgaaagatatatatgggtattcctgagagactgtttaaagttatttgcaagaataacaaaaaggcataccaaatcatgccttttcagttccctggtaatcttcttagtattgacccattcataccanagatttcttttcagtacaaagttgcaacaaactg

SEQ ID NO: 287758 - DNA, 459 bp, Glycine max
  unsure (1)..(459): unsure at all n locations
tgcttctacaggatgggcaatggttgaagaaggacgcacaacctctataagatgatcgtactccccctcctcctcctcaatgagatgactcctcagccctcatgaatgaagttctttcaaagttacgaggcctccaaacctatgttggtgaacgctntgattccttgaatggtcgtatcgatgccattgatgctcgctttgaaggaatggatacccgcatcactcagcttgaggaggatgtgagttatcttcgtcggtgcttcgactttcctccaccatcttcatagatatagagtattattatctttgattntacgccatgtaacgccatgtatttggctatgtgttttaagtcattattctttgaacttagttatatttcagtatttggcacttatgtatttatgactngaatatatttaattttgacttatgaatgcgtatgtgaactttattata

SEQ ID NO: 287759 - DNA, 419 bp, Glycine max
  unsure (1)..(419): unsure at all n locations
agcttgttatttattatacaaaatttggtagctcttctttgtagtttccgcctttccttttgatcttctggactaatgtcattttgtatgtattctaagattgacgtcatctagttttcttgcctttctatcatcatgaagaatcttggggtatgtatcatttgacatataacactttntatttctttgtgctcttcaatattagatacctttgacaaaagtcatctcttgcattttcttctcttggaatgtaggtgaactccatattttttaaatttttctttgattaccccaattttttgatgtatttttgcaagattggttctttgacttggtattctccattcaattggttgagccaacaagttaagttcgttggacactnttagcactttgacctctatgtaagtactatttct

SEQ ID NO: 287760 - DNA, 434 bp, Glycine max
  unsure (1)..(434): unsure at all n locations
ntntctaagcgtttctacaccccaattttctccgcctttggcaacatctataagccaaagtacttgggaatcaatcacaaataaaataatgaagtataggaattacaaagtataaggcataaccaataaaaatcataaatacgacataaccaaaccagaatccaaacagttcaaaattcaaaaaccacatagtatcaaagcataaaagtctgaaatccaaatactgcaagataaataaagtactgaacataataatctaagtagcatagccaaataagagacatagaattagaaactaaattctaagaaggtagaggtggtggtggaagatcgaaactctgacgaatgtaacccacatcctcttcaagctgtgtgaggcgaatatccatgccggcaaaacatgtatccaatgagtcgaaacgttcaccaacata

SEQ ID NO: 287761 - DNA, 436 bp, Glycine max
  unsure (1)..(436): unsure at all n locations
agcttgtgactcttgtcaatttcataaaactagttacttaaaaagttgtgacttttgaaaaaatcttcataaataagtcacttgaagaattgtgacttttggaaatatatttttcgaaattagtcactggtaatcgattaccattaaggtgtaatcgattacacatcaacagatgcaactcttcattttgaattttgaaaattaaaatgtttagaagctctggtaatcgattacaagtattttgtaatcgattacacaagtttaaaatactttaaaactgtttaaacataagttataactcttgaaatttgaaatattaccgttttaagacactggtaatcgattactgccttctggtaatcgattaccagagagtataactctntggtaatgattctgtganaacttcttatgctactcaatattctggaaaaac

SEQ ID NO: 287762 - DNA, 423 bp, Glycine max
  unsure (1)..(423): unsure at all n locations
tgtacgagtgtgagaaacatcttcttcgaccttggagatccttgtctctatctcattgaatcgcatgtacacttgtaactccaaggtatcaaacctttcaccaacaaaggtttgaagaccatcaaacctgtccaaaatcttntgaagaagagaggaatcttctccaccatgtaagtgtccttcttcatcgatgggttgagcaccctttttcacccaagagccatcatgctctttacggtaaccaaaggatgcaatcactgcagcacctattagagaggatctcttgattggaacataaggttcaaaatcaagagggatgttgaagtgttgaatatagagggtgactaggtgtggatatggcaatggagcatttaatcgcaatgccttatgcatgagatatcagactaagtgttcccaatcaat

SEQ ID NO: 287763 - DNA, 379 bp, Glycine max
agcttttagttgtttgaaatgtctggcatagcgtcgaagaagtaattattaacggtttactgaaacttgaatgttgtcgtaactaagttgttgtgcaaatgttgtcttgccctaacaaagtaatgtttgaatgtatgactatatataattttactttgcgtccacacaccatatatgatttttcatgtttactgagaagttaatagatacatactgctttttagtgtcaataacttagataataatgtgtaatttcacaaaacttcaagagtgtgaagggaatttgctctaataagtataactttggcattacaaaggtgattatttgtttttgaacgagttctcaaacagcattggagaatgtagctatgattgggat

SEQ ID NO: 287764 - DNA, 443 bp, Glycine max
  unsure (1)..(443): unsure at all n locations
tgtgtttgagtgaggtgataccttcttagcatctntgatttcctatacctctcttctcaacccgccatagtaatgagaaacaggagcatgtctcagagtaacaacatacacatcaccaaaataatatcctatagtagataaataatcatattcggatgtgcctaggtaaataacaaatgtataatgattacacctcacagaacaacatgcataaatataccagatctaaacattatgcaagttattctgacctaggttgttgtcaagagtcttggtgaactggtccaaagctggagaaaccttcaacctttgcttcagaatcctcttcgtcctctgaatttgaacattctttggccacttcatgaaccgagtcaagtctctcttcgaggcaacgcccctncgattctgaacctctttgacgcttctcaacagcagatttgaac

SEQ ID NO: 287765 - DNA, 389 bp, Glycine max
  unsure (1)..(389): unsure at all n locations
agcttcttatatataagctacatgaagctgcctcggtaaaaaggctgcccagccttcattaaccgttggatcttcacgaaatttggtctgcaacttcacaaaaaacttttccatgatctgacagttgggatctttgagaagatgtctggactgtgctagaagcctcttaatgaagcttctggaggaagcctcttaatgaagcttctagagaaaactacatgaagctgcctcggtagaaacgcttcccagccttcgttaacagttggatcttctcgaactttggtttgcaacttcacaagacactttaccatggtttaaccgttgggatctttgagaanatatctggagtgtgctagaagcttccgttcccgagagcatctcttatttaa

SEQ ID NO: 287766 - DNA, 473 bp, Glycine max
  unsure (1)..(473): unsure at all n locations
ngagatgaggaagtgtagaagggtgaaacttcctgctnttattctttgaccacagagtggtacctggagatatgtcgcgagggtcaggagaccttggggacgtcaggtggggtgctattgcccaaaaccaagcttgaccaatcccgacccaacccgggcatagttagtcagtgagaacctgtgatgtacctaaacaggcgagctcctggcagtcaacagataataggaacaaagacgacaaagcatggaggcttgtgtggtggctggccagctgtgaactttgattgatatatgggatatggcctctggtaatcgattaccaagggtgggtaatcgattacaaggctcaaaaatgaagataggaggctaagatggtctctggtaatcgattaccaaggggtgtaatcgattaccaggcttgataatgaggtcaggaagctaggggagcttctggtaatcgaataccacgggat

SEQ ID NO: 287767 - DNA, 282 bp, Glycine max
agcttttattattatggactgacctcgaatcaattgctttgatagccctttcagagccatcgttccctttcctgtgattgaagctcactactagccttaactgaataaccatgatatgaccatatacttaaggaatttaggagctggggaatagtattgggaataagtatgggggtaatatgttgcattggacaacttgctatgcttgctatgactaatgatgcatgcatagccatacttgatatacgttgtatattgcatatatgttggacatgctgaatg

SEQ ID NO: 287768 - DNA, 407 bp, Glycine max
tgcatatggaattgcgatagctcctctccatcattaggatttgtttttgccatctcaaacaaacaaatcaaacgtatcaagacaattatagttgttgtttgaatacctgacccactcaagtgtatcacacaattatggattttctctaatgaaacactcttgccttttaccactctaattccccttcagttcttatgcaattcaagagattatggccacagcaaagaacaattcaccaatatgtgtaaggtaaggctggatagacaaggataaggtttaccaagaaaaacgctatcaatgtttttatgcacacgtgagggagataaaattcataattcaagaattcaagtaacaatccttcatgcaaccaatatattatcttagagagattattatttaatagtctt

SEQ ID NO: 287769 - DNA, 302 bp, Glycine max
gctttatatttaagttgagagaaacaccatgtaaatacagataaaatgaaaacactttaattccacatctacactttctgaattcatgtataacattactaacaaaatatatatatatatatatattgatagtgaatatttattgtataatttaaatttataaaaatattttatgcattagatcatggttttataaaataaattatttgttttacaatctgggatgtgaaagtagatttcctatcatgtctaatagaatcatgtttttagagggtcaatgtagataagcacatatatggacg

SEQ ID NO: 287770 - DNA, 480 bp, Glycine max
  unsure (1)..(480): unsure at all n locations
tgtaggattatggngtacccatcacatgtggtactaggtggcgttctggcgatggtgcacaacaagttttccacatgcacaatgcgcgcataaacccaccatccgctgttgcccacctgcaactgagctcacgtactcccacgtagcccatatcctcgttgctctcaacaccgggtccccatcaatcctcccaagcttccacaacatccaagcaaaacaacattcaaacagcacaagctatcacagccaagcgaaacagagcaaaggcagaaaactctgccaaaacaccaaccaaatcacaactgttctcacttagagaccccagtaacaattccttcgatccaattcgttaaccgttggatcgactccaaaattgtactggaagtctatagtacatgaacctacattgtgaccgttgggatctactagcatacatacagaactcattctggactactctttgcacagccaaccacacac

SEQ ID NO: 287771 - DNA, 191 bp, Glycine max
gtatcgtactatgacgtgaaatatcctgtataatctattgacatgatagattgatgtgttctctgtgctatcatgatgtcagtcaagtgtgttctggccttgatcacgtagccgcatgctttacttcgaacgatcaattgagaatataggtctgattcgtacatattgatatgagcaggcgagtatttccc

SEQ ID NO: 287772 - DNA, 412 bp, Glycine max
tgtagaatggctagacatgatacatgtcagggtttggtttggttttggataaaagggatgccccacattatttccatgacacaaatgcaaaaatgatgatttggaaactttacgcaaaactggtcatgcatgcacctatgcggacactcaagtgtcaaatttttatggccatgtgatgctagggctcaggattcgtttcctctattctaatcaacccaatgtttccaaaatatgttcttttatcaattcgtgcattcatccgagttcatttcgggcgtccggtgaaatttcacagcattcacccttcatgtgtagacacatattccacaaattggttatgatcaatgaactttttcaaagacaatgtggaaatcgtctcttttcaaaagcatgttggttttcagcttaacaa

SEQ ID NO: 287773 - DNA, 387 bp, Glycine max
tgtttgcttatgtctttgagaagcgggagaccggaagacgccatggagcgatgatatacgaagaccctctcccgtcgactagtgctccggaaggaaacatcaagatcgacgggacattcctcatggatgtaaggggggttatgaacaacgcctgtgatcccgttgctgatagatatattcccacatctagcgatacatgagtctgcatcatctcttcccacgccttgagaggaaaccgaggacgatcatctgaccccataggagaattcgacatctcgggcagcacaacctgctacatgtgacctccatgccctgataccaaatttagtcggattaagagcccattgtgcatctgccgcctgaatgccatggccgaagactacaagg

SEQ ID NO: 287774 - DNA, 473 bp, Glycine max
  unsure (1)..(473): unsure at all n locations
tgcgcatactgcgtcaccaacacacagctggcttcgagacttcttagacgatagaacacagcaccgctattctatgtncagcaccttgcgcaccatacatgcgttacctgtacctcaactgtgaatcgagttcatacatccccctactatcccattgcttatgttgtatacatgctccttctacaaactttgaattgcgcttattccatgcccacgcttaataggattactaatgcacataccttctcacccctcatgacaaagcattggcttaaatctatgcctatacacgaatctaaataacaccttaatgtgcttactgagatgtgatactatgtcattgcccacatgccaaagcctaggcaaaactcataatataattgcaagataattatactgaccataggttgtgacggtgggtatataggggaaaacgcgcttaatcactctcaccgttctttcccaaccatgcg

SEQ ID NO: 287775 - DNA, 372 bp, Glycine max
  unsure (1)..(372): unsure at all n locations
tagctttgagtgtgccgactgaagccaaacaagcaacgtttggtcatgcactcaggattaacacgatccatgattcgatcatcttctgtgagaaattgacgcggaatgactggattaaccacaaacctctgcaacttatgcgatttaatgactggttcaacgtgttgtcgccagtgtagatagttggaatcatccaatttctcagctatcgttgtcggaaatgaatgcgaactgaaaccttgagatgacgaagccatgtatgtgaaggtgcagctcgataaactgaagagaggagcttttatgaagtaacaagctntgataccatatcanaattagagaactaagtgaacaaagagaataagagaaaacatt

SEQ ID NO: 287776 - DNA, 460 bp, Glycine max
  unsure (1)..(460): unsure at all n locations
tagaacagtatacttggccttcatttaactgtctttggtgtcttgttggccacgctcaacaaagtactttcgacacctactgtacattgatttcaccaatgctgttatgggaatgttgcgacaatcctttaaaaccttattgatacattctgagaggttcgttgtcatgtgaccatatcgacgtccttctctatcgtaagccatcgtccatttttcctttgagatgcgatcaatccatgttgctatggctggactcagttcacgaaatttttctaaattttgataaaaaatgtgcttgcaaggagtgtatgctgcataaaattagttatgaataacaattctaagtataaatgaaagtaaaataaacgtgaccatcatatatgaaatcgtacccaatttcttcaacatttctgtntgtttggcattattgaatatttgattgaagttgcttgctatgtgt

SEQ ID NO: 287777 - DNA, 393 bp, Glycine max
agcttaccactataggaagccatggataagagcatgaaggtaggagaagatgagtggagggagaaggagaaaaggagcacgaaattttatgcctcaattgaagtctaaaatttgaagtgtaattctctaataatcaaagttgaaaaaaagcacacacatggcatctatttatagcctaagtgtcacaaaattggaggaaaatttgaatttctattcaaatttcacttgaatttgaaattgaatttgtggagccaaaattttactaattatgattagtgaattttagctatgtttcaacccactaatccaagatcaagtccaagattcctcactaagtgtgcttaagtgtcatgtggcatctaaagcatgaaggacatgcacaaagtgtgacta

SEQ ID NO: 287778 - DNA, 362 bp, Glycine max
tagacgcactaatttaccatacgcacagataccaaagatatttccgtccatacctaccatagctaacactgaaccatatatgatgcgtacaacttctgaagaacactcagtgctcatggaaactcaagagtaaaacatagctaaaataccactgcaatcaaagtacataatgaggacattcactcactatattaaaagctcaactgctactataccatgcccatgctaaaattaaagataaaagataagatcttttttctacaattttcacagaatctggctaaacaaaaccatatgcaagataatagaagttaccctaatggcactatggtgtgtaacaacgcgtacaatgcgagcacctc

SEQ ID NO: 287779 - DNA, 396 bp, Glycine max
agcttgacccttacgagtcagtttagtcaaaggtaaagctaacttggagaaaccttctatgaatctctgcgagtatcctgccaaacccagaaaactcctaatctctaaaacagatttgggactctcccactcaagaacgacttctatcttagatggatctacagctatgcccccttgagatatcacatgccctaggaaactaactttctctaaccgaaactcacacttggacaacttagcatagagttgtcgatccctaagtgtatgcagcacaatcctcagatgttcttcatgttcctctctagtcttggagtataccaaaatatcatctatgaataccaccacaaaactatcaaggtaagggtgaaagactctattcatgtagtccataaacac

SEQ ID NO: 287780 - DNA, 426 bp, Glycine max
ttgtgtaatcgattacacttatttggtaatcgattaccagtgactgtttctgataaatcaaaagatgtaactcttcaaaaaggtttttgactttttcaaattgttttttgacttcttcagaaagtctaaccacttcaagattcgtggcctcttcaaatcccttgtttcctgaaggaaattccattcacagaccacccattttcaatggtgagggttaccattattggaaaacccgtatgcagatattcattgaagccatagatctacatatttgggaagcaatagaaataggaccacacatacccactgtagtagatgtaagcacaagcactacaacccataaacctagagataagtggacagaagaagataggagaagaatccagtagtcaattacatgggatatcatcccaggaacaatttcag

SEQ ID NO: 287781 - DNA, 408 bp, Glycine max
  unsure (1)..(408): unsure at all n locations
agcttattattggacatttgaatgaaatgaattttgtcaaaattttgttaaagagctaccagttaaattacgaaaaaattataatatattatttttttgtaaaattagccatgagagttgaaagatctaaacgagaactttatatatccatctttatgagtgaaatttcttcaaatcttgaataaatgaacaaaagaagtaggcaatataataagctataaagaaaggaacaaacctctattcttggaattggatgaccgtgagttgtgatttgtctttacttgtcactattccaaatcgtaagcaataaactgaatgtgagaaataaagagcagattttggaagaaagcaganatatgttggcaagctaaacatgatttaaggatatggatggcgtactactagtcc

SEQ ID NO: 287782 - DNA, 383 bp, Glycine max
  unsure (1)..(383): unsure at all n locations
ntacaaagcagcagcttcaaaacgagcgaagtattcataaaggagtatgctgagttgcaaatataaagaagaaaagagatgggaaaaaagagtacttgctgacaaacaggagctttcctcattcttagttcgtctcacaacaaaggtaagatccttaatatccttatcggttacttgcgcccagtgttttaatttatccattgctgaaatgaatgcctgtaaataaatatatttgcatgataccaatatgtctgttcctaactctttttttttttttaattatcaatttgatacccaatatatattaaaagatcttggcttgtgcgtgctgtttggatgggttaaagtggtgatgatggagtttgagcagtgacgttgggggc

SEQ ID NO: 287783 - DNA, 414 bp, Glycine max
agcttaaacattcactttcgagcctctcgatatgttacgggactcaatcaaacatccgagaaaaaagttattgtcgtttgaatttgctcagaggttcaacattcaatttcgagcgtctcgatatattacgggactcaatcagatatccgagtaaaacgttattgtcgtttgaattggctcagaggttcaacattcattttcgagcgtctcgatatgttatgggactcaatcagacatcccagtaaaaagctattgtcgtttgaatttggtcagagattcaacattcaatctcgaacgtctcgatatattacgggactcaatcagacatccgagtaagaagttattggtcgttgaattggctcagagcttcaacattcaatttcgagcgtctcgatatatgacgggactcaatca

SEQ ID NO: 287784 - DNA, 422 bp, Glycine max
  unsure (1)..(422): unsure at all n locations
ctgagccaattcagacgacaacaactttntgctcagatatctgattgtgtccagtaatataacgagacgctcgaaattgaatgttgaagctcttagcaaattcaaacatcattaagtatttactcggatgtttgattttgtcccgtcatatatcgagacgctcgaaattgaatgttgaacctttgagccaattaaaacgacaataactttttactcggatgtctgattgagtcccgtcatatatcgagacgctcgaaattgaatgttgaagctcagagccaattcaaacgacaataactttctactcggatgtctgattgagtcccgtaatatatcgagacgctcgagattgaatggtgaacctctgagccaattcaaacgacaataactgtttactcagatgtcggatgggtccgcgtata

SEQ ID NO: 287785 - DNA, 333 bp, Glycine max
  unsure (1)..(333): unsure at all n locations
agcttgaactatatctagtgagagtgtgaacttaaactgtgagtgaacgactaactgtgagtaatgatctttgcatgaatctctaaattttagaatgaaatgtataaatgatgacatgatgaaggccatgattgtacatacacaagctcttttgaccaaatagcttaccttaaatgataattgcatcctttgctccctttttgagctgaatgatattgtcaaaaaaaaatttgaaccctgaacttaaataaatatctcctgataccttgcttcgattctaggagagcatatggtntaagacaatttactctaaatttgggggaggaaagtcaa

SEQ ID NO: 287786 - DNA, 448 bp, Glycine max
  unsure (1)..(448): unsure at all n locations
tcagcttcaagctnttatcttagattaggaatattgtgtaatggtcctttgttgggcttttgtgatttcttctattattgtgtaactagaaccttgtcggacgaggaatggtgaattttctgtagagtaagcttatgagtctctcagtctctcaagccttttaatgcacagcctactcacccagtttttagtgatagtcactggtggaaaggagccaagagaattcaaggatttctttggcgggtaagtcacaaaggccgcttacaaatgctagaagattgagattgggattatctaaaagtgatttgtgcattgtgtgtgaatcccatagtgaaagtctcatatgacaccaattcggaaccatactttggttggtcaaaacttggagctgttcttttgattacatgattggcttgaatggattcactataacttccagaatgttgcc

SEQ ID NO: 287787 - DNA, 368 bp, Glycine max
agcttattgataaaatacttacttgatggtgatgaacaaaagcacgaaacggaatcaaaaaatacgaaaaatgatgaccctagggctgccaactcgtaaatcccgtgggtatggcttttgaaaggggggaaaagaggtttttgaatgcaaaaacgtcccccctttcgtcattcttataattcgatgcacggatggctcgcccaggcgagctaacctgcattttttttttgagaggaacattaaccatgtcccctccttccttatgatttaacgtcttgcttaacttgaacttacttaagttagagttaggcgttgattacttatttttaaaacaaacaaatagtaagacaactgcgaatacaaaggat

SEQ ID NO: 287788 - DNA, 425 bp, Glycine max
  unsure (1)..(425): unsure at all n locations
tctccncttatttgctataaatagggggagaagtgaagattattatggttcaaccccttaggcacttctctctctttcgaatttgctgaggaaaattatttccgtgaagaaaatccaagccgaggcgcttccgtaacgtttccgtgagtaattatgcgaagattctcgaccgttcttcaaagattcatcgttcgttcttcgttttcttcagtcttcaacgggtaagtacctcaaaccaagcttttcaattcactctatctacccgtggtggtccacattntgtttcatgtatttttattctcgttttcatttactttntatacccccttttgacgtgcttaagccgtttatttaagtcatttctcgcttaatctaaaaaataaaataaatttccaccgatcgtttgaatcgcatcatcccgtaat

SEQ ID NO: 287789 - DNA, 89 bp, Glycine max
  unsure (1)..(89): unsure at all n locations
aaaaccacctggacccccccccagcaggtgatgatacgagcagccancagccgaccgggacccaaagcgaccgagcagcaaccaaacat

SEQ ID NO: 287790 - DNA, 584 bp, Glycine max
  unsure (1)..(584): unsure at all n locations
acacgactacaaccaganagagccggtancaaccgatctcaatataatttacanaanacaagagtggtttgatgcntcctggacnacggacctataaaactcagcgtgagacagagctctcttcttgatcctctcacaagctcattggatataccccacattcacttacgaacgccgtgttgcaaaagcaacgcaggtatcactatcaacggtgatgttactttcacgtagcacataatactgatctaccatcattcacataatatcaatcaacagcactcctttcctacctcctattacctcccgctatatcatcggaatcaacggatcacacatctacangcgagacgatgagaacgaatcattatgtgaagaataacaaaacagattcctaagtactatgaaatcaatgccagaaagacacacaccttgtcatcgcttataccaatctgccaagtaccaaggccaagcgtgattgaccaaatagatatagcgaccatctagatgcttatcctctcttacccagaacaaataccgacacaatactaatgacagtaacgacactccgaaacagagatcgatcg

SEQ ID NO: 287791 - DNA, 421 bp, Glycine max
agcttaacgcttatttccttacgaacgctctcttgcacaagacatttatctaagaaaaatgcacccatatacaatcaaggcagcttcgttacctatattatttacacgtacttccaaggtgtatctgttacttacatcacacacatctacttggctaaatttacatacatgcatactcaaagcatattggggtacccaaaattgcacatgtgcacatcatcgcatttcaaatacctatacatacacaaacttcatgatgaatcttgactatctacacaataaggtgctacattccatgcttctttcaagtcttcgctacctaaacccgcatgcaaattcaagcatattaacctttgctgactaaaatagttttcacattagagggtctacatttttttggatgtatttctttactaacatg

SEQ ID NO: 287792 - DNA, 399 bp, Glycine max
  unsure (1)..(399): unsure at all n locations
agctttccttttgctcccttcctcacttataccctcacatgtttctccctctttaacattttcttacttctggttaatagatcttcttcacgcaaagagatcgtaaccttactctcaccaatttccagcaccctaacaccgctcatttttactatgcatcacatttgttttttttgttatcttgtacttactcatggatgtaagggttactcatggatgtaaggagtcaggtaaattcgctatttaaatgattataaccctccatcaatgtaattttgggcctctactggcttattccttaacctttgtatgcattaaggctcaaggaatccatgcatatcaccaagccctaactgttgacttatttaatccatatancctaaatgtggaaatattaat

SEQ ID NO: 287793 - DNA, 437 bp, Glycine max
  unsure (1)..(437): unsure at all n locations
ntcaatagcaacagtccattntcccttgactgagatgaaatcaccatcttccaattttactttggaaacaatggttttgtcaagttctttaaagaggttcaggtcattggttatatggtttgtgcagccgctgtctattaaccatgaatcactggaactattgcttgtggcaaagcatgttgtgacaaagagttgctcatcttcttgttcctccacaaccacctttgcttcctttgatttgaacttgcatattcgctctacatgtcccatattgccacaatttccgcacttgacatctggcctccaccaacattttctttcaggatgatttgtctttntgcaatgcggacaaggaggaaaggtctcaccttgctgcttgttggagccttctagcttattgttcctccattagttgttcttcttgtctttgccacctc

SEQ ID NO: 287794 - DNA, 175 bp, Glycine max
tagctttgagcttattcacacgacactaatgtgttgctcggatgtctgattgagacccgtaatacatggagacgctcgacattgaatgatgaagctctgagcctagttccacgacgataactctttactcggatgtctggttcagtcccatacttcattcggacgctcgcaattg

SEQ ID NO: 287795 - DNA, 411 bp, Glycine max
  unsure (1)..(411): unsure at all n locations
tcagaattcaatttcgagcgtctcgatgtattacgagactcaattattacactccgagtnaaaaagttatttgtcgatgtgaatttggttgagagcttcaacattgcaatttcaagcgtcttgatatattacggaactcaatcagacatccaagtaaaaagttattgtcgattgaattatgtctcagcgtcataattctatttcgagcgtctcaatagattacgggactgaatcagacatccgagcaaaacattattgtcgtttgaattatctcagaccttcagaattcaatttcgatcgtctcgatatattactggtctcaatcaaacatctgaggaaaaaagttattgtcatttgaattcgctgagagcttcaacattcaatttggagcgtttggatgtattacgggac

SEQ ID NO: 287796 - DNA, 380 bp, Glycine max
  unsure (1)..(380): unsure at all n locations
ttcttatccttaacacatatccaacttattacatcacaacagattaattattaatatctaaatttagtttctgttataattttaattaaaatatttaattacataattagtgaaaaacacggagctataatcttttcatcatgattttctttaatctttgatatttttttttcaatttttatgcttttcattattattcagtctatcctatttttctttatttaatatcttccttgataatcttacatcctttataatttatactctatcatttttatatctaaatagaatcataataatttgtttaacaaaaaaattcttatattataactcacaagctantatgtgaaagatgaatacaaaatataatgtatgtattc

SEQ ID NO: 287797 - DNA, 205 bp, Glycine max
  unsure (1)..(205): unsure at all n locations
ntaattaagtgtatcacttttgttattatcatcatgcctttgttttgttaacttgaagttattttttttttttaaatacctgaggtcaatatccaagatatactaaattactaatatagatatacccaaacacacatgaagctatctgatttgttcactcagtttgtcccccctgttatggatgcataatagagggggggagggg

SEQ ID NO: 287798 - DNA, 392 bp, Glycine max
agcttcctctttaagcttcttatccaagccactctcttggtggtgaagcttctccttccatgacttattctctagcggatgacgtctcctctaacctcttctcctttatctttcgctgcaattccatggctaataatcaccattgaaggaccttattgaagctcaaagatccagcctccatagaagcttcataagcaagcttccaacaagtggtatcagagcacaagagcttcaagtaggtgctccttaaacctccactaattttcagctttactttctcctccattgttgttgcttcgtttctctccatgtatctcctcacgtgtcttgtgctgaatgttgtaacataatttttagaagttccaccgattagcttgctataaagctagatt

SEQ ID NO: 287799 - DNA, 394 bp, Glycine max
tgtcaaagctgacaatatcttcagatatgtggacaccgggaatctaatactgacttcccagtaggttcaaacgtgactcaggtgtttgttgatcaactaccgtgactaaacacccttggcatagctttggctcgcatagattttgcaccatagggtttgaacgctccccacactcaccctcgcggcactgagatccttatagtccttgagggtactctttatgttggatttgtgacttccaatcaagatggaaatcgcctcttcaccaaagtgctgaacaagggtgatgtgtttgtgttcccaattggtctgattcatttccaaatgaatatgggaaatgggaatgctgttgccattgctggccttagcagtcaaaatccaggagctatcacta

SEQ ID NO: 287800 - DNA, 398 bp, Glycine max
  unsure (1)..(398): unsure at all n locations
agcttgtagtttattcgaacgacaataacatttcactcggaagtccgattgagtcccgtaatatatcgagacgctcgaactttaaaaccgaagctcgtagcagatttgaacgacaatgacatttcactcggaagtcctattgagtcccgtaatatatcgagacgctcgaaatttagaatcgaagctcgtagaaaatacgaacaacagtaacttttcactcggaagtccgattgagtcccgtaatatatcgagacactcaaaatttaaaacccaagctctcaganacttctaacgacaataacttttcactcggaaggccgattgagtcccgtaatatatcgagacgctcgaaatttaaaaccgaagctcgtagcaaattcgaacgacaataacatttc

SEQ ID NO: 287801 - DNA, 468 bp, Glycine max
  unsure (1)..(468): unsure at all n locations
ntggttntaaatttcgagcgtctcgatatattacgggactcaatcggtcttccgagtgaaaagttattgtcgttagaattagctgcgagcttcggttttaaatttcgagcgtctcgatatattacgggactcaatcggacttccgagtgaaatgttattgtcgttcgaatttgctacgagcttcggttttaaatttcgagcgtctcgatatgttacgggactcagtcggacttccgagtgaaatgttattgtcgttagcatttgctgtgagcttcggttttaaaattcgagcgtcacgatatattacgggactcaatcagacttccgagtgaaatgttattgtcgttagcatatgctgcgagcttcggtattaatatttgagcgtcttgatatattacgaggactcatcggacttccgagtgaaatgtattgtcggtcaaattgctcgagcttcggtttaattcgagc

SEQ ID NO: 287802 - DNA, 432 bp, Glycine max
agctttcaatgtttataaaaaccaaaaaactttggaaagcttttggcaaaaggaagaagaagaagaagttcaaagagactcagaaatcaatgtggaaaacttgcttgtgaaaagaatgaattggaaaagattgattgatagaatgaatgaatgaaaatgcaaaacaaagtcttgcttttatagactcttcatgtcttgtcaagaagaccatttagaagagttataaattttagaaaaacttaaaactaatttgaaaaagtcaaaaaccttttgaatagttacatcttttgatttattcagaaacaatcactggtaatcgattaccaaatcactgtaatcgattacacaaggcttttatgtgaaaggatgtgactcttcacattcgaatttgaatttcaatgttcaaaggcactggtaatcgattacaaaaac

SEQ ID NO: 287803 - DNA, 421 bp, Glycine max
  unsure (1)..(421): unsure at all n locations
ntaatggcttagtgaggatggagaggtgcaagtaaggaagcaagtagagttggatatttccattggaaagtacaatgataaggtgctntgtgatgttgttcctatggaggccagccacttactcttgtggagaccatggcaatttgataagagggctaatcatgatggtttcaccaacaagatctctttcacgcatcaaggcaaaaagatagtgctcaaaccgttgagtccacaagaagtgtgtgaagatcaaagaanaatgagagagaaaattcttcaagaaaagagagaataagannaagagagccaaacacttgagagttcataaagtgaggacaaaaagagggaaacacaagagaggaaaaagatgagtgaaacatttgaagtgagggagaattntctagctacaaaaggagagatc

SEQ ID NO: 287804 - DNA, 405 bp, Glycine max
  unsure (1)..(405): unsure at all n locations
agcttctttgagataacttcattgagaagctagagcttagctacacatccctctaataactaagctcacctccttgagaagcttccttgagaagattcataaagaagctagagtttagctacacacacctctctaatagctaagctcacctccttgagatgagaagctagagcttagctacacaccccctataatagctaagctcacccccattccaaaaatacatgaaaatacaaaaaaaagtccctactacaaagactactcaaaatgccctgaaatacaaggctaaaaccctatactactagaatggccaaaatacaaggcccaaaagaaggaanaacctattctaatatttacaaagaagagtggatccaaccttgacccatgggctcaaaaatctaccct

SEQ ID NO: 287805 - DNA, 459 bp, Glycine max
  unsure (1)..(459): unsure at all n locations
gtangattatggngtacccatcacatgtggtactaggtggcggtcgggcgatggtgcacaacaagttttccacatccacaatgcgcgcataaacccaccatcccttgttgcccacctccaactgagctcacgtactcccacgtagcccatatcctcgtttctctcaacaccgggtccccatcaatcctccgaagcttcccccaacatcaaagcaaaactgcattcaaaccgcacaagctatcacatccaagcaaaacagagcaaaggcagaaaactctgccaaaacaccaaccaaatcacagcttttctcacttaaagaccccagtaacaattccttcgatccaattcgttaaccgttggatcgactcgaaaattttactgganatctttcgtacttaaacctgcattttgaccgttgggatctactagcanacatccagaactcattctacattactc

SEQ ID NO: 287806 - DNA, 292 bp, Glycine max
  unsure (1)..(292): unsure at all n locations
agcttcaacattcttagtctttacctgcttaactaacactttactcttcacgccaaagttaatctagaattgtgaccttttgttagttctttcaccttttcattttaatagttaatatgctttattctgtttctcagatagatcaactagtcgccagatccaaagaaagtataagaagatcgttcataacaagccatatgtatatgtgttaaggttttctttccagttttgcagtctgtctttttctttctcaagcttgtgaatcaagtntgttctgtgcgactatgtacta

SEQ ID NO: 287807 - DNA, 446 bp, Glycine max
  unsure (1)..(446): unsure at all n locations
ttcttttcttcactggttcttgttatacaatttgcactattntataattatagaaaacagtacgtgagagatcaaagtcagattccaaggtggccatgctaataattgaaacatttaagtacttaacaccttagcaaacatgaccagaaaagggctttgatttaaattcttttcatgccatattttaagtgattttccctaacttgcaatatgccccgagaacccccttatatgaattctacttcttaatcctatcatattntgagttgttttaaacttctatttttcttattaaataatgtaatggtgcagcctanaaaggtaatgtcgtttgaggacgcanagcaaagagcatgccagtggaaaaaggcaattgaaggactccaaaaccggtgaatttattctggttttgtgaacatattcttttagatatcctcttattgttc

SEQ ID NO: 287808 - DNA, 397 bp, Glycine max
agcttgtccgttggatgcctacccattacccattagaaatagactagtagatagggcagcaagaccctgcctacttagcttcttagatgcatactcagggtacaaccaaatacggatgcatccacaagatgaggagaaaacaaacttcataacctagtcgtctaactattgctatcagattatgccattcggcctaaaaaaggctagctccacttaccagcacctaatggacatgatattcaaagaacaaattggaaagaaaatggaggtatatgttgacaacatggtggtaaagtctaatgatgcagaatcacacacctatgactcggaagatatatttgcaaagatctgaaagcataacatgtaactcaattcgaagaagtgtatgtttggggta

SEQ ID NO: 287809 - DNA, 158 bp, Glycine max
  unsure (1)..(158): unsure at all n locations
gttgaacaatgaactattcttggaagagaaagtattgaacattttctctctataaagatgaacaacaatgaatgatcaagttctgtatgtctcgntttgtaaacaagttgttattgaaattcatgccatggtcacatatttatactcaattgatgact

SEQ ID NO: 287810 - DNA, 400 bp, Glycine max
  unsure (1)..(400): unsure at all n locations
agcttttcgattcattctatgtacccgtagtggtccacattgtgtttcgtgcattattattctcgttttgtttactttttataccccctcttgacgtgcttaagccattttacttaagtcatttctcgcttaacttaaaaataaaataaattttcaccgaacgtttgaattgtattatccgttaacttcggttaaaataaattccgaccgttcggtcatgccgtaaccacgttggaaatcaaaangaggtcttctaatacatatatatctatctcncnnngacatcttttagtaaaataaagcggaaaatcaatcggacattttctctttgggatttctcattcttaatcgaattgattaataactaaagtgaaactaatgctaaaatcaactcgcctag

SEQ ID NO: 287811 - DNA, 382 bp, Glycine max
agcttgttatatgcacaattaaggtacacacttttgatattcttttgctcagacttggcacactattccagagcgcctatttcgggaaaaaagccctagaagcagtaagaggagcagcttgagcattgaagcctatgttttggaatttgtgagagattactgagctggatagtgagtgtgagatgttgagaagaggaggacgaatcccccatcttgtgtaaggaactatcattctctgcttttagtctcatttattgatacggttgctttgtaatggctggctaaacaccctagttggggatctatgatgaacaactgatgtcaatacttactatctaactgagtatatattgtgagtgcagtgcttcctctcatgcttaat

SEQ ID NO: 287812 - DNA, 463 bp, Glycine max
tgagctatcagaagacttgcttattcatttagttctaatttatctaccttcatagcttagtcagcttaagatctcttataacggtcggaaggagaaatggtctcttaatgagttcatttcatactgcgtgcaagaagaggaaagactaaagtaagaaacgactgaaagtgctcatgttgtgagtacctctaaagacaagggcaaaagataaaggactgatgagcccaacaatgaagctgcttagggtctaggacaaaatataaaaaatcaaggtgacaactatttcttttgcagtaagcctggacatgtctagaagcaatgtaaatgtaccatatatcatgcttggcgtgcaaagagaggtatgtttcttactatggtatgatctgaggtcaatttaccttcagtacctacaaacacttggcggtagactctggtgccctactaacatcagcgtttcaatgca

SEQ ID NO: 287813 - DNA, 203 bp, Glycine max
gcctcgctcgtttcattattcctagctataatagagtgctgcactgaaacatattctatctatctatgcagagtaatgcccatgaccatagccctataacgacttgtgggaatgcttggactctacctagtacctacagcacactgcctactgacctgctaaccatataaagcagaccttccattggtcgaacataccatgca

SEQ ID NO: 287814 - DNA, 410 bp, Glycine max
  unsure (1)..(410): unsure at all n locations
tataaaactaagcctgctccctaggcaggaccatcaaccatctagcaattcttcattccatgttagcttcctttctccctttctttcttatacatagtcttatggtgtacccctggccatctttgattttccttttatctgcacccctggcttctgtatttggacctctggtttgtgttctctgttaactgccccttgttcctcagcttttgtaccagtattacgtatggtggtataaaaattacaacaaagggagcataatgtagaatgttcttattatgtcgtagttttgaactgcataaagagctttcntaagagtgtatattatgctaatgaaaaacgatacgttcactgcacattcaaaaatcatttatgttaatctctaagtatgcattataatattcataatt

SEQ ID NO: 287815 - DNA, 380 bp, Glycine max
  unsure (1)..(380): unsure at all n locations
ttatcttagatcttccatgcccagctgataatgtcaatcctgatactgctagaggatctggtccccacaaagacaaatttcacagttacctaggggtggtggctagagatgaaataccaattgtccactccaattggaatcttgtctcggacaatctaaagaacctaatttacgaagacattttggtaagtccttttaatacggtgtatctttatcattgcctttataacacatttttacatcactaattaagttggtgttatttaacacatttgttgtatagcagaaatntgacatccctgaacgtgacaatgcgaaacaaaaaggtcatgtctatagtggcaactacatggaggcaatttaagtcttcgttgacatct

SEQ ID NO: 287816 - DNA, 475 bp, Glycine max
  unsure (1)..(475): unsure at all n locations
ntgtctttcttagtactcataattctacattaattatttttcttgatgcatgattaacaaaactttaacatgcagaattgataagaggtaaatgtcattgcaacaatactatgtggtacattcttagtatgatcacccctgcagaaccataaagattgtgaataacaagtcaacatcacttagtgccatggcaatggtaaagccaattacgccatttccttaggcctcccacaaagctcttaattctatatatatttataaaaaaataaatcaaatttaaattatcaggtaatatattctattgcattatctattattatttgcgtagccagattataaaattttaattacacatagatatattataaatcatttgagaagtttataattcatttgacaattatagaaaaattagtttccatctactttaaatcttgtaaaatcacacttaatgaatataatgattcaatttata

SEQ ID NO: 287817 - DNA, 383 bp, Glycine max
  unsure (1)..(383): unsure at all n locations
tagcttggtgatctttgctgctggttaacactgagcttgcccaccctaccattactaagcatttcactgctaatagaagatgcaatggatagctttttcttgcatggtgaatagctatcaaagttcatgtccacattccccccagtccttatttttggggagcttgttgatcttgcttttgcttttgctgattctgttgcaaccatgtatgctgganttgcatgatagcttaattatgagtggtcctctcccactgaacactgcctcctatgaggaaaagatcttcttgaaccaagtattggagaatccaatccttcaactggattttgcctctgaatattacttctcagcttaagttgccttcctccatattcctccccaac

SEQ ID NO: 287818 - DNA, 458 bp, Glycine max
  unsure (1)..(458): unsure at all n locations
tagcattagcatgtgttgacactggatcactaatcattgtgtacgtgtttgttactttagtggatcctatcaaagaacctccgcttataactacaaacatagttctgtctgtttttgttgtgtattgtcatgtggacaaagttccatgccatgtttgagacatctaagattggcgtcttgcctttgcccagtattattttttgcaacatcttcctttcttaaccttgtcattacctcgaaattntaatatggcaacttactcttgtggaaaataatttttaagaattaatataacactttaaaattaaatttagaatattaaaaaaatataaaacatagatataattctttaggtgctattgatacttttctcctgttagaattaaaatcgtacttcagtaatccacataataaagatatacatcataaaattacatcaattatcatagtgaaactct

SEQ ID NO: 287819 - DNA, 425 bp, Glycine max
  unsure (1)..(425): unsure at all n locations
agcttttcaattaatctttggctagctacattagtgcaattacccctatcaataatcaaagagcatattttccccatgaccatgcacctagaatgaaaaatgttctccctttaagtttcatctctatccttacacacattacccattaacctcctaaccataaaaagatcaccttccaggggttgtacatcacattcattttcactctcactagaagaactagaccagctagaagaagataaactaatgatatccccattacccaacacaaccatagtccttttgctaggacattgngaggcattatgaccctttcccaaacacttanaacatttaatagaacttacttttgaagaagtaggagtagggttagaaccacaccatactacgagagaggttccctcttttaccatttttaatatccc

SEQ ID NO: 287820 - DNA, 480 bp, Glycine max
  unsure (1)..(480): unsure at all n locations
tcaatgatntaacaatngactnggtagaattgcccacgtcatggttgtcatgcactgccgcattgccacgtggaatgttgaaacttgaaatttattatgaaaatattgtaccctataataacagcgtatgctaattgaattgtttaaaattaaattttgattgtttatataaaaaattatcattacaaatttttaaatttaaatccattcaaaataaaaataaaaaattactcaaaaaactaaaatttaaaataaattatttcttttttatttttaaaatcaaaccaaatcgtaacacttatattaatatttattattttaattntatgtgtgtattattntaattttataatattnttatgatattatgtatatgaaatttatataatatatatttttttcaaataactttctaaagatatanntttatttanatagatgaaaatttacatatctntatcatanaagggttaatatatt

SEQ ID NO: 287821 - DNA, 309 bp, Glycine max
agtttcatgtttattcaagattgattcaaagaagttctaatgattacaaatgtgatgacaaaaagctcacaggttaataacacttcatgataacaaagatgatgatctcaagaatcaaagaatgagttcaagatgttcaagattgaatcaagaacatttcaaggttcaagaggaaatttgatttctagattcaagaatcaagagaagacttagtcaagataagtatgaaaacatgttttcaaaaactgagtaacacatggattattctcaaaacctggttaccaaagagtttttactctctggtaatcg

SEQ ID NO: 287822 - DNA, 438 bp, Glycine max
  unsure (1)..(438): unsure at all n locations
tctcttagaccttaggcaaaccttcaactcatccttttttatttttctgtctacttgagataggtccatttcctctctccggagcttaaactcgctgctactgccccacaaagcccctcggaatttgtttcggccatgttcttccctacgagcccttttggtctcttgttccaaggccttggtggtagctatatttacatctctcagttcggcattctcttttcggatcttaagagttgctgatttgaacctttctttgactatttgggcttgctcgagttctaccctaaggacctgcacctcttcgtcttccttcggtgcctcaacttcctcccctttagtggttctcaaactcgggagccaatccaaaccttgtatgtgggctntctaccacttacggtagccgtcgatgggcctgatgatactgcctctgagttc

SEQ ID NO: 287823 - DNA, 404 bp, Glycine max
agcttgaatttgaacaacagaagctctcgagaaattcaaatggtcataacttatcacacgaaagactgattcaggcgcataatatatcgagacgctcgaaattgaacaacggaagctctcgagaaattcaaatggtcataacttttcaaacggaagtccgattctggcgcataatatatcgagaagcttgaaattgaacaacagaagctctcgagaaattcaaatggtcataacttatcacacggaagtccgattcaggcgcataatatatcgagacgctcgaaattgcacaacggaagctctcgagaaattcaaatggtcataacttttcacacgaaagtccgattcaggtgcataatatatcgagaagctcgaaattgaacaacgaaagctctcgagaaatt

SEQ ID NO: 287824 - DNA, 439 bp, Glycine max
  unsure (1)..(439): unsure at all n locations
tctggatatattatgcacctgaatcttacttccgtttgaaaatctatgaccatttgaatttctcgagagattccgttgttcaattccaaccttctcgatatactatccgccggaatcggacttccgtgtgacaagttatgaccatttgaatttctcgagagcttccgttgttcaatttcgagcgtctcgatatattatgcgcttgaatcggacttccgtgtgataagttatgaccatttgaatttctcaactgcttccgttgttcaatttcaatcttctcgatatattatgcaccttaatcggactaccgtgtgaaaagttatgaccatttgaatttctcgagagcttccgttgttcaattccgaccttctcgatatactatgcgccggaatcggacctncatgtgacaagttatgaccatttgaagttctcgagagct

SEQ ID NO: 287825 - DNA, 382 bp, Glycine max
  unsure (1)..(382): unsure at all n locations
agcttcatactatgctttattaatggngggcggaaaggcaaatgtcagtgcctgctcaacaattaatccatttgatttctcatggaaagatctatctacatatattgtaaataatatctcccgttatagattttctaaggttaattcaacaatggaatcagctagcgcatgtgcattaaaaaggatttgatgctctgaaacctctattgcccaagaaaccatccttctcgccaaatcaagtcggtgaagaatttgtcgaatggactaatcaattcacaccattatccggtgtgattggaaatatagtcgtaagcgtcttgttgccattactaaagcanaaactaccttctctaatgatctttgaagttcgaccccctgaagt

SEQ ID NO: 287826 - DNA, 442 bp, Glycine max
tttctttcacaatcaatttgtctactgactaacaattttaaatgcatgttcacattcttgttctttcttagtctaacatacacacttgctcaaactcatgataagaaacacaaactccatcacaatcatgcacttaatttaaaataaaagcatataactattttcacaaaaagataaaaagtgttttactaccatgtcatcaaaaacaagtcaaactattcaaaatgcttcaggataagcaaactaactacccataaataaaactagcagtgtatgtagacctaaaggaaatattgtatgaaaaccaaaattgtaataataataataaatcaaaaagcaaaaagtattatcaggaatcaaaattcatgtgactggtcttggatatcctgtgcctgaacatcctccttatctgtcaaatgcaatactggagtagtcggaggag

SEQ ID NO: 287827 - DNA, 391 bp, Glycine max
  unsure (1)..(391): unsure at all n locations
agcttgagaatacagaatgttatggttgaaataagcaagataaatattggaagtttatctagataattacctgacttacatgtgtgattctaaatctaatcattatatgtagaagcttatctcagataaaccttcaatctctttttatgttctttagtgaggaactggtaaagattcaatgctttgatacaatctggtgagtgagtgtccgagggtagataattactgccatgtatttatgttactcttgcatatacaccactacactcagtctaatacacccttagcttanggtacaatanaagagtgattcctagttccttagtttttcgaanatatcttanattagcactaggaaaaanatactgtatggagatcttcatatcttatg

SEQ ID NO: 287828 - DNA, 433 bp, Glycine max
  unsure (1)..(433): unsure at all n locations
gtcggcagaactaacaatttccattaatcaatttattattatttacttgtccttagattggaatttttaaaataagatcaatgctttgaggaattattttatatttcataatgtggaagcatttaaacaaaattaaaattttattttgatgtgaattatagcaatgggatcaacacaaatgaattactgtaggacaagagaattagtcatttacattgcatgataaagaaaactagataaaataacaaacaaaatgctgttgataatacgaaagttcacgagaccagtgctactaatagttagtgggggtgtgtatgtttttccctaaaccctaaagacacataagatgtgtaacaaaccaactaagaccagtatagaacaagcagggctggtttaacagcatcaaataatctatcantaaaatgctattgct

SEQ ID NO: 287829 - DNA, 404 bp, Glycine max
agcttatctttcaactcctgaggattaggcctcaagagtgcaaatatggataatgtacactagttctccccctcctacaaaattattggggtctttaaaaacgtgtttaaagtatccttatcaaacttcactaagtgacctctcaccctcacctgcttagatgatttatcctcggggtcatagaggttggcataaaactccttcacaatagcaatgtctatggtattgttagaaaaatcagtcagcttctcatcccaatggcgtctctcgagttcctccttgaactcgtcaaactatgtgttatagactaccacattcctctctggtaatagctttcgaggcaccacaatgtcagtgtacctctcccaagcctcttatgatgtgaacctggatctatcaaatat

SEQ ID NO: 287830 - DNA, 435 bp, Glycine max
  unsure (1)..(435): unsure at all n locations
caaacaacttattgtaatcgattacaacaacttgttatcgattaataagaagttttttcctttaaagaaatttttctaacttagaaacttttcttcacacaaaccatggtgatgcacaatgcaatatagatatcaaatgtactaagattcaacaaccaagataacaaccaatacaaatgccactcaagggagctgagcatgtaaaagccaaaacttcttcaaacttttccttgagcttcaagctttagccttaggttgtttacaatgttgcttatgttgttccccctatctctaacatgggtggccatgggggaagttttgttgtggccctatggtggagctaaatgtacttactaaaatctggagcaggctaacgttaggtttgaccgtcgtctanatgggctccatgatttcctatgtcanactagcaagtat

SEQ ID NO: 287831 - DNA, 428 bp, Glycine max
  unsure (1)..(428): unsure at all n locations
ctcgagctcgcgcccgcgtgatactctacactgcacctgccgcattcagcttatataaatcttaanattcagatagtctaatgaaaaataaactttccacttgatatcgggtatcaagaattaaaatttaaatcacattaaaatgaaacttgagaaacaaaatatgaaagcaagaagtataaataagaaataaattgaatatttacctatatatgtgtaaatatttctgtaaaagatcaaaaatataatactttaatatatgggttaaaatatacaagaatgtatagcattggaacaattgtttaagttatttgatatgataaacatattgtttttactttctgtaaatcatgatccataacgttcatgttatgaatacccataacccagtgaaaacaatattttcatcgtattgcaagcagcgccaa

SEQ ID NO: 287832 - DNA, 441 bp, Glycine max
ctacgctttaaccgtcgtgttcaccgtacgtgcatatttctcattcgtctctgaaatatatcaggccattggagccatatacccttttcttaaaaaattaaaggaacagaagtccatgatagacacatgcatgtgtcaaaaatcattaattcgagcaaggatgtacactaataaaccctggaattctcaaatacaatattgacgcttgtattaaaagaaatatagtaccatatgtaactcttacgtgacaagtactaatttaggagaacgtatacgaaatcatcatttccaaagcctattgtacatatattatgtaccataacaaatgttagcattgcaactttctttcatctcaatccaaaatcgtgaaaggaaagtggggcatataatataatacatgagaaaaaaagtgtatagaggatgagaatgaaatctctgaaa

SEQ ID NO: 287833 - DNA, 404 bp, Glycine max
  unsure (1)..(404): unsure at all n locations
tctatcttgttttgtttacttcaaattattatcttctgcttcaaagcttcttcacgacattcttctctttcctttgcaatttttctcctgagatctgatatttcttctacatttgcttatgtttccttaactaacgaagcaattctcagctttagtttttcattctcctcaatgtaccaaaccatatcactcccctctgtagaaaatgttgttcacatcatcagacaatatcttctcctcaatagaacttggaatccacttaataaatctacaatacctagtatgctacaacacagaacataaataaactgagacgacattngcttatgttccaataggggcaactacaacaacccttcctcgagttcttggtagtgtgtgatgacgacccacacattgcactc

SEQ ID NO: 287834 - DNA, 437 bp, Glycine max
  unsure (1)..(437): unsure at all n locations
ttccctcactcctacaatatttctacatcatccacacttcctatatcccaaaagccaaaaaaaaaaacatcaaaaccttgaaagagaacacttttatgaaactttggaaagtgcacatagaagaaaacaaaattggaagataagaggggaaagaggagggcctcttacctctaaaatcaatccaaattaaaaaaaaaaagaaaaaaagaaaaaaagctcaacaacaaggtcctttgtgtgagggtttccatgtcttgcactctctaatgatggattgtctcagagaggaagaagagagtgaaatgagagtattttgtgttgtggttcagtccanacactcatctcaatccaaacactctaaaacttattatccacaccttanacaaggttttcgcatacataattgtaatcatatataanaacatcacaagtcatca

SEQ ID NO: 287835 - DNA, 400 bp, Glycine max
agctttaaaattgtaactttttaaattagaaaatatgattaaagataactttaaaagtttgaaccctaaaatctttttagttacttttaacacttttttttataaaacctatgcttaagaaaaaataataagaaaattttaaaccctaaaccccaaaagattttttttttataaaaagtgtgaaagtaacaaaaaatattttagggtttaaacttctaaatgtatctttaatcatattttgtaatttaaaaagttacaattttaaaatttttaaaaaaatagtcaaggactaatttgaaaaaataaaaaataattaatgagaagatgacatataatttgatagattaaaaaattaccaatatcataacccctaatattattggaaacaccatagaaactc

SEQ ID NO: 287836 - DNA, 436 bp, Glycine max
  unsure (1)..(436): unsure at all n locations
tgatcaaaacaattctctaaccattccaatcctttcttatcatacaattgcttattcaaatcattctcaaacactcatttcataccaaataatccactgcatatcattttcaatcaattcattgttcaaacacgcttttggtacaagtaaacaactcaaagtgttgaaattttaaataaatgaaatataaaataactgaaacataaaaactgaaattaaaataactgaacataaatcataaaataattgaaaataaactaaaatgttcaagatgcacaaatttaaatgtcatgttcatcatgtggctagtcttcattaagatccagtgctggagctactaatgaatcctggataggttgctttggctccgtgactggtgtagatggctgggtctcctcacgaggaggtgcagaggatggctcangtatctgatctg

SEQ ID NO: 287837 - DNA, 326 bp, Glycine max
  unsure (1)..(326): unsure at all n locations
agcttgatttataaaactgcagttttatttttaaaaaaattatgaggcgaagttagaaaaaaaaaaagggttgagagtaacatatctttataattgtcccgtcccaccgtaatagagaaaattttcgtagtgaaattaaatatgatctcaacaaccgtgcataattaatatatcatttttctcattagaattgaacagaaaataatgatgttatttgttactttctaaattgagggtataatagcatcaatgcctaagataaacggtgacaatatcaaatctatcaatcaatcaaaangttaaagggtatgtattttctactccat

SEQ ID NO: 287838 - DNA, 444 bp, Glycine max
  unsure (1)..(444): unsure at all n locations
gacactatgaaactccgctgctcaaggtgccatgctttttttaattccttttactaatatgcttttaatagttggggttgtgactattagcccacgcaatttttttcaattccctcatacttttgcatcttgctaacagagagagaatggtgttttgatgtatcatcctcaattatttggttaatgacaatctcatttacctaggccttatattttattgcttgctatcatctctctattatatccacgaggacgatgttactaatatcagtttcattatttaaacacaaatagattgacagtgcataggacattatatataactattttttgtcttaatttttatgtttttatggtatgcactcatctaaaaaacacactccaaaaattaaagggataacatcaacattaattngttgtactattttgatgttcacagtggca

SEQ ID NO: 287839 - DNA, 383 bp, Glycine max
agcttcaatggcttagtgaggatggagaggtgcaagtaaggaagcaagtggagttggatatttccattggaaagtacaatgataaggtgctttgtgatgttgttcatatggaggccagccacttactcttggggagaccatggcaatttgataagagggctaatcatgatggtttcaccaacaagatctctttcacgcatcaaggcaaaaagatagtgctcaaaccattgagtccacaagaaatgtgtgaggatcaaagaaaaatgagagagaaaattcttcaagacaagagagaaaaagaaaaagagagccaaacacttgagagttcaaaaagtaaggacaaaaagagggaaacacaagacaggaaaaagatgagtgaaaca

SEQ ID NO: 287840 - DNA, 427 bp, Glycine max
  unsure (1)..(427): unsure at all n locations
ntgcggatttggtcttcgctagtgaaaggatctatgttggtccgaaaagaggcaaatttgatcatcctactaggacgactgagaaaattggggcaaatgaagagggtgagaaagagggagaaacccatgctgtgactgccattcctatacggccaagtttcccaccaaacccaacaatgtcattactcagtcaataacaaacctcctccttacccaccacccagttatccacaaaggccatccctaaatcaaccacaaagcctgtctaccgcacttccaatgacgaagaccacctttagcacaaaccaaaaaaacaccaacaaaaaggaattttgcagcaaaaagcctgtagggttcaccccaaattccgttgtcatatgctaaacttgatcccatatccactcaataattcaatggtagccataac

SEQ ID NO: 287841 - DNA, 398 bp, Glycine max
gttgcatgtaagctgggtgctattacgatagccgactacttggcggacactatggcctgttatcatcatatgcagtagaaatattagtcttgtatattatcaatcgctctcattcagtagtgcgtggtcctctagaggtgagtcacatattccatcagtaatatttttgcaaccttttttttaatatacttacagaataaaaccattgaactgctactactagcaggtgctatacatatttgtggactactacagctcatttgattgcgaccataattatgttagtatatggggtccaaaatccttatcctctcttccagaaattgttggtaagttatgcaatgtgtaagcaactgcagattttcaatcttcagtccttgatatcccaactcccttgc

SEQ ID NO: 287842 - DNA, 432 bp, Glycine max
  unsure (1)..(432): unsure at all n locations
tctgtttcaacgaaatgggtaacaggactgattatatttaagtgaataaactgttgttttgtaatttgaagccacacaatacttcaaaagggtaaatgaataaagatttatcaccccttttgaatcactttcatcgtccctttttgaccttacatatttgctttgacttttacgtacgctgcagcctgttaacagttgctacttttaagcatgcatggctatggccaactaaatcaattcatttcagatatcattggaatgaatggcacgattatgtcaccatttactgtatttacaaggatatggcaaatgcaaaacaatggcactgtgtggccaaagggaactcgtttggatgggaaaaaacaggtttagtgactcttagttgaaaggctcaacatttatgactntttatgtagattttgttttgcatgg

SEQ ID NO: 287843 - DNA, 398 bp, Glycine max
  unsure (1)..(398): unsure at all n locations
tttcatgcaagctttatcaaggtcaggggggattttccatttcttgaaccttgatcttgttatctttagaagctaggcttctttgcattagggatgtgcaaaaaaatcgggtcggatcgaaccagattgcaactgactcgactcgaaccagttgcgaaaaaaaacttgccccattttatagtcagtttggttcgacccgacccgttttggcaaaaaaaattagtgacctgaacttgaactgcattgctcactctcatcatcctacgatctttntttctgtgcaacttcatttgtttaagaagggaattgtggtttcgaagttgtacgacgaagcgattatggtggatctgaaggaaacgctgagatacaatntctttctcggaaccttccccggaatg

SEQ ID NO: 287844 - DNA, 429 bp, Glycine max
  unsure (1)..(429): unsure at all n locations
tgttcttgattntttctaagttctttatttagtctttttacaanatactngnccttcatttaactgtctttgggcttggcggccacgctcaacaaagtattttcgacacctactgtacgttgatttgaccaacgctgttatgggaatgttgcgacaatccttcaaaaccttattgatacattctaagaggttggttgtcatgcggccataccgaagtccttctctatcataagtcatcgtccatttttcttttgaaatgtgatcaatccatgttgctatggctggactcagttcacgaaatttttctagattttgataaaaaatgtgcttgcaaggagtgtaggctgcatcaaattagttatgaataagaattttaagtatatattaaacttaaataaacttgaccatgatatatgaaatcttacccaa

SEQ ID NO: 287845 - DNA, 396 bp, Glycine max
  unsure (1)..(396): unsure at all n locations
agcttttaacttttctgttgngaaaatttcccataattgttattaatcacttttcaaatatacttataactaaaaaaaacattaattttttttttatatcttagaaccaccctcaattcaatccatgaggcaggtacaaactaattaagatttggtatggcagcttctccttactagtgaaagacacatggccttttaaaaccaacgagcatggatgcatggattccacagaaagacatatgtacaaaaactcaaattatcgaatggccttacatacagaccatagataagggggatacataacttctctgctctgaaatgggccaaaatctatttggagatcggttgcagaactgctctatttcctcattcaccatccttgcggccattcacaat

SEQ ID NO: 287846 - DNA, 157 bp, Glycine max
aggaccattgtatctacgcacttagcacagaaacactgtttttctatggaaatgggaccttagccagacctcgataaacatcattctcaaggatctccgcaaactactgcccctttttgaccttacaaatactcaaggctccacagcatgcgatctc

SEQ ID NO: 287847 - DNA, 384 bp, Glycine max
agtttgaactttgaatcttgattcttgattcttgaaatcaaatttcctcttgaaccttgaagtgttcttgattcaatcttgaacatcttaaacatcttgaacatcttgaactcattctttgattatcatgaattgacctttgatctttttgtcatcacctttgttatcatcaaaacatctttgaatcaatcttgattcatcatgaagctttgcttctacacatcccaaatataatgcttagcatcacttttaattttatcattctgagctttagatgctaagggaggaataacagaagctaccaattaattcacaatattacgaaaccaaggagtggtgaaggaatcagaaatcttataaagaatgtacaaatggtcatccgga

SEQ ID NO: 287848 - DNA, 435 bp, Glycine max
  unsure (1)..(435): unsure at all n locations
tattatgtgttgaattgtaagatatgtgtatattgagtttntgtacacattgagttgtgagctatgaactgtacaatcaaatgacagtaagaccctttaagggtgacgggttaatgtgcgataagtattgtgatgagattcattgtgggaaccaatgagttgaatcactttgaggcgcaacgggttaaagttattttgagaacaattgatagaggattgtgttttgtatagttcatagataaagtttgtgtgttaaaatgttttttctgggttgaacctgaatcaggaggaaaaggccctgacggaaacttcagagtctaggccttgggggtaaatacacccaattntagtgctcctttaagcctctgccgatcccacatggttggagcattntcacaaaatagcgtgaccctaactggtctccctatgatttta

SEQ ID NO: 287849 - DNA, 398 bp, Glycine max
  unsure (1)..(398): unsure at all n locations
agcttgtaatcaagtgaggtggagtggagttgataattcagttagtgtagactggtttttttctatttaggagggatgctacatgcttcaattcagacttgatgtcgaagcagagtaattttggctcctttaaattaaaaggggttcactttggaaggaaaagtttaggttctcaaccatttgagtcaacagttgatattatggtaaaatatatgcacaattggccaattgcacattcataacaaagtatggatttgttataacttataacttatccctcactttagatgggtcgaatccaagaggaacatgcaatttaatcaattgtatgttttgtttaagtcaatatgcttaaagttttttcaacttttatccatgtgcattangctcccctggac

SEQ ID NO: 287850 - DNA, 439 bp, Glycine max
  unsure (1)..(439): unsure at all n locations
tataacactgcaaaggtgatgagaatagtcctcaaaattgttattataataacaaattttccttttcttttattacatgaccaatcaaactttagacagaaaatgttactaacactactagttaattaatactatttacataatttcaaatcaggttaatactcagacaactataaaggtcaagaaggacaatgaaggcttagaatatgcgttgaaatggcaatgaagggaagagctgtttgtccaaattaaagatggactaatcaccggcatcattgacttgactgctcgaaaactcttggatcaaaaggttgtcacaaatgattctagtgattacttatggtacatcaccaggtaataatattctatgcatgtcctttntaattaattcaaagttgagtaatgttaacttctcctattaattatatcttcctacaaa

SEQ ID NO: 287851 - DNA, 389 bp, Glycine max
  unsure (1)..(389): unsure at all n locations
agcttcttattttcagaagatgaagatgaatccgtggccacatcatggacttctctaaggacaatagcatcatttcttgcactgaattgttgggagttggaagcaatcttctcaatcagattcctagcctcaacaggagtcatatcaccaagagctccaccattggcagcatcaatcatactcctttccaagttgctaagtccctcatagaaatattgcagaaggagttgctcagaaatctggtggtgaggacagcttgcacacaatttcttgaatctttcccagtactcatacaagctctctccactaagttgcctgatgcctgaaatgtcttttctgatggcagtggtcctagatgcanggaagaatttctccaagaacaccctctt

SEQ ID NO: 287852 - DNA, 451 bp, Glycine max
tataaatctaagcttgcttctcaatctccccctttttgatgatgacaattcttttatcaagaaagcatatacaatttctattgttcgttcattcattccaagcttcccctttgtcttggagattatgcctaatttttttgaaatctaaaactttatctttcttgatttctctaaacctcgtttctctccccctttggaaacatcaaaaagccaaagtgcccaaaaaaacaaatataatttatccaggaagagaacacaaaaccaatcataataccagagcaatcaacattcatacataattcaattatagtgtatttaatcaaagaaaaatatccaaacaaagaaaatcaatccaaaaccataaatataccaagtcagaggtcttatacatagccaaaatacacagcgtagaaattataactaagaaaataaaactaagggtctccaggcg

SEQ ID NO: 287853 - DNA, 369 bp, Glycine max
  unsure (1)..(369): unsure at all n locations
agcttaatgtatccacaagaaaagaccattacccgcttcccttcatggatcaaatgcttgagagacttgcaaggcaatccttctactgtttcttggacagatactcaggttacaatcagattacagtagatcctcaggatcaagaaaaaacagcgtttacatgtccttttggtgtttttgcttatcaccgcatgttgtttggtttatgtaacgcccctgctactttctaaagatgtatgatggcaattnttgatggcatggtagagaaatgtatcgaagtctttatggatgatttttcggtcttcggtgcatcttttggaaattgcttagcaaatttagagaaagtgttacagcgttgtgaagaatcta

SEQ ID NO: 287854 - DNA, 440 bp, Glycine max
  unsure (1)..(440): unsure at all n locations
ntatcgtgaggttgaggaatccaaggaattccgacgctttgttgtttctcctcatccaaagctacaattgcaccctccttctttcccttttttgttaattgtgtgaatgaattagttaaattgtcacagctttttgtgttaattgttcttttattgttcaaagtgaagtaatttttggtaacttttaattgtccgaaatctcttaatctgaatatcttccaagcaatttctagttctttatagccaccagaaagtgaaacgtcaacaaatgtaatataataacaataaaattattccaccattagttaccattaccatttaacaataatgatagaaacataaaaaattaagactgattaatttttaatttaaaggttaaaagtgaaaattcataaaagtttaaagacccaaaacataattaatcctatctttttcatatg

SEQ ID NO: 287855 - DNA, 320 bp, Glycine max
  unsure (1)..(320): unsure at all n locations
cgagctcggtgcccgctgatactctatagtgcaccagcgcgccttcanacttgtatagtgngcataaagatatagatatggggatagcataccttcaatgctaaatagtacgatgaaatggtaccacgtacatttcctgtaacagctgttaaagtattcttgatactatgtgatgagtatagagataataacgacgagctattatcagcccattgcatgagataatatataattatgcagtatatttaatatcacccgggatatatagctgattaatacttttactgctaccagagatttctttactagaacgctattaa

SEQ ID NO: 287856 - DNA, 408 bp, Glycine max
taatcaattgaaaattgacggtgtgagattctctctgtttctctactaggggcaattttccttggcaccctttatcatgttcaatttgttggtaagtttaggtcttttaatccaaaaaaggaaacttggttaccatgtgagagtaatttggataaatgaaaattgttttggttgttatatgcatgagtatttcgatgcttgtttgcaataatgtaatatacaaaagtacctaccacatagagagtgcctacgcaatttggaatcaagaagtttcagattgtgtgattgcattctctagcaccaaagctattgcattgaaaaattactgcatacccaaaattactttaataagttgcaaccaatattacttggcaaaaaagtagtctaaagctactctgtcatcatgga

SEQ ID NO: 287857 - DNA, 407 bp, Glycine max
tcaagcttctcccccaattttctataaatagggggagaagtgaagtgaaaaagggttcagccccttaggcacttctctctctttcgaatttgcttggaaaaattggttctgtgaagaaaattcaagccgaggcgctctcgaaacgtttccgtaacgtttccgtgagaaatttcatgaaggtttcgaccgctcttcaagattcatcgctcggtctttgctttcttcagacttcaacgggtaagtacctcaaaccaagcttttcaattcattctatgtacccatggtggtccacatttcgtttcatgtatatttattccccttttcatttactttttatacccccttttgacgtgcttaagccatttatttaaggcatttctcgcttaatgtacaaatagaataaattc

SEQ ID NO: 287858 - DNA, 401 bp, Glycine max
ttagcttggagggattgatggggacccggtgttgagaggaatcaggataagggctacgtgggactacgtgagctcagttgaaggtgggcaacttgggatggtggatttatgtgtgatttgtggatgtggagagtcgacttgcaccatcgcccgatagccacctagtaccacatatgacgggtaccccataatcctacaagcttgaagtgagaaagtgtggaagagtcagtcttcctacttttattcgttgaccacagagtggtacttggagatatgtcgcgggggtcaggagaccttggggacgtcaggtggggtgctattgcccaaaaccaagcttgaccaatcccgacccaacccgggcatagtcagtcagtgagaacctgtgacgtacctaaacaggc

SEQ ID NO: 287859 - DNA, 431 bp, Glycine max
tgcttctacagacttatcccaatggtctttttttactattagcttgctcactagcttttcactttcatttgcttttgaccttgttacatcagcacactttattcttttttttaacataaaacttatttgttgtgtgtgttgatgctttacctttttctttgcatcccaattagttctactcccccaaatttggggtaaatttgccttgaaccatatgctctcctagaatctaagcaaggtatcaggagatacttatttaagttcagggttcaaatttttgacaatatcattcagctcaaaaagggtgcaaaggatataattaacattcaaggaaagttttttggtcaaaagtcctgtgtatgtacaatcatggccttcatcatgttctcatttatacatttcattctaaaattcagagattcatgcaaaga

SEQ ID NO: 287860 - DNA, 405 bp, Glycine max
agcttgtgaatgcattctgatgtggtgaatttgatggatgtattgaaaaggcggagtccacccagggtatgctattaaagaaaaaaagagaaatatacacgtagagaagatgtcattcttcatgctcttcaactcgagaggcaaatgttaaagaagcaagaaaaaataggtgatgcttctgactagatcaattctagatcatataatatactgttaagaaaggcgtattcatgtatctagacattaagaaatggcaatgaaaaaacaaaatcatatgcaacatcggggtaaagaggtttgggcctaatatttccttttgagatgtttgttctcattttctattgatccagatgtttattagaaactaatagttgatgatagtgctctaactctaacaagtgatgg

SEQ ID NO: 287861 - DNA, 433 bp, Glycine max
  unsure (1)..(433): unsure at all n locations
ttcatttaattcttttgacacctcgattgtagtcacttttattatctctgaacatgccagcattaaaaagcttgcaacttgaggctgtctcttttactgcaagggacaatgactatgctgagccgttttctacctgtaatgtgctgaatactttgatacttgatggttgttcgttgcataaagatgcaaaattcctctctatatcaaattctagcctctctagtttgaccataagtggtagttttgaaggaggagcttacaaaattgtgctttctactccaaaccttagttctctcacagtcacgggtcataataatcacacaatctcctccgcatgcaatctttctttccttgaagaagtaaccattgacacccttggttatacactntttccgaatacagacttactcatcataagctggctgcaagttct

SEQ ID NO: 287862 - DNA, 335 bp, Glycine max
gctaactatttacaccggagtgtgcaaaacgcatgagacctcataaacgcattacacactcccatctctatattcccttcctccactttcatgtgaaaattcaagtactatgacaacaaataaaattgtaaacccaaagggttcctaggttgctacaccaagactcacattatgtatttgagtctcagctgttctagaagatgttagagaacagctattcatgaagatacatattgcgagtgtgccaacaatttgcggaatctttcctctctgtccctacgagactgggaggttgtggtccctgatggcgtccgtcgtttctttcttggtcggaa

SEQ ID NO: 287863 - DNA, 321 bp, Glycine max
taagcttgaaggaaaccttgatgccttggtcaaccaagtaactcagcttgccatgaatcagaaatctacacctgttgcaagagtctgtggtctatgttcttctacagatcaccatacagatctttgtccttctttgcagcaatctggagttaatgaacaacctgaaacttatgctgcaaacatttataatagaccccctcagcagcaaaaccaacctcagcagaacaattatgatctttcaagcaacatatacgatccaggttggaggaatcatccaaatctgagatggacaagtcctccacaacaacaacagcctgtccc

SEQ ID NO: 287864 - DNA, 366 bp, Glycine max
  unsure (1)..(366): unsure at all n locations
tcaacatcagaccacttccgggtgctgtaactacttttcatggacttgatggggcctatgcaagttgaaagccttggaggaaaaaggtatgcctatgttgttgtggatgatttctccagatttacctgngtcaactttatcagagagaaatcagacacctttgaagtattcaaggagttgagtctaaggcttcaaagagaaaaagactgtgtcatcaagagaatcangagtgaccatggcagagagtttgaaaacagcaagtttactgaatactgcacatctgaaggcatcactcatgagttctctgcagccattacaccacaaacagaatggcatagntgagaaggaaaaacaggactttgcaag

SEQ ID NO: 287865 - DNA, 350 bp, Glycine max
tttcatgcaagcttgagggggagggttgagatatgattctgattagatatcattctgatatgattgtttccttatttacattaggattgtttccttatttacgttattgatttagtttcctatttactatttttatgtaattgatttagcttgattattatccctataatgaagggattagattattattttaattaaacattgattactataaataaacagccaagggtacattctctttaagcatctagaatatacaattcagattcaagtgttatgtgtgtgtgtgtgtggaataaactgtggtaaaataaaaaagagataggataaagaaagaggaaggactaaag

SEQ ID NO: 287866 - DNA, 429 bp, Glycine max
  unsure (1)..(429): unsure at all n locations
tattttcgataaacttagatctagatgggatgtgtctctcttgttattactaatgttttttcccatggtgcaattgagattaaaaatgaagttatcgacaaagttttcaaagtgaacggtcaccaactcaagctttttcatgagagcccccaagtggaggaggaatttatggcgggccttagtttagaggtttcatgcttaatgtgaaccattgttgcaattgtcgaagtgataagtaggcttgaaaaatttgaggaggatcatgtgtgataaaatgatgccttgtgagttttgggattttgtggatggattgtattattccattcatgctctttcatgtatgatttcacccttgtgctagattactctaggttntgccttgcttatcttctctaggtttcttttagtcactagcaaaataagcctacc

SEQ ID NO: 287867 - DNA, 357 bp, Glycine max
  unsure (1)..(357): unsure at all n locations
agtcttattctatgctttattattggntgtcggaaaggcaaatgtcagtgcctgctcaacaattaatccatttgatttctcatggaaagatctatctacatatattgtaaataatatctcccgttatagattttctaaggttaattcaacaatggaatcagctagcgcatgtgcattaaaaaggatttgatgctctgaaacctctattgcccaagaaaccatccttctcgccaaatcaagtcggtgaagaatttgtcgaatggactaatcaattcacaccattatccggtgtgaatggaaatatagtcgtatgcgtcttgttgccattactatagcaaaaactaccttctctaatga

SEQ ID NO: 287868 - DNA, 427 bp, Glycine max
  unsure (1)..(427): unsure at all n locations
ttctttacataatttgtcactgactacatttaaatgcaatctcacatncttgatctttcttagtctaacatacacacttgctcaaactcatgataagaaacacaaactccatcacaatcatgcacttaatttaaaataaaagcatataactattttcacaaaaagataaaaagtgttttactaccatgtcatcaaaaacaagtcaaactattcaaaatgcttcaggataagcaaactaactacccataaataaaactagcagtgtatgtagacctaaaggaaatattgtatgaaaaccaaaattgtaataataataataaatcaaaaagcaaaaagtattatcaggaatcaaaattcatgtgactggtcttggatatcctgtgcctgaacatcctacttatctgtcaaatgcaatactggagtagtc

SEQ ID NO: 287869 - DNA, 288 bp, Glycine max
agcttattattattgtttctttaatgatggtatcttagtttctaattaatactttgtttaacgcttctaaattttctttagacttttatatctttgatgaagaagccaccagagactatactaacggatcaagatccatggatgaaagaagcaatttcaaaagacttgccatcaacataacatagtttttgcatatggcacattacttttaagtttagtagttggtttaatgctatacttcgggacaaatattcaaaatggagttctgatttttacgagttgtataaa

SEQ ID NO: 287870 - DNA, 437 bp, Glycine max
  unsure (1)..(437): unsure at all n locations
nggaaggaaaggtggtaaccctagcaacaatctcaactgcacttccaacaataacaacaacaatcataacaataatagtgacagtgaatgaatgtgtgagagtcaggaagggataactaggttgaggtaaagtttagattggaattgcatcagcctaatagccttgtggtgtatgtgtttagttattattattattattattattatcccttaattgttacagttaacttaagagggattgctatgctgaaccctaaaacagagaggaaaaaatgcaggagtattatgtgctgaataagtgaataatctaatctctttgaagaagatgcatcagttcagttgtcatgtgtaacaccattctaaattatatcagtatggggatcatgtcatcattcatagctctagttggatatgcaacctcataagtcacatgatag

SEQ ID NO: 287871 - DNA, 340 bp, Glycine max
  unsure (1)..(340): unsure at all n locations
agcttgtggtctacctctttcaattaagttcatgatttttcactctactccaagcagtattgatgtgccatcattttcttctattttctaaaccctttttgctccattntaattattgattggtcttaattgtcaattaattaggcagttttattatttgggctcatttagctaatttgatgtttctaatctaatttcaagaattaatgaaacattgggcttaatccggattttggttgtggacttgaagagggcaaataaagcagcgcttaccttagttaatttctaattaagaaatttcgcaattttattttatgttgttcagtgtttatttcgtttt

SEQ ID NO: 287872 - DNA, 432 bp, Glycine max
tataacattgcttagattgtgtaggtatcagattagatctatttgttttcaatatcaaaagaattcccattgtaattgacagggtgcaggctattagattagatgagacaaacttcttttcaatatcaaaacaaatctagaaacggagtaacacaggaactttggagtcttgtctcatatggtttcttaattacaagtctaacagtagtctagtagatgcatattagtatcctaacttaccttttgtttttcttaaccatctgattcatcagggaaaaagaatgctaactaatgcacataatgtatgcagtgtgtacaggcatttatacatcctacccaaatgacagataataacaattcagtttagacatcctaaccgcatgaaagcgaaatacaatatgcgatgtatcaaaattagggagtttgtgtaag

SEQ ID NO: 287873 - DNA, 408 bp, Glycine max
  unsure (1)..(408): unsure at all n locations
agctttatgttttgtgattaaaccggattttacttggacacataaaatcttaaaaagaatataaatgtatatgccaagtatgtagatntggaggtcaatgcttgtttatatttattatagacatgattcacaatagaacattatagcattgtgtgatccatcatgtagtcaaccctcctagtgcatgtgctatgtatatagttaaagtgcatgttgggtttgttcatcttattctggagaaataactgcatacttttgttggcttcctactagagttcttaaaaaataagctattatttttccatatgtaagacaaaccaaacttgctaaatcatttanattaatgttgaatttataacaatttactaactgtctatttctctaatatatgacagtcccacatctaat

SEQ ID NO: 287874 - DNA, 425 bp, Glycine max
  unsure (1)..(425): unsure at all n locations
tctcgaaggaggtcgttcttgatgttgttgatgcggctggtgttagaaccgtggtcgaccctgagggcgtggatgtcttcttggaggccatggattttgtacttctgactcaaagatcgcatgctcaatagaaggatacccgtcatggcgaagaattggatgaagctgtccttccgttgcttcgcgtgcgccataaaccctaatatcttcctcgaatgttccgcggcggcgctcggtcgaggagaagctgaagaagaagccatgccgatctatccacaacacgaccgatactattactcacccacctacaacagaacctccctgctttctttcctcgctgatcacaaattgcaatgaatgtcgacggattcacctgtgtaatcctccgcgttactttcttgttgctctttttttctttntatctc

SEQ ID NO: 287875 - DNA, 402 bp, Glycine max
  unsure (1)..(402): unsure at all n locations
agcttccattntcaattacgagcgtctcgatatattacgggacccaattggacatgcgagcacaaagttattgtcgtttgacttttctcagagcttttattctgaatttcgagcgtctcgatatactacgggacacaatcggacatccgagtaaaaagttattgtcgtttgattntgctcagagcttctgttctgaatttccagggtgtcgatataccacttgccaccatcggacatccgagtaaaaagttattgtcgtttgaatttgctcagagcttttgttttcacatttgagcgtctcgatatataacgagactcaatcggacatccgagtaaaaagttattatcgttagaattggctcagagcttccattntcaattacgagtgtctcgatatattac

SEQ ID NO: 287876 - DNA, 445 bp, Glycine max
  unsure (1)..(445): unsure at all n locations
tcaccttctggtcctcctcatagttgtggcatgagatttcatgctctattttcatctcccactccaagtaggcctccggatcattctttcctttaaatggaggaatgttgagtttaataccatcaattcggttttgtctaggaacaccatcattccctcttctcctcctttcttcttcattatgatctctattctccatttgatccaacctctcgtggagcgcatcatctcgttgtttcattaacctctccatatgttgcatcaaagcttgcatttggaattgcgaaagccccactccatcattaggattagtacctgacatctcanacaaacaaatcaaacgtaacaagacaattatagttgctgtttgaatacctcacccactcaagtgtatcacacaattatggctnttctctaatgaaacactcttgccttttaccactct

SEQ ID NO: 287877 - DNA, 367 bp, Glycine max
  unsure (1)..(367): unsure at all n locations
tcaagcttttgtgtgggatacctaatgtgagcatagtttccaaacccttaaggaaaagttgacggccgctcccatgctagttntgcctaacccaagagaaccccttgaggtgtattgtgatgcatcaaagatgcgtttaggaggagtgttgatgcaaaatggccaaggagtggcctattcttctagacaactcaagactcatgagaggaattatcccacccttgatctggagttggctactgtagtttttgcccttaagatgtggaggcattacctgtttggctccaagtttacagtgttcaaggattataagagggaccatgacacanagatcctncacaaagaatttagtcccagacaacaagta

SEQ ID NO: 287878 - DNA, 432 bp, Glycine max
  unsure (1)..(432): unsure at all n locations
ntgtgtaatcgattacaccttatttggaatcgtctactcattgactgnttctgataaatcaaaagatgtaactcttcaaaagggttttgactttttcaaattggttttaagtttttctaaaagttataactcttctaaatggtcttcttggccagacatgcagagtctataaaagcaaggctttgatttgcttttcaatacacttttcacattcattcaatcaatcctttgcaagccttgaatctctttgaacttcttcttcttctttgtactaaaagctttctaaagttttctggtttttccaaaccttgaaaacttgtgctattcatcttttcattctcttctccctttgccaaaaagaattcgccaaggactaaccgcctgaattctttntgtgtctctcttctcccttttccaaaagaacaaagaact

SEQ ID NO: 287879 - DNA, 399 bp, Glycine max
tcaagctaggcatcaaacttgctgataataggctgccaaacactccagcttttaggatcataccccattggaattccaaggtaagaaaaaggagaaaccagctgactatagttaaggaagtgagctgcatccctgcaccaaccctctgattttcccaaacaaccaaactgacttttagcataattgatcttgaggccggataccatttcaaagcatctcagaatagattgtatgactttaacattatccatagttgcagtcccaaaaaatagagtgtcatctgcatattgcagaatattaacctcctccttatgcctgcccacttgataactgctgaacatattcttagaaatggctgcctcatcagacctgtatggacttaactactaaattgaaagg

SEQ ID NO: 287880 - DNA, 433 bp, Glycine max
  unsure (1)..(433): unsure at all n locations
ttttaaaccatatatagatttattaagcttgtaattctttgctcaccactatcagaggagaaaccttcaggttgtttcatataaacctcctcctctaaatcaccattaagaaaagttgttttcacatccatttgttgcaactcaaagtcaaaatgagcaactaatgccaagattatacgaagagaatctttcttagatactggagaaaaagtctctttgtaatctattccttcattttgagtaaatcccttagcaacaagtcttgccttgtatctctcaatgttgcctaatgaatcccttttggtcttaaagacccatttacatccaatggtctttgccccattaggcaactctacaaggttccaaactttgtctgcatagaattcatctcatccttcatgtcatcataccatanatttgactctttacaacn

SEQ ID NO: 287881 - DNA, 383 bp, Glycine max
tttagcttatgaatatcagatcgcaccttcgcttctaaatgttcaagaatctcttgatccgtgggatcaaacttcactccagcaggcagtccaggtaagtcatgaattccaccaccctaaaattattcaacaccacaatatttatttaaataattttttcataaagaacgccaaaaaaaaaaatgaaaaatgaatcaaactaagacaattacatcaaaagaaaaaaaaagtactcaaaagggtaatattatctatatgatatatatcattaacaaaaaggttaataattaagaacctgatcttggcatttgatatgatgaccacacgtaggacaagttctaattaagctatcttttcgtccctccactatgatgttatgatga

SEQ ID NO: 287882 - DNA, 435 bp, Glycine max
tgcaattgccccagtaatgatcgcacttgacctgagtttagaatttgaattgatgtgtgatgccaatgattatgcagtgggcgcagttctaacacaaaggcaagacaagatattccatgccatttactatgctagcaaggtcctcaatgatgcataaatgaattatgccacaaaggagaaggagatgctagctattgcctttggcttggagaaattcaagtcatatttggtaaggtcgaaggtaataattttcaccgatcatactgctatcaaacaccttctcaccaaagtagattccaaaccatgactgattagatgggtcctgcttatacaagagtttgatatagttatcaaagacaagaagggatctgggagcgtggtggctaatcacctctcccagttgaagaacgaaagagtaactaaagaagaaccgaa

SEQ ID NO: 287883 - DNA, 376 bp, Glycine max
agcttgtgcgaatcaaatcactcccgcatcttatctctagcatgcattctttctttctttacccactcctcacgtttggctttttagggaaaaacaccataactaaacgcgccacaaggcatccctatcgcaccagatccaaatctagaacgatgggtgatcaagaggagacacaggaacagatgaaagccgacatgtcggctttgaaagaacagatggcttccatgatggaggccatgttaggaatgaggcagcttatggagaaaaatgtggccaccgctgccgctgtcagttcgactgccgaagcagacccaactctcttggaaaccgtgcaccatcctcccttatacatagtaggacggggaagggacacact

SEQ ID NO: 287884 - DNA, 435 bp, Glycine max
  unsure (1)..(435): unsure at all n locations
tagcgagagttgtaggttttatgatctgcagttttctctaagtgccccttctgtgcgctaaacccagctttaaaaaaaatcagattttgaatttcaaacttgggctaagcgcgcagctccgctaagtgaacctctttgagaaaccaaacgtctctctggctcacttagcgcggtggttcgctaagaaagagggtcgaaaattgcttaagcaagtgtaacatcagttacacttacctttaccaaaaaaatttctgaacattgcctgcatcttctctctcacacccaaactcgcgcatgcttactttctttgtgcatcttcgcgcattttcagcaatcaacaatccaagtaagtttctcattccctttgctcttttatttttgtgaactttagggtagaaaaccatagaatttagcttttaattnttagggttttaa

SEQ ID NO: 287885 - DNA, 400 bp, Glycine max
  unsure (1)..(400): unsure at all n locations
cgtaagctttagaaaccctaatttgaggaagaagaagcaagtgaagaagaaaatatttgataactttttaaattttgcattaaagtccagtctacatgtcacattttgggacaatttgtcacgttggatagtctatgtgacactaaaattgccaataatgcacctcactaacgcgttacttttaaatttaacgacaaggactattttgcaaaacttatgcaaagatagggactattttttacatttcaaaaagatagggactaatttgtaaaaagggtcataagtcagggaccaaaatgcttatntactcgtacaataacacttgttcaatgtttgacntaaaaaattgtcatgagacaacacaaaataaaaacgaagcataggacanagtctaaaattc

SEQ ID NO: 287886 - DNA, 439 bp, Glycine max
ctttaatttcaatacaaggaagcatgacttacgctcatttatctaagttttggttttgaatgtaaaaaggcatgaatattaggacatgtttgagaggtttttaatagaatttaaatttggctgccccatgaggaataccttgtacctaggtagcatggaaaatacctttcaacggtatgtatatatgtgaatatatatatagcatggaaatgccttgcatagtgtgtgaatatatggcataaaaataccttgcaaagtgtgaatgtatagcaaataatgcatttcaaaaatctgtatatgtacgataggtagcgtaaaaatgcctttcaaaatatggatatttgtggataggtagcctaaggagcctttcaaaaaaaaaatgtacccatgtcaaaaatggcacgagaatgcttcccaaatgaatatatgatgtggaact

SEQ ID NO: 287887 - DNA, 392 bp, Glycine max
  unsure (1)..(392): unsure at all n locations
agcttaatataggtttgtgaagaaacatcttacagagaaaagaaataacaaaaaagattaaagatgaaatgagagaaatggaagagaacctgaagttttttccaaaccgattgagaaagaggtactttcagaaagtgcttttgtttatgcgtcaaaagcattaatcttgtcgaagttgtattgcctattcagttctctaatgttttaagataaacatttgaaagttgaaaataataattatagaattaatattccagaaattgttgcaccaaaaatcaccaatgcattaattattaaaataaagaatctttttcattgaattactaattagcaaatatgacaaaatgaaatttccaaaaatacccncaccaatttccacacacacatatata

SEQ ID NO: 287888 - DNA, 428 bp, Glycine max
  unsure (1)..(428): unsure at all n locations
tcatgcattgngtgtgtcggtggaggacaatgttttgtgccagaaagaaaatgctctttgttcttggattcaagcgccacaactatatcacgttcccattgacgaaaattgctttctatcagtggtgacaaaacaagaacaacagaaggattttctctaggatgaagaagttgaatgttgattgttaacaaccataatcgatcaaaaaagcaagaagaataaaaaatgaaactagatttcaaatgaacaaatgcggaaggatgatgaacgaagaaggcttcgtgtgtagggatgataccatgaaagaacaggaactgaatttggaggaaaaaatagtttctggaaaattctccttatccattaatcaactcaacaaaaaaaaatacaagacttgctatttatacaagcaaagctatggttaggaagat

SEQ ID NO: 287889 - DNA, 394 bp, Glycine max
  unsure (1)..(394): unsure at all n locations
ttgcttcatgatcatgaatcaagttgattcaagtagttttgatgatgacaaaaagcccaagagaatgatttcaagaatgagtcaacaagttcaagatcaagattaaagaaaagacatcaagaagaatcaagattcaagaataatcaagatcaagatccaagactcaagattcaagaatcaagagaagaatcaatcaagataagtatttaaaaagtttttcaaaacattgagtagcacaagaagttttcacaaaatcattaccaaagagttttactctctggtaatcgattaccagaatgtagtaatcgattaccagtgtttntaaaacgttaagaattttcaaattcanaatgaagagtcacatctggtgatgtgtaatcgattacaccttaat

SEQ ID NO: 287890 - DNA, 430 bp, Glycine max
  unsure (1)..(430): unsure at all n locations
tctagacattgttcttctggaattggtcttgttcttcttgcatggccttgacctaatgttcattctccatagcatcatcagtgtgttttggttctgtctcttagacgagtattgtctaaccttgttgtctgggggatgcccttgtttggaccttggttaaggagtcaccaatggttgaggatccaatcccatcatctactctgagatccgtaataaaatcattcaactctgatatttttgtattaggcttgatgtcatcaaacttcacattgatagcttccttaataattaaggttctagagtagtatattataggcataatgtcactttttgtgcattatgttntgtagttgtttcactctagtacattaagtttaaaagttccactttggtcctttaattntttaaaatgccacattttgttcctttt

SEQ ID NO: 287891 - DNA, 385 bp, Glycine max
  unsure (1)..(385): unsure at all n locations
agcttcttttggaccttgaacaagcaactaactcctctttcagaaccatgctatgtgctcgcgactggtccctctcttcccttcgcagcttgagttcactattgctaccccatagagctccgcgaaatttattccggccatactcttccttgcgagccctcttggtctcttgttcaagggctctggtggtaattgcattctcttcccgtaatccggcatactccttccggatgtgtgtagcggccaacttgaacttctctttggcaagtttcgcctttcctaactcgcttttgagagcttggacttcttcgtcctcttccggtgcttcaaaactctcttcgctgacgactnttaacttggcgagccaatctaaacctcgtatatg

SEQ ID NO: 287892 - DNA, 421 bp, Glycine max
tgtcaaaccctaactaaggaggttgagcctctcattgtcatgagaatctttacaatttaggagttgatgtggatagaagaagagagatggatagaggaggagaaggggataatagacatagatagagggtttcccttattagagatgctcagacttaggatgtattcattagagagctatgaatctccgaggcggtattatcccggtgtgcgggttgtgtctattacttatgcttgctactccttttattggactaaggtgtaacttacttatcacgctgacttcgcgcttagcgtgaacttatacgctaagcacgcctttgggcttctttatgggccttgttcaacctaagtgtgagtcggaccgcttacagagggtgcgtgctaagcctgcatagcatgctaagcgacgtgctcaattc

SEQ ID NO: 287893 - DNA, 410 bp, Glycine max
  unsure (1)..(410): unsure at all n locations
agttttggttcccagtataaaaaaggcattgctatttaagtgagtttttaacgtgttaatctacgcttctgggttatattgaaaataatgttttcacgggacacaaaaccatatcatcctgtacagtgtacatgctaatacctactatgcaaaaaggttttcgtaatatatacttaaatataacttttggtttattgtatttcgtagttgatttgttttaatatattaagttttaaaagtttgattttaattnttttttaaatgtattattttaatttttttattaaaaatattaatgttttattaacttttaaattttaaaaaatattaaaacaatatatttcaaaaatataaatgatcataataaaacttattatactaaaacaaaataatcaggaaacataatatat

SEQ ID NO: 287894 - DNA, 433 bp, Glycine max
tagttgttgaaggccctaactagatcatgattccaattgttttctctttggaatcatgacttacaaggtttgcagcagtgttgtgaaaatctatctcatcgaggcattggattagatgtcaaatatgtgggtcatttatgggtatcgctaatctatatttcaatattacataagtatttattattataatttattttgttggatattatcattgaatcattaagaaaattcttgttatcttttatgattaagtacaaaaattatcaaatggtcatcagtaagtatgatgaagatgtataaaatacataaatattaaatcatatcaaaataataactattagttattatatatttttatcaagatcaaaataatattatatgagcatattatacgctagtattcaataattggatattaatacgttaacatatt

SEQ ID NO: 287895 - DNA, 508 bp, Glycine max
  unsure (1)..(508): unsure at all n locations
aacccgcggggaccacacacaaagaaagaaaataaataanaaganggggtccgatcagcatgccaccgnaaaannaannnggccgggcccaagaaaggacagggcagctcaacgcatacngcgcganacccagcgggcanggacgcggaaaaacacaaaancccgacccaacggaaacagngccaccaagaaggcaccaacaaccaaggggaggaaaggaagaagcccaaaaccacaacacgccgaaccgaggcaaggagcgccaaggaaacgaagaatgaataacccacaccgaaggccacgacgatggagacaacacaacagcgattacaccgccccgcacaaagagacgagacacacccacccaacaagacctacaagaacgaactgcaaaacctagaaggaaaccgtattcaccaaggactacaaagacaaagcacaacacgacaccaaacacaagcactatcccccaaacacacgatgacagacgaagaggacgacaaacccg

SEQ ID NO: 287896 - DNA, 379 bp, Glycine max
  unsure (1)..(379): unsure at all n locations
agctttatttttgacaactaatattgntaattgatgaccgcgatgcatgtttgtgccatatcattgacaatgtttcataatgcaaaataatttattcttttgcagcattgtgatttttcaatcacacttggatttggataggttccaattaaggcaaaaattattatatttgcttgatcaactaaaatgttctttgtacatatttttctgtgtatataatattaatttatgtatatctaatttgtaatatttctgctatttatagttattgtattttattaattatcatgtgatgtctcgggtattatttgataggattttttatcattctaatcacattggtgatgatgctaatttaactgtgattctatatttctga

SEQ ID NO: 287897 - DNA, 437 bp, Glycine max
tgcaactgataatttttagttgaaattgagaattgtatgcctttcttcttaattctcaacacactttttggatgagtcttccaaggattgtgatgccttctctaactttccttccttttccagtgataaggtaaagctacaaaattgagtctcccaatttttgatataagttttgtaagaccatctttaattcgaacaagtggcttaaaggtgtaaatgcacaatccttccaagcgagcaactcaaaggtgtaacgccatcttagaatttcgtatgagcatcttcaatgaaaatggaagacttgaacgaaaatggttggctcgctcctcattgctctgggaatagataacgatctatataatgagcacaatgtatgaaggatggaaaaactccaatttatgtcatcccaggttaagacttgtagatcacactattca

SEQ ID NO: 287898 - DNA, 323 bp, Glycine max
agctggatgtaacttatcctacgcgatattgtttaaaacttaaatcatatcctcaaatatattttttattcatataaatatcaaaatatttggaatttattcctgtaaaatttgattttattacgttaggcatgtttgctctctcctaaatataacaatcttgataaggcctataaatataacatatccttcaatttcattctattagaaaaaggcccatgtgacaaaagaagtataatgcgatcgaaatgtttgaataaaatattacaattttttttccatagatcacatattcttcattaacactaagaaaaaaaatcata

SEQ ID NO: 287899 - DNA, 559 bp, Glycine max
  unsure (1)..(559): unsure at all n locations
tcatgcacacctataaccggagtgagtaagagtaagatggttaatattactcaanaaaagaagggtnattttgatcccttgagaccgtgtanaccncaanntaannctaaacggncnntgagccgtaagaaatagactataatctttatgtttcttatgccttactgacaaaaggaatgcacgaaagagcttgatcccacccatgctcaacggcatattatattagggagcacttttataatgaccgctgactctggacagtgcgataaactaccgataaccatgacatagtgacgtatggcacgtgcatatgacccaccataactgtgaagtcgaagatgaaaagaattacggctgcatgtgcctgtgatgcttgtggcacaacctttgaattacaaggagacgacttatattacaaagaaaacgtgtatctaaatgacggagctgagaatgacaacggatcctgatgcttatatgatggagcgtatggatccaagtttagatgcattagtgcgcaagagccgttgaataactagatatctttgactttccgcttagg

SEQ ID NO: 287900 - DNA, 331 bp, Glycine max
ctcaagttttagctggacaattccgcgagcctcgatatattattcccctgaatcgcacctccgagtgaaaatgtatgacctattgattttgctaagagcttgcgagctcatattcgagcgtctcgatatattatgcccccgaatctgaccttagcgcgaaaggttatgaccatatgaactcctcgagagcttgcgttgtctaatttcgagcggctcgatatattatgcacctgaatagggtctccgagggaaacgtcttgaccatttgaatctctcagagctcgcattcatcagttttaccgcctcgaatattatgcgcctgaatccgacc

SEQ ID NO: 287901 - DNA, 420 bp, Glycine max
gatgcaacatatggagaggttaatgaaacatctttatattctctccatgagaggttggatcaaatggagaatagagatcataatgaaaaaaaaaggaggagaatagggaatgatggtgttcctatacaaaaccgaattgatggtattaaactcaacattcccccctttaaaggaaataatgatctggaggcctacttggagtgggagatgaaaatatagcatgtattctcatgcaacaactatgaggaggacaaaaaggtgaagcttgccgccactgagttttccgactatgctcttgtgtggtggaacacgctacagattgagatagcaacatatgaagagccaatggttgatacatggacggagatgaataagatcatgatgaagcgatatgtgccggctagttactgcagggacttg

SEQ ID NO: 287902 - DNA, 397 bp, Glycine max
tttagtttgacctgtccacataagtgaggcttctatttgccaaaagatgaggagtattaattgttatcattgtctgaaaataatgctcatcaacataacatttgtgtggtttgcagaattctttgagcttagaagcatattcccccaatgaatccgaaaagtgttcaaaacctattaaaacatgcacacctcactgaaaaatgatacaataactgccacaaattttgtgtaggaaatcagttttgaacactagagaaaaaacacatttaatagcataaacaaacaatttataaagactaaggataagatcatgaacaaatcatgagccagaaacccacggatcaagagggaataaaggatcatcaagaaacaatatgcgagtactttcatttcaaga

SEQ ID NO: 287903 - DNA, 429 bp, Glycine max
  unsure (1)..(429): unsure at all n locations
tttgatggtgtcgagaagaaatcacatgtntgtcattttcattttaggggagaatgtgaatgtatgtatacatgaatttgatgatgtcaaagaagaatctaacaaggctgcttcaaatgataagcatttgcttcaagaataattcaagattgcttcaacaaacaaagccttgtttcaagattcactaaagaccaagccttgccttaaaacaaagtgctttcaagacatgcaaggctctggtaatcgattaccaggaagtgtaatcgattaccagaagacagggttgagaaatagctgttgaaaaaggttttgaatctgaattttcaacatgtaatcgattaccatatgtctgtaatcgattaccagcaacgaaactttggaaattcatattcaaagtcataaccctgcanattataactgtgtaatcga

SEQ ID NO: 287904 - DNA, 353 bp, Glycine max
  unsure (1)..(353): unsure at all n locations
tagcttggcgacaatgagaggttttgagtcggagtgcaaaatcaaggtgaaagtctcgaggatgagcctggcttgctcaatggagatttgaagtgactcaaagattgtcgctaagtcgactcattggttggaggaagacttgagaagcttctacttcagtggaattagggtttgtgccaggtcaaagaagatgagacgcaggattggcaaaaggccatgcttgaaggattcgcgccttgggtgaatcatggtggttgggtcccttgccaatgaagatggcatgcacgacaaaggaggtcgaggagctaggagggggaaaagtctatggggaagaggtggtangtggcggaaat

SEQ ID NO: 287905 - DNA, 434 bp, Glycine max
  unsure (1)..(434): unsure at all n locations
tggtgtccctttcatttgtgacattggcatttattatgttaattactctataccctgcattcattgggtctgaaataccaaaaatcccaactcaatgttcagcagtgccttctttatgtcatcaaataccaatggaaggaatggaagaggcttaaaactacatcacttttaattgattcaatgttttccaaggttatgaaaattaactaacctacacttatttccacgacgttggatacaactttacagtctttagactgccttccaaaaagagacgagacacattcattcagcaagatttatataattcagtctgataaacatagaagagaatttttattctctaaaatttacaaaacataaaacagaacatgacataatagccaattnttattctcttaaattttgatgacatatctagaggactacaaacc

SEQ ID NO: 287906 - DNA, 398 bp, Glycine max
  unsure (1)..(398): unsure at all n locations
tctgcttgaaggtaaactanatgccttggttaacctggtaacccaactggccgtgaataaaaaatctgcacctgtcgccagaatctgtggtctatgctcctctgtcgaccaccacacagacctttgcccttctgtgcaacaatctgaagcaattgaacaacctgaagcttatgctgcaaacatctacaacaaacctcctcaacctcaatagcaaaatcaaccacaacagaacaattatgacctctccagcaacaggtacaatcccggatggaggaatcatcccaaccttagatggtcgaatccttcacaacaacagcaacaacaaccttattttcaaaatgatgctggcctaagcagaccatacgttctttcaccaatccagcagcaacaacaacaac

SEQ ID NO: 287907 - DNA, 530 bp, Glycine max
  unsure (1)..(530): unsure at all n locations
acaagacccgcacgaacgcaaaagagaacagaagaagcaantnaaaaaaaaagagaggnatnttgactgatacatngcanaccngnaanaanaaacncaagcccccnancnngggcaaaacgggacgaggacgttagttctatccnnggcaanncgacgcgcggaagcagcagaagccaacactccaacagcaggtctgcccagatacacgcaaatcacagcaggggagaagcaccacacctgcccccgacaaacaccattcgagactcaacaccacaccgggaaaaatgccagagggaatggagacaaagaagcccctgacgaagaccccagaacaagcagccaacaagctgacagcacacagcaggacagcagcctagatgaggaccaggaacaccacgcaaaccaaggcgagcggtcccagaacgctaccgagggcaggccgcgaagtacacgaagcacgcctgaagcaaagccaacggagcggaaagaaatgccgtccaaaggcgcagcagggacattacaagccn

SEQ ID NO: 287908 - DNA, 334 bp, Glycine max
agcttggcataagaccggtattctttatcctaccaagccattgctagctctaaacaaatcaacaagatttgttggaagtttgcacacaaactaaaatggtgattgtcttatagacggatatatcactcaacacttttagtcttttctctcaaggtatacaaggtgttttaagatcttagtatcttttcaagaatttacagagatatttttacaagaaagaacgaaagaatgactcacgtgaactgttcgtgtattgtttcttcaaagcttcttctatatatagtcttcgtctccaagtatccattgtctctcaatgggtggatccttcactcta

SEQ ID NO: 287909 - DNA, 439 bp, Glycine max
tagagaggaagcttcaatggaggaacagaatgagagttagagagagggagagagagatagatagagagagagagagagaaagagaaagtggcatggaaaattgaaggaagaaagggagagaagttgaactttgaagcgtgtctcacaagactctcatttatcaaagttgtgacaagtgttacacatgtttctatttataacttaggtcactaactaaatgaaattcactttttttgtgattttcattttcatttcatgtgaatctaagaggaatattccaaggatataccaaagaaatcttagcatattccaagaatatgccaaaggcttcttagcatattccttttagatgccacaagaatggaaggtgtgactctagcacatgggaaaggaatatgcctcaagaatatgccaaaggcatcttagcataatccttgag

SEQ ID NO: 287910 - DNA, 390 bp, Glycine max
  unsure (1)..(390): unsure at all n locations
agcttgacggagtttggcgcatcggggaacaatttcactttaaaagtgggtcccaattggattcccaattttcaacttacctatttggaagtgacatcatggccgctatgtcccagctatccattgtggattcagtcacaaaacaaacttgaatatgttggactatctaacacggngattttcgattctatttccacacagatgtgggaagcactttctcaggttttgtatttaaacctctctcgtaatcatatccatggtgagattgcgactacattaaagaatccactatctatcccaactattgatctaagctcaaatcacttgtgtggtaaattaccctatctatcaagtaatgtgcttcagttggatctttcaagcaattcattc

SEQ ID NO: 287911 - DNA, 414 bp, Glycine max
  unsure (1)..(414): unsure at all n locations
tagagagattcccgatctgagagggttctgttctgttttcaacaacataactcaggtcaagatacaccaaatttgagagattcccaatctgaggaggaatcttcccgtggattccagtatcagagaggtctaggtgagtcaaggagctcattgcacaaaggaaagaagaaattgccataccttctccaagtaaatcattgtagctcaagtcaagatatcgaagcttagagagattcccgatctgaggaggaatcttccccatgaatccagtaagagcgaggtcgaggtgagtcaaggaagtcattgtcccatggaaagaaggaattgacataccagctccaaataatatattgccgctcaagtccaagtaattcaaatgttntaaatcagccaaacaaggacttatctctccac

SEQ ID NO: 287912 - DNA, 397 bp, Glycine max
  unsure (1)..(397): unsure at all n locations
agcttcagaccaaggcaactcaaaatctatgtatctaaaacccctcaatttagtggattttcaaggtttgagaagtgaaaatgagaatggggtaaatttagagcaaactctcacctcacacaagtctataaccttaatctaaacttgctcaaactggtttttcacctaaaattccaccaaatcaaaatttgactcctcaacacctaattttaccctagaaatggcttttgccttcactttggtcttttgtttttctctcttgcacagcccaagctttctcataagtcctaaatgacatttcaaactangactaactcactttaacctncaatttctactgaatccagaattagcctttcaaaccctcaaagcatcacactttttcactcataacact

SEQ ID NO: 287913 - DNA, 430 bp, Glycine max
  unsure (1)..(430): unsure at all n locations
tcctcggggccatttcttgcgagaacaaacattcagatgttagttttaccagataatgcttaccttaatgcaaaaaatgtcatgccaatccctctaatttagactaaactcataagatccattcatgcacacacgcatgtgtagaaaataccctattatttatatcaacatacaaggatattcaaaacattctagttaccatacatataaattttttttgaaagaatacttacacgcatgctcaaggtattgtgcccatatgttcatatcctaaacatttgctatttacaaactacctatacatgtttgaaatgtatatcatacaaatttttattgtttctctcatattcatttatatgcatgtcggaaagctaattacattatgcacacacttttgcatttaaaagggactntcatgccatctaatcta

SEQ ID NO: 287914 - DNA, 395 bp, Glycine max
agcttcaccacataatcgtgacaaccaaacagaaccctatccccgacatgcagaaccttcagcagaggcaaagagacggagaaagaagcgagcgcgttgaggaacacgccgttgagcttcatgaccgagacagtgtcgcagtggaagaggcagcgcgggagcgccacgtagcgcgagagcgagagggagagctccacgcgctcggcgcggcggcgcgccacgtgacacagccaagtggcgatgtcgcgcgcggagtagttagggttggcgcagcgaaggcggaagcgctcgatggcgggcgcgtcgtggaggaggagcacggagtagacgaattcggcgaagccagtgagacctccgggatgggtggaactccgggaggactcgtcgtcgaagtc

SEQ ID NO: 287915 - DNA, 427 bp, Glycine max
gtacgcacattgtttgcgtgtatgatatccactccttaggtttgttttagaggagagcttcaaccttataacgcaacgtggcggacaaaagtgggcagataacttgaatggtcatcattgtcaatgcggaaggtattctgcgcttcactatccatgttcacacattattgcagcttgtggttacgtgagcatgaactactaccaatatataaatgttgcttacacaaatgagcacgtcttaaaagcttactccgcacaatggtggcctcttgagaatgaagcggttattcctccttttgatgacgcatggacacttatcactgacctaactataattcgtgcgacaggtcggccaatatcaacaacgatacggaatgagatggattgtgtcgaaccatctgagcaccgacacaaatgtagcatatgt

SEQ ID NO: 287916 - DNA, 377 bp, Glycine max
  unsure (1)..(377): unsure at all n locations
agcttgtgcttatcaaatcactcctacatctcatctctagcatgcattttctttctttacccactcctcacgtttggttttttagggaaaaacaccataactaaacgcgccgcaagggatccctatcgcaccagatccaaatctagaacgatgggtgatcaagaggagacgcatgaacagatgaaagccgacatgtccgctctgaaagaacaaatggcctccatgatggaggccatgttaagtatgaagcagctcatggagaagaacgcggtcactgccgccgctgtcagttcggctgccgaaacaaaaccgactctcttggcaactacgcaccatcctcccttcaacatagtacgacnggtaagggacacactgat

SEQ ID NO: 287917 - DNA, 434 bp, Glycine max
cgctttgtaggtgaaatcaggtgcagccatttcccttagtgtcctctcacggggtggaggttgtgccatgttctcagaatgtgcaaaatcagaatgctcagaatcagaattctcaaaattataatgctcaagatcaggatgttcaaaatcaccaataacagaatgcacagattcaccagtaatggaatgctcagaatgatcaaaaggtataaaatgatgcctaactaatctatgaaatgtcctatctatctcaggatcaaagggttgtaagtcagatggattgcctctagtcatacactacattcagcgtgcacacaactagttgccttgtcatgtaaataaaggtgtaggtttgaactacagctaccctcaaatgatatccaaatgacttgaaatcttatgagcaaccctataaaattatgagaagatagcac

SEQ ID NO: 287918 - DNA, 381 bp, Glycine max
agcttctcctccaattttctataaatagggggagaagtgaagtgaaaaagggttcagccccttaggcacttatctctctttcgaatttgcttggaaaaattgtttctgtgaagaaaatccaagccgaggcgcttctgaaacgttttcgtaacgtttccgtgaggaatttcgcgaaggtttcgaccgttcttcgacgttcttcattcgttcttcatcgttcttcgatcttcaacgggtaaatacctcgaaccaagcttttcgattcattctatgtacccgtggtggtccacattgtgtttcgtgtatttttattctcgtttcatttactttgtatacccccctttgacgtgccttaagccatttatttaagtcatttctcgc

SEQ ID NO: 287919 - DNA, 272 bp, Glycine max
ctattagcacacaccaaactcactagaacaccccagcgcccacgcatgtgtgaaacataccctataatgtatctgaacataaagagatattcaaaccatacctagtaccatacataaaagttacggatgaaagaagactaactcgcatgctccctgtatgagtgaccgtatgttactagaccatacatatgctatccacaaactgactatacgtgtgtgaaaggtacatacggcaaatgcataaagattctctcatgatcaccgacatgcac

SEQ ID NO: 287920 - DNA, 405 bp, Glycine max
  unsure (1)..(405): unsure at all n locations
agctctctatatgttggngcataatttagggggtctctagttgcgaccacccaccctccttggccaaaagagacttagcttcttcatcttgcaattcaagacttcttacctttttatcattttcatgtccatcatggcatcatgtgagttctaccatttaaaccatccacacagctcaaatccttcgtacaaactggaatctttgtttgtgttcaccattatagatacgtcacttttgaaagttaaagtcgggcgtgcaggtaaatagtacagtcatggtctataaaaatgaagaaaagaatgaagtaataaacctttgtgggaattttgattttgttgactatcagtaaacataaatccccatatatacttgctaaaacaatggattagagctattttagtcac

SEQ ID NO: 287921 - DNA, 436 bp, Glycine max
tcgtaattgttgcagagaaattacagcctgttctcactaactttttcttaaatcactattcccttatattgtttattttgccaactttgatctgcacatttaaatatatattaatgtcgtgtttgtttcagacatgaaatgccattcataatttgtacacattaataaagaattgaagttggaggtgatcctgatcgagcaaaacaacaaataaatatgtcagatgaatatgagaggagtgaacatgctgatgatgactcttcaatgggatcatcccagaaatgctcatcctttgatttgaatgaagaagctagtagcaaagataacaatgacaacgatgataagggattcgaggaagcaagggaagaaggtacttcaactaataaaagtagcagcatgacaaaggaaggaagtaatgaacggagaggtggcgtga

SEQ ID NO: 287922 - DNA, 430 bp, Glycine max
  unsure (1)..(430): unsure at all n locations
gcatgagcggcgcttggcacttgaacaagatgtatatatttatatatctccctccaatatgaattgtgactgtttaaatttcatttgctggtttgccctgtgctttgttgcttgttttcaatgtggcatgtgatttaattttctgggcattcttgggtttgaaattcctgacatcattattgctgtttttttgcattaaattgattgaacccttgaatttaaattgtgtaaaatattcttgcaaaaaccaaaagttgtttctaatgaattttccttgtgtattactaccatttatgagagatgctggttgttaataatgtaacatctttacattgatttatgatatggataaaatgcattctacactactgatggaggtttataaagaattataattngaagtgttacttgctggaagggttttccatat

SEQ ID NO: 287923 - DNA, 389 bp, Glycine max
ttaagtttattaagtgttgatgattataacacatatatatctatatgaattgttaaaataaattacgaattaatagttcaaataataaaattaaattaaaggaaattaatatattaagattcaacgataaatacttttaatgcatttttagtttaattatttattaactatttttaattgaaaaaaatatagtttgatttaatatatacatgttttgtgccatgtaaatattaatattctgtgatgtgtatatttttcataaggtgtcataacatgttgcataggaattataacattgtgattgagattggatgtatgtgataaatcgagtatgtgttgaattgaagatacatgtgtataagatcttgacgcattgagttgtgagctat

SEQ ID NO: 287924 - DNA, 238 bp, Glycine max
  unsure (1)..(238): unsure at all n locations
aaagggggagaacaaaaaaaaaaaagagagaaaagaacgaagaaggaaagcggaaaaaacaagagaccaggggggagaacgagagagaagngaccacagagaanacgaaagagcagaaagacgagaaggggacccgaacaaaaaaaagacaaacaacgagaaaagagggaaaacaaaggaaaggcgaagacaaggcgaaaccacaacgacgaagaaaaaaagaaagaaaagaaaaaac

SEQ ID NO: 287925 - DNA, 221 bp, Glycine max
acactctatcccctccacttctatgcaacacataacaaggctagttgttatagatactactaataatgttgcatacagaaactgaacctacggcttaataacttatacgtgccaagtcctttccatctggatagattattgataggggagacaacaacaaccaatgccgcacttgaacatgtagaagctaagactacggacatgtcataaacaatattctc

SEQ ID NO: 287926 - DNA, 432 bp, Glycine max
  unsure (1)..(432): unsure at all n locations
gggataaggacctactattccatggactaattatcttttacttatttncatggttctgttaattttttttctacgaaaatattctagcactcacgtatatatggaccgagaagaacatacgaaaaatattatagcactcatacatttaaagaagagtgaagaattgaagaattcatgactaaaataccatgggtgatgaatctgagaaggaagcattcatctctgagcggccttaagaactaattatctttgtaaactaatttagtagcatatgtacatattatttgcactccaaataagatattattttttttattgaaattaaagaagagattactttaaatcttaaaactaaatattggtccttacattaaaaaaaataaaaattctcacatcattctatgaatatatatatatatatatatatatata

SEQ ID NO: 287927 - DNA, 378 bp, Glycine max
  unsure (1)..(378): unsure at all n locations
ggcactcnatcttacacaaaggntcatccttcctctcgcggaaactcagtatatcagtattggcttcgcttctttttaatctaggaagaaacggggtaagtacttactttcaacgtctcccttagtagtaaggctttgagatggacgagtattgagccacttcaaggcatctccaattaaagaataatggaaaactctaagataatggttctcctttttattctgagccatccttattgtactgcgtagatcatatataatgaccaggtggttgtatggatcttcatggccaagtcagcaaatgcatgttgaccaaaaagagggatggatgtccgcttaacctctgttgctgggtattgtctcttggattgccatgct

SEQ ID NO: 287928 - DNA, 424 bp, Glycine max
tactaagctcgaaattgcacaagcttatcaactcggtttcacattaatatggcttatcaatttgtacaaattgtacaagcttttctaaatgcaggaaacacattgcaaggatactagaacacaagcttaaaacaaatataaggaaacttaaataagatttaaataatccaacgaacctatgttttttttttttttgcaaaaatatggtaggtagatagaattcataggaaaaaaagagatatagaaagtggccacatgttaaaaagttaacattacttttaatataaacgaacataattacattaatttgtggactattttctcaaatggattgataaaaagaaatagactattgaaattgctttctaggtttgcaataaagcctttattttgcaaagtactagtgttgaaaccttgctgatat

SEQ ID NO: 287929 - DNA, 371 bp, Glycine max
tttgcttatcgttcaactgagaagatatccttttgttaagggtggattctttttgaggttagagtttttgtttaagcatttccttgcacccttcttccaaaatttcaagtgtcatggttaaggattttaccctcttttcaaggtcaagacattctaacttgaattgccctgatttcttgcactcacaacaaatgattggactgttttctttcttatgataggatcttttggacgatccgctgaacttggaggattccttgtttctccacatacttctgatctttcttgtgataagacttatatcattatcttcttcattagagtcatcatgcttatattcttcttctaaagcatcattcaccacaaagact

SEQ ID NO: 287930 - DNA, 417 bp, Glycine max
  unsure (1)..(417): unsure at all n locations
ttgagaatcgtcaaagacggacatgaaaaaattttagttactttacaataggatangcacatagattgggatttggaagttatgtcaaccgcccactgctggacattgtataacgcagcatatctcagggcgctacttatggttacatattgagttgaacagaggctccagaaatgaagtttaagcagtgaaacgtaaccatcccgactagacagaacctgagatacatatttgttacgtctagacaagatacaagtccgaacagcatatattgtttccataaaattcaatatatggagcagaacacaatcagataactcactcaacctgtgcctatcttttatatttgtcatctgtgtcttcatcgcttttctttctcttccttcatcatccattgatactgaatgtgctcggaca

SEQ ID NO: 287931 - DNA, 386 bp, Glycine max
ttatcttttctgcttgagaacattaggtctttgtacatgtgcaactctaagcgacattatgtaggaggtagaaagattgtgtctaaaggtacaaacttcttcaatgcttaaaactctttgttataatcgattacaaggctgatcatattcgattacacaagtgtctgtagcttgtagagagattctagtatcggattattcatttaccagttaactgtaatcaattacgtaattcatttgagaccatgtctgagacttcatgagtctctgctttcatcgattatcagataatcgtaatcgattactgaattcttaagattgttcccagatgcgatctagaacactttaatcaacttcatcaataatctaatcgattacatagttct

SEQ ID NO: 287932 - DNA, 437 bp, Glycine max
  unsure (1)..(437): unsure at all n locations
nttaacccctttctaaatgataggctcaaaattttgataaatattccttttcaaaatggtttgaagagatatgtcttttcaaaaagctttttctgaacttcttcactggtaatcaattacaggtttctggtaatcgattgcattattatattttgaagggtcatgacttttgaatttgaatttcaagagtttcattgctggtaataaattacagacatatagtaatcaattacatgttcaaaattcaaattcaaaacccttttcaacagctatttctcaaacttcccatctagtaatcgattacactgcctggtaatcgattaccagagtcttggatgactttgaaaccctatgttttaaggcaaggcttgatcttgaagaaatcttgaagcacgactctgtttgttgaagcaatcttgtattaatcttgaagcagt

SEQ ID NO: 287933 - DNA, 379 bp, Glycine max
  unsure (1)..(379): unsure at all n locations
agcttttcgtacgatgtagcactactgatcttaaaaatacgtaaacggaattaccgataacagacttcacaaatttgtgtcagtggtgactatcgagctcctcctcctgcaattgccatattgatgcttattttgtctaacttcacctatcgagaattgttgtgtcaagtatccatttatgttcaacctctcaaacattaataaatagaaatctcattcttacatgaatacatgcataagtaaccatgggcttgattgaatatgaaggatgtctcaaactacacataggtntgtaaattgttttgtgcttttgcaatacgcagtcactaaactcctatagttaactagcggtatcaaaacatgttaatccaacctaatt

SEQ ID NO: 287934 - DNA, 426 bp, Glycine max
  unsure (1)..(426): unsure at all n locations
tcccactgatgagagtctgctcactcatgttgtcacttttctaatgattntttccccttttggattgacaaatataggttgttttttgtgtatatttcgtctgattggtttgtatcattgatttctctttgcagataaaggatggatttgctgagggcaaggatcttgttgtgtctgtcatgtctgctatgggtgaggaacagatttgcgccctgaaggatattgggccaaagaactagcttttggtgctggcagcctgttgtttctatttaagcaaagatccttttgtaagcctttatattggtttgttcaagacctggcttatggcttatagattctagtcagactagtcttaacaatggtgtttatggatgtggtcacagaaactatatcacattttttctggttttctatgctgtcctatga

SEQ ID NO: 287935 - DNA, 327 bp, Glycine max
  unsure (1)..(327): unsure at all n locations
tagcttctagaaggagatcaacttgatgttctatgcttcttgaaggtggcagtccatgaggaatctccttggaaaagacatctttaaattcctgcaataagggttgaacactaggagaaacataaatagttaactgattagaattatcactctctctcttttgtgtatcactcttttcctcgggtgtatcactcttctttttcatattcctttgtggagcctcactattttctttctcttgttctctcttttctctcattctgatttaggcatcacatgcttatctangggatagagggctaagaattaaccacgaagatttgacta

SEQ ID NO: 287936 - DNA, 436 bp, Glycine max
ctataaaactcagcttacaaggctgcgagtggggttttttttatcttttcccttatgttatcaaacataaaaagggaaaaggtaatattgtagccgatgctctttctcggcgtcatgcattactttctatgcttgaaacaaaattgattggtcttgaatgtttgaaaagcatgtatgaaaatgatgaaacttttggagaaatttttaaaaattgtgaaaaattttcagaaaatggtttctttagacatgaaggctttcttttcaaagaaaacaaattgtgtgtgcctaaatgttctactagaaatttgcttgtttgtgaagcacatgaaggaggtttaatggggcattttggggtccaaaagactctagaaacattacaagaacatttttattggcctcatatgacataggatgtgcagaaattttgtgaacattg

SEQ ID NO: 287937 - DNA, 405 bp, Glycine max
  unsure (1)..(405): unsure at all n locations
agcttataatctntcttaagtggggtgtattcaatcctgaattttaaaagattttttattaaaaaaattacaattttcaatcaaacttttaaataataaaaataagtcttattggtacaaatatttcaaaataaatatcatgtgaagatttaagacttatctgtttaagctttagagaataatggttctagtttctctttttttttttagaagaaaccattttcacctcataaaatatattgaaatagttctttagtttattttttctgaagacttgcccaactattatatttttgaaatatatcttttaacttcaaaatattttcctttcanaatcaaataaacataaccttanacaaaaatattaaattntatttagcagtttagaaagacatggttgagttc

SEQ ID NO: 287938 - DNA, 435 bp, Glycine max
  unsure (1)..(435): unsure at all n locations
ntacaaagatggattataacctactagaaaataaatttatattgtattaattgaaaattagaacaaaattcttttctaagatgaaggaactaaatttatctattttgaaaagacggcatctacactggtccaagaggtaccatttttttaagccattagatcaatctcgtgcctacattattacaatacaccatcaacaccttacaatttctcaatcatcctctttcactttcctgtccacactttcgctaacgccgacagacacgtcgctgctgaacctgcaacaggtaaacccttgccggcgacactttatcacacaagcaatttagaatcatgattccaacaatatcacacacatgaaacctaacacctcanaattcaccaccaatctaaaccttgcaattgcaacaaagacacataaatcagttgcatcaa

SEQ ID NO: 287939 - DNA, 216 bp, Glycine max
agcttctatttatcagaatttattagatcctcattatttattagtttctaaaacactacaatctcctgacttatcaaccaaagaactttcagctatctcagaactttgcccatcattacttgaggtaatcatactcagcttatcagaacttccctcttcttttatgttggtaactatttcacctgattgtagacactctaagacacaatgtatact

SEQ ID NO: 287940 - DNA, 427 bp, Glycine max
tgtaggattatggagtacccatcacatgtggtacttttgggtttcgggcgaaggtgcacaacaagttggaccatccacaagacgcgcataaacccaccatcccctgatgcccacctccaactaagctcacgtactaccacgtagcccatatggctgaactctctcaacaccaggtccccatcaatcctggaggacgggacgacatcaaagtaattcagcatgtaaacagcacaagctatctcagccaaacgaaacagggcgaaggcagaaaactctgcccaaaacgccaaccagaatcaaagctcttcacatacagatacccgagacacattgccttcgttgcgattcgttaaccgttggatccactcgaaattatgactgcaagtctctagtacataagcctacattcagaccgtagggatctact

SEQ ID NO: 287941 - DNA, 406 bp, Glycine max
  unsure (1)..(406): unsure at all n locations
agcttgagnttattatagntgaccaataaaaaagctaattaagtttttagtcatggggttttaaattttttatccctaaactattntaaaaaaaaaattaattcctaaaaaatttgttgttattaaaagtagttcatgtcattgatatcctctattaaataatgaaatgttatgaaacaagttagatgtcaggtgtatgtcatatatatgtcacgtaagttttattacatttaagtaaataattagaatattatgttattaaaatgtaaaaaaaaaaagaaaaaagtcattattgaaccctaacgcttcaagcaccatgaactacattaaccatccatgagcagttcatcctcctcatctattatctatgatgatattcgtgaccatttaagtaggaattatttat

SEQ ID NO: 287942 - DNA, 437 bp, Glycine max
tgaaccatgaatggaggcctttatctatgttttcatatatcttaaaggggtacaaaacaaacctttcccctagtccctaacccctctaagcttagaaaaaaattaggaacacgaaactatgctaagacccgctaatttctcgcttataattcgctctatattgagatcagaactggtgctaatctagaacgaattcgaatttatacttttgtgggtctctaaaatcaagtcctatctttcaaatgcctttggtctcattcaatttagagttccctacaatgttgtatgactattataccaaaacagattcagagagaccaatctgtagatgactttgcatgtagagggttatttgagtaagtacatggtttgtgatgcacaagatatattctcaagtatttctctgtttgtcttggtaaggttcacgagtgtccatt

SEQ ID NO: 287943 - DNA, 385 bp, Glycine max
  unsure (1)..(385): unsure at all n locations
agcttctagctttttcttgtctgccttaaaataaattgtttggctgctacaggttcgcaaatggagagagtggcaagctttgcaagaccttaaatcacttttttcagaagaggcaagcaaatgcttataaagtttggtcttttcttccatgtttatcacttctatttcagtgtcacttattggttttctgataaatattatactctaggttcttgatgttattgtatccagcacaaatgatttggggcctttcagtcttgacaatttcagaanaaatttgtctgcttcatggagagttggattangaaattcaaacgctgaacatgaggtttggaagaattatgtgcttctgcaattctgcatggaacttttaatttggtaattt

SEQ ID NO: 287944 - DNA, 437 bp, Glycine max
aacttgtagttgtatagcatttggttactcatggctcaatcttaaagtaatataataagaatttaatgatcgcatattaataaatgcaaaaaaaaatttacatgatgaatcaattaatttttaattattagttataacttttagaatatttattataaaaggcaataaatttatgatgcatgatccatgtatgacttattttctcaaattataatacatactaggtttagtcttctttttcttttttttttttggtaactaggtttagtcatattttgctcatttaaattcagtgttgttttagtttcttcaattttttattttaattaatttttttctcttttatattaaaaaattaattatttaatttttatttaaaattcttaaactaccacttttattcagaatcttaaaaaacttaagtaaattaaattgtt

SEQ ID NO: 287945 - DNA, 408 bp, Glycine max
  unsure (1)..(408): unsure at all n locations
agcttgaatctntatgtttatgatcaatagaattatgaatatagacaattaattcactaaatatatggtttcaattaattctgaaaagtggatcagttcgattttttccttttaagatataaatattataaattttaaatatatctttttacgtcatttaacatttatcaattaacttatcaattaatattatcaaatattaaattaacttataaaattttaatttacttttaatctttcaacttctaacttataaactttcagctaacttatgagctaatcttaccaataatcaatttgataaaaagaaaagctaatgtatatctaatcatccgaattagaaaanatcacttaccttattcaaaatcaattcctaaataatgataaaacaaaattcaattcctatat

SEQ ID NO: 287946 - DNA, 437 bp, Glycine max
  unsure (1)..(437): unsure at all n locations
ntggaacggaggaagcaactgtgttgcaactaataatctttttggtaaacaatatttctacaaatatattgaagcaaactatttacaaaggagtgtgcaaaacgcatgagacctcataaacgcattacacactcccatctctatattcccttcctccactttcatgtgaaaattcaagtactatgacaacaaataaaattgtaaacccaaagggttcctaggttgctacaccaagactcacattatgtatttgagtctcagctgttttagaagatgttagagaacagctattcatgaagatacaaattgcgagtgtgccaacaatttgcggaatctttcctctctgtccctacgagactgggaggttgtggtccctgatggcgtccgtcgtttctttcttggtcggaagaaaaaatcttgtgtgtcaagaacatatg

SEQ ID NO: 287947 - DNA, 399 bp, Glycine max
  unsure (1)..(399): unsure at all n locations
agcttctacttatgtggcagggcgggcttccttcactttcttgtctccaacgcgagctttgaccactgttcttccttccagcgatgcttcttttcatgttcgcctgagtgggcttatagcctaaaccatacttcccacggtttccttgagtatttatcaggccagttatgccaccgttgtctttgcctaaacccatcccgggttcataaccgttccccaacataactcgggccatcattaccgctgcattggacagacaaggctgcccaaagagggagtccacggaggaaatgctgaccacctcanaagactggaaagcagtttctaacgattcttctacggcttccacataaggcatggaggatgggcagcttaccaagatgtcttcctcgcctgaca

SEQ ID NO: 287948 - DNA, 432 bp, Glycine max
  unsure (1)..(432): unsure at all n locations
tgtagaattatggggtacccatcacatgtggttctatgtggcggtcgggcgatggtgcacaacaagttttccacatccccaaagcgcgcataaacccaccatcccctgttgcccacctccaattgagcttacgtactcccacgtagcccatatcctcgtttctctcaacaccgggtccccatcaatcctcccaagcttccccaacatccaggtaaaacaacattcaaacataacaaactatcacagcgaagaaaacagggcaaaggcagaagctctgcccaaaacacaactcaaaatcacagctttttctcacttaaagaccccagtaacatttccttcgttccaattcgttaaccattggatcgactcgaaaattttactggaagtctctagtacataagcctacattntgaccgttgggatctactagaa

SEQ ID NO: 287949 - DNA, 402 bp, Glycine max
  unsure (1)..(402): unsure at all n locations
agctttgttccatataaaagttaattcaaacaaaataaaattgatatagttgtgacaacttctagggtgaaaaagtttatcaaatgatctatgagtgaagcaccattattaatccttagatttattattaaaatatttcgatggttcaaattaaaattaaataattttaaacaaacaaataaataaataactgtatttctatctttttcattctcaccccacccccaacatctcaaagatgttccacaggaatctgggaaatcttaaaaaataaaaattgttcatacatgaaaaattgataaaacattaaatacattntgtccataaagaaatgctctcatgtgtgtgcctgtaaatcattttcatcacgagaataacaaaataatctaagtaactgaacat

SEQ ID NO: 287950 - DNA, 432 bp, Glycine max
taggcctagaggggatggaccttttcaggttttggatatgatcaataacaatgcctacaggttggacctcccagaagagtatggagtcagcaccacttttaacatttctaatttaattccttttgcaggtggaactaatattgaggaggaggaactaacagatttgaggtcaaatcctcttcaagggggaggggatgatgcaatcctccctaggaagggaccagtcactagagccatgagcaagaggctccaagaggattgggctagagctgttgaagaaggccctagggttctcatgaacctcagggtagatttctgagcccataggccaaggttgtgtccaattatctttgtacatattagattaagatgtcattatattttgtctttgtatttagggctccatgatgtaggtagggtaccctagaaata

SEQ ID NO: 287951 - DNA, 398 bp, Glycine max
tcttgctttaaaatttgaattaaaacgtttagaaattgttggtaatcgattaccatatatgtgtaatcgattacacagtgcaaattttgaattcaaattttaatagctgttgtaaatcagttttggccactggtaatcgattacatcctctggtaatcgattactagagagtaaatctcttgaaaaagacttttttaacttaaatttcttggccaaaccttttgctacttcaattggaattcccttcctatttaatgtaatcttcttaagactttagagactgtcttggtcatccatcttgaatatctttgatttctttgtcttgaataaaactttgagaaacatgtaatcctttggcaacatcaaaacatcagcttgatcctttgtctacaacctac

SEQ ID NO: 287952 - DNA, 170 bp, Glycine max
  unsure (1)..(170): unsure at all n locations
ggcgagctgttcctcaagaaaaanggggggtggtgatctgcgcaggaggaacatcgtctaagcgtaaccaagttattgggataatggggcgactgagatattgaatatatctcgagggagactacgttcgtgactggatcaaagctgataggggagttattgattgaagt

SEQ ID NO: 287953 - DNA, 402 bp, Glycine max
tctgcttctattgctcttcttcatctttacttgggctatctcagaccttttatgtttgttgtctaagattttgcatacacctccttcaaagtgaagtgtgtagcttctctccatcatttgaccaatgcttagaatattttcttttaggctgggaactagtaagacatcatggatgagtcgcatacctttatctgtctccaccatgacagtgcctttgccttttgattcaaccacacttccatttcccagtcgaactttgactttgacagactcgtcaatgcttttgaaaatagtctcatccttggccatgtgattgctacatccactatccaagtaccagcttcctcccttttcttttattgagtcttgagtggcatagaacgtacattgttcttgatcatg

SEQ ID NO: 287954 - DNA, 435 bp, Glycine max
taagctttaactatagaagatctccaggatgggtatcttttattaacaactatttcgaaagtgcaaattaggttatgagagccttcttttagggttctcaaagcgtattagaggcttcttttcaatggctactagatgtagttaagtctttacagaactgagtgaatgaactgacaatattagaaaattacaggacacaagaaatacctccattattatcagttaatggtgcaagagtcttcaagtgcacatgcagtgcatacgatgatcacaatcaagacacgcacaaggcatgcgacaagtgcacaaacgtatgcaatgagaagaaaaacattatagaacccacaaacagcctgtacagtgaacagctgttctcgctctccagacctccaaacagcgattcaagcatgcaattgattggtagtggcggatgaa

SEQ ID NO: 287955 - DNA, 342 bp, Glycine max
  unsure (1)..(342): unsure at all n locations
agcttcataatgattagatcattatgatgcaatcctatcccccaagggcattggatagaagactccaagaagattgggccagagatgtaggagaaggccctagggttctcaagagccttaggatagattttgggcccatgggtttagtatgagaccacttatctttgtacatattagattaaggtttcattatttttgggccttgtatttagggttccatagtgtagggaggctaccctggtaatataggattttttagcccttgtaatttatggcacctagactagtttttgtattaagggtagttntgtaattttacatgcattaagtgcactatttgat

SEQ ID NO: 287956 - DNA, 442 bp, Glycine max
  unsure (1)..(442): unsure at all n locations
tcatcaatgtttcttggttcaacctgtgaaacttaagctcatgttgttacacaaaattctaagtctagagttcgtagaaacaccctttgagatttctccaactatgttgtctaaggggagatccttttgagttctccactctctaggaaattctttaggcattgttgtatagatctctttgctttgttcaaaatcttcagccttgatgtcatattcaagaaaaaaatccttttcctaaaaacctgtatcttcttaaaaagaattttcttgaacaataaagttagtttcatcacaaaccacacatataaattcttcaacagttaaagttcttttattgaatactccatatgctttactatgcaatgaataaccaagtaagatagcctcatcagcctttgcatcaaattntccaagagagtctttatcattgtttaaaatgaaa

SEQ ID NO: 287957 - DNA, 383 bp, Glycine max
  unsure (1)..(383): unsure at all n locations
tagcttangctaaattagtctaaactttcgtaagctatttaagctaagtctagtccaacaagagggatctgaggacgaagcttagtttaagttagtctaaacctatgagggctgtctaaattgagcctagtccaacaagagggatctgaagacgaagcttccattcattcaatctcactagggatcgaggtttagtaatttatgcttcagcatacaacacaaaagcatgattgattagagaaacatctttatatacatcagctggtttgttagaaagacccaacatctttacctattgcttgtcaatttacttacttgcattngtactgtttttagcctaaacttagttaattctgtctaaatcatcaatcatcaatgttttt

SEQ ID NO: 287958 - DNA, 201 bp, Glycine max
  unsure (1)..(201): unsure at all n locations
actatagaaactaagcttgcacttgagggngacatacaagttttggttggttttaaacacacccacggggggagcttctaatgaaattgagccaacaccattttcatattgttaatttaattacctttgcatgaggaactaatattgcggtggaggaactatcatcattgtggtccaagactcttttagggggaggggaag

SEQ ID NO: 287959 - DNA, 397 bp, Glycine max
  unsure (1)..(397): unsure at all n locations
agcttttgataaagaaagaagaagaagaagttcaaagagactcagaaatcaatgtggaaaaattgcttgtgtaaagaatgaattagaaaagatagatcttaaaatgcaaaacaaagccttgcttttatagactcttcatgtctggtcaagagaaccattagaagagttatgacctttagaaaaacttaaaaccaatttgaaaaagtcaaaaactatttgaagagttacatcttttgatttgttcagaaactatcactggtaatcgattaccaaatcagtgtaatcgattacacaaagcttttttgtgaaaggatgtgactcttcacaatttaatttgaattccaacattcaaacacactggtaatcgattaccanatcattgtaatcgattacaaca

SEQ ID NO: 287960 - DNA, 430 bp, Glycine max
tatccttttcttttacagattgcaactttaaatacctttctatcttcattaactagcccatcagatttcctcccttgaatattggcatttcaagagttctccgccaatttcttctttgtgaagcattccccttattctctcctattgaattgtctcgcaacctgccctttggcgggggtgtgaaaaggcctatcgaatgggccaagggtgcatcttccgttgaaggaaaatgtgtggagtcgccatcaacgtttatttgaggaaaacgtcagaaaaaccaaaatggaaaaggccgagggtttgcgtgttttgaaaatgaggattcgaaagttgtttacgcaagaggaaggtattaacacccccacacacccgtcacaagggaaggcagcctctaatagagtgtgaaaattatgacttcaaaactatttat

SEQ ID NO: 287961 - DNA, 405 bp, Glycine max
  unsure (1)..(405): unsure at all n locations
agctttattagagagacaagcctgttggattagagctagattangtgctacgcactcttgatttggatgggattgttaagctcttcaatttggaggaaggggttgtctttactgtcaatagaactcccaatatcttgctctattggatagtatttactctacaatgaccctgataatgattatgatttggcttatgtgatctctagatggttggatatgtagaaatcctattagtactagtatcctctcaaaataagaaactagacgatgtcattattggtaccataccaaagcatattgacaatgtataacccctagatacctatacttcataaggtcgagtattgcatatttgtcttagatttttagaatgtgagtttaagcctaactcaaccccaaagctag

SEQ ID NO: 287962 - DNA, 442 bp, Glycine max
ctaagcttccgtaaagaagcagaaacaatagtggctcgttgttttctgtatgatcagttacttcactttcttatcttctagattcttcttcctatgcatgtctttgatctgcataatcttcaactgtttataattttttaatcttaaatattttaatggacaacattatacaaaaacttaataaaacaaccaccaaattttttgataaaaaatgccttttttccctctctcatttacttacatatttttctctctctttttattttgattaatgtatacgtggatcaatacatgatttttctctctcaactaggttgggggtcacaccttacaacatctccttcctgatttgattttctctctcagctgggttgggggtcacactttacaccatcttcttcctgatttgattgatgtatacgtggattaatacaatgcatat

SEQ ID NO: 287963 - DNA, 395 bp, Glycine max
agcttgagttgttaggtgaagatacataaatgatttcattcattctatcttcttattttcttttcttgtaagtacttattgagaggtttattcaaaaatatcatagcaggcaacattcctagactcatcgtaacagatgcagcaaaacatccatgccatgattaatcaagaatttaaaataaaaaaaaataggtaagtataatcaacacttcatagtataaaccttaccaccaaattaggaaacaagtttaatgagtcaatagaggccagatcattaatgttgttattagctgtatgatgaattgaaagacattagctggtatccacaatccagatagcattgcatatgttgaaaatgatacttatcaagaaggaaagtataatattacccaata

SEQ ID NO: 287964 - DNA, 437 bp, Glycine max
  unsure (1)..(437): unsure at all n locations
ntaattcattatctttgaagacactgacttgcttccattnttttaatctagaactggaacaagtggagcaagacccagatttcataatgttgtctcgccaatttaaagctactgcaatggagcttatttctgttttggagctggtaaagctttgacctttaacacttctactaacattgactgaaaaacatgacatgctatttgagcattgagctttaaaaactctagtattcttttaagattggttggataatatcattatactccatgtttgaataaaatattttgtgttatagatatgaactttttgttttatagtgataaactatagtttttaagattttgggaatgccatcctttctgtgttgcatttgtattagttgcttacatttccttgctttattatagaaacaaaaaactggtggtaggacaaaagt

SEQ ID NO: 287965 - DNA, 408 bp, Glycine max
  unsure (1)..(408): unsure at all n locations
agctttgctttttttttcttcgccagngaaaggatcaatgtgggtccgaaaagacgcaaatttgatcatcctactatgacgactgagaaaactggggcaaataaagatggtgaggatgagggagaaacccatgctgtgactgccattcctatacggccaagtttcccaccaacccaacaatgtcattactcagccaataacaaacctcctccttaccccaccacccagttatccacaaaggccatccctatatcaaccacaaagtctgtctaccgcacttccaatgacgaagaccacctttagcacaaaccatataataacaccaacaaaaaggaattttgcagcataaagcctgtanggttcaccccaaattccggtgtcatatgctaaacttgatcccatatctac

SEQ ID NO: 287966 - DNA, 438 bp, Glycine max
  unsure (1)..(438): unsure at all n locations
ntagactcaactatcttcactttcagggatttagacgtgatcttcttctcttcctatttggagctcgtctctccaaattaagaccaacagagtccctccgtgggagctgatcacaagtttgaagatgaaccttgaaataaatggaacacactagaaaaaggaaagactagtttgtatgagtaatttcaaagctttttcaacaacagtttgcaaatataagtttaaaagcaagtttgaaattgttttgtccaaagatgaaaattcgaggaaagggatatacatgttagaacaagaatacttgttttttaactaattcattcaacttgaattatgtctaattcttcttcaacctaaaaagagttccattaatcaataattgactacaaacaagttttttttcccaccaatgcttgcttacaataagaattctctttgtcg

SEQ ID NO: 287967 - DNA, 400 bp, Glycine max
agcttgtacattcaatttcgagcgttccgatatattacgggactcaatcggacatccgagtaaaaagttattgttgtatgaatccggacatagctgcaacattcaatttcgagattttcgatatattacgggactcaatcacacatccgagtaaaaagttattgtcgtttgaatttgctcagcgcttcggtattcaatttcgagcgtctcgatatattacgggactcaatctgacatccaagtaaaaagttattgacgtttgaatttgctcaaagcttcggtattcaatttcgagcatttcggtatattacgggactcagtcgaacatacgagtaaaaacttattgtcgtttgaatttgctcagagcttcaacattcaatttcgagcgttttgatatatt

SEQ ID NO: 287968 - DNA, 449 bp, Glycine max
  unsure (1)..(449): unsure at all n locations
ctcagcttctatataagctgaaccattntatcaataaagacaagttgagttttattcagaaaattagagtttatctcttttatcttagtgagagtgattctcctaaattcttgagtgattcaagaacaccttggctgtatcaaaggactttcacaacctttgtgtgttgccctcgctggaaagagtgattctttccttcctttcatcttcacccttgttctttcaaaccacaattccagaaaatccacctctgcccagaattatctcgtggccataactcccattttacgcactcaaattaagtgattcttgagcctaaattgaattccaaaacgagagcttccacctcgttttggaatcacctcatttggagccctgtagcttccgttattgccatttctatatttctgtccagccaccacttaacctacgttntaccatcccattca

SEQ ID NO: 287969 - DNA, 316 bp, Glycine max
tcaatcttgctctaaattcacatggatgtgagtatttatgggaggaggttgtatgtcatttctgttttaagagtagtgtcccgctggtaaaactaactttccaaatgtttgccttcgcaggaaatggccccgaggaagcttgcctcaaagaggtccaggaaggacaatgcagcagaaggaactagttccgctccggagtatgatagtcaccgctttatgagcgcggtacaccagcagcgcttctaagccatcaaggtgtggtcgtttctccaggagcgacgcgtccagctcaaggacgacgagtatactgatttcc

SEQ ID NO: 287970 - DNA, 431 bp, Glycine max
  unsure (1)..(431): unsure at all n locations
tctcccctattntgctataaatagggggagatttgattatgaaaggggttcagccccttaggcacttctctctctctctctcgaaattgctgaggaaaattatttccgtgaacaaaatctaagccgaggcgctgccgcaacgtttccgtaatgtttctgtgagtaattacgtgaagattctcgaccgttcttcaagattcatcgttcgttcttcgttttcttcagtcttcaacgggtaagtacctcaaaccaagcttttcaattcattctatgtacccgtggtggtccacattttgtttcgtgtatttttattctcgttttcatttgctttttatacccccttttgatgtgcttaagccatttatttaagtcatttctcgcttaatctaaaaataaaataaatttccaccgatcatttaaattgtatcatc

SEQ ID NO: 287971 - DNA, 398 bp, Glycine max
ttatatttgtgggcggacgaaccctgatgaccacagtggcatgatcgctggctgacctacaccgatgttgtcagcagcctcttcacgggtcctcacactgacccttcctcctactgaagcatgtcgcctgtgctaggctagtgggcgcataccatctataaacatacaccaatgacttggctgacaccacccacgagcgggggtctttctcgcctatcctttagggctcgacgacactccactgagggactggtctcggtactgatgatatgactatagtgctactttaccttacgcaggatatgactgtaagacatgttgctgctaacactgttgatcaacttggtacccagagtacgcactcgtacgcttaaatgagtggagacacctttgggctt

SEQ ID NO: 287972 - DNA, 410 bp, Glycine max
tgtcctcggtgacgaagacaattgaataagcctctttttgcttttcacaggcgtcaacgattctcaaaatgaagggtctgtgtttggaagtggcgatgaggtggagaacaacctcggtgtcggaggtagtgttgaagatggacccgctgtcctcgaggttggttcggagggtgcggtagttgacgaggttgccgttgtgggccacgccgacggagccgaagcggtagccggcaacgaagggttgcacgtttttgagcatggattggccggcggtggagtatcggacgtggccgatggcgaggctgccggggagctggtccagcttcgactggttgaacacgtcggaaacgagaccaacgccggtgatggattggaggacgttgttgtgaaccgtaacgattccggcgcct

SEQ ID NO: 287973 - DNA, 364 bp, Glycine max
agcttctcaaggaagcttcttaaggaagttttctcaagaaagcttctcaaggaagctacctagtctataaataaaagcatgtgtaacacttgttgtaactttgatgaatgagagtcttgtgagacacaaatcaaagttcaacttctctctcttttttcttccttcaattttgtgctcccccctctttcttttcctccattgaaacatccttccaagcttcttatccaaggctcatcttggtggtgaagctccttcttccatggcttattccctagtggatggcgcctcctctcacctcttctcctttgttttccgctgcatctccatggtgaaaaattaccattaaaggacctcattgaagctc

SEQ ID NO: 287974 - DNA, 432 bp, Glycine max
tctcaaagatgtacttaaccaggtccatcttgttatatttaccaggtggtatggctcagcatgtattgtcttagacggtgggacgcccagactaaagcacaacacgttctttcgagcagggagtagttcatttcataggccgtgaactttttactcaagtagtagacagcgcgttctctcttcccggactcgtcatgttgccccaacatacatccaatcgactcatccaaaatcatcatatacaagatgagaggccttcctggtaccaacgacataagcacgagagggttcatgagacactgtttgatccttccaaacgcctcttgacaatcctcattccaacggacggattggtttttgcgtaagagttggaataacggctcacaattagcggtgagttgtgatatgaatctggcaatataattcaaacgt

SEQ ID NO: 287975 - DNA, 399 bp, Glycine max
agcttgctcttctgggcgagctaagtggcaagctcctcccctattttgccataaatagggggaggagtgaagaagaaaagggttcagcctttttggcacttctctctctctcgaaattgctgaggaaaattatttctgtgaagaaaatccaagccgaggcgcttccgtaacgtttccgtgagtaattacgtgaagattctcgaccgttcttcaacattcatcgttcgttcttcgttttcttcagtcttcaacgggtaagtacctcaaaccgagcttttcaattcattctatgtactcgtggtggtccacatcttgtttcatgtattcttattctctttatcatttgcttgttatacccccttttgacgtgcttaaacccattatttaagtcacttctcg

SEQ ID NO: 287976 - DNA, 431 bp, Glycine max
tgccacccagctcgcccaggcgagcaaggttgttttcttctattcaacagccttctggaggaatcttctggagggcccaagtgggtctggttgctatttgcacccccatttttactaagtacacccccttgcctttttttgggtgattcttttttcgtaaagttacggaaacttacgaatttcgtaacgatacttgttttctttccgtaacgttacggaaccttgtggattacataatcatcccctttttgacttacggaatgttacggaacctcactaattgtgcaacgatgcttccatttgatttccggtatgtcatggaaccttacggattgtgcatcaatattttcttttgttttccggcatgtcccggaatttcacaaattgcctaatgatgggtgccaagcacctcacaaggaccaaacaaaagt

SEQ ID NO: 287977 - DNA, 217 bp, Glycine max
tctagcttctccctcttttccctataaatagggggaggagggaagaacaaaaacgttcaaccctcctggtatctgaggatcacttgaaattagtgaaaaaaatcgtttccgagaagaaaatcgaagccgaggcgcttccgtaacgcgtacgagacgtttccgtggttgatattgtgaagaacttacgccatccttcgtttgctatacgccgatcttt

SEQ ID NO: 287978 - DNA, 379 bp, Glycine max
tgtcaagccccccaacttggacaagtgttgacttagttttttctgcctaggtgtctggggtggacatacttttggctttgcaagtgagatctgatgagtcatgtgagaaaagccattgcatttgaagactttcccttttactgaccgctggagagtgccttaatgatagacatctcattttgtccattgatgcaggcgtgtgcatcacactcgcaatacttttgcgtacatgtcactcgtggatgacgcacacactggagacgtgatgcatgggtaagaggggctgtggtcgggtgcagaaaattatggtaccactctatcgccttacagctaccgaagagcatggctcctctttatatggagcatacgcttgatctgt

SEQ ID NO: 287979 - DNA, 396 bp, Glycine max
  unsure (1)..(396): unsure at all n locations
agcttttatgggatcaaggagtctactatgtgttcaacaagatggatgaggattccaagcacatcctaatagttaatggtttagtggttgctaaacaacaaaagtttagcaagaataacctaaaggctatgaaggtgtccttggaacaaagcttgaaggaaactccaaaagtgggcgtgaaagccataaacaagagaaaacaaaaagaggttggccaagtccattgttgatgaagaccttggtctgaacaactttggcatttcaaggaaaattanaaagatcatggttgaaaaacaaaagaagaacaaaaccagaaaacaatctcatagggatgaagaagaaaaggaaatataggcaaagaagcataggaccaaaagaaggcatgagtctattacg

SEQ ID NO: 287980 - DNA, 425 bp, Glycine max
  unsure (1)..(425): unsure at all n locations
ntntctttntccattgctcctcaatgacaatctcttcttcttcttcttattgggcttgcttcctagtttggacctttccctgttgctctctaaggaccctttgaacctttttatcaagttcaaaggtcttcaaaggcttatcttcactagcaacagtcttggccagtttcttctgcctcctttgtaggatttcatcttgatttacttaaggaatagggttgttccttctagtgtcaactttcattgcctttaggttaaaagcactgaagtgttgctatctggcaatgaaagttcccttgctgttgatggaatgcttggagtcctcatctagtctttcaaaggcatggaatacctagtgttcctagaggaagttgttgatgagggtggcagagtagatatcttccactcctcccaaggccttcatg

SEQ ID NO: 287981 - DNA, 382 bp, Glycine max
ttgcacttgaggagggaaggaaatttgcagctaatgaacaactctgataactacttgtactttatgactctcgtgctaattctatcacagtgtaaatattcttatatcagtttgtccaagaacataatcatgtgcttaatatcattcattaacggtcacggatctatcgcactattaacgaactatggatatcagacctattgttaattacattttgaccgtataaatatcttactgattcaagcagatagacgcttaatacgaagtttaattaactctaatggctcctggaggacccgaatttgaacatgaattacattgatcttgcaccatgttttaaacacctctgacacactatccagctattatgcatcatgctcag

SEQ ID NO: 287982 - DNA, 430 bp, Glycine max
tccacttgtatactgcatcagtaatatttaatagctctatgttttccctctcgtggatgtagccttgatcaaaggtgaaccacgtaaatctgtgtgttctttctcatctctctccccctttcaatttgctgcaaaatctgtgtgtatggcatttctgttctgttgcatctactgttgttgttcttgattgttcttcatcacttccataacaagaatgatattataacacaccaggtaagaggaaagaagaagaaacaaaataggattataaaatagacgcaaatgattataatgaaaaaaaaaagtgttttacctatgatgaggatgaaggcaacttagattgagtttatgaaaaaggagaggatgtggtggtttccatatttacctagcaaaaaaaaaaaaaaaaaaagaatagttcataacgaagttg

SEQ ID NO: 287983 - DNA, 201 bp, Glycine max
accatgacgcgacagactctatggccagaccgacatcatgagcggatgagggggagccaccttcataatggggccatgtctgagttgtacaccgtgcagatactgcagggggtataatcctatgcccgtctacagtgggcttattgataattgagccggactcttcctagatatagccgaccaactgtgacatatgatata

SEQ ID NO: 287984 - DNA, 387 bp, Glycine max
  unsure (1)..(387): unsure at all n locations
agcttctccttccaattcattccaaatacgttcctagtttttatatctaataactaataatctgatcatatactacaacgtccctagcttaatttgcagaataatgttacatatatatggcatcctcaaaccacatatggcatatactatttattttcatcttttacatgatgtatatctggaccgaaagagacacgggtgacgggtccaccccatcatgaaccatttattttttataatgttgaaagaattggcatatatagtagattaattctaattggtttgaccatgatcaaggtatctgaattttttgtacagaatgaatattttagtactgtcattgcaagagattattncgtatgagaactattcataaacatccatcat

SEQ ID NO: 287985 - DNA, 437 bp, Glycine max
  unsure (1)..(437): unsure at all n locations
tcacatgtttgagcggactcatctagtgaaacatctttttgatcttgaaggattttctcaagttttaaatgatctttggatagattcttgaaataacttcatagatttttagaagcatttgagagaataaataagttacataaaatttcatgataagattttttaagagacttagggtcattgaaatttaccacatcttcctagtctgatttggatccttcaaaagttgtgtctgtcatcaagcatatgttggcttcttcatcagacgaggtgtcgtctaggtcttcacatgtgctcataagccccttattttctttggtcttaaagaatttcttcttatcttgacttttctcanaatctggacattcatatttgaagtgtctaggctttttgcattcatagcaaactatgaagcttttgtttttattccttttttt

SEQ ID NO: 287986 - DNA, 368 bp, Glycine max
  unsure (1)..(368): unsure at all n locations
gcttgtcgtatcctctgcaagtccaagggggtcgaacccaaaatctccagcaagactgaaaagcatactgtttatgtcaaaaacttgaaaagagacagtagcaatagcagaacaagatgcccaagagaagtgtacagcctcacgttccatcaagatgaggtgggggatcaagtcctgggagccatgtatgtcgctgttgcgccccaacacaagtttgcctataacgtggagtggcagcagcaccatccccaagccacgataatcttccagctggtgaacctctatccaagctcttggtgttgaataaagagccgggctgaatggagaagcttcttcctattgctacgggcattggtntctgattatct

SEQ ID NO: 287987 - DNA, 424 bp, Glycine max
  unsure (1)..(424): unsure at all n locations
atgctggtgtaagaaccgtgttttcattttgtttcttatgttgngatccttgatcatcaatcatttctttctggaatagctgatgttcgtgatcggcacagggatatgcgacttgatgttgataacatgtcttatgaggtaaaatctcatttctacatctggatggaaatattaatatatctatacaaccatagtgtcagtttatcccttatatttcaagtcagtgcttcgctttagagagtttctcatgtgacattcgtgactataacaggagttgttggctctggaagagcgcattggaaatgtgagtactggattgagtgaggaaactgtattgaaacacttgaaacagagaaagcactcggctganaaagggcctcagattgatgcagaaccctgttgtgcttgtcaggtaaacctgact

SEQ ID NO: 287988 - DNA, 363 bp, Glycine max
agcttctatggaggctgaatctttgagcttcaatgaggtccttcaatgatgattttcaaccatggagatgcagcggaagataaaggagaagaggtgagaggaggcgtcatccactatggaataagccatggaaggagaagcttcaccaccaagagagtgccttggataagaagcttagagaggaagcttcaatggaggaaaagaatgagaaggagagagagggggagggaggcacgaaattgaaggagaaaaagagagagaagttgaactttgaagtgtgtctcactagtttcacattcgtcaaaattatgacaagtgttacacatgtttcaattatagcctaggtcattaactaaatgaaag

SEQ ID NO: 287989 - DNA, 433 bp, Glycine max
  unsure (1)..(433): unsure at all n locations
tgagcatgtcaacatgaagcatatntcttaactgtcgttaactgatttactaaaaggactacccaagatttgttggaaaactcatcttctttgtgaagcatgttataaagggaaacaaatcaaaactacctttaaatccggagatattgtttccactaccagacctttgcaattgttacatatggacctatttggacctacaagaactttgagtctaagaggaaagaaatatggctttgtcatagttgatgactattctagatacatgttggtatagagaaaacggttataactgtctgtaatttattaaatctataaggtaattgattattgtaacaaagttaccaattagattatctaagtaatcaattaaagtgttcatccaatatatggaaaacaactcaagaacaatgtaatcaattatatgacctga

SEQ ID NO: 287990 - DNA, 401 bp, Glycine max
tcaagcttggagaggatgcttcaatggaggaaaagaaagagggagagaaagagagagggggcagcacgaaattgaaggaagaaaaagggagagaagttgaactttgagttgtgtctcacaagactctcattcatcaaagttacaacaagtgttacacatgcttctatttatagactaggtagcttccttgagaagcttgtttgagaaaacttccttgagaagctagagcttagctacacacacccctctcataactaagctcacctccttgagaagcttccttaagaagattcctaaagatgtttgagcttagctacacatacctctctaatagctaagctcacctccttgagatgagaagctaaagcttagctacacaccccctataatagctaagctca

SEQ ID NO: 287991 - DNA, 432 bp, Glycine max
  unsure (1)..(432): unsure at all n locations
tacatattggaaaggtacactttcgaaagtctttactgttaaaaaagctgaattttttaacatgagatgtgaaattggaaagatgctaatctacatagttcatacttttttataaatgtttttttttttgccaaaatatttttccacgagagaaagtgaagtgttaatgggatctgaataaggtatcaaccaagaaaagaaaatacagccaaaaccaaagcagagagacaattagcaataaaactaactaataaaactaaggagtaaggaaccaccaaaattattcagggtctctgtcctgtgttgtacatacattaaataaatggcaaggttctaaaaccactatgcataatctaacatanaataaattatataaataaatgcaggtaccttaaatttgatatggccaagccaagctttgaacataatcat

SEQ ID NO: 287992 - DNA, 400 bp, Glycine max
agctttttatgggagtcaagaaaatgaaagtgctccgaaaccattagctggaaaagaagattatgatcgggtcaactacatcgtaactatctttgggaagacccaaaagaagccatcatctgagctaaacatatggaagaaaaggtcaatattctttgatcttcgatactggtccgatcttgatgttagacattgtatagacgtgatgcatgtggagaaaaatgtctgcgatagtttaattggcactcttcttaacattaaaggctagacaaaggatggtttgaagtgtcgtcaatacttggttgagatgggtatacgagagcagttgcatccgatctcacaaggtccacgaacgtatctgcccccagcatgttagataatgtcaacaaaagagaagtga

SEQ ID NO: 287993 - DNA, 434 bp, Glycine max
tgttgtcttcgtttagtttcttggttgtagatatctttttatacaatcccaccttgtgatatccaccagaattgttcgcatatgaagcatacatcaatggggggtataattccaaccttattgaaaaattttatttgcataatatcacttgtgctcaatttcttgtgaccaagtaacattgcacaatccatttcatccaacatgtcatggttgtggtcaaagtcaacatatgtaacataccaatgatcgttactaaagttaacgtgaacatgaaacctagcattgcaaccaccttgtatcattttttcctcacgcttcctagttttcaatgtcaaaccactatcatttcaatatccaacatgagagcaaataaaagtttgttgtaatgttttccctataatgtttctcataacaatacttttacggacaaagaa

SEQ ID NO: 287994 - DNA, 384 bp, Glycine max
tttgtttggcttggcttggctcttaactgtgttgccctcaaagttctgaacattatcttcaacatcgtgcactggttaaaggaaaaaaattattcaagatcacttggtagcgtctttggcattacgtggtatatggtttctttgactactttataatgaaattataacgctcattttgattctatttacttgattaaggttttcttctaaaataggcacagtctgtttgctattgattctcttgtttggaaaagggactcttgatttaatcttgaaatcataggaatttgacttctctaatatgtgtaacttactttaagctcatggttgcagaggaagaacaatacaaatagatcagtgttatgtgtcttatattgtttttat

SEQ ID NO: 287995 - DNA, 431 bp, Glycine max
  unsure (1)..(431): unsure at all n locations
tgttttaaaaataatgattntagatcaactaatacgttttcataggaaaatttgaacacgagggtgaaatcttaattcagcacacacccatcattgggatttttaatttacattagaaaatgtgatctcgaagtttaattaattattttagaggctttaaaagttatgaaaaattatgaaagcttaataggttatatatatataaaaatgtacatcatatcgatggaaaattcatatttaattttattctgcttctgcctcagctccatctattactcttgctcaacaagaaaatattagcagcttagatattgagcatttacaaagtcatcttggacacaagctttctggtcagaaatatttactagtattggatgatatatggggtgatgatcgtgcacaatggatagtgttgaaagatttaataaaag

SEQ ID NO: 287996 - DNA, 402 bp, Glycine max
  unsure (1)..(402): unsure at all n locations
tagcttctatactttatacaagaatgaagctctgataccacttgttagacgagtggcctcagatatcttatgaagggggggttgaattaagatattccaaactacttccccaattaaaatctatttcactttttattcgagttataaattcccttaataatgaacttcttaaatattgattcaaataaaacaatttgaatatgaatataaagcaataataaacaaaggagattaagggaagagaaaatgcaaactcagatttatactggttcggccacacccttgtgcctacgtccagtccccaagcaacccgctngagagttccactatcttgtaaattccttttacaagttctaaacacacaaggacaatccttcctttgtgtttagaattccattacaa

SEQ ID NO: 287997 - DNA, 428 bp, Glycine max
  unsure (1)..(428): unsure at all n locations
tctggtgggacatcttgacttgctttccaatctgactttcaccacagattctgccttcttctattttcagattgggaatgcctctaacagcacctttgtcaatgattttcttcatgcctcttaagtgcagatgtccaaatctttgatgccatatattgacttcatcttctttggagactagacatgtggaggagtaactggtttcttgaggtgtccataggtaacagttgtcctttgatctgctgcccttcattaggacttcactcttctcatttgtcaccaagcattctgactttgtgaagtttacattgagtccttcatcacacaactgactgatgctgatcaagttcgcagtcagtcccttcaccagcagtactttgttcagactangaagtccttcatggactagctntcccattccagtgatc

SEQ ID NO: 287998 - DNA, 398 bp, Glycine max
  unsure (1)..(398): unsure at all n locations
tttcatgctagcttgaggcgagcgacatgaagtttgccttgaattggtttaaactttgtcaagagatcttcttctttcttgaccaattctgctttagatcgctctgtttttttttttattggcccttgtattagcataagtttttccttagccttctgaaaacctttttgagcttgaattaacttatttcaatcctgctctatagaagactctatttcaacaatataaattgtatgttgactatgtaattgatgagctttaaaggcattattgaagatattaaggaaagattccattttcctttngaatctcatcaaccaccaagttttgaaatttgaacacctcattgattgattgttgaagttgaggcttgtaattcggattggaaagagagtctt

SEQ ID NO: 287999 - DNA, 412 bp, Glycine max
tccgcttattagtgcacaactccttctttaatttagcatatcttggaattttctttattgcatccagcagagatatgtttacctctacttttctaaatgtttctaatatctccttctctgcctcttccatttttttgttggaaattgctctttgagggaatggaagagggatatgttgcttttgtaaattagaattaccagtggaagattcacctgcatagaaattgttaggtaacttactctttaaatttttgtcatcatctttttctggagtagagtgaggttgggtaggttcatttgcggatgaggaagatgctactggttaaggtccttgacactgctttcctgacctcaatgtaatggcactcacatttttgggattctggacagattgagaaggtaatcagtcaga

SEQ ID NO: 288000 - DNA, 60 bp, Glycine max
tcttgcttactaattaacctgaaattgagagaaaatgattattaaacatacaaaatggaa

SEQ ID NO: 288001 - DNA, 428 bp, Glycine max
  unsure (1)..(428): unsure at all n locations
tataagaacaaaatngcctaatcattttcttttgtatgtgaattacgacgcatcaaaaagaatcaagccaaggctattgtgcaagcaatcaatggggcaaaacacaccaaattattatgatgatggatggctcaaattctcacaaaggtaaactcatcactttcaaattgagctttcaaaactatcatgacatgtagagaagaatcaaggatttctactgtggcatttagttttggggtctagggtggggtagtgaagtgagtcataccatgatggttcaaatagattttttacttaatagattcacctccattattagagtaaaatgagacaagtgaggtattgaaatatttttcatgcaagactctaaattttggaaaaatagaagagacatctaatttattctttaatggatacaaccaacaata

SEQ ID NO: 288002 - DNA, 396 bp, Glycine max
  unsure (1)..(396): unsure at all n locations
agcttcttatccaaggctcatcttggtggtgaagctccttcttccatggcttattccctagtggatggcgccgcctcttacctcttctcctttgtctttcgctgcatctccatggtggaaaatcatcattaaaggacctcattgaagctcaaagatccagcctccatagaagccccacaagcaagcttccatcaagtggtaatcagagcacaagagcttcaattaggtgctccttaaacctccattaatttttttgctttaccttctcttccattattggttcttcattntttctccatgtatctcctcacatgtcttggtctanatgttgttaacatgattctttagagtttcaaccaattaaacttgttatagaagctagatttgantttctat

SEQ ID NO: 288003 - DNA, 424 bp, Glycine max
  unsure (1)..(424): unsure at all n locations
tccatcaagtggtaatcagagcacatgttctttttcttgtgctccgtaaacctccattaattntttttgctttaccttctcttccattgttgtttcttcatttttttctccatgtatctcctcacatgtcttgtgctaaatgtttttaacatgattctttagagtttccaccgattaaacttgctatataagctagatttgattttctatggttcaaatttcttgtttttgttcttgaaccatgaattgtgttgagtttaggttcctttgagttttgtcttgttattttttgtggctgaaacctaaaccataaaattcatacaaaaatattaaagtagaataaaagctcataaatctagagtgacttgttcacctattgtagttttgtcatagaagtcatgtctagtcatgatacttgtcacat

SEQ ID NO: 288004 - DNA, 333 bp, Glycine max
  unsure (1)..(333): unsure at all n locations
agctttaattgattaccattgatgtgtaatcgattaccagcaatgaaactcttgaaattcaatttgaaaagtcatgacccttcaaaatataactgtgtaatcgattaccagtgaagaatttcagaaaaagctttttgaaaagacacatttcttgaaatcattntgaaaaggcacgaagggcctatatatatgtgtgtctgacttcgaaaagcaagagagagattctaagagaacttaattgtcaaatgctctctcaacaactcttgggcaaacacttgcaaatctattgagaattcatctaggaacttcaaattgtattatcatctctaaaag

SEQ ID NO: 288005 - DNA, 439 bp, Glycine max
tgtgcatccaatagcttgatgaggatgtcccttatgttcttaaaactagactgatccatttgcttccaaagtttcatggccttgcaggtgaagacccgcacaaacatctgaaagaattccatattgtctgctccaccatgaaacccccggatgtccaggaggatcacatatttttgaaggcttttcctcattctttagagcgagtggcaaaggacttgctttattaccttgctccacgatccatcacaagctgggatgacctcaaaagagtattcttagaaaaaaaatttcctgcttccaggaccacgaccatcagaaaggatatttcaggcattagaaaactcagtggagagaacttatatgaatactgggagagatttaagaagctatatgccagttgcccgcaccaccagatttctgagcagcttcttctccaata

SEQ ID NO: 288006 - DNA, 337 bp, Glycine max
cagtttttggtagacctacactagcggtgatgcactacgaggttgatcctaatgatcctgatccactcaaggatttattacggctacgtgatcaacttttgagcaagctgaaaagtaatttactaaaggctcaacaatatataaatatgcgagctgattagaaaataagagatgtgccatttaacgctggagatatgattttagttaagctacagccttacatgaaacaatcagcggctttgaggaagcatcagaagctatgcatgcgctattttggtgcgtttatagtgattgaaaaaattggtacgattgcatataaagaacaactgcctgagtc

SEQ ID NO: 288007 - DNA, 441 bp, Glycine max
cttgcgatttatccagctggaatccataaatgatgaggtgatattgaaagcttgctgtttatgcaaaaaaatggaatccagaaatgaagtgacattggaagctactctcaatattgcacaatgtttcatagcctctctttgtcacaatagttcggcgatgtgaatcaatcatatcaaactataagatcgacatatcctgaaaactagccgaaccatagcctgcatttttgaattcgaatctcaaatttggaaatgggaaagggtggaaggaagaagcaacagataccttgcacgctcttgctgatggaagattgaggaagctaacacgtgttaggaagaaataaaaaattggaaaaaatggatagcactaacacgggaaatcggttgttgtttattactaacatacagactagtactatgatatcataatagtctttagtc

SEQ ID NO: 288008 - DNA, 389 bp, Glycine max
agctttttggagtagaaacatgggaccaactcattttatttcacaaaggaagtcgtatctagtcaaggtctgagagaccatacaagtttcctaacgatttctaattatgtgggccattaagactatcatatgctgacaatagccgagaagcccatgaatctcttcgggggcggagtaggtgtctgccatcgccttggccttggctaacaatcggggaagttcttgactcccgttcaaggtaagagcataccgatccatccacatggatgcctcttggtgtaaagagtcgatcaccctttctctagcctctttttgcgcgtatacttgggcatattcgtccgcaatcctatgctcctgggccgcggctatacctaactcttcttggtact

SEQ ID NO: 288009 - DNA, 441 bp, Glycine max
  unsure (1)..(441): unsure at all n locations
ctcagctgaccagaattattgatgggtaggtgtgaatttttttgttcctgttgcggagatgatcgtacagcgggtgaaccataagcggaagtttcttttggtgaggtagccatggaaaagcatagcgtttggaatgatttcgtatatctcagaaggctattgggaaatgctggttaaaacacgaatgccaagcagatataaattttaatgaagaatgtatatgggcgtgtgacgcaacggtcgaatttgctttgcggtgaacgtgctattaatgttaagtgattcgtttgggcacgttcagattgcagtagctgctataatttctctagcagacaaatgcccatcttgcccctcagtttttcaaactgattagcatccaaagcctttgtgaaaatatctgctattngctgctcagtgtcaacatgctctagtgtgatcact

SEQ ID NO: 288010 - DNA, 401 bp, Glycine max
agcttctaagaaagcttctcaaggaagctacctagtctataaatagaagcatgtgtaacacttgttgtaactttgatgaataagagtcttgtgagacatacttcaaagttccacttctctccctcttttattccttcaatttcatgctccccctctctctttctctccctctttcttttcctccattgaaacatccttccaagcttcttatccaaggctcatcttggtggtgaagctccttcttccatggcttattccctagtggatggcgcctcctctcacctcttctcctttgtcttccgctgcatctccatggtggaaaatcaccattaaaggacctcattgaagctcatagatccagcctccatagaagccccacaagccagcttccatcaagtggg

SEQ ID NO: 288011 - DNA, 436 bp, Glycine max
gcttgtcatgatccgtctctttggtgcaaaattgatatgtccttacttaacagcttataattttttaacataccaaataatcagccatgagcttacaagcgtacaagtggaaaaattactcaactcttaaagtatgttctacgtctgagtaatggaaatacatattgcttagtatttaactacaatgtttacttgactgatgagtagttcatcatagatattgaaaggtaacattgtctcttattcttaattaccccttaatttgtacatgcattattaaataaccttttaaaacaaaaatacttcatcaatattagtgctcaagtctaaattaaatgccacgtataatatttatataaaagttgttgtcatatgggattgataagcgtgcgtgtgcctcgttatgttaggaccccaaatttgaaacaactagttc

SEQ ID NO: 288012 - DNA, 496 bp, Glycine max
  unsure (1)..(496): unsure at all n locations
gatgatcgncnatgaaccctttggatgaacgcgatactatagaacactcaagtgggaccgtggtcccagactaataatcagaccgacgatactattgggaccgtggtcccagactaataatcagaccgacgatacgagtgggaccgtggtcccagtctgattatcagaccgacgatacaagtggaacagtgggcccagagagaatattcaggccagttatgctttctggcctgtaacaaaggacattaagtaaagacagataaacgtagactaaaacgtggtcgcatcagggtgctggcttttcaagttccttaagaatggcctcaattttctctatacactcagttggaacacgagacctgtccaggttaagcaccattttatcgcccttatacaatactgtcgctccaggagcaaactgatgtcgagagcttaaactagttcttgatgcagatgacgttttaagcacagaagttaaaagagtgataacttcttn

SEQ ID NO: 288013 - DNA, 394 bp, Glycine max
tttcttatgctgcaaacatttacaatagacctcctcaacctcagcagcaaaatcaaccacagcagaacaattatgacctctccagcaacagatacaaccctggatggaggaatcaccctaatctcaaatggtctaaccctcaacaacaacaacaacaacaacaacagcctgctccttccttccaaaatgttgttggcccaagcagaccatacattccttcaccaatccaacaacagcaacagccccagaaacagccaacagttaaggctcctccacaaccttccctcgaagaactcgtgaggcaaatgacgatgcataacatgcaggttcaacaagagaccagagcctacattcagagcttaaccaatcagatgggacaattagctacacaatt

SEQ ID NO: 288014 - DNA, 419 bp, Glycine max
tctctaggaccttaggcaaaccttcttctcatccttcatgatcaaactgcctactcgcgattggtccctctcctctctccggagcttaagctcgctgttactgccccacagagcccctcgaaatttgttctggtcgtgttcttccctacgagcccttttggtctctcgttccaaggccttggtggtagctatatttacatctctcagttcggcattctcctttcggatcttgagagctgctgatttgaacctttctttgactgtttgggcttgctcgagttctgtcctagaggcatgcacctcttcgtcttcctccggtgcctcaacttcctcccctgtaaaggttctcaaactcgggagccaacccagaccttgcatgtgggctgtcaaccacttacggtagccgctgatgggcccgc

SEQ ID NO: 288015 - DNA, 301 bp, Glycine max
agcttgagaggattgatggggacccggtgttgagagaaacgatgatatgggctacgtgggagtacgcgagctcagttggaggtgggcaacaggggatggtgggtttatgcgcgcattgtggatgtggaaaaacttgttgtgcaccatcgcccgaccgccacctagtaccacatgtgatgggtaccccataatcctacaagcttgagatgaggaagtgttgaagggtgaaacttcctgcttttattgttgaccacagagtggtaccttgagatatgtcgcggcggtcacgagaccttgggga

SEQ ID NO: 288016 - DNA, 438 bp, Glycine max
  unsure (1)..(438): unsure at all n locations
acaaactcaagcttaggaacccaagctcttagcttcaatgcaaggaaacatatttatgcctaataacctaactnttggttgtggaagtaggaaggcatgaaaattatgacttgcttgtgagagtttntactcgaatttgggctgccccatgaggggtaatttgcacctaagtagtgtggaaaatactttacaatggtatgtaaatatgtgtgtaaatatacgnggcatggaaaacacctctcaatggtgtgtatatatgtgaacatatggcatgaaattccttgcaaagcgtgaatgagtatcttcctaaatgaatagaggtcgcttcctaaatgaatgtatgatggcatggaattccctttttacatgcaagtatgtgcatgacgtaattagctttccaatatgcatataaataaatgtgagtgaaacaatgaaagt

SEQ ID NO: 288017 - DNA, 388 bp, Glycine max
ttgcttgtgaaataaaagtgtcaatatgtgtagtgtatacactggggcgtcgaaaatttaaagaaaagaatcaacaagattgaaaggctaatatatcctctataacaaaatcacaaccacacaatatttatgctccttataaagaatcctaacgcctaaggtacacactcaacacaagaacacatcaattttacaacaaattcgcatcgaaacaccaattggtccatcaaacacactaaatccgtgattaaaacaaaacaacacatagttgaacttcataaaacattccaaaataacccataaattgatcctcgatgtagtcgctcaagcgttattcgctagcaatgacattactggtgttctctaaagctcctcttccgattgctct

SEQ ID NO: 288018 - DNA, 396 bp, Glycine max
tcaaggttatgacttcatgttgctcatcctatctctaatatacacaccacaaattctcctcatgttagcctttgcctttgagttccacccatattttagtgcaaaccaagaacctgagaagattatactcattctttacggctgggttaggttgagtggattggaagcaagaaaaaaatactccctccgttactatttacaaaaggttgtagtcgaatttaagctaattaagtattaacaagtactaatatcaattaataagacattaagaagtaacagtaacaactataaaaaatagtatcaattattaatcatcaatcatgcgtcatcaatatatatattatcttatgtataaattataaaataagatcttatcacataacaatgactatgttc

SEQ ID NO: 288019 - DNA, 395 bp, Glycine max
ttgcttttcactttataaagggagagtttagtatgaattttgatgataccatctgatgtaattctaccccccaagggtattggataaaaaacttcaagaagattgagccagagatgtaagagaaggtcctaggattctcatgagccttatggtagatttcggacccatgggctaagtatgagctcacttatctttgtacatattagattaaggtttcattatttttgtgccttgtatttagagctccataatgtagatagggtaccctagagatataggaattttcaacccttgtattttaaggcacctagactagtctttgtattatgggtagttttgtaatttcacttgcattaagtgaatatttgatgtgtgtgttgggaaataaatttaat

SEQ ID NO: 288020 - DNA, 411 bp, Glycine max
tgcataggataaattggagtggaagccaagactgagttttctgagacataaacaacatgccctatttaacaacttaccttttcaagaggccaatctagattgcaccttctccacaacatcatcaaagtcaaatttagtcactcagtcagttagaggtttgaaacccaagtacttcccaagtgattagtgcaactaatctcaagaatgtttgaaatctcatcttgaatcctttgaggaactgcaagagagcaattgtgaatataattatctacattcactttaagaccaaaagccctacaaaattcatgcagaaccaaattcacaactctagcttgatcaattgaggccttacaaaaaaagagaacatcatctgctaaaaaagatgagataagggaggacccctcgagataa

SEQ ID NO: 288021 - DNA, 393 bp, Glycine max
ttgcttgtttagtgattttaagcttttccttcaagacatatgcactttgtccctccacttgagagttctgccatatctctttgactacctcatgaaaagatggatcttataaccaacaagtgagcattctaaatggttctggaccccaatcatagttgttatttttaaccaagatagggcaatgatccgaaacgtctctatttagaacctcctgtattaatccttgccaaacatctagccaccccttagtgcatatgactatatcaattcagcgtttagctccccatttatacaataccaagtgaatttgtggttgatcatatgaacatctaaggatttcaagttttcatataggcattgaattcctctatttcctatgtcaactatttctac

SEQ ID NO: 288022 - DNA, 423 bp, Glycine max
gacctaagatactaaccttaaaaatgaccacatcattatttagatctgttgtttctttagctttttacgcattaagtctctaacgatatattactcacttttactttttataactttaaacaatttttctcttcaactcaacaactttaaatagagggctatatcaagaataattctttgtgaagttactctcttcaataatctataattatacatacatacatatatatatatatatatatatatatatatatatcacattaaattaagtttatttaacagagtatcatataattgcaagatttataaacttaattaactcaataaaaactctcagttctatggatgaataaaatttaatacagagacgatcgagacttacactaatctctgaagatacacacgtgcatcttcctttattat

SEQ ID NO: 288023 - DNA, 51 bp, Glycine max
agcttgttgatgtggaactattgcttgcatgtgggtgtgtccgtcgcttga

SEQ ID NO: 288024 - DNA, 188 bp, Glycine max
tgtcacgcaagctttcatcaccaactagccttattgattttaactgcacagcgactttaagggcccaatgagtcctcgatgcttatatcacgaacttatgtacgctcaaccttggctgacgatatcaatggtgatcggaaccataagtagatatgaaatactttcaaccttggccgagagaggttact

SEQ ID NO: 288025 - DNA, 377 bp, Glycine max
  unsure (1)..(377): unsure at all n locations
agctttcttggaaaatgttattgttttgaaggcaatgcttagaggctttgagatggcctctggtctgaaaatcaactatgctaagagtcaattcggaatttttggagattatgttaactggtctcaagaagctgctcactttctgaactgtagacagatggagattcccttccactacttgggcatccccatttgggtcagatcctcaaatcaggtggtatgggagcctttgatcagcanatttgaagctaaactcactanatggaaccagaaaagcttatctatggctggcagggttaatctgataaattctattttgaacgctntaccaatctatctattatccttctttaagttaccccaaagaatagctgata

SEQ ID NO: 288026 - DNA, 420 bp, Glycine max
  unsure (1)..(420): unsure at all n locations
tccncttcttcccacgttcttgcccttgaaacctcaccttggtctcactactcttcacatcacgatgttcggtgtccttgaagaggtgaacctcatctcctctatcttcttctcttcaaacaatcacgccaaataaaacccctttgacaacgagtgctcgtcgcgaagataaaaaacccttaccgaaccggatgagtaaaaataagacgcacaaaggaaaatgtatcctatgcaataataacggtggacctaagttcgaatatcaaacttagaagactagttgtgttcccaaataatcaatttagcaacaattacgcaaattgagttttatcaaattaagaaagattgtttttgatcaatttactctttaacgaagagaagaattaacacacaagaactgtgtgagaaacatttataatg

SEQ ID NO: 288027 - DNA, 356 bp, Glycine max
agcttgatatgaggaagtgttgaagggtgaaacttcctgcttttattgttgaccacagagtggtacctggagatatgtcgcgggggtcaagagaccttggggacgtcaagtggggttctattgcccaaaaccaagcttgaccaatcccgacccaacccgggcatagtcgatcagtgagaacctatgatgtacctaaacaggcgagctcctggcagtcaacagataaaaggagcaaagaccacaaagcaaggaggcttgtggtggctggccagttgtgaaacttgattgatatgtgagatatggtctctggtaatcgaataccaagggtgggtaatcgattacaaggcttaaaaatg

SEQ ID NO: 288028 - DNA, 443 bp, Glycine max
tgcgtcacaattcattgtgacagtcaaagtgccattcacttagcaaatcaccaaatgtaccatgagaggacaaagctcatagatgtgaaactacacttcatcagatatgtgattgaatctgagaaggtgaaggtagagaaggtttcaacataagacaacccgactaatatgttcacaaagatcctctctagtgtcaagttcaagcactgcttggacttgataaattgtgaagatgcctaaagcacattggttgaagtgcagccttgaatcacaaggtacacacttgctgatttagagtcaaagtggagatttgaggtgtgtgactcagaatcacaaatgacacaagtgataatactatagagtaatgatgtcataactgttttcacttattataactgaattgggtttggcaccaaagcatagctagagtgttcatatatatt

SEQ ID NO: 288029 - DNA, 389 bp, Glycine max
agcttgtctcatcgtttatgcgagacggagaccaacatgctagctatcatcgccaagtaccaagaagagttaggtctagccgcggcccacgagcataggattgcggacgaatatgcccaagtatacgcggaaaaagaggctagaggaagggtgatcgactctttacaccaagaggcaaccatgtggatggatcggtttgctcttaccttgaacgggagtcaagaacttccccgattgttagccaaggccaaggcgatggcagacacctactccgcccccgaagagaatcatgggcttctcggctattgtcagcatatgatagacttaatggcccacataattagaaatcgttaggaaacttgtatggtctctaagaccttgactagata

SEQ ID NO: 288030 - DNA, 431 bp, Glycine max
tgtacgcacatcgttcgcgtgtatgatatccactccacaatgtttgaagtataggagagcttcaaccctataacgcaacgtggcagacaaaagtgggcagtaaacttgaatggtcgtcattgtcaatgcagaaggtattctgcgcttcactatccatgttcacacattattgcagcttgtggttatgtgagcatgaactactaccaatatatagatgttgtttatacaaacgagcacatcttaaaagcttactccgcacaatggtggcctcttaggaatgaagcagctattcctccttctgatgacgcatggacacttatccctgacccaactacaattcgtgcgaaaggtcggccaaaatcaacaaggataagaaatgagatggattgggtcgaaccatctgagcaccgaccaaaatgtagtagatgtgg

SEQ ID NO: 288031 - DNA, 393 bp, Glycine max
  unsure (1)..(393): unsure at all n locations
agcttgtgctccaacactgcataggaagtgatgatttcgttgcttgcagtgtgaaccaacaccttgcgctctgagccagggttctccaccagcctcaccacaccgttcttgaaaacccaaaccccagacatattcttagcttagaaacaagaactagaggcacaacaaattgaagaataagaagaacaaattaataccaagtgttttgagtgtttacttttgagtgcttctgagttagtgtgcaatgcaagatggggaggggagtatggggtattgatgtatatatagtggtggtgaattgaagtcatgggtaagatgggttttaattnttttttttataatgtagaaataataaaaactacatggtggtgataaggacagtatattgagatg

SEQ ID NO: 288032 - DNA, 460 bp, Glycine max
  unsure (1)..(460): unsure at all n locations
cgcacactatagacactcaagcttgttgaagggtaccttntggcaaatcctgattactgaatgtctttcttgttattaattaagagcttggctatggtgcaaagtaataagctagccttgatggatctgcaagctcagcaccaaggctttcttcttctatgatatcttttatttatttttgttctttattaaaacatgggcaattaatcatagattaataatttattagttttttttttaactttcttcagcttttgactaatacatatgtcctttgcattggctgcaaattgatgtgtcgccgcttgcaatttggttaaaaaataacctatccttagaacagactaagagacacagagatgttagggatatttttattcaagttatgtgctagggtttagagagaaaatattanaaaataaatgtccggatagataatccactgtcatatgggactgat

SEQ ID NO: 288033 - DNA, 393 bp, Glycine max
agcttgtatggttaaagtctcacgattgtcacgtgctcatgcaacaattgttagtcgtggctatacgagacatcttgccaaacaaagtaaggttagcgataactcgcctgtgctttttttttccatgctatatgtagcaaagtcattgatcctgtcaagtttgatgagttggaaaatgaggccgcaattatactgtgccagttggagatgtattttccccctgctttctttgacatcatgattcacttgattgtgcatcaggtcagagaaatcaaatgttgtggtcctgtttatctacagtggatgtacccgattgagtgatacatgaagatcttaaaagggtatacaaagaatctatatcgtccagaagcatctattggtgagaggtacatt

SEQ ID NO: 288034 - DNA, 441 bp, Glycine max
  unsure (1)..(441): unsure at all n locations
ntaagtntgagggagtttgataatggttgtgcattcctatatttgcaatctatttcacaacaattatctcacttttccttgaatcgtagctaagtttgcccttgtttaagttagggaatatatataattagttagatattttcatacagttaaaatttagaaaacttattagcttttacatgtttttacagtaattcagtcattttagtgcacctggaaggaaattgagggtttggaagtgaaaattgatcactcaatgagtttgccaagtagcttaactaggaagccatattagaagaagacacgtggtagctggtggctaagcaagaagtctatctctcttagcagatttctcttgaggaagccatgtcaacagcatcaaggctcgttgagtgatgcagcctctttggaagaagaaaaaaagtgatcccatganaaatt

SEQ ID NO: 288035 - DNA, 393 bp, Glycine max
  unsure (1)..(393): unsure at all n locations
agcttcccagatccgatcatggaaggacttggcaactgcctttattaggcagtaccagtacaatacggatatggctcccgatcggaaccagcttcagagtatgactaagcgagagcatgagtccattaaggaatatgcccaaagatggagagatctcgcagcccaagtcgtacttcccatgaaggaaagggagatgatcacaattatggtagatacgttacccacgttctactatgaaaagctgataggctacatgccagctaactttgcggatctcgtcttcgccggagaaaggattgaatccagactacgaaaaggcaagttcgaatatgcttccaatgtggcccccaacaacaatagaagagccncagtaatgggcgcgaggaaaaagga

SEQ ID NO: 288036 - DNA, 440 bp, Glycine max
ttccctttggcatcatcaaaacattcagcttgatcctttgtctacatagatgactctcaaaaagcactttctaaaagataagatcgaatcaaaagtcactaataagaaagaacaagaaatggtatttataattttaacaaacaaaactgatttcatcaattatcaaatgtggtaattgattaatttgctaaatttcctctttgttccgcatttccaaaaacatggtaatcaattacaaattgtggtacttgattatctcgtttcacaaagagcttctcaagcttccatggtttcgaaataatcaattattttgacacaaagagctattaaagtttccagatgtgatggaagcttgcttgtggagcttctatggaggctggttctttgagcttcaatgaggtcctttaatggtggttttccaccatggagatgcagcggaa

SEQ ID NO: 288037 - DNA, 318 bp, Glycine max
tatcttatgcgcatatttacttacaaatgttctcttgcacaagacattctattaaccgaaaaaatgcacccatatacaatcaaggcaactccgttacctagattatttacacgtatttccaaggtgtatttgttacttacatcacacacatctccttggctaaattcacatacatgcatacccatagcattatggggtaccaaaaattgcacatgtacacctcttggtatttctaatacctatacatacaccaactttatgatgaatcttgactatctacacaataaggtgctacattcatgctctttcaagttttgc

SEQ ID NO: 288038 - DNA, 424 bp, Glycine max
  unsure (1)..(424): unsure at all n locations
tgttgtcattaaatcttacatgaattgtctcttccatagtcaaggtttntgatttgtacactctatatgccttggatgattcaaagtatccaatattccaaaatcacattttgagtcaaactttccaaggttatccttggtgctgaagatgaaacactggcatccaaatgggtgacagtcataaatgttgggcttatgtccctcccacaatacataggaagtcttttttaagattgaccttatataaattatgttctgtaaataataagcagtgattgctgcttctgcccataagtgtttcagagttaagtagtcgttaagcattgttcttgccatttcctgaagagatccatttttcctctcaacaactccattctagtgggatgttcttggagtacacaaattattataataccattctctt

SEQ ID NO: 288039 - DNA, 243 bp, Glycine max
agcttgtatgctaactggatgcattggttaacttggtaacccaactggccttgaaccaaaaatctgtacctgttgcaagggtctgtggtttgtgctcctctgctgaccaccatacagacctttgcccttccatgcaacaacttggagcaattgagcagcccgaagcttatgctgctaatatttacaatagacctcctcaacctcagcagcaaaatcaaccacagcagaaaaattatgacctct

SEQ ID NO: 288040 - DNA, 423 bp, Glycine max
tgagatgaggaagtgtagaagggtgatacttcttgcttttattcgttgaccacagagtggtacctggagatatgtcacgggggtcaggagatcttgtggacgtcacgtggggtgctattgcccaaaaccaagcttgaccaatcccgacccaacccgggcatagtcagccagtgagaacctgtgatgtacctaaacaggcgaggtcctgacagtcaacagataaaaggaacaaagaccacaaagcaaggaggcttgtgtggtggctggccaactgtggactttgattgatatatgggatatggcctctggtaatcgattaccaagggtgggtaatcgattacaaggcttaaaaatgaagacaagagactaagatggtctctggtaatcgattaccaagggagtgtaattgattaccaggcttga

SEQ ID NO: 288041 - DNA, 386 bp, Glycine max
  unsure (1)..(386): unsure at all n locations
tgctttatgaatcaaaatttgtcgcaatgagtcattcattttactaatttatatacagtccatgcatgttttcttactgccattattctttgcagccagttgaactttggagtggtaagcagctatttagcattatactgcgcccacatgctaatatgagagtctatgtgaatcttactgttaaggagagaaactacactgaagacaagaaaataaaagacaagaaaatagaatggaaaacattgtgcccaaatgatgggnttgtttattttcgtaatagcgagttgatctctggacaagttggaaaggttactttaggttagttactctaaatttaccttgtttatttcatctcatatttctatgctcaagacgattgtttaact

SEQ ID NO: 288042 - DNA, 430 bp, Glycine max
  unsure (1)..(430): unsure at all n locations
tgtaacttacaccccacaatgaatctatattgntggatgtgtagatgtgatccaaagagacatgggggtgagaagaggtggaaggcgacgccgatgtcaacacgatcgatggaggaactcggggagttgaagaaagaggaggcggcatctcaggagcactcatggttgtcacattggcactaaacaagggtgtagtgacagtggacggaggaaccacgacatgattagccgaaacgggcagcgtaacaacttcagcaataggagcaaccttctgaacagacacacaaagaagagatggaggagaaggaacatcaatagcaacaggaacaacaaaagatgcttggacaaaaaaacagagctagaggcggatcctgcaaacttgaggggtgacccaaactgagcatcaaccttgcatgcctacctcatcacg

SEQ ID NO: 288043 - DNA, 354 bp, Glycine max
tttcttttcacataatgcaagttctatgagtatgagacactggatttatatgaaggatcaagtctacggattgatagaatatgttagattcatatttactctctgacatgaaccatgctgaaagtattgattcgtgatctatagcatcgcctattattatattgatgttaaatgaagtcacgtgaaccgtacttattcctttttatgatagatcctgtgaagctattagattgatccttcgctcctatgacctataccatacgttatacaatgtcgagtgacacatatagggatgttacatactgaattcataccattatctcgtgccttatgcactaaaccattctacactgt

SEQ ID NO: 288044 - DNA, 321 bp, Glycine max
tgtgagagaggacctggactattctttggtgggtggcattatcggaactgacgagctgactgcttgctcactatccaataagagtgcggctctacactcgtacgccacctagcacatgatgcttactatggtagggcagtacaatgtagagtcagtccaggctgttacctatgaacacgagcatgcagacgatttcgccatgtgtgcacgaaattggaggctagaaggagcgtgatggatgctctgagtcgggaggagactatgtggatggaaaggcacatcttgacctgacatggcagtcctgaccgcccaccactacta

SEQ ID NO: 288045 - DNA, 386 bp, Glycine max
  unsure (1)..(386): unsure at all n locations
ttgcttgtgcatccaataccctgatgaggatgtcccatatgttcttaaaactggactgattcatttgcttccaaagtttcatggccttgcaggtgaagacccgcacaaacatttgaaagaatttcacattgtctgctccaccatgaaacccccagatgtccaagaggatcacatatttctgaaggcttttcctcattcattagagggagtggcaaaggactggctgtattaccttgctccaaggtccatcacgagctgggatgaccttaagagagtattcttagaaaanagtttccctgcttccaggaccacagccatcaggaaggatatctcacgtattagacaactcagtggagagagcctgtatgagtactgcgagagattta

SEQ ID NO: 288046 - DNA, 402 bp, Glycine max
ttcaagatatgtcatgctgtgagagtttaagatgagatgtgatctcatatcggttagatatatgcccaaaatactccttatgttgactctggaaatacttccgtttcgaactaactttgttattcagcacttataccaggtgaaattccagcaacatggatgtctttgcaatatatatctaaaatactaaagttcgagaactgtgagatccatcattcagtaaatgcaagaggaaaattaatgccacaattctcgaagagaataccagactttaacttcatggatgaaaaaggaatgacgtggttttgcagaagagaacttatagaccatatggaattgtctgtgattgaaaaaaactgagatgactgacatttaggaaccgtaggggatttatactcataa

SEQ ID NO: 288047 - DNA, 260 bp, Glycine max
ttcttctttaagagtttcatgcaggacaacctgcccactctccaattatgcaaatcgggggatgcaacatctgtggtggggcccatgagttatgtaagtgcatatcccaacacgatgcatccaaagaattcaactacatggctaatccatatcatcgagggttccatcaaggaggacctctgcgatacaatcagggagaaacttttcttaaggccaaggttggagatcccatcctgtgaatacattcattaaagattgac

SEQ ID NO: 288048 - DNA, 423 bp, Glycine max
tgtgacaccaggctacaaagttataaaaacaagtaactatggctaatagagtaactaaagcttttgacaataccaataactatggctaacactaactatttacttttaaacaaaacaagccatatatcctggtcaagaaaacatatactaggagtaattttctttataaatgattatgaaaatgaattatccgcatctccatgttcccctcctatccatcaaaaggaataagacaaggaattttgttggtcaaacaaatatcaaaataacaatgtcaaaacaacaattatgtacaatgatttataatttagtccccacaccatctatagaaaaaattaaacaccttggacctagtaatcatgattaacagcaaaactaacaaaaaatattgtgatcctccccacttgttcttaggccactaag

SEQ ID NO: 288049 - DNA, 392 bp, Glycine max
  unsure (1)..(392): unsure at all n locations
ttttgcaagcttggagggtatccatggatcttgaagcatttttcctttgtgtgtccatggatgttgcaatgagagcaaaacggtttatccttgcgagtaggttttcccttggcattggattgggttacaacacaagccatttcagcaggaggagcataattgggttgaacaccaacaagcctatgagtttcatcttgaagaaataatgagaaggtatcatcaatattcggagtcggtttcatcaacaatatttgacctcaagcatgggcaaaactctctttgacccccatcagaaatgacatgacaaattccnctttgatggaagcaagaagtggagcaaccctgccacaattacaactatgattggccttgagttcacccagcttagccca

SEQ ID NO: 288050 - DNA, 421 bp, Glycine max
  unsure (1)..(421): unsure at all n locations
gttacagaattgagtcactctntattgagaggggttgtagcaacaatataagatttctcacagagatatcttggcttgagttactctcacttggaaggcttcaatttaacttcataatgctccttgttggccttttaaaactctaaagaatatcgttgaagtggatcccactcaagcgacaaattttttgaggaagcaaacacaaatgatagttgtcatgtcatgggagctagcaaggtcattctgagggaactttctgatgaacattctggacttaaatcagaatggagattctaatgttagcttatgaaggattcatactgaagtagatccttttgatgaagttcaacagatgtatatctttctgaagtagctcagcttcatcaaccttaacacaccttcataacacanagtattctaa

SEQ ID NO: 288051 - DNA, 316 bp, Glycine max
agctttatgtgatcctcacttgctgcaaatgaaaaggttggaccccatgtttttaagacgattgatctcatagaacaacttgagaagtttgggaaagagttttctcaagatttgattctacaatcactttctaattcattttcacaatttagtgtgaatttcaacatgaataagatgagttgtgacttgcatgagatgctaaatttgctaattgattatgagaatcaaattgcttctgaggataagaaagaaactatcatggtagttggcaagagctcccagaagaaaggaaaaagtaccaaaaaggaagcatcat

SEQ ID NO: 288052 - DNA, 420 bp, Glycine max
  unsure (1)..(420): unsure at all n locations
tacaaatctattntaagtccaagcccataaataaaataaattctggacaagataagataagattggatgaaataaaatctagataagataagataagattggatgaaataaaatctagataaaataaaatatggataagataagatttgataaaagaaaattgtttgctctcttcaagtccaagcccaattccggattcaagcccaattgcttataattctcctgaaattaaattaaaaacacaaaattagtcaagtaagcccaaatgataaaattgcataattaatttgacaattaaggctaatcagtaattaaaatggtgacaaaaagggttaagaaataggagaaaataatgacacatcagtggatatcatgttttatgggtaaacccatatagatacaacaaatgagaagaaaaat

SEQ ID NO: 288053 - DNA, 576 bp, Glycine max
  unsure (1)..(576): unsure at all n locations
gagtcgccggcgtgagacgtcgaaagngacangtgtatataatatttagatggttagccaacactctcatagatgtatggtgatataaaagatgtcggacgcctatgtcgataccgtacatactcacnnnnttcggtactcggtgcatcctgtatagtctacatgcaagcatgcaggctattactttatgatgagtgtgacttaaaaaaagacacgggtgagcttagccaaacattaactatgccatgataattaaataagtactctaatcacaggacattatgaattaaggatagaaaacgaggtagaacaattaatgatatcaaacagggaggacaccagactgaacgcgggggatgagtgatttgagggaccaatatggacaatgattggattggacggtttgcacagataatctcggagatcgcagtaatctttatgcatcacccatttatattgctataagacacgctgcgagaatggttgggaataaagggggaaaaattaggtgaatatgccgtgacgagcattaacctcttagaagagagatatctgaccaactaattatgagcctcg

SEQ ID NO: 288054 - DNA, 341 bp, Glycine max
cttatattatgatggatgttgtgactgggatcttatgaatttttctgatgcgttttgtatacttgtcttattgaacttaattgtgaatttgggaattgactctgaagtgttaattaatacactaattagcaaccatccatagagacgttccctcatgttccattcatgcatcatatttatagtagtctttaaccggtgaagctcatcttatttcgacgaatgtaaatttctcaagacatatattacgtggccacaatcgtagggaccgtgctttggacacaatgggctcgcatatgggatctagatggagttgctatatgcatccattcttatgtgtgcaa

SEQ ID NO: 288055 - DNA, 376 bp, Glycine max
ccagacatatatagctttctcgataatcttgcagattacataacaaatttaacgtatcatgtgtcatgtattgagttttctttaaaggaagacctaagcatgttcaatctaatgttcctttatatatatatatatatatatatatatatatatatatatatatatatatatatatatatatatatatatatatatatatatatatattagagactctattattacacattatttatttatttcttacaatatgaacaccccttatattcaaataaaacatcttaaaaatctctctaattgtgtctcattacagagcttaaatcctctcatgttaagataaaatatcactatatttctccatagtataaccagtacg

SEQ ID NO: 288056 - DNA, 492 bp, Glycine max
  unsure (1)..(492): unsure at all n locations
tgtggagcgctttgatacatgcatgacgcgctcttanaacactcaagcttggctttaaaaatacaacttttgtagcactactctattttttagcattatttctgaactgataaatcacttttaaatttatttgaaaccttctatattaaactagaaatcaaattgagtgtaaattcaagtttctttaaaatggaaaacttatttttatgcattatcaaacttaaatgtaaacaaatgacaagaaagaaagaatgttactcacaaacatttttatattagctcattctttaattttggtctacatccaatccttatctttatctttagtagaatttttactagatgacacacactaaccaacacacacaaatatatatatatatatatatatatatatatatatatatatatatatatatatatatatatatatatagttgaggcgcgactatatatgcatattggtgagattcactaactaattaactaatt

SEQ ID NO: 288057 - DNA, 399 bp, Glycine max
agcttgctctctttcccttacaagagtgacaaggcagtcccatggaagtatgcccctcaaaagcttgacggaaggaaggatgagtctgtcagagaagacctatcctctgccaaagttattaacatctctagcacaaatggtatgacccgtaacggacaaatctttgtagcgcccgagcttctgatgcgagataaagacccaaaggggaaggcgaaagtgggcacgaaatagagcgacaaggcaagccgtattctggatgaggaggtcccggccgggaggtttgctaagggagaggaagacttcggcagaaaaataatatccgtagaagaaacaaatgtgttccttcagatcatccagtaaagcgagttcaaggtaatcgagcaactcaataaaacccca

SEQ ID NO: 288058 - DNA, 439 bp, Glycine max
tgagctcattgttgctaccccacaaagctcctcggaatttatctcggctatgttcctccttgcgggcccttttggttttttgttcaagggctcttgtagtggccgtgttttcctctcgtaactcggtgcactctttccggatgtttgtagcggctgacttgaacttttctttggcgagtcttgccttccctagctctaattttagagcttggacttcttcatcttcctccggagcttcgaagttctcctcattgataactttcaacttggagagccaatctaaccctcgcgtatgaactcttagccatccatgataaccaccgatgacgccattacggatgcccctgagctcgttgtctttcctcaacggacttctccacgccttgtggattctttgtataaccttgagactttgcgtgccgaaatctctcacaaggaa

SEQ ID NO: 288059 - DNA, 377 bp, Glycine max
  unsure (1)..(377): unsure at all n locations
agcttgtaagtatttgttggtataatttgcctgttccattaggcttttaatgtctctagaggttacttcctcgttgacatcttttgtcttgaatggaattgccatgacaggtttgttgttactgtctttgatatttggtagttgatattgtgttgtgggaggtaattccgactggattaactcaccatccttcacttgccaatttgttatgacatttgttgttggattacctatgatgtcttgtttccaagggtagtctatatcctttctgatggcataagcatganaccaatcaaagaaaaggacattaattntgactctttcgacaaattcgtagaacttgtcttggatttgttttctgtttgtacccttgtaat

SEQ ID NO: 288060 - DNA, 421 bp, Glycine max
tgacggtgtgggattttccctgtactctactacggtcaatattccttggcacccttaatcatgttcaatttgttggtaagtctatgtcttttaatccaaaaaaggaaacttggttaccatgtgagagtcatttggatcaatgacaatagatttggatgttatatgcatgagtatttcaatgcttgcactactacaaaagtgtgttttttatgacacgcgttctacttttgtaattatgtgtctgaaaaatccttttatgatgcacattctaagacggatattgaagaccgccttataatgtgtgctcctcataaaaaattatgacgggttttattacaatccgacagtatctcaattgaattcaaaagcccaattaatacgagtccacgtgcatgcagcaaattaacttcagcgacctctc

SEQ ID NO: 288061 - DNA, 268 bp, Glycine max
  unsure (1)..(268): unsure at all n locations
tatcttctcaaggaggtgagcttangtatgagaggggcgtgtgtagctaaacactagcttctcaaggaagatttctcaaagaagcttctcaaggaagttttctcaagaaagcttctcaaggaagctacctagtctataaatagaagcatgtgtaacacttcgtgtaactttgatgaatgagagtcttgggagacacaactcaaagttcaaattctctaccttcttcttccttcaatgtcgtgctccaccctctctctttctctccctc

SEQ ID NO: 288062 - DNA, 432 bp, Glycine max
tgtgcaaatcaagtcactcccgcattttatctctagcatgcattgtatgttggtctcgtcctttggcacgggaagccggaaggtccatatcaccttcttaattgtacacatggggcactgcgcccccaaatgcacaagtaagaagagataattttccgggctctcgtgtccgtaaaatgcattcatatcatgcatcgcataagcatctcttcataacatcataatggacatatcctgcatttgtccgttatcatattccagcctcacattttgcatgagtcatggcatcatcatgcatatgcgttcaacaaactttttgatctgcaaaattgcataccatttgttttcatgtttgctcatccttgcgttttcctctacaaaacaaaaacaaagaagggggaagcgtgaaacttcacactacattcttagttt

SEQ ID NO: 288063 - DNA, 286 bp, Glycine max
tagcttctggagggagcctcttaatgaagcttctagagaaaactacatgaagctgcctcggcacaaacgcttcccagccttcgttaaccgttggatcttttcgaaatatggtttgcaacttctcaagacaattttccatgatctcaccgttgggatctttgagaagatatctggagtgtgctagaagcttccgttcccgagagcatctcttatttaagcatttcagcctttgctttcgtgtagcttaagaaaaacgtcatttcttcttctttctttcttccaaagc

SEQ ID NO: 288064 - DNA, 377 bp, Glycine max
  unsure (1)..(377): unsure at all n locations
tctcaaggaggtgagcttagttatgagaggggtgtgtgtatctaagctctagcttctcaaggaagttttctcaaagaagcttctcaaggaagttttctcaagaaagcttctcaaggaagctacctagtctataaatagaagcatgtgtaacacttgttgtaactttgatgaatgagagtcttgtgagacacaactcanagttcaacttctttccctttttcttccttcaatttcgtgctccccctccctctttctctccctctttcttttcctccattgaagcatcctctccaagcttcttatccaaggctcatcttggtggtgaagctccttcttccatggcttattccttaatggatggcgcctnctctcacctc

SEQ ID NO: 288065 - DNA, 383 bp, Glycine max
  unsure (1)..(383): unsure at all n locations
ttgcttttatcttacaccaccaccgccgccatcatcttagaattatattttaatattattattactactttgattttcagccttgtattttggttatattattatggtatttgaacaatttactatttccttatttgcatggtatgtttggaccaatattaagtatgttatttgactatgtgaagtttataattaatctattcatggttgcttgcttcatggttttcatggttcttgcttcttgcttcatgatttggttgatattttttcatgaacattgtatgaatgtttagttatattntaatacgcactttcgctttttgttgatgccaaagggggagagaaatgggattaaatcaagaactcacatgagtaattaattt

SEQ ID NO: 288066 - DNA, 430 bp, Glycine max
  unsure (1)..(430): unsure at all n locations
cgcctaattaacctgaaattgagagataatgattattattcacacaaaatgaaaatacttagtatttattacctatacttaacagaaaatacttatatcactacaaaataaccataaattgggagagtttgatacaatttacacaagttttatacacaaaagttagtcgttttcaccaactaccatgtctctaacaacttatgcaattcagattcctaatcttgagtcaacttgtgatcctccgccgatatctcattatagcaaactagtccttgcaatgctatgaagatggcctggtaatgagctagttttaatttaccttccaattctatgatgttctctgaaatttgttcaccttgtaagcagaccagttntccttgatgttgaaacttcattgtcagctgagcacaattccagttgatgtcaccta

SEQ ID NO: 288067 - DNA, 376 bp, Glycine max
tgctttcaactgaatttacaacgttctaattaatttcaaaatggtgtaatcgattacaatatattggtaatcgattaccagtgtgtttgaacgttgaaattcaaattcaattgtgaagagtcacatcctttcacaaaaatgttttgtgtaaacgattacaatgatttggtaatcgattaccagtgataagttttgaacaaaaatcaaaagatgtaactcttccaatggttttcaagtttttctaaaggttataactcttctaatggctttcttgaccagacatgaagagtttataaaagcaagtccttaacttgcatttttaagaagaacaatcattacaatcctttacaatctttgaatctctttgaacatcttc

SEQ ID NO: 288068 - DNA, 415 bp, Glycine max
tgcacttgaggaggaaaggatatttgtagctaatgaacatctttcttaactattcgtccttaagattttactgattctttttgctaatatgtaaatataaatggtataagggtattgtcataccctaatttcgtccggggattattatttgatgatatacaacctttgattggccgcttcgagatacttggcaccctttgttgcacaatatgtgaagtcccgagacgtgccgaatatcaaaaggaagcaggcttacgcgatccgtgaaaattccgtaatgtgacgaaaatcgaaaggaggtgtttttcgcaatccgcgagttttcataacttcttcgaaagctaaaaaagagtaaatacataatccgtacggattcgtaaccttgcggaaggaaaataactatcggtactaaatt

SEQ ID NO: 288069 - DNA, 396 bp, Glycine max
  unsure (1)..(396): unsure at all n locations
tagcttataagaacaaaattgcctcaatcatttccaaatatgcatgtgaattaggaagcatcaacaagaatcaagccaaggctattgtgcaagcaatcaatggggcataacacaccaaatgattatgatgatggatggctcaaattctcacaaaggtaaactcatcactttcaaattgagctttcaaaactatcatgacatgtagaggagaatcaaggatttcaagtcacaaaatgtcaagaacattttattttcaaaacaattacccatttcttgaacatatcctataattcanagaaaaacatgcaaagtcgtacatgcacacagaattgacccaaaatattaaactagaaatccgacgaaactaacaacatcaacaaattaacacaactaaca

SEQ ID NO: 288070 - DNA, 411 bp, Glycine max
tcagaaccacttcagaataaagcatttggcattcccagaccacctggtcctacaagatctgttagcatggacctctccaaggcaccactggaatcagcttcatctgttgatctttttcagttaccagcagcaccatctcaagctccaacattggatttgtttcaatcatctctttcatcggcagatccatctttcaacgagaatcaacttagtcaaacatcccatcttgcatctattgattttttttccgatttttctccgcagccttctactgtaacctcagatgggaaggcactggaattatctgtccctaaaaatgaaggatgggcaacttttgatatgcctcagagaacctcctctactgcacaagtggaaattccaaccactgtaccctcaaatgctaaatcttta

SEQ ID NO: 288071 - DNA, 247 bp, Glycine max
cctgtagacacgacactgcatgctctgcagcttggagcagcttctaacgactgtttcataatactcctatgtgctatcagatcggatactctattgagacgctagcaagagtacactgttgctaccacacagagctcagcgaaataaactatagccatactgtcccatgggagccctcttggactctagatcaagggctctggcggaaatggcattcacttatcgtaaccagagacactcctttcga

SEQ ID NO: 288072 - DNA, 153 bp, Glycine max
tccattatcaatttctagtgtctcgatatattacaggtctctagcggacatgcaagtgacatgatattgtcgcttgaatttgctcatagattctcgattcagttgtgagcgtcacgatatactactggacacacctcggacatctgattatat

SEQ ID NO: 288073 - DNA, 384 bp, Glycine max
  unsure (1)..(384): unsure at all n locations
agcttgcagagaaaagcagcatggttgtgatctgtggtgggatcaacaacaaattagctcagttgttgcacaacatatgtaatgtctggccttgtgttggtcaaatagatcaacctccctattaatctcctataagaggaaacatcttctgctgaaataggtgaccctgagtgttgatgcttggtggtgtaatcacaaggtgtagaaactggcttagaaccaagcatgtcaacattattgagaatgtccagtgcatactttctttgatatagatttataccaatagagcttctagctacctcaaaccccagaaagtacctaaagtctcctaagtccttaattttgaaagcattgtcaagtagatntgtaattctttgaatttta

SEQ ID NO: 288074 - DNA, 420 bp, Glycine max
  unsure (1)..(420): unsure at all n locations
ntgtcctttggaaggtgtgatgttntattagggacttctgaaggtttttgaaagcttgaaaacgtagtgagtttagtctgttttcgttccatcaatgaagtatcacgcctaagatgggaagttgttgcaggagcacggttttcaccacctgaagtaccagctgcgaccatagccaatgccattgaagcaggtggagatgcaaaagcagcagcccaggctggagatatcatagcatgggcggcctgaaagaaatatcagttaacagaagtagcataacggaacagaaaataaaaatgactatgctgatacaatgaactaggacaacccattcccattagaatataaatacttttagaaacactattcattcaagtcaaattacatatttgcccacattctcttgttatttatcaagctaaa

SEQ ID NO: 288075 - DNA, 357 bp, Glycine max
agcttcttctggaccttgaacaggcaactaactcctctttcaaaaccacgctatgtgctcgcgactggtccctctcttcccttcgcagcttgagttcattgttgctaccccacagagctccgcgaaatttatttcggccatactcttccttgcgagccctcttggtctcttgttcaagggctcttgcggtagtggcattctcttctcgtaacccggcacactccttccgaatgtgtgtagcggccaacttgaacttctccttggcaagtttcgcctttcctaactcgcttttgagagcttggacttcttcgtcctcttccggtgcttcaaaactttcttcgctgacgacttttaact

SEQ ID NO: 288076 - DNA, 444 bp, Glycine max
tgcatgcatctgcatcccttaaaatcatgttaactgcatagattttctacatctaatatccagtcgtgtcgatttgggatgactgaccctctcgatgagtcgatctcttgctttctcataagggtgaacccttgggtactagtaccctcacctccagaggactacatgtcctcgccttcagagggccacacgccctcgccttcaaaggacttcacgtcctcaccttcagaggactacacgtcctcgccttcaaagggtcatgtacctttaacttcagaggactacacgtcctcgccatcaaagggtcatgtaccttcacctttgtagggcaacacgccctcaccttcagaggactacacgtcctcgcctttagagggccgcacaccctcgccttcagaggactacacgtcctcaccttcagaggactacacgtcctcgccttca

SEQ ID NO: 288077 - DNA, 400 bp, Glycine max
  unsure (1)..(400): unsure at all n locations
agcttgtcccaagttgttgatctcatttcagatttaatctgttctttacttgcaaatattttgattgtagaatgttaagtctttttaatagaattaacttgtctgggttataggtgtggatcttgcagggagaagagagaaagcggtgtaaaacaaaagaggcagagggaagtgaagaagactttggagtttgctgagaaatggaaataaaagtggggctgggtggtcatggtcatactttagtgtcacgttagatagtctacatggcactaaaattaccaacaatgcacctcactaatggtgttactttaaaatntaacagaatgactattttacaaaacttatgcaaagatagagactattctttacatttcanagaaatagggactaatgtacaaaa

SEQ ID NO: 288078 - DNA, 445 bp, Glycine max
tccctgcacaaatttaattattaaatataaagaaccaatgcacaagtatgctagacaatccaaataattgccaccacttaaacctcccaattattcttcaatttataattataaccaacatacagtataaatatgatgattaataaatttctatgtagtattttatgacttaaaaagataattttaatgagatattagaaaaagttctattgctaatttaaggtatttttaaagaactaaggagctaggaatcattagtagtggaccctaagctaagggtgtattagactaagtgtagtggtgtataagcaagaataatataaatacatggtaaggcacattgttagcaaacctaaccgataagtggtaattatctgccctcaaccactcactcttaacattgtgacaaagcattgcatttaaaccaatttctcattaaaaaaca

SEQ ID NO: 288079 - DNA, 383 bp, Glycine max
agcttgttcttgaccttttccatgagatggtaagataataagattgaagttgatacaacaatcgtctactttaaagcaaatatgcacttaacctttcgtgacttataaataaagatgataattagacatgtgagttacactttatttaacttttcaagatttaaatatcatgtgtcaaacaaaattcaaattcaaatgattaatataaatggaaaaaaaataattgtataattgattcataaatagtatagattatgttcaagattaaaatatttattggacatctctctctatatataaacttaagaatccataaacacgttctgataacacatggtgacacacgataatttttcaaagttcggatgccacgaatacttaat

SEQ ID NO: 288080 - DNA, 435 bp, Glycine max
taactacctatctcccaaatgcctttgcgaagatttaataattaatttgcatcaatgttaaattctagatgttgctaaatgcgtgggcattgagttatcattctatgcctagcaatgctaacccgatgatcattttcttaagatgttctattaggtgttaccttttcccaagcatataacccctaaaactcatgcatgttaattcttaaatccttactaggaattaccctcacccgagcgaataaaacccaaaattaatgtaaggcataaatgcaagataagaagaaaagttttagaacatgataccctagaatgaatcctctttgcattgataactcttgaagtacaccatacatcgttggctttttaagtttttcaggccctagctaggggattagccactcatggccattgagggctctacaaatgggggtg

SEQ ID NO: 288081 - DNA, 393 bp, Glycine max
agcttatgccaataggagatgatcaatgataatgcctacaaaattgatttgtcgggtgagtatggtataagtcatacttttaatatggctgatctatctctttttgatgtaggtgatgatttacttgatttgagggcaaatgtttttcaagaaggaaggaatgatgaggatatcaaagaccaggccgaagcccagaaggaagcccaatacctaacacaaggcataggagggcttgtgacaagagcaaaagctaaaaagacccaagatactttgcaacatataatggctaatctgaggacaatctaattgcatgaggggacccaatatctagaggcctaaacctcaagcttaattatgtctcacttaaatactaatgcatttcagttatgctta

SEQ ID NO: 288082 - DNA, 439 bp, Glycine max
tctcttttcttgtttaatgattatattttgcttctaatccttgtatttgggtatgttcttatgacatttgaatacttagtatttcttttattattcgattagtatgattgaacatgatgattatatttacttgctcttggttgtttatggttatgagttttaaactcaattattttgatgatatatgattagtggtatgtacttttatttggctattatgaatgactttctggattatatgacattctatgaagtattatatttctagtgtgatgaatggttatgtttgattgttttctattctcgtgtatttggctatattattatggtatttgaacaatttactatttccttatttgcatggtatggttgaacaagtatgttatttgattatatggatttcatagttaataataaactaaaattcacgtagaattac

SEQ ID NO: 288083 - DNA, 391 bp, Glycine max
agcttgtgagcttaagttaaaaaaaagatgttgaagaagttgacttgactatcaagtacaagaaaagcttttggtctagtgataagcacttgattccaagtgtttcaccaataaatgacaagagtttcataagtccaatttcatgatcaagtaaaaggcttacagttttcccatttgtggtaatgatggtgacatttttgccattgatttgtgtcacctctccatcaatccatgcatcctcaggatcctcaacccaaacctgtgatccaacgatgatgttcacaggtgttccctgaaccaatcacaacaaggcaagaaaaagtgttactgttaacacatgatctgacagcaaataagtgggaaggatccaacaacaaccaacatacaacac

SEQ ID NO: 288084 - DNA, 438 bp, Glycine max
  unsure (1)..(438): unsure at all n locations
tctaatgtgtactcatgtattgtcaataagtacaatatgtaagaagcaatatgaagaataaaacatggagcatggaaactgcattgttgcctaaacaagtagcaaaaatataacacctcatctttgagaagtgcttactgttttctcttcctcagtgacgagaaacttcccctctgcaaaatcacaggctgcaattggtattgctagctgcttctgcaatttctttacaacaaacacttctgactcttcacatatggttaccactgtaccattcctacctagccgaccagttcggccagctcggtgtgcatagtgaattgaatctgtcggtaagtctagattaaccacaagatcacattctgccacatccaaaccccttgctgataattcatttgtaaccagaactctcacctcaccattcttgaatntcttcagagt

SEQ ID NO: 288085 - DNA, 195 bp, Glycine max
ctacagtgcacgctgtgcgcacgcattcttgttcctgaacgccgtacactgtacgccatgactagcacactatgtgctgtcagacgaggacactgtttgtaacttgcatatctagagtatgttgaggcctctcacacatagcttgtcaaaatttggatataggatactcgcacttgcaagcgatatgcgtctatt

SEQ ID NO: 288086 - DNA, 395 bp, Glycine max
  unsure (1)..(395): unsure at all n locations
agcctgcatgacttcggcgctctaggtacttctttacattgctatatcttaatataatatgacatactagaataaccctttgcatacggaatgacctactacttgattgcggtgaatgcataagaatgatttattatttactccaagagcatgcatttaaatttcttaatgtgcacattctttttgaatcaatagtgacacgatgagaacancattattgtctaacggaatatattggaggatatgatgacaacccaatcacatacttgaatttacagctaccaagcctgtggtaaataacatatatattatctctcaaacacacgatatattgtaattgacttcacaataaccttttgtagctggcaagaatccgcacttccagaagtaaatac

SEQ ID NO: 288087 - DNA, 326 bp, Glycine max
  unsure (1)..(326): unsure at all n locations
tgcttggcacaatgttgataacaagacaaacttcaattgcttcattctggtaacaactttattttcatcgaaatgatttttttttgcatgaaaaggtcttaaatgggaaaaaattaattgtcatgagaaataacttttcagaaaatatatgtacgactaatcttgtagaatattgtccaaaaatgttcccagattattataaagtgatatgataatatttagaaattgtcgtgtgagaatacagttgtaagacaacaaaggaacaataactatgaaaaatagattcttgtaatttgtttggcttgagaanaatatgacatattatt

SEQ ID NO: 288088 - DNA, 432 bp, Glycine max
tatcacataaatagcttcactaacattaattgtgattctattttattctttattacatattatataaattaatgtgtatttaaatggtaattaaatgtttttatcaattgtaattacatggagataaaggaagccatttcaaattaaaaaatttgaaatgatatgttttgtttttaatgagtaaacaattaatgaatttgattttcacatatcttctaattattactataaatagagaaccaattcatataacttattatcatttctttgtattcatctagtcgattttgacacattgacatatgatgacaagtgtaagatcatattctaaagaaaaaattacacaaaattgtacttatatgtcaatcctggatctataaggattttttatataatgaatttaatcttttattcttaattactataatcata

SEQ ID NO: 288089 - DNA, 395 bp, Glycine max
agcttgccgcccaactcgcccaggcgagcaaggttgcttcctccagaagcaacaaccttctggaggaatcttctggagggcccaagtgggcctggttgctatttacaccccccgtttactaaatgcaccccctttctatttttttgtaattctttttccgtaatgttacgaaactttacgaatttcgtaacgatacctattttccttccgcaaggttacgaatccttacggattatttatttactcttttttagctttcgaagaagttacgaaaactcacggattgcgcaaaaacacgtcttttcgatttccgccacattacggaatctcacgaatcacgcaagcctgcttcctttcaatttctgagacgtctcaagacttaatttattgcacgt

SEQ ID NO: 288090 - DNA, 428 bp, Glycine max
tgatcaaaacaattatctaatcattcctatccactcaattcatacaattgctcattcaaataattatcaaacactcatttcataccaaacaatccattgcatatcattttcaatcaattcattgttcaaacacgcttttggtacaagcaaacaactcaaagtgctgaaatttaaaataactaaaatataaagcaaactaaatactaataaactaaaatgttcatgctttgcagaaattaaactaaacacaatttaaacatcctgctcatcttgtggctgatcttcattatgatctagtgttggagctgctgatgaatcctggataggctgctctggctccgtgactggtgtagatggctgggtctcctcaagaactggtgcaagagatggcttaagtatttgatctatggaagtcccctcctcctgag

SEQ ID NO: 288091 - DNA, 397 bp, Glycine max
agcttggttgagaagcttctatggagactggatctttgagcttcactaaggtcctttaatggtgattttcaaccatggagttgcagtggaagataaaggagaaatggggagaggaggcgccatacactagggaataagccttggaagatgaaggttcaccaccaagagagtgtcttggataagaatcttagagaggaagcttcaatggaggaagagaatgagaaagagagagagagagagagagagagagaaagtggcatgtaaaattgaagaaagaaaggtagagaatttgaactttgaagtgtgtcttacaagattctcattcatcagagttgtgacaagtgttacacatgtttctatttatagcctagccaatgactaaatgaaattttatttt

SEQ ID NO: 288092 - DNA, 426 bp, Glycine max
  unsure (1)..(426): unsure at all n locations
agaagaagttntgaataagttttggcttttacatgcctaactcccttgagtgacatttgtattggttgttatcttggttgttgcatcttagtacatttgatatttgttttgcattgtgcatcatcatagtgtgtgtgaagaaaagtttctaagttataaaaattactttagaggcaaaaactctttattttaattgattacaacctcattgtaattgattacaacaagctattaaagcttgtagagttaagtatcgtatcggtttaatcgattaccgatatctcataatctattacactattgtttgagacaatgactgatttatttaggagtctttgctttaatcgattaccaagtggattaatcaattacttctatctcgttcaagtgttctggggtgaacaagaacactttaatcaattactt

SEQ ID NO: 288093 - DNA, 394 bp, Glycine max
agcttttatgttgttattgcaggcaatatcacaaatagaaacagtttatgctttcgttggagagagctctgcaaccaaatcctttatagagaacatggaaaaacaatatcttataagcaaaggggaggcacttgtgaagggagttaggatagggatatagcaaacagagagtttctattctttggctctcattgtatgggttggagttgttgtggttagagccgaaagagcaaccccataagacataatgactgtcgtgatgagtattctctttggtgccatgtaaggaagaaatcaccttcaggattgtttagaatggagaaaatggttaataattaataactaagtaacaatagtctccttgtgaattgcatatctctcacttacgcatcac

SEQ ID NO: 288094 - DNA, 320 bp, Glycine max
  unsure (1)..(320): unsure at all n locations
tatgaaaaacattattttttttttatcatatttctagttatgcttgcagttaatcttagttgtgcccgcanangaaaaccnctgccgacattgactaatgtcacgcctcggtttcctatgagcaactcgacgatgtcctggggggatcctctcttctctcttctccacatgtccccgcctattgcaagtaccccggcgttcctagtggtgtctgcgaacattcagctcatttactccttgagccttgctccggccctatgcctcagtatgcctggcggcgatggcgccccacggagcatcttgtgcgatacgtggcttgg

SEQ ID NO: 288095 - DNA, 270 bp, Glycine max
agcttgttcttggagtccttcttcttgagcaaggcttacacactcactttattcattttcaagtgcttcaatccataagtatcagcagttctacctttaatcttgtggatcatgcttgttggggatgttcttccgtcttgttgggtggaggaaaactcaaattctgcatcttctatatctaacactcaaaattagtgaaagttcattgtttacatgttgatggctgagggaatttcatttgttatattagtggtgcctatctctgccatg

SEQ ID NO: 288096 - DNA, 421 bp, Glycine max
tgccacccagctcgcccaggcgagcagggttgcttcctctagaagcaacagccttctggagggcccaagtgggcctggttgctatttgcacccccatttttactaagtacacccccctgccttttttttggtgattctttttcgcaaagttatggaaacttacgaatttcgtaacgatacttgttttctttccgtaatgttacggaaccttgcggattacataatcatcccctttttgacttacggaatgttacggaacctcactaattgtgcaacgatgcttccatttgatttccggtgtgtcacggaaccttacggattgtgcatcaatattttcttttgttttccggcatgtcccggaatttcacaaattgcctaatgatgggttccaagcacctcacaaggaccaaacaaaagttgc

SEQ ID NO: 288097 - DNA, 395 bp, Glycine max
tgtcttgcatgcttttataaccatgttttttttaataatttaaacagtttttttataatttaaattgtatttaaaaaatatgtttataaatttaattttttctaaaatattaaaataataaaaaatttattatattttttagatattaatttttttataattaaatttacaataagaaaaaaattagatatatttttcagatataattcttaataattaattttatgataattatttgagtaatttaataatatgaaaatttatttattttaaacaatatattataattaattaatttaaattgagtagtattgcggaaattcttttgttattagtcaatcataagtaatcctacaattaaatatttaattctaattattctcaatcatttataa

SEQ ID NO: 288098 - DNA, 403 bp, Glycine max
  unsure (1)..(403): unsure at all n locations
ntaatcacttgagnttgttatggaattaatttttgatttaaatttaatcacatttaaagttttttttaattcttttttaatgatatattttatgtgaattgaactcatgtttttcaattccacaaaatatatgaattaacttatttgatattattctagttcaattgaatgatttcaaatctttgcactttctgtgtataaaagaatctttgcactttacgtacattataattaaattcatgttaattatccacttggtcaagagagaggcagaaaggcgtgatgccattaacaagtggtagtggatatgggaactgtggtgtactctcttcaagtcttttgtgcgatatatgacaatgaaacaaatcaatcaatggtatagtaatagcaatgtttattttat

SEQ ID NO: 288099 - DNA, 394 bp, Glycine max
agcacggaaagtccggtggtagctgtcttggcagatttatttgacacatttaaccgaaggtgcaaaaagagtagcgcacggatcatctgttgcttgcccgccctctgtgtttggttggtttcacacctgttccagcaagacacgagtcatctatgtccgctccagagccatcgctcgtgtactgaaaagagaagaatagattgggaccggcttttggctgggataggaggtagaacaatcaattggttcccccgatggaaggaaggaaaggagggagtccttttctcatgtggagggtacccaaacattccgctgataggaacgaggggttgtattaactacaatcccgcgctcgctataagacaactaaggtaccccatgatgggagtaccga

SEQ ID NO: 288100 - DNA, 445 bp, Glycine max
  unsure (1)..(445): unsure at all n locations
tggagaggatgcttcaatggaggaaaagaaagagggagagaaagagagaggggggagcacgatattgaaggaagaaaaagggagagaagttgaactttgagttgtgtctcacaagactctcattcatcaaagttacaacaagtgttacacatgcttctatttatagactaggtagcttccttgagaagctttcttaagaaaacttcctttagaaacttctttgagaaaacttccttgagaagctagagattagttacacacacccctctcataactaggctcacctccttgagaagcttccttaagaagatttctaaagaagctagagcttagctacacatgcctctctaatagctaagctcacctccttgagatgagaagctagaacttagctacacaccccctataatagctaagctcacccccatgacaaanaacatgaaaa

SEQ ID NO: 288101 - DNA, 305 bp, Glycine max
agcttgtacttgatcttggattaatgagctgaatcatagctaacattaactaatcataattagagaaactttcgctccaaaatttgcctccaaaaattcaatttcaaattcaagtgaaatttgaatacaaattcagatttccctccaattttgtgtgacacttacgctataaatagacgccatgcgcgcgcatatgttcgactgcgatcatttgaaaattacacttcaaatttctgaccttattttaagcactcattgcgcgtcgttctattctctgccttattcaacttcttccacatctaccc

SEQ ID NO: 288102 - DNA, 442 bp, Glycine max
aagctttagaattataacataagaactgtgattattgaagaatctatccatgttgtttttgatgaaattgaccctatatggccaagaaaggatacacttgatgatattgctgatacattagacgacatacacattgatgagaaagggcatagaggcaaaggaaatggtaatgaataagactgtcatattgatgaaaataaaaaaaataaatatagatcttccaacagagtggagaacttcaagatatcatgctcttgataatatcattggtgacatctcataaggggtaacaacttgacactctctcaaagatgcgtgcgataatatgactttggattccttaattgaacctaaaaatttatatgaagccataattaatgaacactggattattgctatgcaagatcagttatatcaatttgaaagaaataaagtctgggaa

SEQ ID NO: 288103 - DNA, 385 bp, Glycine max
agctttttattaattacactcatactgtaatcgattactagaggagattgtcagaaaatattctcaacagtcacatattttcagttggttcttgaatggccatcaaaggcctatatatatgtgacttgagacacgaatttgaaaaaaagagttttcataacaaaaaggtattatcttcttaaaaagcaaaatcattttatcctctttcaagagagatatcttcttctcttcttctttattaggaaaagggattaatagactgatggtctcttgttgccaagaaatctgaacacataggaagggttggccttgtgtggtggagatcttgtagcaggctgtcacaatatagtggaactctcaatcaagttgtttggggactggacgt

SEQ ID NO: 288104 - DNA, 258 bp, Glycine max
gacagaatacatatggacagaccttgaactttgatttgtctctcacaacacgatcattcatggaagttacaccaagtgttgcacatgctcctatgaccagctaggttgcttgcttgtctaactgtcttgacatcacttccttgataagcttctttaacaaaacttccttgagacactcgagcttatctactcacacgcctctaataactacactcaccttcttgcgaagcttccttgttatgattcatagtgaagcta

SEQ ID NO: 288105 - DNA, 404 bp, Glycine max
agcttctattgctttattggaaaatactaaggatctgtcaaagattacattggcagaacttgtaagtgctatgcagtcccaagagcagccgaggttgatgagacaagacggtgtagttgaaggtgctttaccaaccaagcaccatcatgctgaatccagtagaaagaaatatgtcaagaagaaccagcaaacaagcagcgaaaattgtgcaaacaaccaaaacaaaggtaagggtaaaaagaaaaattatccaacttgccagcattgcggaaaattgggtcacccaccatacaaatgttggaaacgaccagatgcaaagtgctgcaagtgcaatcagcttggacacaaagctataatttgtagaagcaaatttcagcagcatgaagtcgatgcccaagttgttg

SEQ ID NO: 288106 - DNA, 446 bp, Glycine max
  unsure (1)..(446): unsure at all n locations
ctcaagcttgttagggtttcaagcaatggtactagggtttcaagctgtggtgatagggtttttgaggaaccgtccaagaagaggatgatcttttacgtcaaagcaataggaaggtcaaaataaaacctgacgaggatagcaccactctcgatatagaggttgagaaagaaaaaggacgttgaagaagaggtggatccctacaaaaagaagttgttgtcaaataacattgcagtgcctttctctccttttgatggaagatgttttgataagcctaacaacaaaatcccccctgccacctttgtcgaaagaagatagggaaagattttacgaggttaagattacaaatgaggagttcagtgattggtgtaaaccctggaagggctcccttatggtgatattgttgggtaagaaaanttgcttttgtatgatggagacaaagttgaata

SEQ ID NO: 288107 - DNA, 384 bp, Glycine max
agcttaagttatatcatacatattagtactccttttatattctaccatatctgatagctcactttgtaagaggaaatgagaacattttctcgaatcacaacatagatcattcatttattacaatgtcccgtgaagcgactagagacagccgcattgaacaggaatacatagagcagcagagaataatgcttgaattttagtgaagccatacatgctattgtcggaaaattctaccatatctgacacaccactgtctcaggacgtattgaagacattttcatatagatgattgatcatgcatataataaacgtcagattgaagattaaaggccactctcaacataatactaagctcaaacctccaatttctccatcattgaagca

SEQ ID NO: 288108 - DNA, 438 bp, Glycine max
cgctatgaacatcaggcatgatcttaccaattaattagttgattgagtggctagtatgtgtcggtgttgctgtcatccaaggtatcatcaataattagatcgaatttgcttttataaaaaattactgcagccaacaatatccacgataaaaagaatagaatggcctacaatagtctcatacatttatcaagctacagcatccagactaacggttgcaatttgcccttctttatacaagttattattacccaaggacaatctataacctcatcccacacatagcagtcgtatagtttgagccaaataggaatttttagacgagacatggaaagggaatatacatgttcaccaagcataaggatagtggtagagctgggataaaatttctgctgttatttattaacaatccctacaaaggggtgatacttataaacaaag

SEQ ID NO: 288109 - DNA, 250 bp, Glycine max
cgctttcttttatatgtgcaattaatagaaaggtatcctatagtagtcgtggacgtacgcacatacattgtgtgtcgatccacattaaaacatgcgactctcctctcttccctttattcatacacctgcttttattgcactatactaacatgcctcaccatgacaacattggccaaccaagtggagtatctgacttctatgatgaactggactatgaggagcttgacaatctctactcatatcgctttac

SEQ ID NO: 288110 - DNA, 422 bp, Glycine max
  unsure (1)..(422): unsure at all n locations
tgcctcacagaggtccaggaaagatattgcggncgaatttactagttccgcccgtgagtatgacagtcaccgctttaagagcgctgtacaccagcatcgcttcgaggccatcaagggatggtcgtttctccgggagcgacgcgtccagctcagggacgatgagtatactgatttccaggaggagataaggcgctggcggtggacatctctggttacccccatggccaagttcgatccagaaatagtccttgagttttatgccaatgcttggccaacagaggagggcgtgcgtgacatgaggtcctgggtaaggggtcagtggatcccgtttgatgccgatgctatcggccacctcctgcgatatcctgtggtgttggaaaaatgccaggattgcgagtattggtcaacgaggaaccggtctg

SEQ ID NO: 288111 - DNA, 329 bp, Glycine max
ttactttctagcactaacaagactgagtatctcaagaccatcatcttggagatactccaagctccaaccatagacgccaggaaggtcatggtgggagaaatggatgaacctgactatatgaccccctataagaatttcttaatttgaggggtgtttccaccaaacaagaatgaaacctgacgccttaaaaggaaggctagcttctatgtcatcattgactgtgaactattgaaaagaggattaacaacacccttgctcaaatgccatatagccaacaagtagactacatcatgcgagagctacacgaaggaatttacagcctccatatc

SEQ ID NO: 288112 - DNA, 433 bp, Glycine max
  unsure (1)..(433): unsure at all n locations
ntggtctctacaaatcttcgcacagcataatctatcaatttctctggaacttggacctttctctctctagaaaaacctcacatgcagaagctccttgagaaaaatggccaaactcgctttccaaaatctgatttcaggcttaaataggtggctttgttcatgcttgtgtgcttagcgcaattctgaatcgcttagcacggagcggatggaccgaagcggtgcgcttagcgggatggcccttcactcaacaaacaagcacaactcatccttcttccagattcttccttgcgcttagttgaggaatgttgcgctcagcggatagctcactaagccagcagattggcttatcgagagggtgaaaatcaacacttcaaaacttgcctaattatcctgaaattgagagaaaatgattattaaatacacaaaatgggag

SEQ ID NO: 288113 - DNA, 381 bp, Glycine max
tgtgaaacccaccatgcgtgcatagaaaggtcgtggtcggagcgcgaaactgatgcccctccacagtgttatgtaagggtataccaccaactacttgccactcaaaggcacatccgaggcaaagcctgaagtcgcttaaaccatggcggggaatatcatgaagataccccaaggattgagagacaagtacatgacgagcgagacggctatcaaagaggatgggagcagaaacattgacatgctcactgggagtgtacgccccactagacaggagtctaaaggggaagccaaccatatggcgggaatgcgcgcgacatctgaatggcacacagaaggcctgtcggagcaccaaatcctgcctacatcaatgccgaggatgtc

SEQ ID NO: 288114 - DNA, 312 bp, Glycine max
tcgctgcggtattctatatcgagcgtacgcttatattacgagttttattccgacatacgactataatgtgattgtcttctgcatttgctcataacttcggtgtacaattccgagtgtcgacgacatacaacgggactcaatccgacgtccagatcaaaagttgacgtcgattgaattggctatcagcttcggtattcattttcgagcgactacatagattacgttacctcttccgacatgcgagtcgtcacgaattgccgagcgactttgctcatagcgccagctttgtatttctagcatatggagatatta

SEQ ID NO: 288115 - DNA, 364 bp, Glycine max
agcttttttctctttcaaacgacaataagtttgtactgggatgtctgatagaatccagtcatatatcgagacgctcgaaattgaatgtcgaaaccctacactactttaacgacaatacatttttactcacatgtctgattgagtcccgtaacatatagagacgctcgaaattgaatgttgaagctctgagccaattctaacgaccatatccttttactctggtatctgattaagtccggtaacatatcgtgacgcatgaaattgaatgttgaaaccctcactcaattcaaacgataataactatttactctgatgtctgattgagtcccgtagtaacaccagacgctcataatgaatgatgaac

SEQ ID NO: 288116 - DNA, 381 bp, Glycine max
cactatacaatactcaacgctgcacatggaacttcgagcgcacctaatgtgacaggatttttcagacatccgagtaaaaagggattgtcatttgaatttgctcagagcatcaacattcaattacgagcgtctagatatattacgggactcaatcagacatacgaataaaaagttattgtcgtttgagttgcatacagggtcaacattcaatttcgagcgattcgttattttacgggactcaatcatacatccgatgaaaatggatatgtctttgaattggctgatagctgcaacattaaattttgagcgtctcgatatatgatgggactcattcatacatccgagcgacaatgttttgtgtttcgaattcgttgagagctc

SEQ ID NO: 288117 - DNA, 351 bp, Glycine max
tagcgcattacatctaacaagttctatgtgtattctttggtgatgaactctccttgccaattttgctactatttactaaacttaatatttgttagctgattccttcttaatctaggtatcgatcatcgaccagttgactcactaagtaacccactatttgattcattgtcccctacatatctaactaacgaacctatcaaacaacctcttaagttgcagccccaggggcagtgctgctgattcattgccggaggggcatcaattgagagatttgggtggtattgagggtgcagccacagggatagagcctactgattcttggtcaaccataatgggcgtgaatatgcttgg

SEQ ID NO: 288118 - DNA, 411 bp, Glycine max
  unsure (1)..(411): unsure at all n locations
tgccccncagctcgcccaggagagcaagtgtggcttcctctataagcaaccgccttctggaggaagaatctgaaggcccaagtgggcctgattgctatttgcacccccatttttactaaatacacccccttgctcttttttggcgattctttttccgtaacgctacgaaactttatgaatttcgtaacgatgcttgttttctttccgtaatgttatgaaaccttacggattacgtaatcatcccttctttgccttccggaatgttacggaactttgcggattacgcactaacacttccttttaatttccggcatgtcacagaacttcgcggattgcgctacaatgctttcttttgactcccgacatgtcatggaacttcatgaatngcctaacgatgggtgccaagtacct

SEQ ID NO: 288119 - DNA, 353 bp, Glycine max
acatgtatggacggtataaatagtgagatctaatcaatttactagatcaataagattaatactacatatattttaaatcaaagaaactaacaatgtaattaaattcaaacttagttcaaaagtaaatatgcgtaaatgttataatttcttttatgttaattcactttgaaaaatcagaattaatttttttaaaaataaataatattaataatgaattttaatttacagctctgcaatacatactttcattgttggaacatcaatatatatttgaataatccaaattacagaatatgtgaagaatatatgagatatctagtgaaacatgataattcatgaatatatcttaatat

SEQ ID NO: 288120 - DNA, 418 bp, Glycine max
tttcaaacgggtaatatgctcacattctctttcttctatatcatattcaaacttgtccaaataaagaataaagtcatatcgactcacagaaagtcatatcagtctcatacaattaatatagaacctatatcctaatgtcacatcctatcagagcgtggtgcttccgtgtcctctagcatgaagttcttcatagtcatccacctattcatctgctcccccgaacacaaggtcaagatcatcacaggatccaaacacaacaacacacagggagtgagttatcacattcctagctaatagataaacatgacaattaaatattcgtattatataaatgagataccacttgcttaaacatacctcacgtaacttcaccactgtctcattcaaaatgcacttctcattataatcacattacaca

SEQ ID NO: 288121 - DNA, 401 bp, Glycine max
  unsure (1)..(401): unsure at all n locations
agctttataagcgcgggtctgggagacaaaggtcaagcgttcgcgatatgcgaggatgatattccgagtactttggatttggtacgaccatgccctcctgatttccagctgggaaattggcgagtggaggaacgccccggcatttacgcaacgagcataatgtaaacctttacggttttaaaagctctatagttgggcctaggctttagagtttttccttttgttaaggctttgtgtcttttgtttttgaatttataatacaaggatctttcttcatctgttcctggtctctacccattctcattcatttgcatgtttacttctttntctgaaacggcagatccggtgacgagtcccccgaaggtacttatacctgngacccgcctatcgacttcgagcga

SEQ ID NO: 288122 - DNA, 445 bp, Glycine max
  unsure (1)..(445): unsure at all n locations
ttggctacaaccttttctccccctttggcaacatcaaaaagccaaagaactcggaaatcaacacagttataacaatggagtagcaagatataagtatcagagtattaaatccaataagccaaactcataatcaagaaaataatcaaaccagaattcaaataacataaaatgtcaacaatcacaaaatatccaagaccgaaacacaagaaaaataagcaaagtacttagcataataatgtaaattctaagaaactaaaagccaaaatacacggcttataaaagataaataagcagaatctaaaatctaagaagacggaggaggtggtggaagatcaaaactctgacgaatgtatccgacatcctcttcaagctgtgtaagacgaatgtccataccggcaaagcgtgaatctaacgagtcanagcggtcaccaacatacgaacgaag

SEQ ID NO: 288123 - DNA, 384 bp, Glycine max
agcttattcacatgaaacacaaggcatatttatgtctctggtgagcctaagctcttcgctctagaggacacgaagctgtgcaaggaaagcagcacatagatccaagaaaagaaactgtggaccctgcaccctttgaagatcaagcagatacttttcttcccgggttttgtaaagctgttgatgtgactgtaagaattagagaatattctggaaaagaattataactacccaataataacagaagaattagtttattgagacaatctgtcttataattggttataacactgtaaagaaacagcaatgatttacacgtgtatactgtctagtattataaacatggagggagggaagcaaaataatcagaagactatttagttatta

SEQ ID NO: 288124 - DNA, 429 bp, Glycine max
  unsure (1)..(429): unsure at all n locations
gacttcacccattntagcatattcttacccaagttgtccaagcaagagctctacgcctcccaaaaaaaagctccaaattttgtttagtactaatatatctcaaaaaaattattgtaaaattatatttaaaaataaattttaattaaaatattataagtaactattaatctttttattaataatgtagataacaattaataaacaataattatttaccactatcataatttttttagaaaaaaagagatttaataattaataagtaaaaaaattcacattttttttattttataaataaataaaaaatatcattcttaaatttgttttagatctttcaatttgttgagtcgcctgatccaaaacaaaatcttcaaaaatcaaacacgattgtatcaagggcgttaagataaaacatgaaattgttctttt

SEQ ID NO: 288125 - DNA, 352 bp, Glycine max
  unsure (1)..(352): unsure at all n locations
agcttttatctttattgcactattgacctacctaggagattttatacctagaggtactcatgattnatgtcgacaagtactacatatttgcaaaaccaactgatgagtcctcctatgactaggcatatctccccatacgaagtattttgcccgaatacgagtatttaaattaactaaaataaaccaattaaaaatacactgtgcaagtttgattcataaaaatactaatgaaatgtaaatgactctcaccattttaaattaatgaaatatataataatattaattaagggaaatatgatcaatataatatttgtcggttaaacaatcaaattgataacacaaggatagctta

SEQ ID NO: 288126 - DNA, 415 bp, Glycine max
catactctatcagctgatatgctcagtgtaggtttactatcttgaacacatttcattcaaaagaccgccataaagcataggtatgacttccaacataacaagatacattattacttgggtctaaaacatattaacatgattactttaaaatattaaatgacagacatcatatattgaactgtgactaatcgtatcctactatatgtaagacgggtttaccctagctgatagagcccaactcatagaaacagatttagtttacgaatctgttatcaatcctctctttaggacttatcttttattaatatcttttaaggagttggttgagggagaggttaataaatatatgacagaatgttagtgaggaacaccttctggtgaatttctgatgcatttatattttagtaataatact

SEQ ID NO: 288127 - DNA, 388 bp, Glycine max
  unsure (1)..(388): unsure at all n locations
agcttgtcggtgtttgaaatttcttctttggtgttgaagaagtaattattagaggcttagtgaagttggaatgttctaactagcttgttgtgcaatttttgccatgccctaacaaagtaatgtttgaatgtatgcgtttaggaacccattaagataatgctttcgtgtttatgctccctagtgttctttgccttttcttctttggtgttgaagaaattagtattaagggtttagtgaagttgaaatgttctaacttgttgtggaattattgactttccctaagaatcaatttgacttgcgcttagctttgtggaaacttcaatcagtagatagattcaaatctcttgtttgaagtatttcttcagcctgtngcatgtgttacttggag

SEQ ID NO: 288128 - DNA, 447 bp, Glycine max
  unsure (1)..(447): unsure at all n locations
ctcaagcttggaggtatcaaaaagattatcttgttataaggtctaattctcctagctagatcctaacacgcaacattggaggaggtggcaggtagagagggagagtgggacgttggaggcacaggggagaacaaaaagaagaattatcaattgaacataggtcattatattggaaaacaaggggtaaccaactttttcttcttgcattttccagtatatcatacataaaaaaacttatggaacattttcatgaagtaggagaaagtgtgggatatctatatctcaccaaggaagaacaagtccgatgaaaaatacgattttgtttggttcttggaggtgactaatcccaaaaggcttgaatatcaacttgataacattcatataagagacataaagttgtttgtttacttaactaganttgggatgacaacaacaaaggaggtgaag

SEQ ID NO: 288129 - DNA, 394 bp, Glycine max
agcttgagccgttgttgatgagtactttgaccataacgtgttccatgcatttgactgacacatgtaaagccctgttatgtcctcttccctcgacggggatttcctcttcagcaaatgtgaggtagttgttggctgtgatgttattgacgatcccccccaaagccttctacggagatgtcttggactacgtgagcttcattcaagacctttaccagcaaagctcgatgaggctcagagctcatgagcagctccagaagggagactctagctagggtcttgttgagttgttcaatgactttgaactcgctttgttggataatgcggaggaactccctcctcgagtgatacctctttcttgccacagctctctcttcccatggaaagatccttcgtc

SEQ ID NO: 288130 - DNA, 419 bp, Glycine max
  unsure (1)..(419): unsure at all n locations
cactcagcttgtaaaaatggaagaaaagaaaccgaaggtgaacgaattttagatgaatgtctaaacaacaagaaatgaattgaaagtctcggattcaaaaacttacccgttgaagaacgaagaacgaatgaagaacggatgaagaatggtgaagaacgacggaaaaccttcacggatttgctcacggaaaagtcttggaagtgttacggaaacacctcggcttggattttcttcacggaaacaattattttcaccaaaaacaactgaaatgtatagnnaaggaggttagagatatttggaacagcctcccttcgccaatttataggaaaaggggggaggacgttgtcgtccagtgtgccttgaaaatttgaacaccgctatccgcaccccctctcgataagttcacgnttttctttcgt

SEQ ID NO: 288131 - DNA, 383 bp, Glycine max
tatcttgttaaatcagggaaacatgctgaactctggggtgccctccaaggaaacatactcatccagatcaacatggcgaaccagtttaagaacatgctgattgacaataatggcaaaggtgggggaaacaacaacggtcaaaagggtggtggtgggaataaccagccaaagggtaataatcaacaagggcagaacccccaacagcaacttcatcagtatctgcaacagcttcagcatatgaaagggttccaagatctgaagctgtctcaattcaatgacatgaaactgcccaacccgaacccgaacccgaacccgatagtcggtaaattaaatttgcctgacgaggatgatttgtctgatgatgaaatatactagtttgatga

SEQ ID NO: 288132 - DNA, 402 bp, Glycine max
ccttctcagcccacgcattcatagtatattgatcattaatattcacacaaataacagaatctatccccttagccttaaacttatcaatattctccttgtaaggaggaacatgtttgtttgaacaaactcctgtgtatgcaccctgagagaaagccaaagcaaaaaatacattactatggaataagtctataacaaaaaaaaagtaacacatttctttcaaacaattccatttcctataccataagaagcattcattcaaccacataaaatagtaccaaattttacaaaacaagaccaacaaacaccaaagagacaccccaaaacatatcaacatatcaaaaaaaattgcaagttaaacttactgggagcccaaagatgacaactttcttgtcctgaaacatg

SEQ ID NO: 288133 - DNA, 389 bp, Glycine max
agcttttagccaaaatcctgactcaccataaaccttgacccatggtgagaatgtcaatccttaccctcggaagcaaaaaaagaatagaggggaaatttccaatcaaagaaaaagagaaggaaaatttccaatgaaagcaaaaaaagaaaagaaggaaaattccccaatcaaagagtgggagaaagcaaaaaaagaaaagaaggaaaattccccaatcaaagagtgggagaaagcaaaaagaaaagaaaggaaaattcccaatcaaagaatgggagaaagtaaaaaaggaagaagaagaaggagagaaagctcctcatcaaggatcaaaagaaaacagaagatatgtgcagagaggtctttggaccggacaatatctgaacaatacagaa

SEQ ID NO: 288134 - DNA, 396 bp, Glycine max
gcttctaccacaaaactatttccatcacaagtcatgaatattgtaaatgttttacatttaagaatgttggttatgacgtaatcaaacataaaggttgacgaaaaatgacttacatggtccacagctgcaggatagagatgttcaaacacttgtcacctgatattatttctgctagatcagcatgtgtgatgaaaaattttgccccaacattaggaagtccaaattgcgtcgcctcccacgacacttccactggattcttgtacacgcaaaacaatgtcttcatcaattcgcccaacggatcagcttcagctgcaacctcagcctcaccaagacgtctaagtggcaaatgcacattatgatttgaatcctatatggtacaagaacatcagaagttaa

SEQ ID NO: 288135 - DNA, 389 bp, Glycine max
  unsure (1)..(389): unsure at all n locations
tttcttgtttctactgnggaagctaccgaggagtgcttacacttatagtagctgttggagtgttccatatgcgatccacgtgttggtactcagcctggaccccctcttatttgtgcatctttatgcgagagaatttatgacgcatgctcaaatgcttacttctctatggatgtgaaaacacaggtacatggatggctgtcacttttcaaaatcgtctgtacaagattatgaaaataagttcagtgtcctgcatcagctggtaaagaaacaaaagtttgcatagttttgggagtcattttgtttactcttcttttccccaacattcatttgataagctgttgtacagtgttgacatgttacaggattggttgtaataattcatacataat

SEQ ID NO: 288136 - DNA, 428 bp, Glycine max
tgtccacacaaacctgaccttatcattagtattaaagtatataaatcaaggctcaggagagattgatcattttatggtgtggctgcaaataattaaccattcaaaagtttttaaaataaactaattatgcatgttcaatcaaaattttgttgtctttcataaaaaaaaatgttaatgggcaaacataacggtatacacatggggacaaccatttaagcttgatgtcaagcaaaacatcatggcttcaaccccacgatgggtcatgggtgcaacccgctgtctcaagtctctacaaacatttgcacagaagttgttcaattcattgcatttataattgggataattgtatctttgtttttaatggatctatttcgaattgaaagcttattatatttggagttcattaggacattacgcctgtattgtat

SEQ ID NO: 288137 - DNA, 390 bp, Glycine max
agctttggtttcagagaccccacttggtcagagccatggtttctgatggcaacacttccaggattcgatttcacctttatcaatgttggataatgagaatcaaagcgaaatcatcatttcacttgatcatattcatgattatgggcacatgcatgccaagcttggagtcatttgtgacttccagatactgtccatgagataatcttttatatttctgttttggtttatatattgctttaatccccactacccacaatttttaatccattattgcattgaagtcaactatcttattcaaagtctaactgaactaaactttgatctgcttcttttaagaataacagggaacatgtatactgcttttgtggtgtttaagaatttattggggta

SEQ ID NO: 288138 - DNA, 216 bp, Glycine max
tgacctatgaaactcagcttcggatttctaggggccctgtgttccgtgcgtttccaccattctacgcgggcgaagagcacctttggttttcccagcaccttgcactatatactcacccatccttggtgcccatccttcactgagctcacgtgctcccactgttcctatatccgtgatactctcgcgtccgagtcctcataaatcctcacatgcctt

SEQ ID NO: 288139 - DNA, 283 bp, Glycine max
tgcttcttttatgattagattccattgcaagcataaattttttcttgaagaaacaacttagtatccttagaagtatttaaatagatgtatccccatcctcaactatatacattatattcacgagaaacaacttactatcctgagaagtactttttgagggataattaaagtacttacactattactattacgtatctaacatcaattttcttcaatgtgatttttccttttttctttgggtttatacctctttcactaatttatgacatctttttgtacaaca

SEQ ID NO: 288140 - DNA, 428 bp, Glycine max
  unsure (1)..(428): unsure at all n locations
ctttgcaataaaatttctttacaaaattataattaaaatttagaactacactaaagatagtacaaaaggtactttgatctctaattatttaaaattctttcatctgattatttaatccggttgtaaaatagatctggtgttgtctttatatcatccattaaggaatagaaatttattcaatccataacgttttggttgataacaaatttccttaatatacattagacaacagcggaaattgttttcaatatttgatttttcattatatttacaaaagtctaaacaagaagcattcttgtgtgaatttaagaattttgagatttcaaagtaaaaaccttaatatcagaagttaattataccgcanaccttaattcatttatggattangaaggttcattagttaatcaaatatccttacatagatgata

SEQ ID NO: 288141 - DNA, 367 bp, Glycine max
  unsure (1)..(367): unsure at all n locations
agctttatctntgtccccaaggcttcatgtagacttgtccaaaatcgcgaagtgaacctcggatccctgtcagatacaatactagaaggcattccatgcaaccttaccacttccttgatgtacaactccacgagtttctccattctatacttcatattcaccggaataaaatgagcagatttggtgagtcgatcagctatgacccacacagcatcatgcccacgactagtcttgggcaaactagatacaaaatccatagatatgctctcccatttccattcccgaatttacaatggcttcaattctcctgatggtcgctggtgctcaaccttagccttttgacatgtcaaacatcttgctacatatt

SEQ ID NO: 288142 - DNA, 394 bp, Glycine max
tcttacatagtccgtctttgcttgaccttctttatgcttaaaaacagaaacattaggcatatgcaaaagatcaagaggagttagtgggttaaaaccataaacaacttcgaaaggagaacaattagtggtgctatgaacaactctattgtaagcaaatgcaacatggggtaaacaagcttcccaagtttttaagttcttcctcaaaactgtcctaagcaaagttcccaaagtcctattaacaacttccgtttgcccatcggtttgtgggtgacaagtggttgaaaataacaatttagtgcccaacttgctccacaaagtcctccaaaaatggcttatgaacttagagtccctatcactaacaatgctccttggcaaaccatggagtctcacaatc

SEQ ID NO: 288143 - DNA, 358 bp, Glycine max
agcttgaattctaagagagcacaaatcctagacttacccaatttgtcttttcaatccacttagcccattcactagcttttcacttgactttgttttaacaacacacacactttatttgaacttctttttttttaacttacaacattttattaattttttgtgtgttctgttgtttcttacctttaaaattatccatcaaaccaactcccccaaatttggggcaaaattgtcttctaacgatgtgctctcctaaaaccaaagcatggtaaatggagatgccaattcaaagctcaaggttcaatttgacaattacaattcagctcaaagatgggtgcaaatgatatcatcattgagaaac

SEQ ID NO: 288144 - DNA, 417 bp, Glycine max
  unsure (1)..(417): unsure at all n locations
tgtaggattatggagtacccatcacatgtggtactaggtggcggtcgggcgatggtgcacaacaagttttccacatccacaaatcacgtataaacccaccatcccttgttgcccacctccaactgagctcacgtactcccacgtagcccatatcctcgtttctctcatcaccgagtccccataaatcctcacaagcttccccaacatccaggtaattcaacatccaaatcatcacaaactaaaaaaccaagcaaaacagggcaaaggtagaaaactctgcccaaaactcaaaccaaaatcacagctttttctcacttaaagaccccagtaacatttccttcgttccaattcgttcaccgttggatcgactcgaaaattttactggaagtctctagtacataagcctacantttgacc

SEQ ID NO: 288145 - DNA, 399 bp, Glycine max
agcttgtttgacagccaatttgaggggaactgagcggttttgacgcttcattaaaaattgtcgaactgaaccacctttggcatactcagatacaatgcaccataccattggcttgcggcatgcaccaatgaaacgaactatgttagaatgctttagtgtggccaacattgtgacctcctgctggaactgttgttccatcaattgagcctttgctggatcattttcaggcctctccaagattttgattgcaacatcttcaccattgtaagtacctcggtaaagtttcccaaaagctccttgagcaaaaggctcacccatattcagtttcctgatatcaattgtccactcatcaaaattgtcaagcccttcagtcggagaactattgtccattatagcttg

SEQ ID NO: 288146 - DNA, 449 bp, Glycine max
tcaagcttggtatattgatgctgatggtgtagttcagttgaaagtactagcagcctgtttgattgacacaggcgatgaactccttgtcactgaattaatgtttaatggtgaatcaatatttgtttcccaattatagtttacatttcattatgttttgtaacctgtttttttcccttcatttcccctccaccattaggtacttttaatgaccttgaccatcatcaagttgctgcccttgcgagttgtttcataccaggagataagtcaactgagcatatacaactgagaacagagcttgcaaggcctctgctacagcttcaagatagtgcaagaaggatagctgaggtaggtgtttgttcacttaacctgaatgtatcttctgaattaaactataaatggtatcacccttttgtcacagatacaacatgaatgcaaattggatataaatg

SEQ ID NO: 288147 - DNA, 401 bp, Glycine max
agcttgatcttgaattaatcttgaagcaatgcttgtttgttgaagcaaccttgtattattcttgaagcaatgttttgaatgtttattgaagtaatcttgaaagcaaccttgtttgattattctttgacatcatcaaaatcatgtattcatacattcacatatactaatttgagtcttggccacatcgtctacaatagttaaaggtaacttacatttaataaaaaatgttaatgagttagataaaaaaacttaaaagaaaaattttgaaaattttaggaaccaaatgtaataaaattatttttggaagactaaaactaatatgagtcaattaatatttggagtaacaaaatcatatttaactcttatttataggtctatcagtttattatgtgaccaatgga

SEQ ID NO: 288148 - DNA, 449 bp, Glycine max
  unsure (1)..(449): unsure at all n locations
ctcaagcttgaaggtgtatagcccaccatctttntatactggtaatgtgtctactatcattatcatcattttttctccgtcattgaggtgccacttgaactgctaggtctctccacctttgggcgtattcttttgaaagattcgtgccccctttttgcacatgttctgtagttgcatcctatcctaagacatcatattgacactgcttaacgaaggcaaccactangnccttccaagaatggactcgggaaggttccaagttagtgtaccaggtaacagctaccccagtaagactttcttggaaggaatgtatcagcaattcctcatcttttgcgtatgcccccatctttcgacaatacatctttagatggttcttgtggcaagtagtccccttgtactcgtcaaagtctagcaccttgaacttgggaggggtgatgatattgggtact

SEQ ID NO: 288149 - DNA, 367 bp, Glycine max
agcttcttatccaagactcatcttggcggagaagctccttcttccatggcttattccctagtggatggcgcctcctctcacctcttctcttttgtcttccgccgcattgaaagctcattgaagctcattgaaggacctcattgaagctcaaagatccagcctccatagaagctccacaagcaagcttccatcaagtggtaatcagagcataagagcttcaagtaggtgctccttaaaccatgaattgtgttgggtttaggttcctttgtgtttagttttcatatagaagctagatttgattctctatggttcatatttcttgttcttgttcttgaaccatgaattgtgtctggtttaagttcctttg

SEQ ID NO: 288150 - DNA, 438 bp, Glycine max
tagccgaattcagatcgaattgaagttagcttagctcatccttggtcagcttagcggaccaaatcagccttagatgcaagggttgggcactaagcgcttgagactcgcagcttagcgcatgaacaaagatgcgcttagcgtgaggcttgcgcttagcgaaaggactactttttagaaaaaagttttctaagttatttttcagtcctttttccaaaaaattgaaacccttatgttaaacattcaaacataggctaatatactcctatgtatagatcatacaacaagttccaaatgattaaatgcattaaaaacaaagataacagaaattaaaaactgggttgcctcccaggaagcgcttctttaacgtcattagcttgacgcttttacctcaccgggtgatcttatgttttggttcttactttcagaacctcttgacct

SEQ ID NO: 288151 - DNA, 388 bp, Glycine max
  unsure (1)..(388): unsure at all n locations
agcttgtcttcaaacttgcttgtaataggctgccaaacactccagctcttagaagacacccctaccttgcaagtattttgttcaataatgtgattgaagcaaattttttattagatttaattaaataaatgtttagtattttgttctttcctattagtctgttgatagctaactggaataaaagaaaagctaaggtcggaccagttgatagctaattggaataaaagaaaagctaaattgcagggaataattatgatatctttttatttcatcattacccctttntatagccatttcatacaagatattttgctaagttgttataacagaattttgaaattgcataaccacacaggtatcaagtaaaacgtggataaagctttaagcg

SEQ ID NO: 288152 - DNA, 443 bp, Glycine max
tcaaaacacagcaacacagaatctaggtgtccaaaacccctcaatttaatggattttctaggtttgagaagtgaaattgagaatgaggtaaatttgaagcaaactctcacctcacacaagtccataacatcaatttaaacttgtccaaactggatttacacctgaaatttcaccaaatcaaaatttgactcctcaacacccaaatttaccctaaaaatggctctttgttcactttggtcatttgtttttctctctagctcagcctaacctttctcataaatcctaaatgacatttcaaactaggattaactcatttgaaccttcatttactacagaatccagatttaaccttccaactcacaaagcctcactcttttttccactcataacaccacattctcactttctaaccctaggttaactctacccttcatctctaacag

SEQ ID NO: 288153 - DNA, 399 bp, Glycine max
  unsure (1)..(399): unsure at all n locations
agcttataagatatctgcttatgcggctttctatggttggaaaatgtggaacgttgttgagtatctgggaggagatgcaagaatgtgggtatagttcggacttggaagtttatgagtacatcattagtggtctttgcaatgtaggacaactggaaaatgctgttcttgttatggaggaggctttgcgcaaggggttctgcccaagcaggctagtatatagtaaactaagtaacaggctgcttgcttcggataaatcaganagggcttacaagctgtttttgaagatcaaacatgcccgttcccttgataatgcaaaaaaatattggcgttctaatggtcggcacttttgaacaggcatgctaatcagaagctcttacagtagatcctcttggttgctct

SEQ ID NO: 288154 - DNA, 427 bp, Glycine max
  unsure (1)..(427): unsure at all n locations
atatagctnacatctganatccttaaagaagactgatgaaatgcatcttatagctctcatgttttaagcatacgaagcctgttggtcactatctcattgataaaacttggaggttaagagttgaaggtctagtagtgaacaatcacgctgtaataatcaataatggtccccacccctctcctattattattattccaaaagagctacttgaatcatcactgctcaaaaattcagagctggataagttgtaacaactgacaaactcttgtattctctccatcttgaaccctacacaccactgtgtgtagttgcaacttgcaagcttgatttgacttcatctatactactatatatgatttgcacaatcactttagctcgtatactagttggataggtgtttaattctagcgattagtcaacaagcacg

SEQ ID NO: 288155 - DNA, 391 bp, Glycine max
tatcttaattagagtatctttaatataaattattgagctcaagaatttctatccaccagatctattactattcctgtttaaaaaaatttcatgcggaaagttgaattctaaggaaagaactctcaagaattttacttttatcaaaaaagtattattttttaatgtcgtttgagggaaaagaaagatcttatttttcttttatgtacaagtaaaatccaaaaatccaaattgaattttatcagtaaagtaaacatgataaaagttctttatcatgagacctataaaaaataatctaaaaacaattcttccattaaaatgctcttaatgttcacatggcgagacagagaagttattaacaaacctttgatattaacaatgaagttaccaatca

SEQ ID NO: 288156 - DNA, 425 bp, Glycine max
tgcagatttcggcttggccatgagagtttccgaaggtatttggccgtgaaacctgtatggatattttttttctctctgtatgtatttaactttgattgaatcattgctgtcccacctgccttttgtaaaaaattgtccagttcagtagctatcaataaaataaatgtgtatggcttatgaagatatgctaatatttctacgttatgttcatttcagtttccgtgtatttgtattttgggatttcttgtggcatctttctaataaaaaaatgaaggaattcatcatgatgagctttcaacttaagactaagagtcatgaattttgaaagtgattgcattttgagtaggaacaggtcggtcacgttcgggccaaaaaactcagtctgaccaaaccttatgtgttgctacttgagttccataaccgac

SEQ ID NO: 288157 - DNA, 276 bp, Glycine max
ctaaacaaaagactatcatatagcactctaggttaagttactatgtcaactgtcctctgatcatggtctggaaacaccaatcacacacgcgatgaattatcgaactcagttacatggtgggacatgatcaaaggatgacaccttaaatgatcttcactatttccaacgcagggttgtggacaaaacatcacgagcttagagaatttctttacgatgcccacaaatatggctctaacgacttcctgtgcaatgcccacatgtacatttatgaccata

SEQ ID NO: 288158 - DNA, 431 bp, Glycine max
tagatggagtataagacagagagaaggacatgacatcgttaaggagacgattcatacctaggtatggtggccacggagaagattcagagacttgtgacgatgctcgattgcgatgaagacgatgctcgagtgctacaaacactatgctcagatgcgtacagatattataagatgaatagagcgcgatagcttagatggagatgaatacagatatccagcttcttagggctcaccatattttttaaaatataacttcaacatctgttctaaaaaaacccgatgttaacaaaatgatgttaaggttaacatctgttgtctggagaaaaccgatgttaacataacacccgttataattgccccccctcccaccccacgttaataaacatatgttaacatcggttatttaaaaaccgatgttactaataaatgtt

SEQ ID NO: 288159 - DNA, 390 bp, Glycine max
tatctttcacaacatccaagcaaaaaaacattcaaacagcataagctatcacagccaagcaaaacagagcaaaggcagaaaactctgccaaaacaccaaccaaatcacagcttttctcacttaaagaccccagtaacaattccttcgatccaattcgttaaccgttggatcgactccaaaattttactggaagtctatagtacataagcctacattttgaccgttgggatctactagcaaacattcagaactcattctgtactactctttccacaaccaatcacacacaagcatttttctgcacaaagccaaaatcctgctgcacctattttgacagcaaaattctgcataagtgcagatttcgaaaatcacacttgccctcatccaatc

SEQ ID NO: 288160 - DNA, 417 bp, Glycine max
aagaagaagaagaagatcttcaaagagatttcaaggcttgtaaaggattgattggaaaagcaaaagtattcaagattgctgttagaaagattgattggaaaatgaaaaacaaagccttgcttttatagactcttcatgtctggtcaagaaggtcattcagaagagttataacttttagaaaaacttaaaacccatttgaaaaagtcaaaacctttttgaagagttacatctatagatttttcagaaacaaacactggtaatcgattaccaaatatgtgtaatcgattacacaaagcttttgagtgagacaatgtgactcttcacttttaaatttgaatttcaacgttcaaggacactggtaattgattaccaaaacattgtaatcgattacagccttttgaaaatatctggaacatt

SEQ ID NO: 288161 - DNA, 384 bp, Glycine max
ttcttttgggggctatggagtttatcctcaatactatgcatcatataatgaattgaaagtgagctcatgtgcatctaaatattactatctgagattaatttatgctttgctagcattaattgactgttaaacgttatgcgtgaacagttctgtttctgtacatttgtactgtgacaaatgtgaaatgctgtttctactaaagtcatgctaatttttcctgcctgtctgcaacagattattatagttgttatatctcatggtcaaattaactcgacgtcatcattgctttttgtgcgatatatattaactgggttaatgtgctatattgttacatgagctgcatccaacagtgcttgcatgctgactcttactatccaatcttgg

SEQ ID NO: 288162 - DNA, 428 bp, Glycine max
ctcctacaatagaggaaacacaaaatgaatttgaagagaattcaaattgcacctctgatggaattcaagtttccataggtgaggaaaaaacacccaattgcacgatatgtgaaaatgaagtggatggcggaaaaataaaaatatgtggccatcggttttgctccaataaatactaccatgttaggtgtctaacaattaatcagttgaagtcatatggtcattgttggtactgcccttcttgtttatgccgggttagcttaactgatcaagatgatgatcggattgttctgtgtgatggctgtgatcatgcatatcacatatattgcatgagacctccgcggacttctattccaagatggaactggttctgcagataatgtgatgctggaatacaagcaatccaccaggctaaacacgcatatgagttc

SEQ ID NO: 288163 - DNA, 361 bp, Glycine max
tgctttctagctcttcattggtgtattttgatctccttttggtgctctaaattgtgggaatgtgctcacatatgtggggcaattttggtttgttttcttgcttgattaagtcgaattgggggtttgtatgagatggccctaggcctataatgcattttgaagtaatggggcatgccacattgtccccgttctcttgctattgatgcctaaacgcgcgcccacacaagtgttctgtgaaatgcctcaatggcattagcgcgtgatttttgtagggaaacaacccatggggcgacttggtttgcacatattattgggacatgcattcattttcgaaagagctagagtaattgccccacatgtg

SEQ ID NO: 288164 - DNA, 418 bp, Glycine max
tgaatcggacatccgtgtgaaaagttatgaccatttgaatttctcaagagcttccgttgttcaatttcgatcctctcgacatattatgcacccgaatcggacatctgtgtgaaaagtcatgatcatttgaatttctcgagagtttccgatgtttaatttcgagcgtatcgatatattataaccctgaatcggacctcagtctgaaaagttatgaccatttgaatttgacgagagcttccgttgttcaatttcgaatatcactgtatgtgatgcgcctaaattggacattcgagttaaatgttatgaccatttgaatttctcaagagcttccgttgttcaattctgagcgtctcgatatgtgattcgcctgaatcggacatccgtgtgaaaagttatgaccatttgaatttctcaagag

SEQ ID NO: 288165 - DNA, 381 bp, Glycine max
agcttggagaggatgcttcaatggaggaaaagaaagagggagagaaagagagagaggggaagttgaactttgagttgtgtctcacaagactctcattcatcaaagttacaacaagtgttacacatgcttctatttatagactatgtagcttccttgataagctttcttgagaaaacttccttgagaagcttctttgagaaaacttccttgagaagctagagcttagccacacacacccctctaataactaagctcacctccttgagaagcttccttgagaagattcctaaagaagctagagcttagctacacacaccccctataatagctaagctcacccccatgccataatacattaaaatataacacaaaagtccctat

SEQ ID NO: 288166 - DNA, 420 bp, Glycine max
  unsure (1)..(420): unsure at all n locations
tagtgaccaatgggtgcttgaatcccttgaacattggcttgtcctagacttgtttaatgctccaaattcacctaagttgaagctcaagctaagccatttttgtttttgaggtctactgaacttttagagaagagaggagaaagagttcttgctttgattgcttgctttcttgagtctttgatctccaagccttccttccactcttcaccatttttgtgcaccaactgaggtatggaggagttattcattcttattcttgcttgtttagaggaaacaaatctttaaagataagatccccatcctaataaaggttcatattattgtctaatgactaatcagaggaggaaggacgtgagcattgcagattcctctacttttcctatatgccatgaccaaaatgagacanatgtctataccttg

SEQ ID NO: 288167 - DNA, 351 bp, Glycine max
agctttacccgtaggataatgtttgttttcaataccgccaggtaaaagtgtatggccgtcgatgtccgatgaacggcgctcgctgtccgtggtcatgcctcccggcgtcgagcactcgctatcgaccgtaggcgctggggctgccgccgctacctgcaagttagtgatgtccgatgacaggcacgcgctgtctgtggtcttccctctcggcatcgagcccacactgttgactgtgggtgctgaaactgccgccactacctgcaaggtatgtgaggtttgcagcgacggcattgtgactgaccgcggcgaggccatgtcactctcctccataacacttcctccgatgaacta

SEQ ID NO: 288168 - DNA, 421 bp, Glycine max
tgtagatcccttatgagttgaatcgcacatagaatcgtttttttggtaggctcggagtaaactctttacaatcatagttttgttactgtgccgacgattctactccacaccatagacaacaccgtaatagtatgtcacgacagtggctgggagaggcggcatggcgaagtccgtgaacgagggtttcactagtgaggttggtcgaaaatggcggacatgcaacagaaaaggatgcatgaagaagagaaagaatatatttatatcattgtggcaaaattagttctatgatgtggcgtgccagcgacgatggatgacggtggcactgattatgtgaagcttcatgctaagcataatgtcgcaatcactattggaacgagggcgtcgtgtgagataaaaatgattatgcttgtgttcggattac

SEQ ID NO: 288169 - DNA, 397 bp, Glycine max
agcttgagctcatgtaggtaatgaactctgagagtgcaaattgattttttttcgcacaaaataagatggtttcctatatactagctttgacataataagtggtattgtggtagactaacatttttttatatattttccattgaatgctcttctcccccattaagcttgttcaaatttctatccattaaaagcagcctcctttaagtagacttttcatcttagtaataggaaatgaaaagtcccattcataatgacatttggaaactattactttttgatttggagattaagattatcttttaaatgttttcttcttcaaacatttcaaatagaacgcaattcccttataacatttatatttttggataagaaaatggacaataataaaataagatgt

SEQ ID NO: 288170 - DNA, 431 bp, Glycine max
tgagatgaggaagtgttgaagggtgaaacttcctgcttttattgttgaccacagagtggtacctggagatatgtcgcgggggtcaggagaccttggggacgtcaggtggggtgctattgcccaaaaccaagcttgaccaatcccgacccaacccgggcatagtcggtcagtgagaacctgtgatgtacctaagcaggcgagctcctggcagtcaacagataaaaggaaaacaagaccacaaagcaaggaggcttgtggtggctggccagctgtgaattttgtgtaatatgtggattgtggcctctggtaatcgattactaagggtgggtaatcgattacaaggcttaaaattgaggacaggaggctaagatggtctctggtaatcgattaccaaggggtgtaatcgattaccaggcttgataacgaagtca

SEQ ID NO: 288171 - DNA, 394 bp, Glycine max
  unsure (1)..(394): unsure at all n locations
agcttctgtccatggtgattaagcattgtgtaagcttttgccatgaattgttaagcattgaattattattttgcttctgtcttgaggggttaagcattgattttagcttcttctcttgatggttaagccttgttatttctaccaagtggttaaactttgaggtatagtttctgcttggtggttaagctttgatagttttctgaattgatgatttgagcttttgtcaaatggccttgtgttgatttcgcttgatggttaagctttgatacttgctttggactcttggaaaaagattgagatagtcgatgatggtcgaagatttttagaagatatgcaccatgattgcacctacattttgatttgtttctaaatttcaattntgaccgatgtattt

SEQ ID NO: 288172 - DNA, 444 bp, Glycine max
  unsure (1)..(444): unsure at all n locations
tattatgtctcanatgggaagcagcacattccaccagaagatttttggtattctcactacagaaaaaaacatacaaacagttccacaataaatttcagataagagaagacattaaattgaaaaggaacaataagtaattactgaatgtgataaggaaatgtgtcccaggaaatgtttatcttctcccaaggaataattcttctcataaactcttttttaaacttatcccttgttgtcaaaaatggtgattctctccttttactttctatagaaagcttctcattattaagccattcctcttgttcctgttctccaagtcgtgcatgtgcattgctgtacttgacatctttcccaaacttctcttgttgtttctgtcctttatcaaagttagctccatcattaacatttacatgtttatcctcacttgcatttcttccatcactt

SEQ ID NO: 288173 - DNA, 354 bp, Glycine max
agcttgtaagtatttgttggtataatttgcctgttccattatgcttttaatgtctctagaggttacttcctcgttgacatcttttgttttgaatggaattgccataacaggtttgttgttactgtctttgatatttggtagttgatattgtgttgtgggaggtaattccgattggattaactcaccatccttcacttgccaatttgttatgacatttgttgttggatcacctatgatgtcttgtttccgagggtaatctatatgctttctgatgagcataagcatgaaacctatcgaagaaacagacattaattttgactctttcgacaaattcgtagaacttgtcatggattt

SEQ ID NO: 288174 - DNA, 441 bp, Glycine max
  unsure (1)..(441): unsure at all n locations
ntgtgcgatgtctatccatcattaagcggaaaaatcaggaaaaaatggtgatttacacccgattgagactacctcattcataagcacttgtaagagaagaaaataagaaagtaaaatgagtaaaaatcctcccataagttagatgagacaacttttataagagttaagtacataagttgatccaaacagggttttaggggaacttcaaataggctcaacaaaactaaatgcaacagctcacaaaaagcaccaatgtagagataataatggaagcgcatctcaccagaacatgtagagataataatgtacaatgcacaaacaacaccaagaaacctgcaattaaaaaccatcaaaacccaattgattctaaagaaatcggataaaagttagaccatcaataaaattttaaaaaagggaagcaaaagtcaaaacttttccatt

SEQ ID NO: 288175 - DNA, 400 bp, Glycine max
agcttatgctgcaaatatttacaatagacctcctcaacctcagcagcaaaatcaaccacagcagaacaattatgacctttccagcaacagatacaaccctggatggaggaatcaccctaacctcagatggtctagccctcagcaacaacagcagcctgctccttccttccaaaatgctgctggcccaagcagaccatacattcctccaccaatccaacaacagcaacaaccccagaaacaaccaacagttgaggcccctccacaaccttccctcgaagaacttgtgaggcaaatgactatgcagaacatgcagtttcagcaagagaccagagcctccattcagagcttaaccaatcagatgggacaattggctacccaattgaatcaacaacagtcccag

SEQ ID NO: 288176 - DNA, 435 bp, Glycine max
tctggaaaattgaagttcgtttttataaccttttcatgtgaactttcaaacatattattgagctcatttacactaatttaatgtagttcaaaatttaaacacatgatttgagattttagaaatgatattaattcgtatttagtaatgaatatcatgtttcgtaactatattagctcttatatttcatatttatattttctattattcctttgaaacaatttatacttcaatgttgttctgagactcctcaaatctatttgtgctgcaatagttcaactatttcatttgaactggattggtgtagttggtatgaaattggtttacctgaattcgttacaaataaagtagaaaatttatatataaattgttggatggattttgttggacaattgtgctataagtagtacatatacatgatcaaacaaaacatgataa

SEQ ID NO: 288177 - DNA, 385 bp, Glycine max
agctttgatgtatatatgcaaactcaacttgtccctttctttgagtttctcatacttataatattataatatgtttaagtcccaataaacgaattttcatttgggtcatgtcatcacttcacttaactgacgacatgaactcatgacaaaagttttaatatattaagcacttaaaacaaaattcatatcatttattaatatcttaaaggtatttaagtctatattatattattcactctctcactctgtatatatatatatatacaggatgttgttgatatcagaaatctcagtctggtttacactcttgctggaggtaaggccttttataactataagtttttaggattaatattaatataacagaagatacatgcatgataaa

SEQ ID NO: 288178 - DNA, 415 bp, Glycine max
tgtacgtgaatatttaagacttcagactcacttctctttgtcttgggaaatagattcagtgcagtcacattttcatgcattcaatttattttatatttgttctaaatttcagtagttcaattttgaacaactgaaatttggaattcattttttaaaattaattggtcgaaataaaatatgagttattcaatcttcatttgatagttccaagttactaaatgcattgaaaagtgaacgcacaggatctgatcctctgcctcagtctttcagtcaatgataggtattctcacacaaccttccaagctagcttgctccaatttttgcaaaatgcctcaatcctaatagtattaaatcctatgtaagagtcacaacataagttacataactgaagagttattaaattttaatattattt

SEQ ID NO: 288179 - DNA, 306 bp, Glycine max
tgctcgtatgaattacattctgcccctagctcaagcaaattcttaattcttcttgacatcatcaaaatcttcatgattgacatgctaccccttgttgatgacgacaaccacctgtaggttaggagcaacaacaaagaaaagatctatttgcatataggtatactcccccttgtgtttacaatgattgcttatatgagacaattgaagatttcatatttttcatatataaaaagttgtctcatacaacagtaggaaaagcttcttactatgttatctactatcattctctgaccctttgacaacatc

SEQ ID NO: 288180 - DNA, 432 bp, Glycine max
tgtataatcaaattaaaagcgcttgatatataaggctatttactatattatataacttatgtaacttataactcatataaacttttagtgaaaccaacctattcaatctaaacttaataattatgatggaattgcaatggctgctctccccattatgaaatactgcctttatatattcccccacttcaagtagtacactcaccaccccattccaattctctctcagacactcagacatagataaatgataatggcacaggttgggacagtaattatcccccactccattttccagtgcccatttatttttgtttttgacagaaagtgcgaatttattattgaacaatgaataatgattcatcaacattcatccactctaaacatctcattaatacataagttttatcttcattattacattaaataatctat

SEQ ID NO: 288181 - DNA, 396 bp, Glycine max
agcttcctcggtgccattcctgcgaaggcaaacatttggaaagttagttttagtgggacattactcttaaagcaaaaatggcatgtaacctcctcccatcaatacaaacatcaatgtaaatttagagcaagcttatgcgcatatttccctacgaacgttcacttgcacaagacatcctattaactaagaaaaatgcacccatatacaatcaaggtagcttccttacctagattatttacatgtacttccaaagtgtatttgttatttacatcatacacgccatcttgtcaaaatttacacacatgcatactcaaagcatttcggggtaccaaaaattgcacatgcgctcatcttggtatttctaatatctatacatatacaaacttcatgatgaat

SEQ ID NO: 288182 - DNA, 432 bp, Glycine max
  unsure (1)..(432): unsure at all n locations
tataaatatatttacatgtatcaaatatatatataattaataataacaataataataaatgtatcattagataaatatttatttaaatatatatatatatatatatatatatatatatatatatatatatatatatatataagcacataaaataattaaatgtactaaaaacattaacatgaatatactaaaatataaatgtaagtttaataatatatatatatatagaagtaattttacatgtatatatataatttgaatgattaaatgcattaaatataaaataataagaacatgctaaatatatccttatataaaaataaaatatatatgtataatatatgtacataacaaccaaaagtttatatacatatatacatatatcctanatgcattccaacgaagccatgaaaacccaacaatgagaaacga

SEQ ID NO: 288183 - DNA, 399 bp, Glycine max
  unsure (1)..(399): unsure at all n locations
tgctttgagccaaaatcctgactcaccataaaccttgacccagggtgagaatgtcaatccttaccctcggaagcgaaaaggaaagaaggaagatttccaatcaaagagaaaggaaaaaaaaagaaagagcagaaggaaaattccccaatcaaagagtgggagaaagcaaaaagaaaagaaagaaaattctcaatcaaagaatgggagaaagtaaaaaaggaagaagaagaaggaaagaaagctcctgatcagggattgaaggaaaacagaagaaatgtgcagagaggtctttggaccggacaatatctgaacaatacagaattgtcaccaaatgaacaaaaaagaaggaaagganaccacgacctataatggtcttctccctttgattaccaaccaaaa

SEQ ID NO: 288184 - DNA, 429 bp, Glycine max
  unsure (1)..(429): unsure at all n locations
ntgaggtaccaatcattgtctttcatcatgaccgtgtagtaaggaacctattgggtgagaactttcaatctgcccctagattcgcttgaggtttatgcatggtacctttcattgccccagtgtagggctttgaggtatccatcgttgttttgttttcacaaccttgtagcaaggaagaatgaaagaggcggtttgattctcgcaaaaagaatttttcaaggacgagaaatagttgaaggattttttttgagttgacgggttaagtcaaatgactcctattcttgataactcacttctctctaaaaaagacaaacttttaggaatgataaaatgaggtcacatgaatgtctatatttttacttgaaaacacagtcaatcaaatgctnttttctttntctttgtgaactcttttttttttgctttactcgt

SEQ ID NO: 288185 - DNA, 388 bp, Glycine max
agctttttaatcatgttttatgaacatttcatattaaactacatcctggaagagaaataataatataataaataatactgacgtgaccaaacaagaaatataaaaaagtgtcaaataagtgcatctaataacagtatttagacttttcctccctgatttacttaaatccacgtgattttcattattatcttaatatcagtatctaattacactgtttcctaaaggcatataacattgtgcaccaacttctgcctcatcgattcccaactatccaggggacgttctgggcaacaattttttttatttggtcaaattaaatttcaaatgtccacacctagcatgtagattcagggtcaagaaggaagttgtttatatactggtaattggg

SEQ ID NO: 288186 - DNA, 422 bp, Glycine max
tgtactcgaagccctctttttaaggctgaggctccacaccgccagcggatactagctgctgagtctgctatcttcaatcgactttttgtggagcgggcatacaagtatcgccctgttaaggtggtggaatttgaacttccgcggcagcagtgtgtggtttacttggatctgaagcgggaggagtgcaccaatttgttcccatctggccgagtatattcacaggcattccatttaggtggacaagggtttttcttatcagcacattgcaacatggaccaacagagctctttccattgctttggcctgtttttaggaatgcaggaaaagggctcagttagctttgccgttgactatgagtttgctgctaggtcaaggccaacagaggaatttgttagcaagtacacatgcaattatgtattcac

SEQ ID NO: 288187 - DNA, 389 bp, Glycine max
tagcttatgctttgaaaaaagtctaagtgagtctaccttgtatgtcaagaagagggatgttggaatagtcattgtttccttgtatgttgatgacttacttatgacaagaagttcaaaggagctgattgaagagttaaaaggaggaaagaaagaagcctttgaaatgactgatcttggaaaaatgttctttttccttggtatgcaggtgcaacaagatagaggtgaagtctttgtaagtcaagaaaaatatgcaaaggaaattcttagaaagttcaagatggaggaatgcaagccaattgcaacgccaatgaatcataaggagaaattcagcaatgaagatggagctgataacgttgatgaaaaactgtacaaaagcttaatatgatgtc

SEQ ID NO: 288188 - DNA, 410 bp, Glycine max
cgagctctgacctttttattaaataagttgagtcacgttagtccttaaatgagttagaaaataggcctctgagacgggtgactcaccctacttgtatccctaattgtgtgtatattgaaacataataaattccatagaatactttatactattgttaaatattcctagtcaagtattattgtcaatttttgaccaaaatcatggattatggacaaagtgattataaagttagtcattggacataacaaattatgaagagggatatgaatgatctagatgaaatttattcctccttcataattagagtaatatctatcaaccatcttaataaagtaagaagctaggcatagttgtgctcaatgagtcaatatgggatattgatctcatctattttaatgtcttttcaaagt

SEQ ID NO: 288189 - DNA, 155 bp, Glycine max
gtcatctgactaaatgtgatgaagatactctgaataatcttctgatgacccaagtgattgcacatagagggggagaatctatgtgcttatttgagaattgcactcctactgcctgatgcttatgtagttactgttatgctctacattccatggag

SEQ ID NO: 288190 - DNA, 411 bp, Glycine max
tcttagtttcaatgatgcagatgagtttgtggctacttcatgcactcctctaatgactatggcatcatttctggctctaaactgttgagagttggaaaccatattctcaactaaatttctggcttcagcaggggtcatgtctccaagggctccaccactggcagcatctatcatacttctctccatgttactgagtccttcataaaaatattcgagaagaagctgcttagaaatctagtggtgagggcaactggcgcatagttttttaaatctctcccagtattcatataggctctctccactaagatgcctaatgcctaaaatatcctttctaatggtcgtggtcctggaagtatggaaaatttttttctaagaatactctcttgaggtcatcccagctcgtgatggacc

SEQ ID NO: 288191 - DNA, 376 bp, Glycine max
  unsure (1)..(376): unsure at all n locations
agctttaaggtcaagagggctgaaggatgatacaacttgcctcgttgtagatattattccttcagatcatcccgtgttgccaacaattccaagaaagaaacgtaacgtgctaacttcccttctctttggaaagaaatctcaaaactctacaaacaaaggcaccaataagctttcttctgttggtgttgtggaggaattatttgaagagggttctgcaatgcttacagagaggtaactgggaccataactgctaaatttatatttgcatgatgtcatttgaagtttaattggtcaccatcatggtggaaagagagaaaaaatgantcctttttcccaatacatctatctttgattctntaaatttcggacttaaaat

SEQ ID NO: 288192 - DNA, 420 bp, Glycine max
tgaaagcaggatgatggaacaacggccttctaatgctcaagaaaatagaagagtttctagataagtgttaccttgtatgtgatgttaagaacataattagttttactaatttgtaggtgaatctcgagttgtacgtactcttgctttcacgatctatcttctttttgccatatgattttagacaaaagtataagttggttataaaggagttttccgcatggtctcgtggcttttctctatagaaaaatacagcatagaacctgcgttctcgttaaactgtactattttcactactaaggacatgattaccattgtgtttggttgaaagggagaaaaagaagtgaaatagtgaaagagagtaaagatagatgaaatatttaaattaaagttggttgctagataaacaaaagaaaaaaaaat

SEQ ID NO: 288193 - DNA, 377 bp, Glycine max
  unsure (1)..(377): unsure at all n locations
cccaccaagccccacagaaaacaataaaaaaaaaacccaatcnnnnncagagagatcagcactcancccgaatgacaaaccggaccaaagaccccagcaccacagattaacccacccccanagggggggagaacaaacgacccaaaacaccaaaaggaaaagacaaacagaaaaacgcaaaaaaaaacacaaaccaagaacaaacaaaacaacacacacgacaaaaagaaacaacacaacaaaacaaaacaaccgaaagacgaaaaaagaccaaaaaaagaaccacaaaacaaaaacaaaccaccaacaaacccaaaacagacaaaaacacaaacaaaccaaaaacacacaccccaacaacaaaacaaaccagaacg

SEQ ID NO: 288194 - DNA, 411 bp, Glycine max
  unsure (1)..(411): unsure at all n locations
agcttgcttgtggtttctttattaagggtggatctctgagctgtaatgaggtccttcaatgatgattttccacgatggagatgcagcggaagacaaaggagaagaggtgagaggaggcgccatccacaagggaataagccatggaagaaggagcttcaccaccaagatgagccttggataagaagcttggagaggatgcttcaatggaggaaaagaaagagggagagaaagagagaggggggagcacgaaattgaaggaagaaaaagggagagaagttgaactttgagttgtgtctcacaagactctcattcatcanagttacaacaagtgttacacatgcttctatttatagactangtagcttccttgagaagctntcttaagaaaacatccttgagaagcttctttga

SEQ ID NO: 288195 - DNA, 455 bp, Glycine max
  unsure (1)..(455): unsure at all n locations
gtaggcctaggatcttcttcatcaatggattcctttgcttcttggaagatgtatggcagcgtaatggagaaggaagagagagaggagacgccacttcaaggagaagatgagtctagaagaagctcaccaccataggaggccatgaataagagcttggaggaagaagaagatgaatgaagggagaggaagagaagagcacgaaattttgtgctctaaaagagctataaaatctgaagtttaattttcaaatgatcaaagttgaaaaaatgcacacacatggtctctatttatagcctaagtgtcacacaaaattggatggaaatttgaatttctattcatatttcacttgaatttgaaattaaatntgtggagccaaaatttcactaattatgattagtgaattttagctatggttcagcccactaatccaagatcaagtccaagaatctccacta

SEQ ID NO: 288196 - DNA, 426 bp, Glycine max
agctcagctttcattatccttgttttttcttaaatctccatggcatacttccttgtcttttcttaaatttccatggcatacctaccaacaagcttagcactcattaaccttggtggagtcagccaagatcttttattaaaaatggtgacaaaaaatcctccttgacttgagtgaagccaccgatcactacatgtaatgacaatgttgtcgacactcagcatagataatgaagtaaatgcacccaatagcgaggtggcgatatataatgaggtaactatcctcactctgagtcataccaaactattgaacaatggtgctaagtctacaaatacatgctctagagattgtttaagaccacttatcataatatcctgtgaagactaccaaaaagttgtgaagaccataattaccctatgtacattatta

SEQ ID NO: 288197 - DNA, 330 bp, Glycine max
tagactaatatcatgtttattagacacggaatggtatcacctctatcatactatatcgtacgttatgtatgccactcaaaacgacatgtatttcaaatgccaagcgaactctgatacttcgatccatgaaagtcattttctaagccgccgtcaagctatcagttccatatagattacagctccatcaagctgcgtttcaataataattctacacatacttttgcaaataatatgtcttaacttacaccaaccacaaccactacatattcaattacgaaccgcatatatataatctcgttacacgcatcattatgattcactatacacacc

SEQ ID NO: 288198 - DNA, 411 bp, Glycine max
agctttcattgttgttctactaatattggtaattgatgaccgtgatgcatgtttgtgccagatcattgacaatgtttcataatgcagaataatttattcttttgcagcattgtgatttttcaatcacacttggatttggataggttccaattaaggcaaaaattattatatttgcttgatcaactaaaatgttctttgtacatatttttctgtgtatataatattaatttatgtatatctaatttttaatatttctgttatttattgttattgtatttttttaattatcatgtgatgtcttgggttttatttgttaggtttttttatcattctaatcacattggtgatgatgttaatttaactgtgattctattcttctgaccttgctatgaaatgatattaaagatgtac

SEQ ID NO: 288199 - DNA, 456 bp, Glycine max
  unsure (1)..(456): unsure at all n locations
tgtaactcaataattttagttgaaattggtgaatttacgcatgcaatcttaattctcaacacactntttggatgagtcttccaaggattgtgttgccttctctaactttccttccttttccagtgataaggtaaagctacaaaatcgagtctcccaattgttgatataagttttgtaagaccatctttaattcgaacaagtggcttanaggtgtaaatgcacaatccttccaagcgagcaactcaaaggtgtaacgccatcttaaaatttcgtatgagcatcttcaatgaaaatggaagacttgaacgaaaatggttggctcgctcctcattgctctgggaatagataacgatctatataatgagcacaatgtatgaatgatggaaaaactccaatttatgtcatcccaggttaagacttgtagttcacactaatcaatgactaagaaacaagaac

SEQ ID NO: 288200 - DNA, 422 bp, Glycine max
  unsure (1)..(422): unsure at all n locations
agcttattatgtctattgnggtgcagaatgctactgactctaccaaagtgtttctccgaaggagttttgcaattctagaagagaatagactacgacaccaagaggctatgcagaaggtggcatccgtggaggcagaggtcgccaagtagagggctactgctcgtctttatcttttttcttctttttgttggaatttgaccacataggtcttgtaactatgacaattatttttcttcgatgcatatgctttccttcgatgattaattttgaactgtttgtcttgtgtgtatataatgtatattgcctttgtctttgcaacgctntgtacttgtggttgtatgaataggttgtcgtgatgtagactatttgataacgtaggaaggaagaccttgttgatgaagaggtangaccatgatggtctt

SEQ ID NO: 288201 - DNA, 448 bp, Glycine max
  unsure (1)..(448): unsure at all n locations
agttcccaatgtgcatgccatgtaaatgagatcatataaaaactcatgttttggaatttctgattataaaaacacattcatgtgaattaaaagcaaaggagaaataatgctccccacagacattcatgcatgaataacccattataagcatgattaaataaactaaccttcccaggctttattgtgctcacgtcttcaagagaacatataacacactgccacgaaaagttataagttttagttacaaaaggtttgcgtaaaaacacataaatntgatctgcttggttcatcatggcctgattactcagcctgtaataaattaaatgtacaaaacttgctttaaaaatactaattgataggtntttgtttgttaacaattaagttagataaagcacatagagtaaaataatcaacatacctgaactgggaaatccatttggggtctccg

SEQ ID NO: 288202 - DNA, 422 bp, Glycine max
  unsure (1)..(422): unsure at all n locations
atcttgaatgntatcccattgccatcattgtggatagttgcaggagtcgaatctggctagcaaaaggacatacaaaatctcaagacatgaaaataagcaggactaagtaagaacagtgtgttctgtttcattgattattgtttagtgttttaaatatttgacgcggacatctctgaataaaattgtgttacttataaaaatgaagaaaaaataaaatcatgcacgggaatcaattgatacataattgttatattttaactaatgatctcaagtcaaatatctaattatattaaatactcacgtgagattnttgttattnttaataatcttacctgactcanacaagtaagattagatntaatgaaaaatatanatgattcttactaaagaaaaattataatggtttaaatgttattcgattt

SEQ ID NO: 288203 - DNA, 370 bp, Glycine max
gaagaatgagtggcggaactgaccgcatatatgatggacaaggagacaatgctggcttgcatatcttgagagaacgaaacgctgaaatcggagatgaacaactgcagcaaagcaagggaggaagatgctgctgaagtatagcacgtgagggcagcggaacgcgaggctctcatgaaactcgggattgtgatggaggaggcagataagaacaacaagaatgctgcaagagtggctgagcagctggaggcaacacatgccgcgaactcagaaatggaagcagaactgagaagactgaatgtgcagtctgatcagtggaggaatgctgcagaggcatctgctgttatgatatcaacagggaacaacaatggga

SEQ ID NO: 288204 - DNA, 423 bp, Glycine max
  unsure (1)..(423): unsure at all n locations
agctntatattcaaaatatttattttggatggtcaacataatgtggcaatcaaatcgttgttgtcattaaggttgtcctctcctccccaagatagcagccagaataagaaataaattcatgaaaaagcaagcatggaccgacaaattcttacgtactctctagtctatatagcatggattccaattttattttattttttaaaataaaagtttttagtattggacaaactatggagtgtggaccaattattagaattttatgacctactagtatatatatcatccacgcttttgactaactccacttattttaaacgcgcttcactatagctgtcactagataataacctactaaaactcataattntaccgacatctctcctactgataatattagttntttntatatattaaaaatacaag

SEQ ID NO: 288205 - DNA, 400 bp, Glycine max
  unsure (1)..(400): unsure at all n locations
tggagttgttgcttttccttttgggcctcatataacttgtttcctgcagacccctttgcttccagcagacccttagtgctattcgtaacatcttgcttggctaacttcgcatacgtggtccctttgtttgtcacttcgacatcgttttcttttctagtttggtgactttgctctcatttcgtgtgtttctggtacaccacttgttcatcttgatataaatcttaattatcagtttacatgtttgncatcatatatatatatatatatatatatatatatatatatatatatattttattgggctcttgtgtcttatgttctaaatattagccgcgtgtcagtgtccttgtccatgtagtggtccatgtccgtacttcatagctgaaaaccaattacctga

SEQ ID NO: 288206 - DNA, 419 bp, Glycine max
  unsure (1)..(419): unsure at all n locations
agcttgattggacacccacatttcatactctcagtatctcttctaacaaaatctttcttcctagacctatactaaccactcctctcacaaccaattaacacaaatgaagtccttcctctaataccagtgtttgtgtctagcctcataatcagcaccacaaatccattttcatgagcaactgatcgaacccactgcaaaacattatctcggatagcaaacacctacaattcaacccacaattttagtcttcaaagggacattcatcttatcaatttaataacaataatgaagattattacctgagaagtattgaacgcatccgaacaatcaacatgttgttcattcacaccacattcttgttcattntcatcatccatatcaacttcttcggacattatactgtcatacatccattgatc

SEQ ID NO: 288207 - DNA, 422 bp, Glycine max
  unsure (1)..(422): unsure at all n locations
tatgaaatattngtataaagatatggtctaaacactttattgtctaaagtggtggaattctcctttaatttatgtttcataccacatgagtatgtttgcaaataggaatgttcaatatcaattaaagagctctaaccaagaacatgggaaaatcaatcattataatcaccacacatccaccattacaagcatgtaagtcttcctttgcgccgaacacaattcatatgaagaactgcacacaacatctatgttgattcaatcaaattaattaacctacacaatagatgttactttggtaatatgctatgtcaattaatccaaccaaaaatactagacaatttagttaaatttaaatttacacatattttacatatatatacaaaatcccataatggcatatctatatcantcctagaaatcac

SEQ ID NO: 288208 - DNA, 400 bp, Glycine max
  unsure (1)..(400): unsure at all n locations
agcttcctttatctgttttactttngaaatnntaaccatagattgctaaagtagaattaggcataagtggcaactttgcttttaccaaaagaagtaaatctctagctagtaagcatagataatggtgctaattatacaaatcatagagtaatccaaattaatcatgcttaaagtaaatatacacaatgtaaatctacattgtctaatcttgcaacgtgtaattttacaccgtgtagaaatcaggttctaatgaaattctaatttctactaaatttatcacatgaaatagcatgcatataatcggaattttaattggttacttgaattaaatcttccttataattacttttaataccaattatatntccacagatcacccaaactcaatactttctgtaat

SEQ ID NO: 288209 - DNA, 429 bp, Glycine max
  unsure (1)..(429): unsure at all n locations
tgcctgtccgatgcagcagtaatgatgttcgagttatgtttgtggaacggctacgaacccgggatgggtttatgcaaagacaacggtgacataactagcctgataaatgccaaaggaaatcgtgggaagtatgggttatgctataagcccactcaggcagatataaagagaagcatcgtgggaaggaagagcggtagtcaaaactcgcggttgagacaagaaggtgaaggaagcccaccctgccacataagtaggagctttataagcgcgggtctgggggacgaatgtcaagtggtcgcgatatacgaagatggcgttctgagtacattggacttggtacgaccatgccctcctgatttccaactgggaaattggcgagtggaagaatgcntccgcatttacgcgacatgcataatgtaactcttacgg

SEQ ID NO: 288210 - DNA, 419 bp, Glycine max
  unsure (1)..(419): unsure at all n locations
agtcttattttcttccccagggggtagaagaaatatgtcatacgtttcctctttggtttcagtatgctctgcagcaataattgccttgatttgatcaactgtcacagctcttgctgactaaaatggtagaaacaatcaacacaatgcatcatcaaaaagacacttgaaaatataaagaatcttactatgatagcatagcatagggtcaccttcaatatgtaagtgggattctggaatccagagaatggattaaacttgttaataattcttagatgagctgttgtgagatctggctcaataaaagctctatacataggatacacctgcaaaaggaaacaaaacaatagttaaaaattatagcaggtgccttagtcttacagatgcaagtgttcataagtcctanaaaaattataacatga

SEQ ID NO: 288211 - DNA, 422 bp, Glycine max
  unsure (1)..(422): unsure at all n locations
ttagttattntaatcttaagttgaccttgacatcatctattgtccaatattgctaaagntggactaggtgatcaatgtataacaagagagagagaagaaagagagtggaggagagaatattcaaaaataaaaaataatttaatttttaaaatatattaattgtgtgaatggattgaatatctatacataaaaactatatatggatgaatttgaatagattttattaaatgaatcatggatgaattgaatnttttaaataaactttggtaaatctaaataaattaatagattattttaatccatttattcaatttgattattaataatgaattaatttagtctaattntcaacccaactcaattataccgtcgagttaggttaangttaccttatnttattnttgtaatcaactcaattcaac

SEQ ID NO: 288212 - DNA, 402 bp, Glycine max
  unsure (1)..(402): unsure at all n locations
catgttgncttggttttaaatttcgagcgtctcgatatatgacgggacttaatcggacttccgagtaaaatgttattgtcgctcgactttgctacgagcttcggttttaaaattcgagcgtcacgatatattacgggactcaatcagacttccgagtgaaatgttattgtcgttcgaatttgctacgagcttcggttttaaaattcgagcgtctcgatatattacgggactcaataggacttcccagtgaaatggtattgtcgttcgactttgctacgagcttcggttntaaaattcgagcgtcacgatatattacgggactcaatcagacttccgagtgaaatgttattggccgtcgaatttgctacgagcttcggtttaaaattcgagcgtctcgatata

SEQ ID NO: 288213 - DNA, 365 bp, Glycine max
atatatcgacgtgctcgaaattcaaaccgaagctcctaagcaattcgaacgaccataactttgactctgaagtccgattgagtccccgcatatatcgagacgctcgaaatttaataccgaagctcggcgaaaattaaaagacaataactttgtactcggatgtccgattgagtgccgtaacatatcgagacgctcgaaatttaaaactgaagctcgagaaaattcgaacgacaataacttttcactcggaagtcagaatgagtcccgtaatatatcgaacgctccaaatttaaaaccgatgctcgcggaaattcttacacaataacttttcactcgaagtgcgattgagtcccgcaatatatcga

SEQ ID NO: 288214 - DNA, 286 bp, Glycine max
ttagcttatatatatgtaatagtttttgtctatttttttttaccttttttggttagcataaacataatcttgttgaatcagaactactttcggtcggcatcttggaatcttcgttcttgctatattagctgctttttttttttttttgcctctcgtccaagtatttatattcattatttaaatcgacacttatgatcgaggcatatttcgttaacttttatacaaggtatgactgatatgacaagttactaattgtacatttctttcgtcccgaatcttgtatctg

SEQ ID NO: 288215 - DNA, 386 bp, Glycine max
cgacactatgaaactcagctttgacgatatgttagaactgcttttgttgttacactccaactggtggagaagcatgccagaaataccgaagtatttatatgcgtcctcagggtctatatatcagtttgaaggagaagtaagcttttttcatggcactgctctttatgttttttctcttggctttgagaaaatactaagtatttgaattcttcagaggcaagatccttgaagtactgaaaaactggccagaaaagagtattcaagttattgttgcgactgatggtgagcgtatattaggacttggagatcttggttgccaagtaaaatatagtgttagtctcctatatctgcattacacacagagacattagagtaacataattttt

SEQ ID NO: 288216 - DNA, 278 bp, Glycine max
ggggattatccacttcccacaaaagtattgccaccactttccacaacttcgatataattcagcgtacgatatattacgggaccatcagacttcagtgaaagcattgtcgtcaaatgctacagcttcgtttaaatcagcggcgaatataccggaccatagattccaggaaggattgccgttcacttgctcacctcggttaaattagcgacgaatttacgactcataactccaaggatgtatgccccaatacacgacctggctaaatgacgccaatatac

SEQ ID NO: 288217 - DNA, 449 bp, Glycine max
  unsure (1)..(449): unsure at all n locations
cttgttctatttaaattcctaggatcatgagcaactatgtgtgtcctactatgacttgagaaacaaagatgatcaaataacaagcaaagatttaaaaggtactaggttgcctcctagtagcgcttctttaacgtcttgagctggacgcgtgatgacttgtcggccacggacctagtactttgcttacctttggctttggacttggtcgcctgctggtcgaccacgggtcgtaggcaacgctccagcctttgtagatgagctgagggactctggaggtggcggcgatgcgtctattgcccgctgccggccatccccaagctactgtggtgtctcgccttgcgcctgcctgngggcgcagtacttcttgatgaaagctcggttagtagggggcctgatgaccttgatgtgggcgacgggcactccgtagaactgacagaggcccgtaatca

SEQ ID NO: 288218 - DNA, 433 bp, Glycine max
agctttcaatgaactcttgctccaaaaaattgttattcgatccaattcaaaaatcttacaaaatggtccatcaataagcatgtgaaatctaacaaaataacaagttaaggagaacaaactacaacttaataacttacatcataaaaggcataaacaaagtcctaaataagagaaaagattagataattttctaaattcacatgtctcagttaagtatttttggcaattattaactcccccaactttagaaatttttttgtcctcaagaaaaagtaaacacattgttaaatgaaaactactagtgctaagactaaaatattgacatgagttgagatcaattccatcctaacatatccaacacttgtattgtccagaaccaaggtcataaaaaaggaatgggacaaggacttaattattctcagtgatgtcattg

SEQ ID NO: 288219 - DNA, 417 bp, Glycine max
  unsure (1)..(417): unsure at all n locations
aaggtccaatgccttaacagttttttttactcttgggggttaaaatgaacctttcaaaagtttaaaatcaactttacgcgtaactttatcgcttttttaagaactatataggtctgagttcctcttcgcacttgaggatacgtaggagcaagggtcatgctcttgtcgaccccaaaagataaaaaacacaaaaaagggaaaaataaataaatattgaagtcatgattttgcacacttgattaaaggtcgccgtcccttgtgacggacgaatagggtgctaatacctttccggcatgtaaacaactcttgaacctttattcttaaaattcgcagacccctttntagtttttctaacgttntcctcgaataaacattggtggcgactcccgcatgtcttccttctttggatgacgcacc

SEQ ID NO: 288220 - DNA, 412 bp, Glycine max
agcttagctattggtctgagagatcccatgaccttctaaaccccacaatagaatcccatactttcaaggataaatatcacttctgttttttcgttttggtgcattatgttttaaaagtctcattgcggctatatgtttaattgatgttaaagaacacattttacattgatatccatttgaaaggtaataaaatgcattgcctatctccgggagaaccaacccagtcagcatctgagtatccaactacctgagcatgtcccctatcttcataaataaggacttagccaggagccttcttaatgtatttcacccagtgatcttggcagggagagtttatgaactgacttaccacactcactgcaaaggcaatatttgggcaactgatcatgacataattcaactttccaactaa

SEQ ID NO: 288221 - DNA, 351 bp, Glycine max
  unsure (1)..(351): unsure at all n locations
tcaagcttagaggcagaccattggaattgactctgccctgtccatctttatcttcgncattttcatccgttgncaggcctaagacgattcttacagtactactggatgcatgaattggccgtgcatggaaatactatccacaatgatatcttccaacttggtagtcttacttgtactaaattctaatcgcatatattttttgtacaatacaaaccttccactgaccgatatgcctgcgtgcgttcatgactgttcttaattgatcataacaatacgtgtactcgaaacaaattgattgattataacaccgattttgtccatctgattttatatttctatcaagtgttaaaa

SEQ ID NO: 288222 - DNA, 404 bp, Glycine max
  unsure (1)..(404): unsure at all n locations
agcttgtgagctnatgntaaaaaaaagatgttgaagaagttgacttgactatcaagtacaagaaaagcttttggtctagtgataagcacttgattccaagtgtttcaccaataaatgacaagagtttcataagtccaatttcatgatcaagtaaaaggcttacagttttcccatttgtggtaatgatggtgacatttttgccattgatttgtgtcacctctccatcaatccatgcatcctcaggatcctcaacccaaacctgtgatccaacgatgatgttcacaggtgttccctgaaccaatcacaacaaggcaagaaaaagtgttactgttaacacatgatctgacagcaaaaatgtgggaaggatccaacaacaaccaacaaacagcgcagagaagactcct

SEQ ID NO: 288223 - DNA, 455 bp, Glycine max
  unsure (1)..(455): unsure at all n locations
tcaagcttctaatgtgtactcatgtattgtcaataagtacaatatgttataagcaatangttagaataaaacatggagcatggaaactgcattgttgcctaaacaagtagcaaaaatataacacctcatctttgagaagtgcttactgttttctcttcctcagtgacgagaaacttcccctctgcaaaatcacaagctgcaattggtattgctagctgcttctgcaatttctttacaacaaacacttctgactcttcacatatggttaccactgtaccattcctacctagccgaccagttcggccagctcggtgtgcatagtgaattgaatctgtcggtaagtctagattaaccacaagatcacattctgccacatccaaaccccttgctgataattcattcgtaaccagaactctcacctcaccattcttgaatgtcttcagagttgttgacct

SEQ ID NO: 288224 - DNA, 427 bp, Glycine max
  unsure (1)..(427): unsure at all n locations
agcttcactgtttattatagtatgtacaaaagagttgcagtattcaactgcactcttagttaaagggagttagttaaaagatagtttggaagcttgttagtcttcctagttagttcaaagttagctacaaacagtttcagtaactgttttatatatatatatatatatctttgtaacacaatattcactggccaaatatatttttcctttcttgattcttgagttttcctctctctcaaactctctctaatcttcttttatgatactgtttagtttctaataatgtttattaatgataaaaaagtgctccatgcaccccatcagatttgtcctttggtcttcttccanaatgcttcaattccagcccanaatagctattgggccaatgggcccaagtatggacacttcagcacctttntctttacat

SEQ ID NO: 288225 - DNA, 475 bp, Glycine max
  unsure (1)..(475): unsure at all n locations
ttacgcgaccttagaatcctaagcnttctaatgtcttgttagagtcgtggccttcttcagtttgtcatctttagtgtcttcatagnttatgctcaataagttccaaacctctttagcagttctcagtctgtaaatcttgctgtaatcattctttgatagggcacatgttagagtatatcttgcttttgttttaagttccataataaccagatcatcatctgtccattcatcttcaggtttatgaatagggatatccctattggtaatcatgagctagatttcatactgggtggacttgatgtacatctccattatgtccttctagtaagggtagttntcttcagcgaagcctggtggcctagtgagagatgctcccttagtgataaacttgtgttggttatctaccatttggatcttttcctctanacactattaaatgctcaacccttggagactgagctttgataccaactgt

SEQ ID NO: 288226 - DNA, 432 bp, Glycine max
  unsure (1)..(432): unsure at all n locations
gcgcacgcaagtcttgagtatattncttctgtgacattctagaacagtcaccaaatctagtactagacagtcatcttcaccttatatcagaaccagcaactgctaggtaggacccactgtggtcgaactccactgcaagacacacagaatgaagatgaaggccttttgaaatatgtacaacttcttaaccagtatatataaatataggttatattgccatcaagtgaaaatgaataccggagctcgttggtgtttccgaatcatatggagcaaaattcctgaagttcttcagtttacgtagatcccatagcttaacaccatcatgagcagcagtctgtcaaatctaagagtacaataagaatactgtataaacaatcatcatactttactagttacattgtctcacataccgcaaggaagtatccattctca

SEQ ID NO: 288227 - DNA, 401 bp, Glycine max
agcttgcatcatatgctatcgacaataacatttcactcggaagtccgattgagtcccgtaatatatcgagacactcgaaatttaaaaccgaagctcgctgcagacgctaacgacaataacatttcactcggaagtccgattgagtcccgtaatatatcgagacgctcgaaatttaaaaccgaagctcgtagcaaattctaacgacaataacatttcactcggaagtccgattgagtcccgtaatatatcgagacgctcagaatttaaaaccgaagctcgcagcaaatgctaacgacaataacatttcactcggaagttcgatggagtcccgtaatatatcgagacgctcgaaattaaaaccgaagctcgcagcacatgctaacgacaataacatttcactc

SEQ ID NO: 288228 - DNA, 415 bp, Glycine max
  unsure (1)..(415): unsure at all n locations
gagcgtctcgatatgttacgggacttcttcggacttccgagtgaattgttattgtcattcgaatttgctacgagcttcggttttaaatttcgagcgtctcgatttattaggactcaatcggacttccgagtgaaaagttattggcgntcgaatttgctacgatcttcggtttgaaatttcgagcgtctcattatgttacgggacttaatcggacttccgagtgaaaagttattgtcgtttgaaattgctacgatcttcgattttaaatttcgagggtctcaatatgttacgggactcaatcggacttccgagtgacaagttattgtcgttcgaatttgctaccagcttctattntaaatttcgagcgtctcgatatattacgcgactcactcggaatttcgagtgaaaagttatt

SEQ ID NO: 288229 - DNA, 376 bp, Glycine max
agcttgtaggttagcttgcaggaatccttcgaattggccaatttcacttggtgctacaaagcagtgacactagtcgcagaggtaagggaggactaatatttcaaaacatcatccctcacccactcatagcaagcaatagcaggggggacgatagtgacccaacacactatggctacgccacactcggggggaagccttaacgtccctgccaccacttctccttgcttttctagaaatagaagggggaagaatcgtggttactggaacgggttccctgtttagagaagaagtcaaaggctgcgccaacacggtgtgagaccgtcaacctctccaaggaagaggactcgctatcagaaaccctttggcgagtctcctc

SEQ ID NO: 288230 - DNA, 242 bp, Glycine max
tatttaattccataagcccaactccttatcaaggaaataatccaaccagaatttcaataacctaaaatgttcacaaccacaaaatattccagactggaacacaagaaaaataagccaagttcttatcataattatggaaattctaagaaactaaaaagccaaatacacggcttataaaagataaattagccgaatctaaaatcttagaagacgaaggaggggggggaagatcaaaactctga

SEQ ID NO: 288231 - DNA, 409 bp, Glycine max
agcttgtttatcccttatgagttgaatcgcacatagaatcgtttttttggtaggctcggagtaaactctttacaatcatagttttgttactgtgccgacgattctactccacaccatagacaacaccgtaatagtatgtcacgacagtggctgggagaggcggcatggcgaagtccgtgaacgagggtttcactagtgaggttggtcgaaaatggcggacatgcaacagaaaaggatgcatgaagaagagaaagaatatatttatatcattgtggcaaaattagttctatgatgtggcgtgccagcgacgatggatgacggtggcactgattatgtgaagcttcatgctaagcatagtgtcgcaatcactattggaacgagggcgtcgtgtgagataaaaatgattatg

SEQ ID NO: 288232 - DNA, 406 bp, Glycine max
  unsure (1)..(406): unsure at all n locations
tcttcttccatggcttattccctagtggatggcgcctcttctcacctcttctcctttgtcttccgctgcatctccatggtggaaaaccaccattaaaggacctcattgaaactcaaagatccagcctccatagaagccccacaagcaagcttccatcaagtggtaatcagagcacaagagcttcaagtaggtgctccttanacctccattaattntttttgctttaccttctcttccattnttgtttcttcattnttctgcatgtatctcctcacatgtcttgtgataaatgttgttaacatgattctttagagtttccactgattaaacatgctatagaagctagatttgattttctatggntcaaatttcttgttctttttcttgaaccatgaattgtgttgac

SEQ ID NO: 288233 - DNA, 403 bp, Glycine max
agtcttcttttctattttgctataaataggggaagaagtgaagaagaaaagggttcagccccttatgcacttctctctctctcgaatttgctgaggaaaattatttccgtgaagaaaatccaagccgaggcgcttccgtaacgtttccgtgagtaattacgcgaagattctcgaccgttcttcaagatccatcgttcgttcttcgttttcttcagtctacaacgggtaagtacctcaaaccaagcttttcaattcgttctatgtacccgtggtggtccacattatgttgcatgtatttttattcttgtgctcgtcaactttttataccccttgtgacgtgcttaagccatttatttaagtcatttctcgcttaatctaccaataaaataaatttccatcgatc

SEQ ID NO: 288234 - DNA, 444 bp, Glycine max
  unsure (1)..(444): unsure at all n locations
tctcggctcatgctgggaacgcctctattctaacacccgttcagcctaaggcacccacccagagggaagctccccaagttccaactccgaacacggctcgaccggccggtaattccaacacgacaaggaacttccctccaaggccattgccggaattcaccccgctcccgatgacgtacgaagatcttctaccatccctcatcgccaatcatttggccgtggtaactcccggaagggtcctcgaaccccctttcccgaagtggtatgaccctaatgcaactngcaagtaccatgggggtgccccggggcattccgtcgaaaaatgcttggcccttaaatacaaggtccaacatctaatggatgccggatggctgactnctcaagaggatcggcccaatgtgaggaccaacccgctcgccaatcatggagggggagcagttaatg

SEQ ID NO: 288235 - DNA, 405 bp, Glycine max
  unsure (1)..(405): unsure at all n locations
ttagcttaagtaatgccagggatacaccacttcccttttagggtagttagtttgggatatgattcataaccctgaaaagttgtgggtccaaatcattcagagcaaatattgcagtgccattcgctttttgaacatggagaaaccgaaaggatttcccacgtagctttccatgattaaagctaaggaattgctcacagagggttttagctttcacattggttcgaaggaaagttccttttggtttgaagcttggactaatgacgagccactntgcaacaaagtcacctatgtgaatatccaggatataaacctaagattaatgaggtttatagggacaatagctggaggtttgatgagcttgcaactgttatcccagactaaaccaaacaacaaatttgttctttc

SEQ ID NO: 288236 - DNA, 504 bp, Glycine max
  unsure (1)..(504): unsure at all n locations
agcacggatgnngttgaaacccnttggatagangcgattgttgatcaccnctagacatnccngagacgccatacaatactcacactnatatcctaaggatttacctaggatgttgtgatctgatttccgtgaagagccttgagctcctttcatgtgcgaactcctactgccttaatggaaccatgaatcacattcctaagaatttggagcttggaattgcgctgagaataaaagcggagggttnttcgattcaattggataacatcaggatgatggctatgcctcatgaggtaatctgggccatacttgatggacagcgtatataggtttaatgatgcacatgctgactgagacgatggatcataaacgctatagcagtaagcaagctaaatgagatcatcgataattacatgcaatccaggtgagtgaatacgatctttaatggcacatgagcgatgaaaccgttggtctactcttatgggtaaacatactcttactctttct

SEQ ID NO: 288237 - DNA, 345 bp, Glycine max
  unsure (1)..(345): unsure at all n locations
ttagctntnttttcttatgttctctaatccacaagcatttgaggctcctgctacatcggtcatttgttcttgcaacattatgacaggttatcgaaggtacacacattcaagaagcaagacatttgagatataggtatctttttcctccttatactctagtaaaagtatctcttcatcaaagttgtaccttgctatctcatacacaagtcttattttttgatgatgcaaagccattctcagttgcctacttctctggctttcatggttntggtgtcaaaaatttatttgttgtaatagtgcatacaattttaanggtttagcacttaaaatttcttcctcatatga

SEQ ID NO: 288238 - DNA, 431 bp, Glycine max
  unsure (1)..(431): unsure at all n locations
gacctataaaactcagcttcagatctatccataattggagattgcatcttcctcaataaggtattaacaatttgtcttctattctagtgacactttgtttagaagaaagaggggagaaaacttttataaacttcaaacttttcttgcattaaatatctcctaaaactaaacatttattattttgaaaaactaaaaacatgtttaattaaaaaataaaatacaagataagctttaaatnttttttttttttttaactctgttcacttttattctatctcccctagtctaaaactacttttcccatgtaacgggtttctatttgcttccaggataggttttatttaatgcattcaattgagcccgtattccttcatgaaaatgtctttcaaaagaagaaaattatataaggaatanaacgaaatctatagtag

SEQ ID NO: 288239 - DNA, 476 bp, Glycine max
  unsure (1)..(476): unsure at all n locations
acacatgcgttgagcccttgannccntgaantnncaccaaatcccgggaccctcagagacgacctgtacgcgcgccagcaccatttatgancatttttaacccccagccacggggagatgtaggtgagttgtataaactaacttccaccgcaaccagcgtatggatcatctacgacaactaccggaccagaatagcctctgcggggcaactcaaaactatgtgaatcatgccctaacaaacaccgatacagcctggatgagccggtcgctcataaataccttatcaaatacaccggggcatctgcgcctttcacgaacgggctaggtgaagacagataagcgtggagcgtctatcacaccctgtatctaataaaacaccactttacaaatgtggaaactcttcagggacggagacatgtgcccgctagcacccaactatatcgaaactatcctgacacaagcgggccacctacgcc

SEQ ID NO: 288240 - DNA, 444 bp, Glycine max
gcgcttagcggcaccaactcttcaaaaatttcactaagtgttttgagcttatctagtgaagctcgcttagctcagcggacgctgcaaccaattgtgcttggctcaggaatgctcggcttagtgcataactatcaccaaaaaaatgggttaagttacctgggcttagcgattcagcctcgcttagccaaaagtagttcagcatgaggatgagtgttcatcctcaaaggatgaactctcttagcgcggtaagcatgcttagcgagttctttagataacacttacatacaatgagtattgatgaactcgcttagtgcagcatgctcgcttagcgagctcatcgcgttttccagacaacgcagaatatacagctcgttttctagcacttttcaagcctctaaaaggcatatcacacatgcaatgtgtgcgccatactcaattcagtat

SEQ ID NO: 288241 - DNA, 330 bp, Glycine max
agctcgcttgatatgatgtacatttttataaccaaggaagatattcttggccttccatgcttccaggcgattttttgtctaaatacttaactttatatataatagaaagaacaaacgatataataagaataataagatgaatgaatataagaattaaaatacgagatgcatatatttatacattgagatgccgacagatacgacgaagagacatactgtaatttctctctatgcctcaatgacaaatatctatcacttagtagtgtttttctgccacatacctgtgtgtggggcaagctaaccatcctttctacattcaacaaaacattc

SEQ ID NO: 288242 - DNA, 457 bp, Glycine max
tatgagaccaaaacatgacaaagaacgtttccaacaatctatttctcatgcttttctagtaaatcttgtccaaaacacaaacgaattatacataaattcttctcacaacatggggagtcaaatccctcaaacaatttcacataatcatattataatcaaaggaatcaaaatggttcaaaaacacaaaacaccaagagcactcaattttatcaaccaattcgcattaaggcatcaattggttcgtcaaacataacaatctcatgattacaatcataaaggtagaattacaatacaataaatatcccaaaataaatcccaatttgatcctctaaggatccccacacatgttctttctaatcccaattgtgataaactcatcccttacctctaagaaggctcacatgtgtagtttgacaatgatagtatcatctctagtggttccctaagattcctcaag

SEQ ID NO: 288243 - DNA, 421 bp, Glycine max
  unsure (1)..(421): unsure at all n locations
agcttcattgtgatctttttctattgtagaaattgatcactcccactaatcaagtcattctcaagaaattntgcgtttcttgattcgacaaccctagtgctatgtgatggacaatagaatctataccctttggactttntagcatatccaatgaaatacccactaatagtccttgggtctagtttcttctcttgtggattataaactctcacttcagatgggaatccccaagcgcatatatgtcgcanactcggtttccaacctttgaataactagaaaggtgtctttaagacagccttggttggaacccggtttaatatatatacaaccgtctttaatgcttcaatccacaagaattgaggaagttntttattacttctcatactttntatcatgtccattaaagttcggtttcttcttt

SEQ ID NO: 288244 - DNA, 443 bp, Glycine max
  unsure (1)..(443): unsure at all n locations
agcaactcanaatctaggtatctaaaacccctcaatttagcggattttcaaggttttagaagagaaaatgaggatggggtaaacttggagcaaactctcatctcaaacaagtctatatcatcaatctaaactcgctcaaaccggttttacgacgaaaactctaccgaatcaaaatttgactcctcaacacccaattttaccctagaaatggctcttgttttcactttggtcactcatattcctcatttgcacagtctaagctttctcataagtcctaaatgacatttcaaactaggattaactccctttaacctccaaataccactaaatccagatttggccttctaactctcagagcctgactctntttccactcataacaccacattctcactttctaaccctaggttaactctacccttcatctctagtagttttccata

SEQ ID NO: 288245 - DNA, 425 bp, Glycine max
  unsure (1)..(425): unsure at all n locations
agcttatattttgttaattttaattaacggaaaagtattatatataccacaatctttaaatcttcaaaattccaatatctataagtaaagcccacattttctggaaatcacacctaagatattttttttttgtcatgagttagacacttttggtgttttccaattcattgaatcatatattaatcatactcttaatgtgtgaatattgttagttcaagaaaattttacgctcgaagaanatgaaatacaaaattgtttagagtttcaagaaaattccattatcgtgataaaaaaaaagcctaaaatttaacttttatgtgacatatataaacatactaaaaaaacaactaaatacaatnttgttntgttgttgaatacatcaagatacaaacaaactagcattcatccatagactgaaatgcatc

SEQ ID NO: 288246 - DNA, 443 bp, Glycine max
gcttctaatttctattgttagaccaaaatccaattattaacatttaagccattaattagttgaccattatttgactagagaattttctctaaattatccttattctggctagactttaccttaaaaatttatgagcttaaccattcatagatattctattgtaacatctcattttctagtttaaaaacactatccaatcacacaacaaacaaaaatattgtctaccacatagacatgaaaaattgggatgttacagagtttctctcttttttttttcctttaaccaccaagttaatcctataatcccccatttctctctttaaccaccaagcaaaccttataactcctaatttgagggatcaatttttctttgtatttattttaaggattaactttctatctattacaacttgagagactaaattgaggaataatgttcaacc

SEQ ID NO: 288247 - DNA, 397 bp, Glycine max
tgagaaccataggccggtgtctatgggtcctttgatattatgaacaatccactttgcatccttgagaggagtactcattacagtctccatgtatcaactgatgactccagcagcatataaaacgtctagtcttgtgcacatcatatcgtaaactacccaccaaactcttgaactttgtatcatccacctttcctgcttgatcgaactttgataacttatttctgcactcaatcggtgatccaattggcttgcaagcatccatcttgaatctattgagcatctggtgtgtgacatagccctttcacacttacgagatggcaaagtggctctgtgagtgggcgatgacgatggtgagagctcttgctgaacatgttgaggtgtcttatcttcttcaagt

SEQ ID NO: 288248 - DNA, 421 bp, Glycine max
  unsure (1)..(421): unsure at all n locations
agcttcttgttgatcaagttgatccgcaagctagttacagatgaagttgatctgtataaatcaacttcatccgtaaccagcttatggatcatctacgtcaactacggatcaaatatagcttctgcgggtcaacaaaaacctatgtgaatcatgccatagcatacgcggatcaagctgaatgagccgggtgcacaaaaatattttaaaaatacacggnggtatttttgtcttttcatgtagggtgttaggtgcaccagcaataatgctgggtgctcctagcaacacccttcatcaaaatataacatccactttacaaagtttgtaagccttttcagggctacggttcccttgttacccgtttacaacaccaaattcatatcaatatgctaatcttgtaccaaaatgtttgtctctacttatt

SEQ ID NO: 288249 - DNA, 433 bp, Glycine max
  unsure (1)..(433): unsure at all n locations
tctagcgtacccgctatnggtgctcataanatcccaaattcaaatccctcttattactagctattttgaattctttagttcctgaatgtacaaccttcaaattgttactcgttcccgtatttgttttctgcaaaaaagaaaattaatctgaaacaattcaggctgaattgttatcgttattattactcgaaccataaggaataacagctaaacaagtaatttaaaatgtaacttttaaattatgtggtatttttttaattacaattttacttcaatatctaattttgttaatctacttaggtcgttgtttaaatataaatatgaatttaaaggtgatctactgataatataaagtacttgctaatcacaaattatgatacctatcattntcaattntaacttaattntataaatattaataaatgtataataa

SEQ ID NO: 288250 - DNA, 420 bp, Glycine max
  unsure (1)..(420): unsure at all n locations
agcttgcttactataccttctaccgaacacggccgtgcttctgtctaggcccggattcaaggcgggttgcagcaccggctccgcttccctaactgtactggaggcggttgcggtggctttatcctctatggttttctggagttttaacatgacctccgagatggaagccattttatctttcaaggccgatagatcggccttcatctgttcctgcacgccctcttcattatccatttttctagatcgagtgttataggggtgccttggtgttttcttagttatgatgaaattcctaaagaaataaacaacggtgagtatgccaccaaaacatgagtatgcaaatggatgatcggagcacttggatccaccccaagattnttagataacgtaatgagtccagaactttctcattntataaaa

SEQ ID NO: 288251 - DNA, 434 bp, Glycine max
  unsure (1)..(434): unsure at all n locations
ntgtacggccttaagcaggcccccaaacaatggtttgaattactgcaatctactatcttcaagccctttgtgatgcaaactgggcatcaaatgttgatcactgaaggtgaatttcaagttttgccatatatttgggcccttatcatatatcttggtggacctgcaagatcaagtgcaaaggcaaaatatcgtagtttggcataaactactatagaattatcctggattgagaccatgtttaatgagttgtaagtttccttcaacacactcattgtattatgtgacaaccaaagtgttgttgctcttgcccactaaagttagttattgacaactgttgacacctaactcaatagattggtaacacaaaaattagtaccctaagaataaaagaatattntaatntggtatttgttcaatgaaagagtaaaatatag

SEQ ID NO: 288252 - DNA, 401 bp, Glycine max
agttttatatttcaatttcgagcgtctcaatagattacgggactcaatcagacatccgagcaaaacattattgtcgtttgaattagctcagagcttcagaattcaatttcgatcgtctcgatatattacgggtctcaatcagacatctgagtaaaaaagttattatcgttcgaatttgctgagagcttcaacattcaatttcgagcgtctcgatgttttatgggacttaatcagacatccgagtaaaaagttattgccgtttgaatatgctgagagcttcaacattcaatttcgagcatctcgatatattacgggactcaatcagacatccgagtaaaaagttatcgtcgtttgaatttggtcagagcttcaacattcaatttggagcgtatacatatatt

SEQ ID NO: 288253 - DNA, 379 bp, Glycine max
tctggaaggagatcaacttgatgttctatgcctcttgattgtggtagtccatgaggaatctccataggaaagacatttctaaattcctgcaataagggttgaacactaggagaaatagaaatagtaaactcattagaattatgagtagaaattttactgtctttgcaatactgtagattgagtggttcatgagcaggtaacattttcctcacttcactcgcctctgcaaaataattaaattttctctcatgtgtatcactcttttcctcgggtgtatcactctttttcatattccttttgggtgcctcactattatctttctcttggtctctcttttctctcattctgatttggtcatcacacacttctctaggggata

SEQ ID NO: 288254 - DNA, 349 bp, Glycine max
  unsure (1)..(349): unsure at all n locations
agtttgcattatattgtgtttggnctgaatccttatgagcaagcaatatcaattattgcgaaaagcttggcagcattcgataaggataacttgatcccctactttggatttggagatggtatctctttaaacaaatttaacttatggagtgcattattttgaagttaagatatggctaaaagaacttgcagaaagaatctgatttggaaatttgacataaaaaatgtgattaagatacaagttgcagaccacatgtcttgccttgaaaacaaagcactaaagatgaacctttgcacatttaggaaatacttgctaatgagcaattacttggtataaaatgacatgcatt

SEQ ID NO: 288255 - DNA, 417 bp, Glycine max
  unsure (1)..(417): unsure at all n locations
agcttgtattcattacttgttgagaaccataagccaaagtcgattgttcctttgatattatgaagaattcattttgcatccttgagatgagtagtcattagagtctccatgtatcaactgatgagtccagtagcatatagaatgtctagtcttgtgcacatcanatcgtaaactacccaccaaactcttgaactttgtagcatccacctttcctgcttcgtcgaactttgataacttaattntgcactcaatcggtgttccaattggcttgcaagtatccatcttgaatttattgagcatctggtgtgtgacatagccctttcacacttaggagatggcaaagtgtctttgtgagtggttgatgttgatggngtgagctcttgctgaacatgttgaggtgtcttatcttcttcaagt

SEQ ID NO: 288256 - DNA, 443 bp, Glycine max
  unsure (1)..(443): unsure at all n locations
ntagtgcatgtaatccacttatgaatagaccccatcttcctcataatataaaactagaaatcccacaaacataatcgtataccttctcaaagttaactttaagcacaaggcatgatttcttccttctcttagcatcatcaaccacctcatttgcaatggctacactatctaacatattttgctctcccataaaggcaatttgcttttcaccaataattntagggagaaccactcttagtcttcttgctaaaaccttagacaaaattttatacaagcacccgattaaggatataggcctaaagttattaaggccttgtggatcatccttttttgagatgagaatgataaacgaaggattntctcttcttggaattgctccattttcccaaaactcttgcaacatatttataaaatccaccttcaatgtagcccaacatttcttg

SEQ ID NO: 288257 - DNA, 381 bp, Glycine max
  unsure (1)..(381): unsure at all n locations
catgttgctntatatggcctccgtgatagaagccatttgatcttttaaggtccataggtcggccttcgtctgttcttgcactccctcttcattatccatctttctggatcgagtgttataagggtgcctttgcgcttttttagttatggtgagttccctaaagaaacaaacaatggtgagtataccaccaaaacatgaatatgctaatgaatgatcagaacacttggatccacctcaaggccttttttagataacatgatgagtttcagaacttctctttttataaaaaggaacaaagcttttatctagccaagatcatacaaaagtgttacaacagaacgtaacggtttctaattatatgggccatcaaatctatcatgt

SEQ ID NO: 288258 - DNA, 420 bp, Glycine max
  unsure (1)..(420): unsure at all n locations
tcttatccaaggctcatcttnggggtgaagctccttccttcatggcttattccttaatggatggcgcctcctctcacctcttttcctttgtcttccgctgcatctccatggtggaaaatcaccataaaaggaccccattgaagctcaaagatccagcctccatagaagccccacaagcaagcttccatcattttcttctgagggcaaggtttatggtaaattgggattttggctcaaggcttgtaacacggctggacatgatatatgtcagggtttggatcggttcaagggtaaaaggggatgtcccacattatttccatgacacaaatgcaacaatgatgatntggaaattttatacacctatgtggacactcaagtgccanacttttatggtcatgtgatgctatggctcaggattca

SEQ ID NO: 288259 - DNA, 264 bp, Glycine max
agcttctcttactctgacatcaatggcggaaacagaggatagtggcgcttacctccatggtcgacgctccctcgacggtggacggtggttcgtggctcctcttcacggcaacaagaagaacaagaatcaaacgcaagctcctcttcacggcaacaatggttcgtggctgaggaagaagaagaagaaccaaacgaggaagaagaagaaggtagcgcgagaaagacaggtctaagaggtcaccaacacaatatgaaaatggctctg

SEQ ID NO: 288260 - DNA, 392 bp, Glycine max
tctacttatgtggcttggcgggcttccttcactttcttgtctccaatgcgagctttgaccactgttcttccttcccgcgatgcttcttttcatgtccgcctgagtgggcttatagcctaaaccatacttcccacggtttccttgagcatttatcaggctagttatgccgccgttgtctttgcctaaacccatcccgggttcataaccgttccccaacataactcgggccatcattaccgctgcatcggacagacaaggcttgccaaagagggagtccacagaggaaatgctgaccacctcaaaagactagaaagcagtctctaacgattcttctgcggcttccacataaggcatggaggatggggagcttaccaagatgtcttcctcgcctg

SEQ ID NO: 288261 - DNA, 369 bp, Glycine max
  unsure (1)..(369): unsure at all n locations
ccgaggttggcattgacacttgaaancccaantcacacaacccaggaccctaaagacctcaacattttccctttttgccaggaaggggccttgggctcttgacgtaagcccccccccaggctggactggttcgacccgactaaggaccaggattagtgagcttacccttacatcgttggaagacaacaattcaccgaggtagaaacgcacacagctatcacggatgactaacatgaagaaacacgccatctaaagctcaaataggaccacgcttctaaaagactagaattctaccaaaacttaaaggtgcaaagacgacggaaaaattctggcagcaaaataaaagcacataaatacccctaagccacc

SEQ ID NO: 288262 - DNA, 486 bp, Glycine max
  unsure (1)..(486): unsure at all n locations
gcatgcttgatacctgcttgaacgnatctcttgaaccccttanacatgcgtganaancctctatggcggatctatacattcgctcttatggcgagctttcccatgcatttgcagcggaaggcgaaggatcataggtcatggtagacaccattcacagaggaataagccctggaagatggagctttcacccccagactgtgcctccggtaagaaactcgacgaggaagccttaatggacgaaaagacagatggaatgggggagtccgaatttgatcgaatacaccacggcgagaagtggaacctcgaggtgcgcctcataagactcttatgcatctaagtgaccacaagcgtacccatgcttctatttatagactatgtacctacttgaaagcttctagaaatacttccttgacaacttcactgaaaaactccttgaaagctcagctagctaccacaccacttaaagctagccacctcttataaccn

SEQ ID NO: 288263 - DNA, 387 bp, Glycine max
agcttgttattctattttatccaaacaacttcacaaatctcacatgctttcaagaaacaacctcttcaatcttccatgtgtaccttcaaccctttaaagcatgttaatgtaatgtcaacagaagattattcttataaaaaacaaaatgtgaaacaagtaggcaattacatgaatgtacctattagttgttgtgtttccaatatgcataacccaatcagtccatgcttctacaaacttctccttatgaggcatcaacaatgtatagtaaacatactaaaaaaatactaaaaactatgaacatagtgtcataccctaatttcgtccggagaccattatttgttggcatgcggccttcatttgactacctcaaaatgtttaacacccatc

SEQ ID NO: 288264 - DNA, 439 bp, Glycine max
tcaatgatagtttatttccacttttaagcaacatattagtaccaagcaatgctatcaaacacattaggacaaaatacaagagcaaaaatattacacaattagcattttgaatgtacaaaataaagaaaccaataacaagtaacagggagcagtgcacttgagaagcaactacatttcacgagcaacatgtgtatttgttttatgcagttttaaacaaaatcccattttaaaatcattcattagatagttgttctcaaatcttattcatcgcctaacttctgaaataaatatcaaataacagggaacaagaactttgataagtcacaaagctgattgcatcatactcaatttgagagttctcaccaaattcagcggcaagcaagttattccattggctctagagtcgtctagccttgatctttggcacgtaccatataat

SEQ ID NO: 288265 - DNA, 422 bp, Glycine max
  unsure (1)..(422): unsure at all n locations
agctttaacaacaacctgcaaatttcaagacaaacaagagcaatgcaaaaattcacaaatcgtaaacattagaaagtttcaaatttgaagttaacttaaaaatgtatttatagtataccaaatacaccaaataaaagtacagacatcgtgcaaaacaagaacaagtattttcaaactttcaataagacacatatctttattatgatatgcttcaaaggttcccaccggtcattcatgttcaagaaatcaatgtactcgaagtaaaaccagtaagattgaaagaacatgaaaatgaattagtgaggattagctnttagcaaatactacaaagtacactaaccgtcttccctgaagtgcaaaggactntaatttcttctcctttaacctccaagacctcactatctatccaagcgacatcagga

SEQ ID NO: 288266 - DNA, 453 bp, Glycine max
  unsure (1)..(453): unsure at all n locations
tatcattctatctctcanaaagtatgaaaggaagttcaagtgatgcaggtaattcatacccctagtagacaaatatttctatcttaccttcatgtagacatctgtatctggatcaggtgtaatatttgcttctttttctcttctgaacacctctgctagcaaatctgcagaatgtgaaataattttagttaaaacttgatttttcatatgaattttggctcgatttccaaattgcagctctgtgggctaaccataaggaggcccaactccttggactcatgctgagaaggccagggtttctctgactgtcatttctccaatatgaagatcattttgacttacaaactcattcatcccatgaccattataagtcacctttccagtgaactgatcaagaagccaaacctaattagctacaaatccaataatggaaaatatgagcacaaacatcat

SEQ ID NO: 288267 - DNA, 398 bp, Glycine max
  unsure (1)..(398): unsure at all n locations
agcttcttactagtttacggctttctggatgtagatgatgatatctatacagatggatcttatatatctatatatctatagatagatatatagatatagatatatagatatagatcatacaatgaagtaccgcacgagtgggtatataggaatccaaatctgccgaatcactcatgttatgatcttctacatcctaggtcttcccgttccttcatctggcttatgttcttcatgtagcattcagactgaatgactctatgaaattacgtcgctacttccacatggtacgggtaacgtatgagacatctctatttttcccggngggaatccttagaattaccacagcttagctntcaattcgcctctgaccatcatatgaaatgtgaataacccgtcct

SEQ ID NO: 288268 - DNA, 461 bp, Glycine max
tcaagcttgtgaatttagttttgatgcagcaagtgagggaaaacaattcttaattgatgtctcaaaaaaaaaagcagcggattcagtagcacgggctgcaataagagctcggtgtcattatgttaataaaaagtggctcggcggtatgttaacgaatcggtatactacagaaacacgacttcaaaagttcagggacttgagaatgcaacaaaagacggggagactcaatagtttttcaaaaagagatgccgctatattgaagagacatttagctcatttggaaacatatcttggcggcattaaatatatgacggggttacctgatattgaataatcgtcgatcaacaagaagaatatacggctcttcgagaatgtataactttggaaattccaacaattcgttcaatcgatacaaattgtgacccggacctcgccgatatttcaattccagctaatgatga

SEQ ID NO: 288269 - DNA, 419 bp, Glycine max
agctttgcttaatgagaatctgttcttccaacaggctgtgcaatttggcatctgaagtctgggagctctgggcagatgggtctgctaaagctagaagtggggctgaagtagaagatgcaaggatgccagctattggtgcaaaggaaaagggaacatcagctgctctgagcttgctcttccttgcctctggaaaattaactgtttggtcattcgcattccaacagttctttatgatatacgctaagtcaatgaccggtcttaggttcttgtaggaggtaagagcatcagatccaactcccctcaatctacacaaggctgtgattaaagctgggaagcctaagcgagaagagttagactgagccatcatggtcatttgtccagagatcaaaccgccaatgttcatgtccatccttgtgata

SEQ ID NO: 288270 - DNA, 275 bp, Glycine max
  unsure (1)..(275): unsure at all n locations
atgcacggaaaatgtaattatganattgagatgcccgtttattcaccatttcctagttaaccttgcattaagtaccatgttcaattattttgtttctaagtgaaacgggtttatgatcccaacatggttggctcgtggggcctaacacatgatacttagaatgtagtgtgaagtttcacgctttcccctttttgtgtttgttttgtagaaggaaaacgcaaggatgagcaaacattgaaacaaatggtatccaattttgcagatacaaaagtttg

SEQ ID NO: 288271 - DNA, 416 bp, Glycine max
agctttgttgtggaaggaagatggaagaaagaagaggttcgaggagattggtaaagaggatatacatttgaactaaggcttgccacatggtttgctgacatggactcagattttccatgttatggactaagacttgccacatagacatttgactaagaggaaattagattttaaccgtagggacttatttgcataacaaatgtaaagatgaggattatttttttcatttcaataggatagagactaatatacaaaatgactacaaagatagggaccaaaatgcctatttactaaaaataaaagagaacaatgtcatgaactttctaaaactcttgttctctccttatcttgtaccaaagctgctctctactgactccaagccacaaacaccaagctcacaacaccatactcttaag

SEQ ID NO: 288272 - DNA, 439 bp, Glycine max
  unsure (1)..(439): unsure at all n locations
tgctccagatccataaggtaatatgcatcaagctaatgactgttaaacgagcgcttactgggaggcaacccatctctttntattttcattaatcattgcatatagttaggattaacttatttgtgaattgttgagtaagtcatcagcatgtttagttttgaaaatggggttgttaaagctctttgaagctgtggatgaaaaataacttagaaaatttttcagtcatccactcgctcagcgcgccctgtgcgctaagcgaattatcattcatgcgctgagcgagtctcaactcgcgctaagtggatcaacccctacctattagctgatggggtctcgctaagcgagacctgtgcgctaagcccaaaaacctctctgaaattgcatttaatggaattagggtaagcaagtcttctttctaagcgcacaacattgtctcgct

SEQ ID NO: 288273 - DNA, 87 bp, Glycine max
  unsure (1)..(87): unsure at all n locations
agcttcnatactttgtacaagaatgaagctctgataccacttgttagacaagtggcctcacatatcttaagaagggggggggggggg

SEQ ID NO: 288274 - DNA, 442 bp, Glycine max
  unsure (1)..(442): unsure at all n locations
tctanccttttccttcctttctaccacaaaggtggagttattccacatacataaaaggccaccagcagcttccacagatggaacaaaatcccaatgaccagtggagtctcccgaaatggcctggcaaatacttttattaaagttctccctcttggtttcttggaggcagacaagatgcactttgtgcttacaatgagccttctaacagcagcccacttgactcccctcccctaacctctagaattataggagagaattatcataattgctgagatttaattcccttttctgttgccatcaaatcatctttattctccatatccagcagtagccccttaaccttgctatcttcttccttataagacaagcccatttccttcaagatgtcacattgcagctgtatagggtcctcgtataaagaagcccatttccttcaccattc

SEQ ID NO: 288275 - DNA, 368 bp, Glycine max
agcttgtgtctaatcaagtcactcccacattttatctctagcatgcattgtatgttggtctcgtcctttgtcacgggaagccggaaggtccatatcaccttcttaattggacacatggcgcactgcgcccccaaatacgcaagtaagaagagataatattccgggctctcgggtctgtgaaatgcattcatatcatgcatcgcataaacatctgttcatggcatcataatgaacatatcgatgctgcatttgtctgttatcatattacagcctcacattctgcatgagtcatggcatcatcatgcatatgcgttcaacacactttttgatctgcacaattggataccatttggtttcatgttagctca

SEQ ID NO: 288276 - DNA, 393 bp, Glycine max
  unsure (1)..(393): unsure at all n locations
tgaagagagacaacaatggtggtgattttaatgaaaaattttcgtggaggaagaaagagagagttgtgctggaagtttctggagaaagagagagaagatttggcttttaaaatggtttttcttttcttttttcattntcttttttaaaagcaattccacatgtcatttttttaattggagcaaaaagggcccacctttacctttgacttgaccaaatactcagccataaaagaagaaaaaaatgggacctttttggatgctgaaatcttgcctcggtttgcgtgccgcctcttcggttccagttcttcgtgtttctctgcacccgtcgaggcccattttcaaggtaggcaatatatatatatatcaaaatgctcagaatgagaccctgagcat

SEQ ID NO: 288277 - DNA, 400 bp, Glycine max
  unsure (1)..(400): unsure at all n locations
agctttactttagatnttattaatgacccactaacctagaattaaaataacttaatgccattaacctagggaattaaaaaaaacttaatggctgagtgtaactgaaattgtggcaaccaaaagtcacccccaacagccaacaagtcagccaccatttggtctcccaaaaggctgatgcctatgttgccaattgggcccttattacaacttgaactaaacctaactaaagcccttttagttgattaacccaaaacatatttttggtcagccaactttacaaggattgggccattatttagacagactaaacactctaaaattgaaacaaagtggtgtcatttagtcctcctccatttgggccatgatacaactcacaaccttggacttttctccttgaaac

SEQ ID NO: 288278 - DNA, 399 bp, Glycine max
actcagcttgtgggtcagaaaaatcactgttgtcatctctaaaagcggatattggaatgtatgtatacatgatttgatgatgtcaagaagaatctaacaggctgcttcaatgataagcatttgcttcaaaatattcaagattgcttcaacaaacaagtcttgttcaagattactaaagaccaagccttgccttaaacaaagtgctttaagacatgcaggctctggaatcgattaccaggaagggaatcgattaccagaagacgggttggaaatagctgttgaaaaggttttgaattgaatttcaacatgtaatcgacaccatatgtctgaatcgataccacaacgaactttggaattcaattcaaagtcatacccttcaatataactgcgaatcgatac

SEQ ID NO: 288279 - DNA, 410 bp, Glycine max
  unsure (1)..(410): unsure at all n locations
agcttgctttcattttcagtcatcaaagtcacctcccctatgccaacaatcttgcttgtgacatggttgcccatcttcaccataccaaaatcctctttttgatatggcaaaaaaaatccttcatgaggagtaacaaggaaaaatactccagagtcaattatccatatacaataatcagatgcaatattaaaataattttcattaccgataaaaaaaacattctcatcatttaatgacagagaagtagtggttccacctttattcttcttctttgggtcaattcaattagcatggatagttccagtcttctgatctttcttcaagaatctaccctcaaacttcttatgggccgactttccgcaatagtagcaactaaagcctttgnggtgagacttggatctttcttgtga

SEQ ID NO: 288280 - DNA, 425 bp, Glycine max
  unsure (1)..(425): unsure at all n locations
tgcttctacaactctatttataatatttgctgcaatctttatttcctttcccaagagtgactatagtaagttagaatgacaaatcatgcttcttaccatatccttaagagttttgtttcatctttcagctactacatccatgctaggtgaccacgacatggtgtactatgggacgatttcacattcctctaggtacctagcaaaaggccccggacgttgttcacttgaaccgtcatatctgccatagtattcaccaccacggtcatatctaacactcttgattcttttgttgagttgattttcaacttcaactntaaatgttttgaacacatccagagattgttatatttcatgtataagaaacaagtatgcatatctggagtaattgtctatgaatgatataaaatattgttgaccattccatg

SEQ ID NO: 288281 - DNA, 369 bp, Glycine max
  unsure (1)..(369): unsure at all n locations
agctcggacccgggatcctctgagtcacctgccgcatttttcttacttataatcggcctcattgcttaggttcctcacgaagctcgcaaaaaagacgaagccattttataggctacttaggaaaactgagtcattcctatgggatgaggcttcgaaacaagctttcttagcctttaagatagccaattctaagttgaccaaagccaggagcacccctactcctttaccttaagtagcaaaagaggccatcagcttagcccttcgtccagaagatggatagcaccaaatgcccatntattttggtagccatgtcattcatgaatgtgaaaagaaataccaaatgatcgagaaggtgacattggcactcat

SEQ ID NO: 288282 - DNA, 189 bp, Glycine max
cgtctcaggtaccatatcactctgcgacggcggagccatgactgatagcaacttagtgtatctagtgcatgattggaggaaagaggcacatgtccgcatagacccttttatagagatgcaggatactctaaagataccaaatccttcagatctgattcatatactttatacaatcttatgtccgcctaa

SEQ ID NO: 288283 - DNA, 340 bp, Glycine max
  unsure (1)..(340): unsure at all n locations
agctntgttaaccctctatcttactttgtcttgtatcgtgactcttcgttgccatcatagagagcggngcagagagaagaaacactctctggcctctcatcttcaagcttcgatggagatgagcgttgcaaggctaaagaaggacgagatccagaggctgaagaaggagatcaattagctccgacgtccggcgacagagctgcatgactcagagacaagcgcgacgctgaagaacctcctcgaagagggagaaagaatggtgacattcctagagacgagcgcgccagcaccaccatcaccatcgctgatggtattcaaaccctaaccctcctcaccctca

SEQ ID NO: 288284 - DNA, 303 bp, Glycine max
  unsure (1)..(303): unsure at all n locations
atgatctatggctcctgaatcaagtatccaattccttgaacttgacttgtttacactgcaagcanatggattaaacattacctttgtgagaattactggatccagtgattgtaccaaatcggttcacatgtgaattattgtgaattgagctttgttgctgagacaatgtcatcaaagctctatattgttgtaaagccaatctcattatactattatgtgtatcttgactttgtactggaacaacactatctacattcttcttcgatgcattcatgaagttatgcttgagcactgatgcttata

SEQ ID NO: 288285 - DNA, 89 bp, Glycine max
ccccacacaacaaccaccacccacaattttccacacccaaaagggacggaccccacacaaccacccacaaacgaaacgcacgacggcac

SEQ ID NO: 288286 - DNA, 427 bp, Glycine max
  unsure (1)..(427): unsure at all n locations
tattcgagtatttaatactattctttatgtcttatttttgtcattgctgcgtcaaagntaacaatctcaatgggagggtggagccatgattgagtgcttctatgtttaacaagtgcatcattgttggaaagaggtacatgtctgcctaagcgcttctaagataaggtagtgaacttttacgataaaaattctttcatctttttattataaaaaaaatacaatcatatgtatgcctatacaatatctatgcggttcttgctccaatgagttcatttctctatggctgctctatgccatctaacatttgtgggtggccaaatattacacaactcatggatggctgctagtgttgacaatccttaagtaaacactctgcaaatgatttctcgtttacttgttgattcgagttatttaaacactattcttg

SEQ ID NO: 288287 - DNA, 356 bp, Glycine max
agcttttctgactattaacaaacattaaaaaataaacattaagtgataaattaaacaagtacaaagaagtatgtattataattttaatgtacataccaagtgaatggtgtgatcctccaagctaatagaaccacctgtgtgcatacccaccctttttagatgcccttttttttgtctatgcacacttggaacgatacccaggtgcattccaatgtaataatagattgttccagacacgatctccaatcaaatatgacctttgattttcatttcgggcatccataaacatcttagagagtctatgagaggatttcgagttagaagcttcgttaatttcattctcttacagacgtgtc

SEQ ID NO: 288288 - DNA, 457 bp, Glycine max
gcttgctctaagatcgtcggtttggtagtcacctccacatatttgtgagggggatatttgctgggttttttgggctcacttcctttgtggagtacagacccaaaatgagatgacccatatgtctcatttatttaagtggagagaggctatattagagagtgagatacagtgagagagactcatttgagagggaaaaaatttacaaatcattgagagagatagaatgagagagaatatcattgtgatattcgcatacccactagagagcgtttttcagattgcaacttcggatttgttcaccattggatcgggctgatttgaggacaactggttctacgtgcgtgatacttcaaattatctggctggatcgagaaaaagatatctggagagagagataagtgtttcgcattatctgctctatattctaggggtttatcttcttgtctctattgtacca

SEQ ID NO: 288289 - DNA, 276 bp, Glycine max
  unsure (1)..(276): unsure at all n locations
agctcgagtactattgattgtttttcccacntatcccttttaatttttttatatctacccaactattcctatttccaaattattaacataaccatccctattactattcttagtgtgaattagagcccccagtctcgaattcacacctttttttttttttgtaactttttgaatacctacattcggaattgaagaacccttaacccgaatttgaaaggactggtttttttttgctttcggaggatcccagtttactatacacattgtctacttttt

SEQ ID NO: 288290 - DNA, 424 bp, Glycine max
  unsure (1)..(424): unsure at all n locations
aactgatgcattggtaacttggaacccttttgccttgaatctgaaatctgtcctggcgcagggtttgggtttgtgctcctctgctgaccaccatacagaccttngcccttccatgcagcaacctatagcaattgagcagcctgaagcttatgctgcaaatatttacaatagacctcctcaacctcagtagcaaaatcaaccacagcagaacaattatgacctctccagcaacagatacaaccctggatggaggaatcaccctaatctcagatggtccagccctcagcaacatcaacagcagcctgctccttccttccaaaatgctgctggcccaagcagaccatacattcctccaccaatccaacaacagcaacaaccccagaaacagccaacagttgaggcccctgcacaaccttccctcgaa

SEQ ID NO: 288291 - DNA, 422 bp, Glycine max
  unsure (1)..(422): unsure at all n locations
agcttggttcaaggtacttacccgttgaagactgaagaacaatgaagaacgaatgaagaacatcgaagaacggtcgaaaccttcgcgaaattcctcatagaaacgttacagaaatgtttcagaagcgcctcggcttggattttcttcacggaaacaatttttccaagcaaattcgaaagagagagaagtgcctaagggaccgaaccctttttcacttcacttctccccctatttatagaaaattgggggagaagcttgccacccagctcgcccaggcgagcagggttgcttcctccagaagcaacagccttctagaggaatcttctggagggcccaagtgggcctggttgctatttgcacccccatttttactaagtacaccccctggccttttttggtgattcttttntcgtaaagttacg

SEQ ID NO: 288292 - DNA, 438 bp, Glycine max
tgaaggcaaactggatgcgttggtcaacttggtaacccatctggccttgaatcagaaatctgtacctgtcgcaagggtttgtggtttgtgctcctctgctgaccaccatacagacctttgcccttccatgcagcaacctggagcaattgaccagcctgaagcttatgctgcaaatatttacaatagacctcctcaacctcagcagcaaaatcaaccacagcagagcaattatgacctttccagcaacagatacaaccctggatggaggaatcaccctaacctcagatggtccagccctcagcaacaacaacaacagcctgctccttccttccaaaatgctgctggcccaagtagaccatacattcctccaccaatccaacaacaacaacaaccccagaaacaaccaacagttgaggcccctccacaaccttccctcga

SEQ ID NO: 288293 - DNA, 423 bp, Glycine max
  unsure (1)..(423): unsure at all n locations
agcttgttttaatttgttaaaagaaaccgaaattgaacaaagtaaagatgaaagccaaaaaacaagaaatgaattaaaaagtctcggatttggaaacttacccgttgaagaatgaagaacggacgaagaacggtaaagaacggaggaaaaccttcacggatttgcttacggaaacctctcggaagctttacggaagcacctcggcttggattttcttcacagaaacaatttttttttacccaaaacagctgaaatgcatagccaggggaatcaggcacccttagaacaacccccttttgcctttntataggaaaaagggggaggaggttgccgcccagctcgcttangcgagctgggttgcttccaccttaagcaagataatgcctagaaacctctagaagggcctagatttgaaaattacta

SEQ ID NO: 288294 - DNA, 459 bp, Glycine max
  unsure (1)..(459): unsure at all n locations
gcttgaagtgagaaagtgtggaagagtcagtcttcctactttttttcgttgaccatatagtggtacctggagatatgtcgcgggggtcaagagaccttggggacgtcaggtggggtgttattgcccaaaaccaatcttgaccaatcccgacccaacccatgcatagtcagtcagtgagaacctgtgacgtacctaaacaggcgagctcctggcagtcaaccgataaatgatcaaagaccacaaagcaaggaggcttgtgtggtggctggccagctatggatcttgagtgatatttgggttatggcctctggtaatcgattacaaagggtgtgtaatcgattacaaggcttaagaatggngtcacgaagttgagatggcctctggtaatcgattaccaacgcgtgtaatcgattaccaggcttagatatagagacaatatgttgaggaggcctcttgtaa

SEQ ID NO: 288295 - DNA, 380 bp, Glycine max
  unsure (1)..(380): unsure at all n locations
atcttnttattttgttggatttcccctgcacttactttttggtccactttttctttatacaaatatgttcaagggaaatccggcttgctggaaagcgtaccgggtcgtcaagtatttaaaatttaaagcggatgaattcgagtatcaaactcagggaactagtgttagatagggttaaattcagaaataagacattgttgaaagaaacattgataattgatgatttagaacagaattaaactaagtctaggctaaaaaaatagtaaaaatgcaagtaagtaagattgacagcagtatgtaaaggtgttgggtctttctaacaaaccagctgatgtatataaagatgtttctctaatcaatcatgcttnntgtgtttatgt

SEQ ID NO: 288296 - DNA, 446 bp, Glycine max
  unsure (1)..(446): unsure at all n locations
ntgtggattcggtcttcgccgatgatttgatagaagtgttttaatttaatcatcctgctttgatgaataagaaaattggggcaaatgaagagggtgagaatgaaagataaacccatgttgcaactaccgttcctacatggccaaacttcccaccagcccaacgatgtcattactcagccaataacaaaccctctccttacccaccacccatttatccacaaagtccatccctaaatcaaccacaaaacccacctaccacacaaccaaacgctaaacaccacctttagcatgaaccataacaccaaccaggaaatgtaatttgtagcgaataagcctctatggttcaccccagatttcggtgtcctatgctagcttgctcccatatctactagataatttaatggtagccataaccccagccaaggttcatcaacctccatttctcc

SEQ ID NO: 288297 - DNA, 393 bp, Glycine max
  unsure (1)..(393): unsure at all n locations
agcttgaggagtctgcttcaacccatagaaatccttgagtaacttgtgttgggaagtccaatattgcctgccataattcatgtggtgcaacttataaaattgttggacaacttcacttaatgttatttgattttaagatgaaatctaacatggtataaagccttacaacccatctttgtgtattgcctatttttctacattggtggagtggggatgttgaaaagtcgcacatcgtttgccttaattctgagggtgcaacttatatacttattgggaaactttacttaagactaatcgatgttatgaatcttatgatgaaacctaacaacttgcaacgaagagacttgtcggttgctacttgtttcaaagcttgggtattngtgcatacaaacc

SEQ ID NO: 288298 - DNA, 439 bp, Glycine max
  unsure (1)..(439): unsure at all n locations
ntggattgaatcagaattcgatttggatagagaagaggatatggaggttgttgaccttccccacgtgtgttgggaaggtggggaatccatcacattacttttttttctttttcttatgatcggtttcaatttcaattggagtgtccgattgtgattgtgttaatgtgatggattttggtgtggtgagtgtggattntggtttcaggtacgttgggatctganggagggttgtgttgttgtgttgtgttgcgtgtttgtgaaatggaggacatacgatacgggaaaggcgggctgtgaaatgagatcgggatcttccacccggaacaatccaacaccggagtctagtgctgggtggggcttcaaaatgtaatcacacactacaggatagattgattctatgagtaaacagcatgatgtaactntgcgtttaattactcat

SEQ ID NO: 288299 - DNA, 413 bp, Glycine max
agtgggagttgttggaggaagttcagatgaaccagttgtagaagattttgatctagataatttaattttggtggaacttggtgatgatgcacaatttgaggaacaccttgatgatgatggagacggtgatgaaactgatgatatccatgaaaatgatcctattagagaattagacatggttcttgacgtagctcctatgtggagcttgtaggccttggatattcttcatcaatggagtcctttgcttcttgaagatgaatgacagcagaatggagaaggaagatgattggagatgccacttcaaggagaagatgaatcaagaagaagctcaccaccataggaagccatggataagagcttgaaggttggagaaaatgagtggagggagagggagagaaagagcatgaaatttt

SEQ ID NO: 288300 - DNA, 419 bp, Glycine max
  unsure (1)..(419): unsure at all n locations
tgaagtagttctcccatctccacctctgtttatcatctcttattccctatctagagaaactattgctccccctgattcaccagctagagaagcagttgatccccctgattccccaattggaaaagctattgatctttcttattcctcatccagagaagctgttgctctctctgattccccagtttttttatctgatagatgaggaggatgctcggactctgttgatctctctgattataactatattagtttcagtacattattttgagtaattctggtttctgattataattatgtacttatactttctgtgattagccactatgcttggtttgaagcatatggaacaatttgacttgattntgatgatattgcagtgaaacacttttatcttttaataagaattggtgttatgaatt

SEQ ID NO: 288301 - DNA, 410 bp, Glycine max
agcttattcttcaaacctattgaaacgatagatcctgaagaaaatggggggaggggggttagcattagagaatagaataacagaattactttgatttaaatcctggcaaccagaagatagcattacctgccaaattggcaattcctatgcagacatttgcaatgtctgatggcactccagcacttttaaaaacagttgaagagaaataaaacacagcatttataccagatagctgttgtaaagcaaatagggttgatccaataaaaacaactgcaaaacgaacttgtgaataaaatataacttttggaaacctaaggaaaccagtgaccagataacaacaatggcaaatacactcacaagtcacaactattccagagacaaaccaggataaatgcatacctttagaatga

SEQ ID NO: 288302 - DNA, 421 bp, Glycine max
tgttgctaatgctggacagatcctcttatgaaacctggtttattggagagtttagattccttatatggactgtatgtgcattctttgttgtggactctcttcaataactaagctctattacatgctcaaattcatgtagttgtggactcaataattgcttatagcatgagaatgatgaggagattgaataactatctgatgattcaccctgtaccttcgataatttttcactctgctgctacaacaaaattataaaaaaaaaaacaaaaagagcttatcaactcctttcacacttcacaggaaaaagagcctgaaacttgcgtaccacaaacaagttctagtcattcccaagtattcattgttatttgatagacctcgtacacaaaacttgaattctttgaacttgtttgacaaatactta

SEQ ID NO: 288303 - DNA, 412 bp, Glycine max
  unsure (1)..(412): unsure at all n locations
agcttgtattcgattacacacatactgtaatcgattaccagaggagattttcagaaaatattctcagcagtcacatcttttcatttggttcttgaatggccatcaaaggcctatatatatgtgacttgagagaccttgttatcatgtgggcctttcataccgggcgtcaacttgactgggcacacttagtcggatattgcatgcataaggcattgcgattaaatggtccattgccatatccacaccttgtcactctctttcttcgccattttcaaattcttcttcattctgaaccttatgttccaatcaagagatccttttttaattggtgctgctgtgattgcctcctttggttaccgcanagagcatgatggctcttgngtcanaatgggtgctcaacccgctgatgatg

SEQ ID NO: 288304 - DNA, 442 bp, Glycine max
  unsure (1)..(442): unsure at all n locations
tgttatattcatgggcaggataatgatctttgatcaagatattctacacacaattgccaacaacaaagtccacagatcaatgcttctgtcagcctataattaacttgtatttttcagtggaagctatcaattgagcatgagtttgttcgtgcacctggcgaagttaggagatgaactcctcaatggtggtataagaacacacttgactagggaaacttatcaagtcaaagggggccacgagtaatcatgcaataaataacgtggaaaggactagcctggtactatgattatcgacattattgtgagaaaatatatcttgacagagtctaacatcccaagactttanatgatcgccaaccaaaatgcatagcaagttaccaatggaacgattaagcacttcaatgtcactgttagtttgtgtattgtaagcactgctgaagtt

SEQ ID NO: 288305 - DNA, 419 bp, Glycine max
aggggatgggtgtgacagtgatgacatgacaatctcggcaattcagctcgccccgagatcctctgaggcacctgccgcatggagctgtgtcttggcatcagagatgataattggacctgactgagttcataattaattacatcatctctcaacattttcatcgatcttcatattatgtcagaaattcaatacatttcttattttctaaagtcttataaccttctcttccaaaaagtctttgtcaaaacttggctatcatcttttcatttttctcctttgcaagagagcaaggactatcactgaatctttcgtgctctctctccttacaaagatctaggactacccctgatattctttgatctccgttccttaaacaatattgaagacgaccgctaaattcttttattccttacagatcg

SEQ ID NO: 288306 - DNA, 335 bp, Glycine max
actagagagaattccatgctaccttactactaccttgatgtacaacatcactagcttttccattgtatacttcatattcactgcgataaaatgagcagatttggtgagtccatctactatgacccacacagtatcatgcccactactagtcttgggtaaactagatacaaaatccatagatatgctctcccatttgcattccggaatcttcaatggctgcaattctcacgatgggcgctggagctaacctaagcctttgacatgtcaacatcttgctattattcggcacatcttattcatgcctgccaccaaaactttcttaatcttggacatat

SEQ ID NO: 288307 - DNA, 346 bp, Glycine max
agcttggtttgcatcaaccttggccattctaaaatcttcctttaccttatcagtgccctctttaatgtatgcagctggttcagtaatatttgaatccatgccattgatgtttaccccaacatggtttccttcagtgtctgagtcatctttgtaaccattcattgtgtcaaactcaactgcaaagatgtggtttgactcattcccatcattggtggagttaacaaggccaagataatggccagcctcaaccccaggaaactgtgttgagggtgctatggtgaaggcaaggccaaagccaccagaaccagaacttgtggacacaattgagaaaacaaaattggtgctg

SEQ ID NO: 288308 - DNA, 336 bp, Glycine max
tggattgtagaaaagattaattacaaatggaaaacaaagccttgctgttataaactcttcatgtctggacaagagaaccatgtggaagagttatgacttttataataacttacaaccaatttgataaagtcaaaaaccatttgaagagttatatattttgatttattcagaaataatcactggtaatcgaataccatatcagtgtaatcgattatcacaaagctcttatgtaaaacaatgtgactcttcacatttggaattgaattttaacgttcaaagacactgggaatcgattactaaaatattgtatcgactacagctttttgaaataattgg

SEQ ID NO: 288309 - DNA, 403 bp, Glycine max
  unsure (1)..(403): unsure at all n locations
ccccccgcaccaccacaccacaaaaactagacgagaacaagactgaacncnnncaaccgtgtgaacgtggacccaaaanccanaanacacnnnccccgccccacgaacaacaacccttaaaccccccccaacaacaggaaccggagcacacaccacacaacccaacaacacagagagcagcgaccgcaccgaacaccacccacgccaaaagaccaacacagacgccacacgaacaaacacgggcggcccaacgccaccgaagcacaacaagcgaaaaaaaccccaaccacaaaaaaacacgcgagacaccagagacgaacccaacacacgcgcgccagcgcacccgacacaccaaaacgcgacacaacaaggccagaaacgcaaaaaaacgccggacacgacg

SEQ ID NO: 288310 - DNA, 414 bp, Glycine max
  unsure (1)..(414): unsure at all n locations
cacatactgtaatcgattaccagagatgnttttcagattatattctcaatattcacatctttgtacttgattcttgaatggctgtcaaaggcctatatatgtgtgacttgngacacgaatttgctaagagttcttcacaacaaaaaggtcttatcctcttaaaaagcaaatcatattatcctcttacaaattccttggccaaattacttgtgattcaataaggaattatttgagtgctcaaattgttcaatcaatctctttaaagagagatttcttcttttcttcttcttcattctgaanagggattaagagaccgagggtctcttgttgtgaaagaattctaaacacaaaggaagggttgtccttgtgtgcttagaacttgtaaaaggaatttacaagatagtggaactctca

SEQ ID NO: 288311 - DNA, 391 bp, Glycine max
  unsure (1)..(391): unsure at all n locations
agcttccttatgaatanttctaaagaagttagagcttagctacacacacatctctaatagctaagctcacctccttgagatgagaagctagagcttagctacacaccccctataatagctaagctcacccccatgacaaaaaaaagatgaaaatacaaaagaaaagtccttactacagagactactcaaaatgccccgaaatacaaggctaaaaccctatactactagaatggccaatatacaaggcccaaacgaaggataaacctattctaatatttacaaagataagcgggctcatacttagcccattggctcanaatataccctaaggctcatgagaaccctagggccttcccttggatctctagcccaatctacttggagtcttcta

SEQ ID NO: 288312 - DNA, 421 bp, Glycine max
aagtctcacattgtcatgtgctctgcattattgtagcctggttatacagaatcttgtctacaaagtctggttagcgataactcgcctgtgctttttcttccatgctatatgtagcaaagtcattgatccagtcaagcttgatgagttggaaaatgaggccgcaaatatactgtgccagttggagatgtattttccccccgctttctttgacatcatgattcacttgattgtgcatctggtcagagaaatcaaatgttgaggtcctggttatctactgtggatgtacccggttgagcgatacatgaagatcttaaaagggtatacgaagaatctatatcgttcagaagcatctattgttgagaggtacattgcagaataagccattgaattttgttcagaatacttagagaaagctaaacct

SEQ ID NO: 288313 - DNA, 419 bp, Glycine max
  unsure (1)..(419): unsure at all n locations
agctttgcttttgtttcatctatgttcactgcttttatgaggttgtatgcatattttttattctttgatggtaataagttaatcgtatatagtatgtgtctgttttggacttttggttagtaatgaattttttttggagctgagttagtggttgtttctttgaggtttgaacctgtgatctttagtaaattaatcaagcttgtcaccactaaaccaatcctagtggcttgaagtagtggttatgtagttggcgataatgtacaatcctttaaatagtttatctttctgtcatgcagtcgtgagtttacccatcgtgtgaagtctgtatctatggcaatgttcacgtcacaagaagttgatgctcttcaaaatgggggtaaccaggtacaatggtggattatctnttctatatttggaat

SEQ ID NO: 288314 - DNA, 411 bp, Glycine max
  unsure (1)..(411): unsure at all n locations
attgaaattaatacgattatcaacacttaatttctctggaacatattatatattgcctcattcatgcatactggtacttggtttttccagtactttgggaacaaatctttaatcaaaattcctcactactttatcaactctttccccagttgcatccgtgtgtgtatatatatatatatatatatatatatatatatatataacttacaaaacttgcagctagccaaggtgctataatatttgaaatctatgaattatttcagctggctcatgtaaatttttcttcattgttatgtttgtgtgcgaaaaaagagacagaaagaaacttattcttttattaatataaacaatctatatctttntaaaaaaacaattanataaatttacaattataacttacatagtgtatgc

SEQ ID NO: 288315 - DNA, 428 bp, Glycine max
  unsure (1)..(428): unsure at all n locations
agcttctattctntatacaagaatgaagctctgataccagttgttagacaagtggcctcagatatcttaagaaggggggttgaattaagatattgcaaactatttccccaattaaaaattctatttcaatttcaatgcaagttgcaagttcccttaaaaatgaacttttaaataatgattcaaatagaacaatctgaatataaatataaatcaataataaataaacaagtttaagggaagaaaaagtgcaaactcagatttatactggttcggccacacccttgtgcctacgtccagtccccaagcaaccagcttgaaagttccactatcttgtaaaatccttttacaagttctgaacacacaaggacaatccttcctttgtgttcagatttcattacaacaagagaccctcggtctctcaatcccct

SEQ ID NO: 288316 - DNA, 104 bp, Glycine max
gcttctaaactctatacaagaatgaagctctgataccacttgttggacaagtggcttcagatatcttaagaagggggggggggggggtgaacccccccctctcc

SEQ ID NO: 288317 - DNA, 336 bp, Glycine max
gacctgtctcatacagcatcactcaccggcagcgaagcaactgacttcgcccatttatcgcatccctacgaagcctgcaatgaaaactattcatccgcgtcactgtacactggacgacagcctctcgtggtaatgcgaacgggctacgtaagaccggactattacaacatgtcacatgcgcactaacgaagtcaaggccgcgtgaatacggcacctaactgacttggtatctattctccgaggaaccctactctcgactgtgacctacactcatttacctgcctccaaggacttcactcctacatacgacaggatagacgtccctgagagacgacg

SEQ ID NO: 288318 - DNA, 492 bp, Glycine max
agagcttgaaccctgatgaccgatgtataacactaaccttagaagatgtatgcgcttaaaagatggaaaaggatttatcaaggccatttctcttaccaaggagcctagctccggaggataaattaagtgttgagaggactataatttatcgatatcgtggtccattcttatccgatattttgactgcaacggcattgtctgaacctaatccaggaaccaaagactagagataatattttatatacgtgacttctgggtctaaaaatgttcaatttgtgttatgttaatagcgtgtaccatctatgcaaagagcgtgtttcttgagtgcctgtgtgtactttccgtactatgatccttcttccgtttagagtggctttcaccatctgtgaataaaactatgcaactgtagtaccatctactaaatatagacccgactctacgcgcatattatcaagcttaggctactctctccacttgtagatttgcatgccg

SEQ ID NO: 288319 - DNA, 403 bp, Glycine max
  unsure (1)..(403): unsure at all n locations
agcttctatttatgctgaaccattttatcaataaacacaagttgagttttattcagaaaattagagtttatctcttttatcttagtgagagtgattctcctaaattcttgagtgattcaagaacaccttggctgtatcaaaggactttcacaacctttgtgtgttgccctcgctggaaagagtgattctttccttcctttcatcatcacccttgttctttcaaaccacaattccagaaaatccacctctgcccagaattatctcgtggccataactcccattntacgcactcaaattaagttattcttgagcctaaattgaatttaaaacgagacctttcacctcgttttggaatcaccttatttggagccctgtncttcagttattgccattctatatttct

SEQ ID NO: 288320 - DNA, 499 bp, Glycine max
  unsure (1)..(499): unsure at all n locations
cggtgctttgacccgttgcttgatcccgtcgtatancccgacacactctagaatactcacgctcgcatcctacataccgtgtgaccacattttataatcagattatccgacagctgccgcggntcatttactagagtctctataggcgaggcaccgcctatgacagttcgacttgagacacaaaccatctaagagtcttacaaaccatcagggtcctattctcagccactgcacataatatgcgcctaatacggacatcctggccaaaagacttgggaatcagaattgaatgacatgggcgcatgaatagttcaaagcttctctatatagagagagcccgacttggacattcttgagacaagatatgaccatatagaccgctgggcgcttgcgttgaacaattccaaccccacggcatgttatgccctcggagcgacatcctgtaaaagagattaactatttgggatctctacagaggctgcgttcgactggcgcgagc

SEQ ID NO: 288321 - DNA, 369 bp, Glycine max
agcttcattattatcaatacatctctattaagcctctataaataacattactgtagcttatccaacaggagccttgtcgtgagaaaaatagaacccacaaatacgatttaatttgcaaaatatcatggttaaaagtgcataatatattttcctggtagcaattaattaaggtgcaagtacaatttaaaatgcacaacagtcatgtagtaattcatatttagaatatgtaataattcatatatcctacattcataagacaaaatatagtaagtttttatgaaccatagttaggcatcctacaccgaaacaggcttcttagaaagtgtttatatattttgcaactaatcacatctactcaatttaacatgc

SEQ ID NO: 288322 - DNA, 442 bp, Glycine max
aagcttgaaggtaaactagatgccttggtattctggaacccatctggccatgaatcagaaatctgcacctgtcgccagactctgtgatttatgctcctctgccgaccaccacacagacctttgcccttctgtgcaacaatctgaagcaattgaacagcctgaagcttatgctgcatacatctacaatatacctcctcaaccacagcagcaaaatcagccacaatgaaacaattatgacctctccagcaacaggtacaatcccgggtggaggaatcatcccaaccttagatggtcgaatccttcacaacagtagcaacaagaaccttattttcaaaatgttgcttgtagaagcaaagcttcatgatgaatccagattgattcaaagatgttctgatgataacaaagatgaatgacaaaagctcaaggtcaatcaaagaatgag

SEQ ID NO: 288323 - DNA, 382 bp, Glycine max
agttttctttcaagtcctaaatgacatttcaagctagtattaactcacggtaacctacatctaccacaggagggagacttagccatacagccctcaaagcctcactctttttccactcataacaccacattctcactttccaaccctaggttaactctacctttcatctctaatagtttttccatgagcaacttcagcatataaacatcacaaacatcatcacaaaaaccctaaatagaatgggtatgtctaactcatccagacatggcaatttcaacaagctttcaacaagagtcttcacaaataaccatcatgaagcagaaaactaccaaaactacccatcatatctgccaaaaccccgtacccacgaacattaagagag

SEQ ID NO: 288324 - DNA, 280 bp, Glycine max
atcggcattgtgcccctttagaggtagcaagatgctacatggtttcaccaatgactcggacatatcagcaacaagtgtcttttcagctttagtcaatcgaccaacatatggatgtccaactaaagacttggccaattcatgaatatgaatgcaacacatcaactttaccatccaaccttgtcctccaaccactggtttgccacaaagcttgaagggacacccacatttcctaagtccaggatctcttctaacaaatgcagtcttcctacacctatactcg

SEQ ID NO: 288325 - DNA, 416 bp, Glycine max
tgcttcttttcaatagtctcaccttctccttaagttgtccattctcttctcactcttgttgcgcaaaagcttttgagtctctaacttggattttcagcttgttacattctcctattaacacatgatcttgctcttatgccttcttcaaggcaacatccttctcctctattggctctaatgggttgatattacctagggactgcctcaattctagaaaacattttatatgctagggtaacatgggtgagatactctatcacccctaccaagattgatatggtagaatctaagctggtatgattgttttttagaacaatatcccaattctcaaacaaaataagacgatcaatctcctcactcatagacatcaatatgaggggaccgccaaacatcctggtacgaaccaagctagaatt

SEQ ID NO: 288326 - DNA, 330 bp, Glycine max
acctggagatatgtcgcgggggtcatgagaccttggggacgtcaggtggggtgctattgcccaaaaccaagcttgaccaatcccgacccaacccgggcatagtcggtcagtgagaacctgtgatgtacctaaacaggcgagctcctggcagtcaacagataaaaggataacaagaccacaaagcaaggaggcttgtggtggctggccagctgtgaattttgtgtaatatgtggatggtggcctctggtaatcgattaccaagggtgggtaatcgattacaaggcttataattgatgacaggaggctaaaatggtctctggtaatcgatta

SEQ ID NO: 288327 - DNA, 416 bp, Glycine max
  unsure (1)..(416): unsure at all n locations
agctttttattaaaatttcttccttctcctttgttttaatactacagtatatatgttattataatttgatgctgatttgtgtgcaggtaagttctcatggcctgagttggttggggtgcaaggaacggtagcggaggctacaattgagagggagaatccttcggtgaatgctattattgtgcctctaggatccgtggtcacaacggatcttcgaagtgacagggtttgggtttgggttaataaagatggaattgttaatagagttccaaaaattggataggaagtgtttacactanagcacatcaccatatatgttctaataagttatgaatatatagtaatatttaaataaggagttatttttccaattatgttctttgattgcaaaaaatattttatacttttaattatgctct

SEQ ID NO: 288328 - DNA, 253 bp, Glycine max
tctgccattatggcgccttgagagtgtcttatgtgagctttatgcccttatttgatatgctgtttttgtagctgtaaattgtgaccaaattcacatagcagcgaccttaatgtttccttgcagcaacgtttgcccttttgttgatgtgctatctattttagttttagtatctttctaaatagttgggtgcctatatacaggtatattatggaaatgttttgaaaatccattctctagctacaaagttgggcaa

SEQ ID NO: 288329 - DNA, 228 bp, Glycine max
tagcttgctctaaatttacattgatgtttgtatttattggaggaggttgtatgccatttttgttttaagggtagcatttcttggtaaaactaactttccaaatgtttgccttcgcaggaatggccccgaggaagcttgcctcaaagaggtccaagaaggacaaggcggccgaaggaactagttccgctccggagtatgacagtcaccgctttaagagcgctgtacacc

SEQ ID NO: 288330 - DNA, 430 bp, Glycine max
  unsure (1)..(430): unsure at all n locations
ntctaagttntctattttccaaaccttgttctttcacagttgacaaaagtgtgctatatctttntattctcttctctttttgccaaaaagaatttgacaaggactaatcgcctgaattctttttgtgtctctcttctcccttttccccaagaacgaaggactaacctcatgaattcttttgtgtctcccttctcccttttcaaggaattcaaaaagacacagtctgagaattcttttgattcttccctttcccttaaacaaaagatttcaaaggactaatcgcctgagatatcntttgtttcccttttacaaagtttcaaaggactaaccgcctgagaactttgtcttaacacattggagggtacattctntgtggtacaagtagagggtacatctacttgggttgttgtaactcagaatagagaggata

SEQ ID NO: 288331 - DNA, 405 bp, Glycine max
  unsure (1)..(405): unsure at all n locations
agcttgatatactttcaaaaggtgtagattgtgagtgcacttgacctcccacaaagcaaatgcaaagcacagcaatgtgggatcagtagccccatccttatagctaccatcatcaatcatgctctcccccaacaaagctgcaattatatataaaagcttcaacgtaagattgattttgacaatttctaagaactaaagacaaaaactgaattatgtgaacatgttaacccagacaaatcaataaacaggtggcacttacaactgaagatccttgatcttggagagcagggatttagttgctccctcaatgtgctttntaaacagcttcagtttctcttcgtcaagcttttgacaagaaactgcttcttgtcaaaagcaggttgctcctacctacaaagataatat

SEQ ID NO: 288332 - DNA, 434 bp, Glycine max
  unsure (1)..(434): unsure at all n locations
tggcacatgttccagctgccaatccacaaaggaaaagcttatagctagagaggttatcttctgcagcagtgttggagtatctatgattccaagcctacaatttcacaaacaatacatattcacaggtccaaaaactgcagtgtcaagtaaactgaaacaagacattcattagctgtgtgaaggaatccaactccatctttaatgtaagattacaacttacaagtggaaataaatccatagtgacataatttgaaggttccttttctcaacagaactttaatctaaactacaatcaattatcaaaatgccaacctaacaataggtatgaggcatggacaccactaatttctcaattgaaagcagtggtgcagcagctntattggtgcaaataattcatccagcttagtgattgacatatagaggcaatagtaatc

SEQ ID NO: 288333 - DNA, 472 bp, Glycine max
  unsure (1)..(472): unsure at all n locations
ggcactcttcgtgtacccgtganccctttgaactccacnncaatccaaccnaccccacgataccttaaggcacccgcagcatgtatcaagcttataaacaaccgacgggggacttttgggatatgtttgtccccatctacgctttaaggtgtacacttcctggtaacaacaactttccacacgtttgcctatccacgattggcccacgagaattttgccttatagaggtccacgaaggacactgcggcctaatgacctcttccgttcaggaggatgactgccaccgttgtaggagcgctgtacccagcagagcttcgaagccattaatggatggttcttctgcgcgagcgtatctgcacttcatggacacagtatacttttacacgaatgatataggccctaccatgacattattggtactccctgctcattcaaatagaaatacactctagtcttgccatgcaggcctcat

SEQ ID NO: 288334 - DNA, 454 bp, Glycine max
tgcttctacacaaagacgagtaaaaaccgacgtagaaaggttctaaacaaccgacgtagaaaggcacttttgtcatggtgacaacattaaagaaattgagaaataaggaaaaatgtctaaattggtttatatatatagtccttcaagatctagagtaatatttattattgtaccattgaatttgagtatcttttttgtatttgtaacttaatttgattgaagtttaattctccttaccttatatatataaaaggtatgattcagtccatcatgcatttgtccgcattttcttaattttcacaagttaaacctgaacttatactattttgtgtaagtgtcttttcccattttcatattttattttttattttcaaaatcgtcataagtgttttgttactattcttgtcaaagttatttaagttgagactgcaaatgattagtgttactaatcatg

SEQ ID NO: 288335 - DNA, 391 bp, Glycine max
  unsure (1)..(391): unsure at all n locations
agcttgtattagcatatatattgntctctatacatccaagggtaatcataacaaaaatttgactttagtgcaacttaatcaaaaggaaaatcataacaaaaatctccccatcttttattctcctttgtgcttcaaattcaacatgaatgtacattaatgacgaggatgaaaagcattatatataaccattttcatcaaccaaaaagattattaccaaaaaggttgtacggagagaggttaaggtaaactataaacaaaagttagttagtaagaccatatctnggataatttgttcataatttttttttaaaaaagaaaatactanagtaaaatgaaatatantttttccataagtttctaacttatgcactnttattttatatagaaactc

SEQ ID NO: 288336 - DNA, 457 bp, Glycine max
  unsure (1)..(457): unsure at all n locations
tctnccctattntgctataaatagggggaggagtgaagattataagggttcattcttcttggcacttctttctctcttgaaattgctgaggaaaattatttccgtgaagaaaatccaagccgaggcgcttccgtaacgtttccgtaacgtttccgtgagtaattacacaaagattctcgaccgttcttcaacattcatcgtttgttcttcgttttcttcagtcttcaacgggtaagtacctcaaaccgagcttttcaattcattctatgtacccgtggtggtccacattntgtttcatgtatttttattctcgttttcatttgctttttataccccattttgacgtgcttaagccatttatttaagtcatttctcgcttaatctaaaaataaaataaatttccaccgatcgtttgaattgtatcatctgttaatttcggttaaaatgaatttcgacc

SEQ ID NO: 288337 - DNA, 416 bp, Glycine max
agcttgtgttgttatgtgtagtgttgctacttgaagaaagttcttgcttctatctatgggtttctttcttttatgggatatagttttttccgtgtgctcgggtcatgcaaagtgtggcgcatcttgacgtgggagtgtttctaaagagagaatgatgtaagtatatttgggagtgtatttttttttttttttgaaaaaaaaaagagggaataagctaagatgaaaactggatacaataactgccctaattgaatacacattttgtcccgaagcccttcccaagcaatgagtgtgtgtttagatatgtttttgtagaattggttttaaattaacatgattatagataattaattttaagtaaatgtaagtttattgtaacgtaattttttttggataatatatattaaaaaaattaa

SEQ ID NO: 288338 - DNA, 451 bp, Glycine max
  unsure (1)..(451): unsure at all n locations
ctcttctcgtccttgtcctcttaagaatgaaacaagtttagtgttgcgattgaaaaatttttactcaatccatttctgttagtaatggaaaaagttgtgtacaatctatctatctgtttcacctttttttttacttgtatacatgtaaaattttaaatcacatcacttcaaatatgttaaattagctcattaaaaatataatttatttgtaagtaaagtccagattgattatttactcttttatccaaattttaatttgaaattcagttttaaatgaaaaaaaaggttattgtcactgactcattttataaaataattctcatccaaatttaaatttttaatttgtaaactttaatctttnttttatcagcctttanactttaatctgaatatatactatagtattttcttttcagcaagagataatatgtaggaataaatacgtcaatgt

SEQ ID NO: 288339 - DNA, 424 bp, Glycine max
  unsure (1)..(424): unsure at all n locations
agctttgactccactcacgttagaaaattcagtcattttcttcattagtgctttctttctcttcgtgaaagccaaatcacgatctctcccatttgggatgggctttaagattaattttgggcgtcccatgttctaaagcatatgcacatatatagaaattgatcaataaagcaaaacttggggtcatacgttggggatagagagatcaaatagacaactagttcatgaattgatcgaatgtttcggataagatgttgttctagaaatttaaaataaaaaataattcaacaaaaaagaaaatcatcaaggatcaaagaagaatggttcaagtctaatctctcctctcatcaaggattaaagaattntatagaagaaaaagtaaactgtttttgaataatagcaaaaatgaaagataaaagggaag

SEQ ID NO: 288340 - DNA, 458 bp, Glycine max
  unsure (1)..(458): unsure at all n locations
ntgaggatttggtctttgccagtgaaaggatcgatgtggttctgaaaaaatgttaatttagtcatcctgcttggacgaatgagaaaactagggcaaatgaagagggtgagaaagagggagaaacccatgctgtgactgccattcctatacgaccaagtttcccaccaacccaacaatgtcattactcagccaataacaaacctcctccttacccaccgcccagttatccacaaaggccatccctaaatcaaccacaaagcctgtctaccgcacttccaatgacgaagaccacctttagcacaaaccaaaaaacaccaacaaaaaggaattttgcagcaaatagcctgtagggttcaccccanattccgttgtcatatgctaaacatgatcccatatccactcaataattcaatggtagccataaccccaaccaaggttcctcaacctccatttttctg

SEQ ID NO: 288341 - DNA, 425 bp, Glycine max
  unsure (1)..(425): unsure at all n locations
agcttccatcaagttttaatcaaagcacaagagcttcaagtaggtgctccctaaacctccattaagtttttgctttaccttctcttctattgttgtttcttcatttttctccatgtatctcctcacatgtcttgtgctaaatgtttttaacatgattctttagagtttccaccgattaaacttcctatagaagctagatttgattttctatggttcaaatttcttgttcttgttcttgaaccataaattgtgttgagtttaggttcctttgagttttgtcttgttattttttgtggctgaaacctaaaccataaaattcttacaaaaatattaaagtataagaaaaccttanaaatctagagtgacttgttcacctattgtagttntgtcatagaagtcatgtctagtcatgaaacttgtcacat

SEQ ID NO: 288342 - DNA, 452 bp, Glycine max
  unsure (1)..(452): unsure at all n locations
tatatgatataaactcttatccttatgctttcacaagttatttttcaaaggctattggaatttattttatcatctattattcaatgtccaacacattattattaaacaaacatgaaattgtttggaaaaaccagtacttatgtagtgagtgtctttacacgtacaattaaaaaagacataactaagttacactaatgttttatattctgtttgttaacatccaaatcattttgcttgcatgtgaaagcatctccaagataaatatttgctgatgcaatcctccctaggaagggaccagtcactagagccatgagcaagaggctccaagaggattangctagagttgctgaagaatgccctaagattctcatgaacccagggtagatntctgagcccatgggccaaggttgagtccaattatctttgtacatattagactagaatgtcattat

SEQ ID NO: 288343 - DNA, 417 bp, Glycine max
  unsure (1)..(417): unsure at all n locations
agtcttgtttatattcaccccaattccaatgtcttatgctgacttgctcccatatctacttgataattcaatggtagccataaccccaaccaaggttcatcaacctccgtttctccgagaatacgactcgaacgcaacgtgtgcttgtcatggagaagcgtcggggcgttccattgagcattgtaaggccctgaagcgtaaggtgcaaggtctaattgatgcgggctggctgaaatttgaggagaatcacgtgtaaatcctgacattgacaagagatgccacacatggnngaaatttgaaagctgttgttagatgtctccaatgactcatcangattttcaagtntgtaccattattgtaaaccacagttacaatggtaaatgaaatggatatctttgtccctcatcctctcacaaa

SEQ ID NO: 288344 - DNA, 440 bp, Glycine max
tgcaacatcagagaacatgaagaactttctttgcagacatctatagggagcgatgtgaacacacaggtacctatgggaattttgcggtctgctccgagtcaactacactagtttggcactaggtttgatgacatgtcaacgagttacttacagaaatgatccaacaattgaatcagctcggctaagggtctggtttccgattcaaccagccgagccgagccgagtttaataacactgattgggagggttccttacttagtactgaaaatcttgctttcaatttgatagtaggtagaaaagttcttcttcatggagtatgtctcattaatattctcccgcatttcacaaatggaggtagaaaacatacaattacagcttatgttttgaatcagagtgccataaccaggtttatgataagagcatcctcattatccctggcc

SEQ ID NO: 288345 - DNA, 415 bp, Glycine max
  unsure (1)..(415): unsure at all n locations
agcttgatgtctaangattagtttgaagaagtttttgaagaagttttggcttttacatgcccaactactttgagtggcatttgtattggttgttatctggattgatgcatcttagtacatttgatatctgctttgcatcatcatagtttgtgagaagaaaattttctatagaggcaaaaactctctcttttaatcgattacatcctcgttgtaatcgattacaataagttgtctgaagcttgtagagttaagtctcgtatcaatttaattgattaccaatatctggtattcgattacattgttgtttgagacaaagaactaattagtcaagagtctctacttcaatcgattaccaagtggattaatcgattacttctttctcgttcagttgttcagaggtgaacaataacactat

SEQ ID NO: 288346 - DNA, 420 bp, Glycine max
  unsure (1)..(420): unsure at all n locations
tcaacctttggtgcccatttctgatcctaatcgcgaaatttggcattttctgggtcgtgaattgcgtgtctacgagtgagacttcgaaatttcaggtttgggtggacttctttctctcttaattctcgtgggtatgggattctgggagatatgacgggtagttttgttacgtctctgcttcatggtagttatttgtgaagactcttgttgaaagtttgtcgaaattaccatgtttggatgagttaaacatacccattctgcgttatggtccttatgatgatgcttgtgatgttcatgtgctgaaattgcttatggaaactgttagagatgaagggtagagttaacctanggttagaaagtgagaatgtggtgttgtgagtggaaaaagagcgatgctntgagagttggaatgtaaatctg

SEQ ID NO: 288347 - DNA, 262 bp, Glycine max
  unsure (1)..(262): unsure at all n locations
atcttggtcatgagctgaagcatcagaaagaatcttcttctaagttagatgttgcgatggagcttgattgcttaattgaaacccatgactgaaactcagatgctgagccatgataaacttcctctgaccaaaacaaggagggatcctcaaattcaggtaacaacacaatggagctggccttcaaaatgattagtactgattaggagacaaccaacacacttctcctcacaagatggaaggtgannatgtnngttttaaaatt

SEQ ID NO: 288348 - DNA, 170 bp, Glycine max
caagccactaagaccaccaatcccagacggaagctgccaaaaaaagcacacgacgacaaacccaaaacccggaggccaagaacagatacacgaacggaagtaagcgagggacaactgccctcactaaacctatttcctgaaagagagacactgggcaagcccaccctgaa

SEQ ID NO: 288349 - DNA, 414 bp, Glycine max
  unsure (1)..(414): unsure at all n locations
agctntacttggagctacgttaagactgaagagggaagagagccttctagtagcaacccttgactcgttcatgggggatccgcagctacgacaacaaatttgtgtcagttggtgtcgtggatgagagagattgaaaactgcaccattgccacgaatgagagagatcgacaaccgctacatcatcacgaacgaggttttttcaatcctgaactctttcgctcaattgtcgtcaacacaccacatcaaatcctagccaccaccatcaaaagcctactatgaacgagggagactgcaactgctccatgaccacaatctacggagaagggttttgaactttgattattataaaatcaaattaaaaattattggtgttttaaaaccatcagtatgtgaaaacntagtaaagtgacacat

SEQ ID NO: 288350 - DNA, 442 bp, Glycine max
  unsure (1)..(442): unsure at all n locations
tctaagcctggtggattgtctagtcctccttgaagtaactctcgagaggatttctgaatgtggcggggaccttgngggtgttgccataagcctgtggaaataaaaaaaattcagtttggcaaagtcagttatgtaatacacaataagttgtaaatttaattataaatttatgcattacaattaaaagacatggaatatgtatatggtactttgtgcttacgcagttatgtaggaatgttctcccataaacccttgtcatgatcagtacgatttgcatatacatcatcttcttgttgttcatcattaatcaaaggcatgtctttggagaaaggcggcatgtcactgacatcaagtgttgaaccatcaatatggtgaccgatagaaattgttctcccttgcaaaaccactgaccatctaaagttgtcgggatcttctacataaa

SEQ ID NO: 288351 - DNA, 413 bp, Glycine max
  unsure (1)..(413): unsure at all n locations
ttcatgttagcttaatataaattattaaatttattatatataatataataatttataattgaaagatggtataagattattttacaccagcttattttctcttattacaatcataaagtatatttttgctcattntcggttactagttcacagtattaaaagctnttacgtgcctgatccatagaactaaaaaaaaagtcaattcatagatgagaaagaatganagatattatttntcccagagtaaaaaaacgatataaatgaggttaaatgtaatgtatccattcctaattaattaaatcattaaataatattaatacacaagaataactagtaatgacgggtacacttgcttcagtgtttacgcatagcaatgaatgcctagtctctcttcttgactttctccatataca

SEQ ID NO: 288352 - DNA, 396 bp, Glycine max
  unsure (1)..(396): unsure at all n locations
ntcctttcttgtaaaagataaaaaagttcacttatataattctttcattcatgcttgaaacaagtaaaataatccaactaagcataaactaatacaagtagaaggataagaaaaaccagtaaatgatcaaaccaaactgtattttattcatattccatgtagtcttagatacatggaaatttgatcacatgaaccccattattctagtccctttntttgacacaagtaaattaacaagaaacaacattgagtgacactacttaattataacaaacaaattaacggaataagtgatgactagtactacttattagttgtagtatgttcctggggtttggaaccagtgcatgtatatttaatttcctttctcataaatctggactttggtgcataagt

SEQ ID NO: 288353 - DNA, 293 bp, Glycine max
  unsure (1)..(293): unsure at all n locations
ttgcttctatataagctaaaccattttatcaagaaacacaagttgagttttattcagaaaattagaggttatctcttttatcttagtgagagtgattctcctaagctcttgagtgattcaagaacatcctgactatatcaaaggactttcacaacctttgtgtgttgccctcgccggaaagagtgattctttccttcctttcaccttcaaccttttttctttcaaaccacaattccagaaaatccacttctgcccagaattatcttgtggccatganctctcgtttacgtgct

SEQ ID NO: 288354 - DNA, 130 bp, Glycine max
gtgtcaataagtagttgtagtttctcattatggggaatacttgtacttgggggcatgtcactcggttcagaactttcttgagactcatgctgatcaccatgggggggggggagttgtctgggcccgacat

SEQ ID NO: 288355 - DNA, 400 bp, Glycine max
  unsure (1)..(400): unsure at all n locations
tcttgctntgtcccttgctcgtgcctttagccatcatcttactttgatgggtatagctgaaacccaccataggtatacattcttgtctccaactattgttgtctttttattccattagttgataatttgtcttgtctttatttggctgagctctgtgcaaaattaagccgcaatctctccaaaataagccgaacctttgactaataacaacattgagggaatactatacttctttaatctaagattaccccagtatgatagtcttgaacaagttatgtttttgcagggttcgtaaaggaggacatatggctcttgctgcaaaatcttgtgatgatatctntaacnaacctgttttataagacagtgttcaagcacgtctgtggtttagtcctcatttctg

SEQ ID NO: 288356 - DNA, 431 bp, Glycine max
  unsure (1)..(431): unsure at all n locations
tggtgattaggatgttntgactgacttctactcatagattcattccagtgctcatggtgatcctcctcatcattaccttctgaagagaaagaagtgatcatcaagtcttaaaagtggattgaaagaatatcaaagatatctttgaggatataacagtgacaaggcgtagtctagaagaacaaatcatatagaaaaatcttcagctaatcatgtaaagacattgtgagtgcattaatagaacaataaatggatgaccatttcacttgcagtgtatcatcaaatactatagtgtatctatattagtctaactcacaccaaggtttaaaatactttgtagtatctacaaactattttcatgccggaagaaaactttncatttgaaaagcagattntgttgcctcatcatatgaaaccttntgcaaaaacattcc

SEQ ID NO: 288357 - DNA, 499 bp, Glycine max
  unsure (1)..(499): unsure at all n locations
cgccacacccactcaaaacgagccaaacacaaaacgttcaaactaaaanaaacccccncccgcccaaggatgacacantgaaaccctgaanaccaccaaatccagcgcccccacaagacccaacaagccaccccacaatattacacccatttacacccaccacaacggggaaacggggacgaaacgagcacccacaaccaacactaacacgcaaaaccaaaccaagaagcaccacccacaacaagaccaaaaaccaaccccacacacaacaaaaaccgaaacgaccacccggccaacccacacaaaaaaccaaccccaaacgaaacgcgaaccacacacacaacgaacccaaccacacacaccaccacgccagcgacaacacagacaccaaccgcaaccccacacaacacaacaccacaacgaaccccaaaccaacacaacaccacccccaaccaacccagcaagcacgcaccccagacaacaccaacaccaacaccac

SEQ ID NO: 288358 - DNA, 406 bp, Glycine max
gtgcgtagcccaccatctttccataaaagtatctatacgcgtcttccatcacgatcatcgactccctatccatcattgggggtaccacctgggccgctagatccctccaccttttgggcgtgttctttgtaagatctgtctcactttttgcaaatgttctgtagttgcatcctatcctgaaccatatcaaacttgttctgatactgcctatcaaaggccaccattatgtccttccaagaatggactcggcaagacttccagtcagtgtaccaggtaacagctaccctagtaagactttctgggaatgaatgtatcagcaagtcctctagttctcgtatatccccatctcctgacatacatctttgatggtcttgggaaagagtccactttacttgtcatatcaatc

SEQ ID NO: 288359 - DNA, 424 bp, Glycine max
  unsure (1)..(424): unsure at all n locations
agcttgagaaggaacagaattatttttgtatccactctcagctctgtagtttaaaccaaatatccattccaaacaagcacaaagaataaaaaatcattgtaattattaggtctgttgtttttgaggatatcctctccctagttggattgtccttttctatctaacaagcttactattttatctgaaaataaaagcacttcttggtattttactatttagtatttactatattatacaacggaaagaaaagcatcttaaaattattcataaaacttactacaataaacatcatcatcattcaacanaaacattcaaaaatgaacgagtcaacaatgtgaagtttgggaggccaaaatgaaatatgaaaaatgcaattacagcaaacatgcttaaatccaaaagaatctagaacaatactgacatc

SEQ ID NO: 288360 - DNA, 451 bp, Glycine max
  unsure (1)..(451): unsure at all n locations
ntgaatcataaaaaaaatactttaaatagtaaaatttttatttaaagtgtttttcaacaaaaagtaaaaagaatatatttttataataattttttataaaaacaaaataaaataataaacactaaattacagtaagtaatatatatatatatatatatatatatatatatacactgcggcatactccttccaaagttgccactggtaatctgattcctgttccatcttctcaatatccactcacccttttgtgctgccactaacaaaacagcacttcaacctcaaattttcaacctttgctcattcatgtcccttcttccttcactgcaaacacccaatgttcctttccatcctaactactagtcattctcgcaaccaggttagtttcatgtctttcacttcccatatctctcttcttttgtgttttttgttccaacaactaagcaaaata

SEQ ID NO: 288361 - DNA, 399 bp, Glycine max
agcttggtttttcttattcgatatttttaatttgcaaaattgaatgttattggagttgcactgtttatcatgcttgtcttgtacttaaaaatatttaacttctgcattttttttattccacagaacttttacatgataggaagggacaagagcaggacatattggaaagtactaaagattgaccgtcttgatccttccgagctaaatttgcgtgaagattccaccacatatacagaaagtgaatgttctgatcttttgagacggatacatgagggtaacaagtccacaggtggactaaaatctgctacaacttgttatggaattgtaggtatgtaaatccataatgtcttagctacctgcctgttgaccaattatgagttactgtctggatatactatt

SEQ ID NO: 288362 - DNA, 301 bp, Glycine max
tggatgggccctgaatattctagctctacagcttgtgctacaagtaacttttggatattgaatgcacgcaaccatatcattagaggtgaagctgcaagtatttttgctttgatatgtgctcttaggatcttaaaactctcatattaaccctgacctttacttattgggacaaaatttggctcaatgatgctctctctttgtcaaaaggcgtcaacaaccaagtaacatgaaatctgctgccgatggaagctctgggtggccagagctgatatataccattggatcctttatactattctct

SEQ ID NO: 288363 - DNA, 417 bp, Glycine max
agctttgctcgtatttgtcaagtgtatggaccacgttgtagccaaggtgctcatcgataatggttccagtttaaacgtgatgcccaagagcactttggagaaattacctttcaatgcttcccacctaaagccaagttccatggtgtttcgtgccttcaacgacacccgccgagaggttaggggagagattgacctccccgtacagataggccctcacacctgtcaagttaccttccaaataatgggcattaaccccccttacagctgcctgttggggcgcccgtggatccactcggtgggagttgttccctctacactccaccaaaagttgaaattcgtagtggaagggcatctggtcatcgtatcaggcgaggaagacatcttggtaagctgcccatcctctatgccttatgtgga

SEQ ID NO: 288364 - DNA, 444 bp, Glycine max
  unsure (1)..(444): unsure at all n locations
ctaagcttgacaaaattaccactgctgtcttctaacaagatttaaagggaaatctctctaaagatacatctaataatacccataattataacacatacaaaacactgacagaaacaatgggtatccaattcaagaaggatacaactattaacaaaacaaatattcacaaataataaaagaataacaaatagacacttaaagaactaaaataaacttcccaaatagaaagaagttcctcggcaacggcgccataaacttgttcgacgaccgacaagtgcaccggatcacgcaagtagtataacacggtaagtgaataccgagtatcgaactctcgaggaacttgttttacttggtaaagctgtggttagtaaataagtgttttgggtgaaacttgtgtctggtatgacaagatgcanactaactatcaaaagaaatacgtgagta

SEQ ID NO: 288365 - DNA, 409 bp, Glycine max
  unsure (1)..(409): unsure at all n locations
agcttatgttatggatcactgtatggtttcctttaacctcagtctatccataacgcaaagaacaaacatgaagaatgccaacattacattcaaaaatgggtcaaggaatcacaacgaanagtgtacttgggaccttacctaaatcagtaagttgaattgatgttgtagaatatagatattatgtgcattattgttgcctaactaatgtttttcgtcttcaaggcacattggcaacttgttgttctgtgtccacgggacaatattgttgtttggttttgttctttgtgtaagaagcctgatgttaacatcaagacaacaatgaataagttagttntaacattaaaagtcaattgaaatattgcaattgtanggtataaagacaatgattatttgaatatatacgttaacg

SEQ ID NO: 288366 - DNA, 350 bp, Glycine max
  unsure (1)..(350): unsure at all n locations
ctcagcttctcccccaatttctataatagggggagaagtgaagtttatnagggttcagccctcctggtaattaaaatcacttanaattagtgagaaaaattggtttcgtgaagaaaatccaagccgaggcgctttcgtaacgtttccgtggatgatttcgcgaaggttttcgaccgttcctcgacgttcttcattcgttcttcgccgttcttcggtcttcaatccggtagttccctagatcgaacttttcaattcattctatgcacccttagtggtcctcatttgttttgcgtgctttcatttacatatcatttacttttcggcccccttttgcatgcttaagtcatttt

SEQ ID NO: 288367 - DNA, 314 bp, Glycine max
agcttatattgattctaaatcattcaaccgaatgccatacatgtactcgagaacaatgactttgtctgcagactataataggaagcaaccagattatataaataagaagaattatggcaaaaagataaacgagtaggaattaacacgaggcgcattgattttgaacccgtagcaaactgaatgcaccagacacttatgcaaccactggaaattgcactacacatgatatataaacacattaataagctaatcagcatataattatggagaaaattcattcttttacttggtatggcaccttgtcgggaaatatg

SEQ ID NO: 288368 - DNA, 363 bp, Glycine max
tcgttgtgatgctagagcttagctactttctcccatgttttaactaagctcacctgcttgagaagctagagcttagctacacacacccctctaataactaagctcacctccttaagaagagaagctagagcttagctacacacccctataatagctaagctcacccccatgactaaatacatgaaaataccaaggaaaaatgctactgcaaagactactcaaaatgctctgaaatacaaggctaaaaccctatactgctagaatggccaaaatacaaggcccacaagaagaaataaagcctattctaatatttacgaagaagagtggagccaaccttgacccatgggctcagaaatctaccct

SEQ ID NO: 288369 - DNA, 417 bp, Glycine max
  unsure (1)..(417): unsure at all n locations
agcttgatttaagaaaattattaattaatgtaaggttacaaaataagtagggataattaaggttgattaatgacgatctagatttcatggaattagaaaatgggtaattaagtcacaagagtttaaaatggagggcatttttgtaaatgactatacaactagtttaaaaatagaaatttagtttaattagttggtgacaaattaaagtgcctgattatacaatgtagaataattaaaataagttagagttgtaacaccctgaaaaattacaattcagattgacagagaanactctgtgttgtgtcatctgtgcatgtantgaattaatttaagtatttatatgctnttaatcatagaatnttgtgttatgtatatatgtgtgtgtgtgtgtatgtgtgtggttagttggtttaataa

SEQ ID NO: 288370 - DNA, 433 bp, Glycine max
  unsure (1)..(433): unsure at all n locations
tatcacccgtatcagcgattgaagaaggttttaatgggtttcaggaaaatgagagtgcgtctaaaccattagctaggaaagaagtttatgatcaggttaaggacatcgtaactatctttgggaagacccaaaagaagccatcatctgagacaaacatacggaagaaaatgtcaatattcttttatcttccatattggtccgatcttgatgttagacattgtatagacatcatgcatgtggagaaaaatgtgtgtgatagtttaattgacactcttcttaacattaattgacactcttcttaacattatacgaatgttctcatttctcaggggatcattgcagcaatagtaaccacaaaaaaaaaactatgtttgctgataaaaaaatagaaatcaaacagcaattggtttgctttattntttcccatcaatca

SEQ ID NO: 288371 - DNA, 420 bp, Glycine max
  unsure (1)..(420): unsure at all n locations
agcttaatattcactaccatataatatgtctggacatataattatatgataaaacttgtctttgagcttaataagtactttgcgctcaaataatcttcgttgttttttttcatttaagtcacccgactatatcctatgtgtgacattctcattaatttcttcgtcatcttgtataattgatcctagatatctaaacttagagacatgtgatgtgagatcttcccccaattttattaaagtttcaattacattttttttctaatttaaggactttaatgaattacactttcttatgcaggagacaatcaatgtagactatcagtatagctntggtcacacattntaaaataaaactagataaaatacactagatcccanacgaatgtatgtaaactntnttgagacccttgatcttattag

SEQ ID NO: 288372 - DNA, 310 bp, Glycine max
aaaatcagttgtgaatttgaggggtgagttttgaatttattcttttgggttaaatttttaaaaagatggtacaaattgaatagtaataaaatgagtcaaccattttatcttatctcgctttactatggcataatggcggtgacgatggtgacagtggcggtggaaaggtgatgctggtgtttaaaagctagagcagcttgacacgacctgaagatctggtcaagtcggggtaactatggatcgaccatgcattaaatctactacaaccgagtacaacctaaccaggtcgtggacacccaagggagaaaat

SEQ ID NO: 288373 - DNA, 415 bp, Glycine max
  unsure (1)..(415): unsure at all n locations
agcttctatataactggtctcccattggagagggattagctcttgtagttcctttctagggatctagacaatagatggtgtttcttcttggttgttagccaggacaaagagagcattgtcatgaatggtaggcagagacagattaacagtatagttctgcaatctatatatgatctgatgatgcaaggtagcagaatgggcctcaaatacttgttcaactccagtgatctagctntaaactttcatcctctgtgggagagtgggatctttcaaactgatgttagaatttgggaaaatggtgagaactatacttccaacatggagactagtcaatttggttctgatcatagcattntcatagtgaatgtaattggagtctaatagagagactctggcggttacaagtagtcctctt

SEQ ID NO: 288374 - DNA, 434 bp, Glycine max
  unsure (1)..(434): unsure at all n locations
ntacagtccttgactgtatccgagcatagtctcactaatgtgtccactgatctggcacctccactaatagtccatgactattagacgttcttgggcagcacctcaactctctagcacctcaattggtcctatacaacctggctctagataccaaattgtaggaagtaagaaaacaagctaaatattctactcttacacactcatatttgaaggaagaaagagagctatagaattgattntgattcaattgacacacacacaaagcagcgtacatgatctgcattttataggcaagttctcctaaataaactattacataaataaagaaaacccactagactaagtaaaccaaaaagaggctccgactggaaaaaggtgcattgttgatggtcataagttgcaacttactgcagctgtataaaacaactatgcag

SEQ ID NO: 288375 - DNA, 443 bp, Glycine max
  unsure (1)..(443): unsure at all n locations
ttattgttttacacaacagcgccgaggataggtagagtcnttgacacttcaccgacaccttctcacaatgatgtctgatcgccatcggaaatggacatacatatgcctgatatatacagagactgcgagagcatcatggaaccatgaagtgccttgtcgtgccttttctgtaagctcaaatgactatcacgtgactacttatggtagtatactaaatcgcataagaaaatatgacgagtcctcatgttcatataccacatgctaagacacacttctgtgaacgaacgatctagacaatattcttcgatgatagacgccgctgggcattagcaagagtaccaggattattctggtgtagatcaggttcacttgctactaggtgtaagcgtgaagcataccttgttttattcgatagctttaacagtgactgaaagatgctgggg

SEQ ID NO: 288376 - DNA, 419 bp, Glycine max
  unsure (1)..(419): unsure at all n locations
gggggacatgantactatgcgggctgcatanacgaagtgttttgtccatgaacaaaaggggttctatatgcaaagcttctgctttgcctgaagatataaagggcatataaacaatttatccattatactttcagttagcgaatatccacattctcgacataaatccggatattccttgaagcgtagtaaacagacttccattcggatatgtagctcgaatagctaatgctatactcctatcatgagtccatgaattcagtctctttgcttcactcttacttccggaaccttggaactaaattacggccttgaatattgatttaatccattgaaccttgacatcgctttgaaggtctgtgaacttcaaatgaacaagactcttggcaaagcaaaaatctactgattgcgagcgcgtagcg

SEQ ID NO: 288377 - DNA, 280 bp, Glycine max
agcttccttatgaagattcctaaagaagctagagcttagctacacatacctctctaatagctaagctcacctccttatgatgagaagctagagcttagctacacaccccctataataactaagctcacccctatggcaaaatacatgaaaatagaaaaaaaaaatccctactacaaagactactcaaaatacctcgaaatacaaggctaaaaccctatactactagaatggccaaaatacaaggcccaaacgaaggaaaaacctattctaatatttacaa

SEQ ID NO: 288378 - DNA, 425 bp, Glycine max
tatagaatatataataaaagaaaaatgacaattgaagagtctatacatgtttcctttgatgagtctaatgccattcttccaaggaaggattttttagatgatatttcagattccttagaagatacacatattcatggaaatgactctaaagaaaaagacgaaggaagcaatgaggattctcaagataatggggctagaggaaataatgaacttccaagagaatggaaagcctcaagagatcatcccctcgacaacattattggtgatatatcaaaaggggtaacaactagacattctcttaaagaattatgcaataatatggcttttgtatctatgattgaacctacaaatataaaagaagccatagtagatgataactggataattgccatgcaagaagaactgatatcaattgaagaaataat

SEQ ID NO: 288379 - DNA, 400 bp, Glycine max
  unsure (1)..(400): unsure at all n locations
agctnttgtgtgaaaggatgtgactcttcacatttgaatttgaatttcaacgttcaaaggtactggtaatcgattaccaaaacattgtaatcgattacagccttttgaaaataattggaacgttgtaaattcaatttgaaaactttntcaaaacaatnttgctactggtaatcgattacaacaatctggtaatcgattaccagagagtaaaaactctttggtaaaaggttntgtcaaaaactcatgtgctattcaaagttgtgaacaactttntaatacttatcttgattgagtcttctcttcatccttgattcttgagatcttgaaccttgaatcttgattcttggctctagactttcttcttgagtcttgaattcttcttgattcttattttgaactc

SEQ ID NO: 288380 - DNA, 430 bp, Glycine max
  unsure (1)..(430): unsure at all n locations
tgtaatgagcttcataacaaagaaagggaaacataggcttttagggctatcaaagggattaattcaaggtaaatccatttggctagaggcttataagaacaaaattgcctaaatcatttccaaatatgcatgtgaattaagaagcatcagcaagaatcaagccaaggctattgtgcaagcaatcattggggcaaaacacaccaaatgattatgatgatggctcaaattctcacaaaggtaaacttatcacttccaaattgagctttcaaaactatcataagcgacttttattttcaaaacaattactcattacttgaacatatcctataattcaaagaanaatatngcaaagtgtacaagcaaacagaattgacctaaaatattaaactagaaacccaacaaactaacaacattaacaaattaacacaac

SEQ ID NO: 288381 - DNA, 348 bp, Glycine max
  unsure (1)..(348): unsure at all n locations
agcttgcaaccttagaacatttattgtttccaataagcaattgagcttcaatttccttaaatctctcacatacggataaaagaagttgaattcctcatcgaaagtctctgtagtataattcattatctgcatcactcctaagtcaactcanacttatttatgaaataaatcaagttaaaaccttntaaaaatctatttagttacaaaaacaaaaacagttccaaactatattaaaaaaagccgaaatgatcgacgaaggtttgttaaaactagaaaattagtaaaataaatcttcgaacatatgtgacaagtataggttctgtcaaaaagaatagtataaatacagta

SEQ ID NO: 288382 - DNA, 405 bp, Glycine max
  unsure (1)..(405): unsure at all n locations
tgagaatagtacattatagcattaaatcttgattattatcttatgcagatgataaattggttttaaataagataatccccgtacacacacatgataaaagaatagaaaacattgtgctntgtagaagtactaaaaccacaggaaaatatagagaagctaggactaagagaatgaaagccaaagtaccaaagttttgtattataaccctgtatttctttacccttcatttactttttgccattttagtagaacttttgagatatgaggattatttttaacactacactttacagcaacaggtatttcgcagtacaaagtgttgtcctgttctataaggattactgaacacaggaaagcatgagccttaagatcaaatcagcttaatgttttggttagatttgagtg

SEQ ID NO: 288383 - DNA, 372 bp, Glycine max
  unsure (1)..(372): unsure at all n locations
agctntacaacttgcttctctacctcacgccgtcactcttgcctgactgcaagaggacaagattaatgaccgccgaaaacactctcggacctcgtttccttccccacaacaaccagcttcagcaccatccactcaaacccaaacacctcgccctaagactcctttcatacagcgtactcacgaagagatgacctatatgcgcgaaaagggcctctgctacaactatgatgagaaatggaacttatcacaccgtattaagggtcgagtcttgttttcattgcagcctctaatgatctctcccactccgacatagctctgctggaagactcaccacccctacctattgaacaccttcaccttttgacccacacc

SEQ ID NO: 288384 - DNA, 196 bp, Glycine max
gacctataaaactaagccagaagggaggcccgaaaaaagaacgaacatgaagacactacttattatactaacgaaacagaaggaggcgacgtgaacaaggtaagcacacatacaacataatatattattaacagaaatcacaaaatacgaacagagacgcacacgaacataaacataccaaaaaagtggcataaag

SEQ ID NO: 288385 - DNA, 404 bp, Glycine max
  unsure (1)..(404): unsure at all n locations
agctntgggttcttctattgagatacttgatgcaattagggtttttctctacttgaaattatttttgtgttctatgttgaaggcacaaataccaaacaccaatgtctcccgagtttggcctaattcaagttaaactttgttcttagatgtctcttgttgaacttagcctaaccgaacagcattacaattacagcatgataaaaactaaattaccacactctgtgttcggcagttcgataacctagccctaccctatccagttctaaggatgcagtacattatgcaatactaaagctcctaaccttacacacaaatgggtgatcaagccacgagcatgcataacataagcacagatagaataattgaacacataaaaacaacttcaaatagatagtaataatatt

SEQ ID NO: 288386 - DNA, 471 bp, Glycine max
  unsure (1)..(471): unsure at all n locations
tagttgtaaaananattaaagatctttntcttatctttccagggtctactcacacgttccatttggagttctttagtgtcttctaggcttgcacaaggcagataggtcaagtaagcacaaaatctaaaatttaactacaattctcaattaagctcaatcatttgccttagaccaaaaccgagttaaggtgagaaaataagggtcaaagagatttcaattgacctaagaagaatagaaaaatattaaactacaaatactcaatcaaattcccccacactttatcatttgaactcatgggaaaaactaaaagaaagattaagataaagaaatcaaacttagaaaataaccacactaaaagaaggtatgaacaaggtgtcgtaacctaccctcacgacgggatggtgaaggccaacgtagatagaccacagtgttcatctcctagggagaaaacgcgtggagtcgccaccaaca

SEQ ID NO: 288387 - DNA, 446 bp, Glycine max
agcttgaatcttctaccctatttctgacagccagtgggtgagtccagtccaagtggttcctaagaagataggcctcacagtgatcaagaatgaaaaggatgagcttatccccacaagagtgcagaacagttggcgagtctgcattgattataggaggctgaattaggtaaccagaaaagatcattttcccttgcctttcattgatcaaatgcttgagcgcttggcaggtaagtctcattactgctttcttgatggtttttctggttatttacaaattcatattgctcttgaggatctagaaaagaccacattcacctgtccctttggcacttttgcctatatgaggatgccctttagcctatgcaatgcccctggtaccttccagcggtgtatgcttagcattttcagtgactttttagagagtcgcatagaggtggttatggatg

SEQ ID NO: 288388 - DNA, 463 bp, Glycine max
ctaagcttgtgaatgcctgttggatgatatacatacccattcttttatgtttttgtgatgatgtttatatgctgaaattgcctatggaaactgttagagatgaagggtagagttaacctagggttagaaagtgagaatgtggtgttgtgagtggaaaaagagtgaggctttgagagttggaaggctaagtctgaattctgtggtaaatggaggttaaaatgagttaatcctagcttgaaatgtcatttacaacatgtgacaaaggttaggttgtgctatagggaaaaactaatgaccaaagtgaacaaagagccatttctggggcacaattgggtgttgaatagtcaaattttgattcggtggaattttaggtgtaaatacagtatgggcaagtctatattgatgttatggactggtgtgaggtgagagtttgcctcatatctacctcattctaaatctcacc

SEQ ID NO: 288389 - DNA, 443 bp, Glycine max
  unsure (1)..(443): unsure at all n locations
agcttctagcttaatgctcttaccttgaattaattcctttgatagcccttttgagccttgtttccctttccttgttttgaagctcactacaagccttaagtgaaaaaccatgatatcaccatatccttaaggaattttggagctttggaattgttttgggaataagtgtggggggtttttgtttcattggataacttgttttgttggctatgcttcatgatgtattttgggccatacttgatgtacactgcatattggttaaatgttggacatgctgaatcaaatgttgtttctcaaaggctatagagtaaaaaaaaaaaaaaattcaaaaaaaaaagagaaaaagaaaagcaataaagttgagtgaataagatcttanatggcacaagaatcatgaaactctttggtatactctctatgtctaaattntatctttacttctt

SEQ ID NO: 288390 - DNA, 434 bp, Glycine max
  unsure (1)..(434): unsure at all n locations
tctnccccaattntctataaatagggggagaagtgaagtgnaaaatggttcagccccttaggcacttctctctctttcgaatntgcttggaaaaattgcttccgtgaagaaaatccaagccgaggcacttccgaaacatttccgtgaggaatttcgcgaaggtttcgaccgttcttcgacgttcttccttcgttcttcatcgttcttcgatcttcaacgggtaagtacctcgaaccaagcttttcgattcattctatgtacccgtggtggtccacattgtgtttcgtgtatttttattctcgtttcatttgctttntatacccccttttgacgtgcttaagccattttatttaagtcatttctcgcttaacctaaaaataaaataaatttccaccgatcgtttgaatttattatccgttaacttcngttaaatg

SEQ ID NO: 288391 - DNA, 431 bp, Glycine max
  unsure (1)..(431): unsure at all n locations
agccttatagatgatacaagatcatttagatcaaacatgcactgtttcttcacccagatagattntaaagatccttaattatgataganataaaaaaaatccttaattatgatagattntaaagacaatatgatattacactnttagtgcataattatttttctcgaagtaaattaataataataatcttaaaaaataggacttattcaaaaatgtttttttagtttttagttatgaaaaanagaccaaattcaaattaaaaaaaattgaaaaaattgaanatataattaaacttaaagtttataataacacaacagtagtatataacttatantttccctctcgtcttaccaatcttataaatatattttagaaatttttttatcatatcgttaatccgtgtcataaagatccaatgactagtgaccttt

SEQ ID NO: 288392 - DNA, 288 bp, Glycine max
  unsure (1)..(288): unsure at all n locations
gtttgagattntctcactggtaatcgattataggattctagtatttgattacatagttatatgtttgaagagttatgacttttcaaaggtttttttttaaaatctcttcaatggttatcaattacaggattctagtaatcgattactgatcgaggccatacccgaatcaaataaacattaaaaatacagtatctaggaagtgatcctaggtcgtctcccgacgagcaagggtcaaacaaacgttcataacagatagtaggaaaatattaacgaattgggggggggggg

SEQ ID NO: 288393 - DNA, 195 bp, Glycine max
agcttgtatgattcttagttgttcgccagatacaccgctatcactgacggaatacacacgtgagcccatttagaggtaatagataagatcatcgcggctagaatggacatgtgtagagatactcacaggatcagatcgcgatttattctgggatatctattgtattgtgatgcttccttaatgatcattaataca

SEQ ID NO: 288394 - DNA, 261 bp, Glycine max
aactaagctggggatggctgcattcgacaaagacggaagtgcccactactttgcttgataaaacaatggctagaccacaacagcgctggaggcggcaacggacaagggactgacaaaaaaattatgtagacatgaacaaacaatagatcatgcgcagagcgtgccaggtgaaccaagagaagcactgaacaggtgttagaccagctacaaacaatgtgcctgagcaaaacgaaaaccaaaaacgtgaccgacacagatgat

SEQ ID NO: 288395 - DNA, 442 bp, Glycine max
  unsure (1)..(442): unsure at all n locations
agcttgttaaatactaaaaaaaaagtttaataaatattttaatgataagaaaagaataaaatataaaaaattagaagtcaaacattttaaaaaagtgacttcaatgacatctttaaaaatgtttatttacggaacagtcaactaaaatttttaattattaaaaaaatctagaagctaattaaaatatattttgaaacataacctaactaaatcaacatatttttagaatcttgatttagtttgtatcatatttgaatttctcttaaaattaattttattacttatgttttggttaaatttgagtctaaataagaagcgatcataaatgggctgctcttaaagtattctttatttatatanttacaatagaaacatgaaatagaaataatgttaattggtattatctaaataattatcatcttatcaacatctttataacaaa

SEQ ID NO: 288396 - DNA, 352 bp, Glycine max
gctcattatgttattgttctttcaaagtatgaacaaacactatgattgttcatgatagagcattacagcatataatatattattacatttctgaaacgacatacaacttgtggtgttacgatgggtgcatagccaaggcgatcctttgcttttgagcaatcaaatgttctgctgcaagatatgagtcttattcttgaaggaatgagttgaggcagctccatcccatatgggcctagcaacttatatatgcactccaaccaatgtgcactgggcatgataacaaaagtggtggatctttacccttggcctataagcaacatgacttagattacaaagaaatggcattgacaat

SEQ ID NO: 288397 - DNA, 314 bp, Glycine max
ttgcatgcaagcttctactttagtgcttggcgggctgccttcactttgttgtctcgtacgcgagctttgaccactattcttccttaccgagatgcttcttttcatctcctgctgagcgggcttatagcctataccatacttgccatgatatacttgcggttttataacgctagttatgccgtcgttgtctctgtctaaacccatcccatgttcgtaaccgttccccaacttaactcgggccatcattactgctgcatctgacatactaggttgcccatatatggagttcaccgatgaaatgctgaccacctcaa

SEQ ID NO: 288398 - DNA, 418 bp, Glycine max
agcttagaattattgagatatcatctgtgcgtttcatggacccaggagcggactttgacttcagtttcttaattcttcaattgtatgtttaagtttgaaacaatttttttataaaaaaaaagagggaaaagacatcaagtaacgcaattctccttggaaaaaagtcaagattctgcactaggtctacataattcatataaactattaagttaaatgacaaaatatataaaattatgaagaaacaccataatataataaaaagagtaccacattcatacataccctcatcaacatcaacagcaaccacaagtttctgggataatcgatgatcactgaaacaaggaggcttagcaggacttccatttatagatccattatcaaccttaaccagagtagcatcactctcatcactcctaac

SEQ ID NO: 288399 - DNA, 432 bp, Glycine max
  unsure (1)..(432): unsure at all n locations
tgtatcaccacttgacaaacacaatgatctgaaataaagtttatttaaaatgttgtttcatcgattgaactcgtatatgcacaataatgtttaatgagaagggaagagacaganagcaaaacgtaatcatttggattacagtccatggttcaaacttcagagttccagagacaggaacctgaatctacttgcaaaaaataattaaatgaaaactgaataagctcagccaatgttgtacaagaatgaatattataatttatggcaataaactaggattgtgctattttggagctagctttgtctggcaatgtcttttcctttctcagaccaacgatgcatgtgcgatataggagcagaaaaaattattgaaagaatgatgatactagaacgttctatcacttatataccanatcatggcaaggtttgtcacaa

SEQ ID NO: 288400 - DNA, 375 bp, Glycine max
  unsure (1)..(375): unsure at all n locations
tctgctttaatgtttatgtcacattagagaatgtcaaataaccatatcanattatggagattgtgatatggtattgtaaatgacatctctggctagagtggctttgattaggatgacactaagtacatgatcacagttgagaataaaaatgcttggaatgaataatgcattgtaagtattcttttatatatttctatctgttattcacaactgattagatttgactttgtttccagtcacataaatcggctaaaccgtttcgattcaaagtgcttcacaactgggatgatatagtggatttgtgcgctaaagatagagccactggtcatggagctaaaactgctatggatatttatgaagcgatgagttgagaaa

SEQ ID NO: 288401 - DNA, 468 bp, Glycine max
  unsure (1)..(468): unsure at all n locations
ctataatactcagcttgagccaaagggaaaaagaacttagttattcaatgtactctccttaatanagtgtgttcaatgcaaagttaccactctattccatccaaccttgaggattgataaaaccattatgataagtcttcattaaaattgttcttgaatattgcttccatggtctttgaagataagtcctaaccgggttttgaaccggtctcacatctgaggcagctgtgactcaagaattgcgaattgaaattccagtgttttggtttggatcagttctgccttgtgcagcgatggtgttgactatgttgggagggtttcttgcaaggtgttgcaattctgtaacacaacaacaacaacatgctacaggagatttncatcaacttccctgccacacgcgtttgggtaacaacaaaatgataagtcaactaatagccaggagattacattacactttcacatgcacac

SEQ ID NO: 288402 - DNA, 438 bp, Glycine max
  unsure (1)..(438): unsure at all n locations
agcttcccgcctgtgtcaatggcggcacccacgttcaaaagtgaccccccccccccgtaatttgttttaaaataaaccctcttccgtaaatagttttcaaaagcatcccccttctgtaaatttgcctcggtgtgaagatagtctagtattcaagcatagatagcaccataatcattgctgagagaattctaaaaatctcggctaatattaaccaatttttatgtcaaacaaccaatctgacaattttcacaaatattaatcattttcattaatgttaaccaatattattggcaaatgaacaattgtgtgaaaaattaactggattctatacattattagatttatgatttttgttcttaaattaaaataaagactgttctcttaattatatattttttattcttatgattcanaataaataaataaaaacttaagaga

SEQ ID NO: 288403 - DNA, 463 bp, Glycine max
catccaaagtggcattccttgtaccaccaaattcctaactcagtttcctttaaagtcctactaaattagtacaaagtaacatgtaacagtttagtgagtaattcaacattgtacataataagtgcctctgcctgtaaaatttttaaaaacatatacatatctaacatgaacttaatcttcatttcaagatgtgttgagtactatatacttatttatgaaagatgcaaaattcacccatgttaatttggaagggactatagaatgcaagattgtttacaatcactggaggaagtctgcaaagattggttctggatggaagtcttttacaaattcaaaaaatttggaagctagccaggatattatatttgagttcccaaatccaaaatctaactctgttctattctgcatttgtttgtaatttaagtacattatactctatcaatctctataaacttatgtttat

SEQ ID NO: 288404 - DNA, 407 bp, Glycine max
  unsure (1)..(407): unsure at all n locations
agctngngatgttctntgttgagcttatnagtggaacagatagatgaagaggctgaatcgttgagaaagtttggataaacataacttgaggaatcagaagctgatgatggaagcgaaagaaagagcggaacttctgggagagctgtgtgtaattgttgactgtcacattctggtttagtgattcactgtttctttggctttgctgcatatctgactntgctaatttgcatgttgctgaatggcgattcaagtcatgttntgagaatttatgatgaagaggcacaagcaatgtccattcgcgcgagctggaaaatgctaatgcagttggggaagccatcctctctacaatacatggacaaagagatcgcttgaaggtatatcttaactgctgccttcactcatcaaca

SEQ ID NO: 288405 - DNA, 478 bp, Glycine max
tctccctttgctgcagtgggtcctctgtagcaggcaaagatgcttttctttccatgtaaatacatgcatgtcattgaaccatcaattaacacacatacataattgaattgcatgatgaaagattaagagacattcaagcatggctatcccacggtgcacatcttgtgggtgtttggagtgaacaagagcccatgataaacgcaggagacagtcttgcatatactcttgagatgattgtttttctgcctccaagacctctctttcacatccctgccagtgcagtgccacacacaacaacaattaattaatcaattgcaatctcaaacacttaaaaccctaacagagaaagagcatatgaatatgaaacatacagctacgacgtcagagtcacaataaggaagatggtccttgccggagaagaactgacccaccgagtccaagatcatccctagcttggcttcaagtttcgccatttcta

SEQ ID NO: 288406 - DNA, 311 bp, Glycine max
  unsure (1)..(311): unsure at all n locations
agctncgaatgtattattattctntaagcatgtctgtaacatggtttgtgcagtgctttgaaacttcagaatgggccatatgctntcgaagatatgataaagatgggtaggatgctggagaggagcttctttttcgagcccgaccctgcttnttcagtcgttaacatccaccacattaatggccacacaatactgatcatgagggtgacggcagctctttcagtgactgcatanangtatgtctattcttaaccatgtgtaagactaaatatcagctgatggaaaataaccactcatatggtcaattgtga

SEQ ID NO: 288407 - DNA, 477 bp, Glycine max
  unsure (1)..(477): unsure at all n locations
cgtcgatcctaagagtaataaaatcaaatcgctcacaacaacagtttgaatcncctgcttactactgcgctctgcagtggttatatttcccctttcaaaagagacaatgtcgtgtttgtactgatcactttgatcacctttgctgaaccatgagagtttaaatgaagcctgtctcgataataaagaaaataattaaaatcaatttgcttaagtaggagtaaatcagagtatatacattgcaattttagcaatagaaaagaggaatatgtctttgaagtaaaaatggtacaagatgtcttaccacagatttctaagttcaaatacatgggatcaataatacaagatgatggaaaaattaatgaagatgtcacgcaaaggatacaagcgggatggataaaatagagaaaggagtcaacggttatttgtaatcgcgaagtccctaccaatatcanggcaagtttatcgtactactatacg

SEQ ID NO: 288408 - DNA, 445 bp, Glycine max
  unsure (1)..(445): unsure at all n locations
agcttggatgctatccattatttntgtaagactatgtattgcattcgaaatattgtgtttacgtgcctttttttgtacactcaaaattctattttgaagtagactaatgtaatgtatcatgcccctaatgaactacaagactganagttgtgtgttctattagactgggatatgcgtttgaaaattgtttttgggattgctcgagggctcctttatatgcatgaagattctaggttgaggattattgatagggacttcaaaacaagcaacattctactaaaattctgattggagaactataccaaaattacctcctaaggagttgtatctaacttttgtccttantttgtatttgtcacactttacataatcataccagacaaatctcttattttgtctacatttcacattnnttgtaatgcaatgggtatatgtgtccataata

SEQ ID NO: 288409 - DNA, 430 bp, Glycine max
  unsure (1)..(430): unsure at all n locations
ctaagctntataagcgcgggtctgngagacataggtcaagtgttcgcaatattcgtttattatgttccgagtacatcggatttggtacgaccatgctctcctgatttccagctgggaaattggcgagtggaggaacgccccggtatttacgcgacgagcataatgtaaatctttacggtccttaaagctctatagttgggcctaggctttagagtctttccttctgttaaggctatgtgccctttattgccgattttataatacaaggatctttcttcatctgttcctacgtctctacccatgctcattcatcagcatgtgtacttctttgtctgatacgacagacccaatgacgagttccccgaaggtactaatacctgngacccgcctatcaacttctagcaatatatgaatcacacggatgatgaat

SEQ ID NO: 288410 - DNA, 341 bp, Glycine max
acttgatattttaattttataaataccggaatgtgcacatgtgcatattttggtaccccaaatgctttgagtatgcatgtattgtaaatatagctaaggaagtgcatgtgatgtacgtagcaaatacaccttggaagtacatataaataatttaggtaacggatgtgccttgattgtacatgggtgcatgtttattagttataagaatgtcttgtgcaagtgaacgttcctaaagaagtatgtgcataagtatgctctaaatttacattgatgtttgtagttattggaggaggttgtatgccatatttgttttaagagtatcatttcttggtaaaactaac

SEQ ID NO: 288411 - DNA, 325 bp, Glycine max
tgctgacgagagagtacgacaatgtggatatgatctccatgctattgtaagcgccacaggactaggactatcacttgcagatgatcatcactttttataagatatatctatatcatatacgagttattaaatctatgaggaagaaaatgataatacttgactgcgtagtatatgaagattaatatatactatgggggcggtgggaagtgtacccatgcccgcaccaggattaatcttagttatggaacatctattgcaagctattcaacaatataaaaacaaaaatttattgtacacttaattgacatatgactcgagtaataat

SEQ ID NO: 288412 - DNA, 404 bp, Glycine max
  unsure (1)..(404): unsure at all n locations
agcttgagtatttctctctgatagagaagataaatagcttgggaagtctttatcctcaagcttgagtgagccaccgtagtgtagaagcaaatgactttgatgttttgatgatgatcatgatgatttgatgcatatgatgcaagaatacaagccacaacatcaagatgatcactagtattttaggaagggaattcctaattgatttagcaaaaggtttggccaagtaatttgagttaaaaagtgtttttcaagagatttactctctggttatcgattaccagaggatgtaatcaattaccagtggccaanaatggtttacaacagctactaaatatttgaattcaaattttagactgtgtaatcgattacaccatattggtaatcgattaccagcagttaataaa

SEQ ID NO: 288413 - DNA, 391 bp, Glycine max
caggttgagttctgcttaccacccacagactgacggtcaaaccgtgcgttctattcaatccttaaaagaactcttgagagcctgtgtgttagagtagacgggtacttggaatagtttcttacccttgatagagtttacatacaacaatagttttcactccagtataggtatggcaccttacgaggcattgtatggtagaagatgtaagacacctctatgttgggtagattccagtgagagcattgccttacgacctgaggtagttcaccataccattgaaaatgtcaagttgatccaagataggatgacagcagcccaaagtatgcagaacagctactatgatcagagaagagaggatcttgaatttgctataagtgatcatgtatttctg

SEQ ID NO: 288414 - DNA, 348 bp, Glycine max
agcgtgatcttcatcgtccgcgtgtatgatattcactccacaaggtttgaagtagaggagaccttcaaccctataacgcaacgtgacggacaaaagtgggcagttaacttgaatggccgttattgtcaatgcggaagttattctacgcttcactatccatgttcacacattattgcagcttgtggttacgtgagcatgaactactaccaatatatagatgttgtttacatgaatgagcacatcttataagcatactccgcacagtggtggcctcttgggaatgaagcggcaattcctacttctgatgaggcatggacactaatccctgacccaactaagattcatgcg

SEQ ID NO: 288415 - DNA, 444 bp, Glycine max
  unsure (1)..(444): unsure at all n locations
caggtagagttcttcttaccacccatagactgagagnctttcctgcgctccattcaatccttagaggacctcttgagagcctgcgtgttaaaatatgggggtagctgggatagtttcttacccttgattctacctacaacaatagctttcactccaatataggcatggcaccttacaaggagctgtatggtaagagatgtaagacacctgtatgttgggtaaataccagtgagaacattgtcttaggacctgaggtggttcagcaaatcactggaaaggtcaagctaatctaagaaagaatgagaacaacccactgtacgttgaagagctaccatgatacgagacgaatggaccttgaattctccgtaggcgaccatgtattcccgatagtcactacatccactgggttggtatggcattgaagtacacatagctcacacctag

SEQ ID NO: 288416 - DNA, 379 bp, Glycine max
agcttcttcgttgtgtcaagcggaagaaccttcttcaccttctttcgctggaacttgcggaagaaccatttcatctttcttccgcaagagcccgcggaagaacaccttcttccgctacaatacccaacgtccactttcacacgcacggaagaaggttcttctcgcggaagaaccttcgtcttcaacctcaagcaccaaacatcacctatgtgcgctatcctacggccatttaagcgattcacactgataggaggttagaacactaacctcgatggcgaaagaagaagggaacgaaagcctatggaggagaagaagggaaccaaatttgaaacgtgctaccaaatgacgaagaaacgtgctacccaatgaaacgtgctac

SEQ ID NO: 288417 - DNA, 412 bp, Glycine max
tagaagagacagttgttgatcaataatgccaaaatactttattataacattgggaaactaaaacatctcttatttaaaagaatgcagatctactatgacgatgattaactacaaaaaatcaagatgaccccaggtaagaaatatatacgatggggagaaaaaaacaacagaaaatatgaatccttctatattctacatgaaaccgattaagagtgcctgcagctattagccgcaaacaacagcaagactaatatatttgatatatagtctatatgcgatagtgaaagtgggaagagcatactataggttatgtgtatatactttttgatgaggactataggttatatatatagaaagagacagcatgcgcgaatatatattggcctccttttatataaagatggtggccaat

SEQ ID NO: 288418 - DNA, 319 bp, Glycine max
agcttgtcgattttgccatgtttgggtgagatagacatacccattctgttttatggtttttgtgatgatgtttgtgatgtttatatgctgaaattgctgatggaaatctgttatagatgaagggtagaactaacccaaggttagaaagtgagaatgtgacgttatgagtggaaaaagagtgagactctgagagttggaaggctaattctgaattctgtggtaaatggatgttagagtgagttaatactagctagaaatgtcatttataacatgtgagaaaggttaagctgagctatagagaaaaacaaatgaccaaagt

SEQ ID NO: 288419 - DNA, 412 bp, Glycine max
ctcaactgaatttacaacattccaattgatttcaaaatggtgtattttattacaatgatatggtaatcgattaccagtgtgtttgaatgttgaaattcatattcaattgcgaagagtcacatcctttcacataagtgctgtatgtaatcgattacaatgatttggcaatcgattaccagggatgtgttttgaatacaaatcactagatgtaactcttccaatggttctcaagtctctctaaaggctataactcatctattggccttcttgacctgacttgacgagtctatataaccaagaccttaacttgcattgtacacacattgattacaatcttatatatcctttgaatctctttgaacctcctcttgaatgtcttcttatcttcctttgccaaagctttctaaagttt

SEQ ID NO: 288420 - DNA, 374 bp, Glycine max
  unsure (1)..(374): unsure at all n locations
agcttctaatgtataacaaagtgactctatnttcagggtgaatcattacgctgcttgtcctgaaatgactctgaatgatcacaacttgattgggtttggagaacacacagacccacaaatcatctctctgttaagatccaacaacacttcaggccttcagatttatcttagagatggaaactggatgtcagtcccaccagatgacagatcctttattattaacgctggtgatactcttcatgtacaacataaagcatgctattgacgcatactaatgagttcaatgaagaaattgtcattttctttctccttatgacttacgtatctctatggataagtataaaataataaatatacaaactcctcttttaagt

SEQ ID NO: 288421 - DNA, 447 bp, Glycine max
  unsure (1)..(447): unsure at all n locations
tgtaataaaatgttctaactattataggataaagtgtaaatctattttcagcttgagagatgtgtcagaattaccacagtctggaggaaattcagatgaactgcaggtaaatgactcgtatggttgcctttgttctcgtacgaagctctgtacataaaaatttctattacattatttacaccagttattgctaagtcataaagtatctctatcaggaagctcgtggaccagaaataaatgggcaagattttgaaaggcgtaaccacctgcttcaatttctggttctcttccataagtttggcttccttcacgagcaacattgccaaacatcattgcagaanaaggttgtgtgaatatagatagatgacaaattgcttatacgctgtattattatatacaacanaataaaatacacattnttaacactctcattttactatatataac

SEQ ID NO: 288422 - DNA, 374 bp, Glycine max
  unsure (1)..(374): unsure at all n locations
tctagcttttcgatatcccattattttgtttcattttcattctttcaaagctgatagtcatatgtcattattaattcaattntgatggaatatttgtgtataggagatgtgtttaggaattaggatgcattcaaatatatattttcatgatttagaccctatttatttcacgattcaaagttttccaaaacacgtttttacagacaattttctcggagtcaaaattttccacattctcgaatccaattatttatgtacattctcgaaaaattttatgtacattcttgaatccaattatttatgcacattctcgaagctgagtcatatctcgaatccaattatttatgtacattctcgaagctgagtcatatctc

SEQ ID NO: 288423 - DNA, 434 bp, Glycine max
  unsure (1)..(434): unsure at all n locations
tcatgatgaatcaagattgattcanagaagttntgatgattacatatgtgatgacaaaaagctcataggttaagaacacttcatgataacaaagatgatgatctcaagaatcaaagaatgagttcaagatgttcaagattgaatcaagaacatttcaaggttcaagaggaaatttgatttcaagaatcaagaatcaagattcaaggttcaagcttccaagaatcaagatcaagattcaagactcaagattcaagaatcaagagaagacttaatcaagataagtatgaaaaagttctttcaaaaactgagtagcacatggatttttctcaaaacctgtttaccaaaggggcgtattacctaaccggtaatcagaanatgcagaaccatagaccccaggcccatacaccccaagcctagtaaggtcactgtataaa

SEQ ID NO: 288424 - DNA, 435 bp, Glycine max
  unsure (1)..(435): unsure at all n locations
agcttttcatttaccttcacaataagggaaaaatgttattagaactaattaataaatacaaaaaagaactaaaatgacagccataagtatgtacctttgattntttcttcaaattataattatggcgaagtcaatccccctgcaaatgagcgcttcaatagattcttcatttagtttagaacaatactcatcaattaccctacccttagcactaaatgtagactctgaaactactgttgatattggaatagctagtatgtcacccgccatctttgataaaaccttgtattttaggctattgttcctccaccactctaacacactanaataagagttactagtttcaggaatataaacattctccttaagataatcctctaattctgagttcactggaggggtggcttcatttgcacgcacaatgttcattatttg

SEQ ID NO: 288425 - DNA, 446 bp, Glycine max
  unsure (1)..(446): unsure at all n locations
cgtgaaataagagtatcaatatatatgtacacatatactctgcttgtgtggaaaaaataaacaanaaatgaacaagattgataagccaacatatctagtataaacaaaatcaccaccacacaatttgtatgctaattataaagaattctaattcctaaggtacacacctaacaaaggaacacatcaattctacaacaaactcgtatcagaacaccaattagttcatcaaacacactcaatccgtaattaaacatgaaaacataattaaacttcataaacaccccaaaataacccaaaaattgatcctctaaggatccctacacatgttcattctaattcccaagcgtgagtaactcatcccttacgtcgatgtagtcgctcacatattctccgctagtaattgtggcgtctctggtgctctctagagctcctactctggttgttct

SEQ ID NO: 288426 - DNA, 450 bp, Glycine max
  unsure (1)..(450): unsure at all n locations
agcttgtgatttatctcatcgagtccccacagtggttcccatcacaatactcatcatgtattaactcatcgccttaaatggtcttatagtcatgtgattgtacaattcatagatcacaactcanagcacataacatctcaatgcatatatatcacatacattcggtctcaatcacgatgatataatcccagagtaacatgctatcacacctcatgaatcatatgcactttaattatgaactatacaatacacacaattactcatttgttttcaaaatcattttaactcctcgcacctcanagtgattcaactcatcgggttcccatagtggatcccatcagaatactcgtcgtgcaaaaactcgctgctcttaaagggtcttacaattgtgtgattgcacagttcatagttcacaactcaatatatacaanaatgatgtagctccatgtg

SEQ ID NO: 288427 - DNA, 450 bp, Glycine max
  unsure (1)..(450): unsure at all n locations
tgagatgaggaagtgtagaagggtgaaacttcctgctnttattcgttgaccacatagtggtacctggacatatgtcgcggtggtcaggagaccttgtggacgtcaggtggggtgctactgcccaaaaccaagcttgaccaatcccgacccaacccgggcatagtcagtcagtgataacctgtgatgtacctaaacaggcgagctcctggcagtcaatagataaaaggaacaaagaccacaaagcaaggaggcttgtggtggctggccagctgtgaattttgtgtgatatatgggttgtggcctctggtaatcgattaccaagggtgggtaatcgattacaaggcttgaaaatgaagacaggaggctaagatggtctctggtaatcgaataccacggggtgtaatcgattaccangcttgaaaacgaggtcaggaagctaagggagcttct

SEQ ID NO: 288428 - DNA, 442 bp, Glycine max
  unsure (1)..(442): unsure at all n locations
agcttaactcatccaatcatggcaagttcaacatgctttcaacaaattgcttcacaaataactatcatgaagcaganaactagcaaaactacccatcatatctcccanaaccccatacccacgaaaatcaagagagaaacaagtccacccaaacctgaaatttcgaagtctcacacgtagacacgcacttcacgactccgaanatgccctcctttcgcgatttggagcagaaatgggcaccaaaggttgaagctntgttggagcttcaatggagaatggaggagaacgaanaagcaacgtgaggaagagggagagagangctttgaaaatgtggggctgagtgaggagagagagangttgcttttggtttanaaannaaaagcttttcctctnttcttattatttatttaagctatgccacatgtctncatttgagtggagc

SEQ ID NO: 288429 - DNA, 474 bp, Glycine max
tggtttgaggtacttacccgttgaagactgaagaaaacgaagaatggactatgaatcttgaagaacggtcgagaatcttcgcgtaattactcacggaaacgttacggaagcgcctcggcttggattttcttcatggaactaattttcctcagcaatttcgagagagagagaagtgcctaaggggttgaacccttttcttcttcacttctccccctatttatagcaaaataggggttgtatatcctcaaataataatccccggacaaaattagggtatgacagttgcccctctttacttacctctcatcggagataagaggaaagcaaagataggacactgatttcgtccgtcctgcccttttccgtgatgacgactctcgtctctactcctttcttttttcttctgcacaaaacaaaatacatacaacaaccagaacaacgaatataatacacatatacacatatacacatact

SEQ ID NO: 288430 - DNA, 434 bp, Glycine max
gctaactatatgcattttgtaacttggtaacccagctggccttgtatcatatatctggtacctgtcgcaagagtctgtggtttatggctctctgctgaccaccatacataccttttgcctttcatggcgcaacctggaacaatagagcaacctgaagcttatgttgcaaacatttacaatagacactctccacctcagctacaaaatctaccgcagcagaacaattatgacctctccagggaccattcgttgttgtgatgcgacccctatttgaccacttggaggtgcttggcacccatcgctatgcgatttgtgatagttcctgacatgccgcgaatctaaagaaacactgtgcacaaaacccgtagattcccgcatgtgcgagatataaagagaagtggtgtgtactctcgaagagtttgcacttacgggat

SEQ ID NO: 288431 - DNA, 473 bp, Glycine max
  unsure (1)..(473): unsure at all n locations
gacctatagatactaagctgnagaggatgcttaatggaggaaaagaaagagggagagaaagttagatgtgggagcacaaaattgaaggaagaataagggagagaattngaactttgagttgtgtctcacaagactctcattcatcagttacaacaagtgttacacatgcttctatttatagactaggtagcttccttgagaagatttcttgagaaaacttccttgagaagcttctttgagaaaacttgctatagaagctagagcttagctacacacacccctctcataactaagctcacctccttgagaagcttccttaagaagattcctatagaagctagagcttagctacacacacctctctaatagctaagctcacctccttgagatgagaagcgagagcttagctacacanccctataatagctaagctcacccccatgacataatacatganaatacataataaaagt

SEQ ID NO: 288432 - DNA, 423 bp, Glycine max
  unsure (1)..(423): unsure at all n locations
caagcttgagtttatttatgagttttctttgccctttaattcaactcaatggaagcaacgaaagaacttgtatctccaattccatgcgatgatggacaccttgttaccgttcttagtattgatgggggtggcattcggggaatcattccaggaattatacttggcttcctcgaatcagaacttcacgtaatatgctaactatataaataggtacaaattaaaaaaaaaatcattcactagagggcttanactctanagtanataaatttttatatatactttgttgtaagattataattatctttataaaaactntatttattgaggggatttgatcccttccttccaccctaatgctagtattaaagtaactttctagttacgtcgtgcatcaaatatatgctatgatcgtatatataataa

SEQ ID NO: 288433 - DNA, 438 bp, Glycine max
tactcaagctggaactataactttgatcgttctttactcctctcaaacagaatatcttatggacaatcaacaacaacttccatatagtaaaccaaataccatgtgattaacggttagtacatgttcgatttgtcgtttgcacagctccaaatgtccgttcatgcgtttcaaaatgataacaaaataaataaataactacactgcttgattgacaaaaacatgcattacgttgaacctaacattgtttcaaatacaccttatatatgtcaccgaacgattgctaatgatgatccaaatttaagattataagaaataactttgtttatagtaccggaaaaattgagtatgaaactttgacaaacatattacgaaaataatactatatagaaacaataaaataatatatatatttataaatactctaacatttatcttcat

SEQ ID NO: 288434 - DNA, 392 bp, Glycine max
  unsure (1)..(392): unsure at all n locations
agcttgaaggtttactagatgcattggttaacttggtaacccagctggccttgaatcataaatcggtacctgtcgcaagagtctgtggtttatgctcctctgctgaccaccatacatacctttgcccttccatgcagcaacctggaacaattgagcagcctgaagcttatgttgcaaacatttacaatagacctcctcaacctcagcaacaaaatcaaccacagcagaacaattatgacctctccaggggaccatccgttgttgggatgcgaccctcattngaccacttcgaggtacttggcacccatcgttaggcaatttgtgaagttccatgacgtgccggaagtcgaaagaaagcattgtagcacgatccgtgaagttccgcgacatgc

SEQ ID NO: 288435 - DNA, 476 bp, Glycine max
  unsure (1)..(476): unsure at all n locations
gggagaggatgcttcaatggagganaaganagagggagaganagatagaggggtgttcacaaaattgaaggaagaaaaagggagagaatttgaactttgagttgtgtctcacaagactctcattcatcagttacaacaagtgttacacatgcttctatttatagactaggtagcttccttgagaagatttcttgagaaaacttccttgagaagcttctttgagaaaacttcctatagaagctagagcttagctacacacacccctctcataactaagctcacctccttgagaagcttccttaagaagattcctatagaagctagagcttagctacacacacctctctaatagctaagctcacctccttgagatgagaagcgagagcttagctacacacccctataatagctaagctcacccncatgacaaaatacatgaaaataccaaaaanaagtccctactacaatgactactc

SEQ ID NO: 288436 - DNA, 402 bp, Glycine max
  unsure (1)..(402): unsure at all n locations
agcttgatatcttatataaataatatattctcgatcaaaacacatggcgttaccttatacaaaagacataatattaaaaattcaagcacatgtaataacgtaaaataatgtgggaaaatacatatttacaactcacctggtcgatcgttagtttcttgaaactgtaaaatgagatgacctataagaagctagacattagacgtgacactggttgagtcagaagtgtatatctggccctatttattataattnttatctgcccccacatgaaatnttaatggtatttaggtaccgtagatatacatattacctgtaatatatatgcaatctctcaatacttatatngctgttattaacccatttctttgcagatttgaaagatataactctcttccacccact

SEQ ID NO: 288437 - DNA, 470 bp, Glycine max
  unsure (1)..(470): unsure at all n locations
tgaccttntcccatggactcaaggttcaacgcaacaggcttatcttccttgngtgaatcaaatgccgtctacagtatgatcatcactctatattaatttcaggtaaagaaaaatggtgccatttggatcgcataaacagcaactaccttataccaagtgagtgtttgattgcaagtattccctagtggactccattgaatagaactgttacttttttcttcgtatatttctaattgctctcccagtaatccaacctgtaataacgtacgtacatgacaccaatgtcctactgtccaattaaatctatacaacctaacagatttgcagtaattaaatgtgcttgagaataatatgcgttagttccacgaggaatacacatatataatatttaattatatataaactcatcataatacaagagcaaagcggacctgatatccncatgtagaattggtcatatcgtaggactc

SEQ ID NO: 288438 - DNA, 433 bp, Glycine max
  unsure (1)..(433): unsure at all n locations
agcttcatgctgtttaattgctccaggttgctgcatggaagggcaaaggtctgtatggtggtcagcagaggagcacaaaccacaaacccttgcgacaggtacagatttctgattcaaggccagctgggttaccaagttaaccaatgcatccagtttgccttcaagcttcttagtttcagatgatgcagatgggtttgtagctacctcatgcactcctctaatgactatggcatcatttctggcgctaaactgctgggagttggaggccatcttctcaattaaatttctggcttcagcaggagtcatgtctccaagggctccaccactggcagcatctatcatacttctctccatattactgagtccttcataaaaatattggagaagaagctgttctgaaatctgatggtggnggcaactggcacatagtttc

SEQ ID NO: 288439 - DNA, 454 bp, Glycine max
  unsure (1)..(454): unsure at all n locations
tgttccagtggcaaacaaaaggctcaggattcagcaatgtgtttatataggagcaggctgataaactnttagaagcaaccaatttgtggtactcagagcagagagatatctgttggttttcaccaatagaggaagatgttgctatgtggctttttgtctcgactacctctgaccttgattcttgccataatcatgtttcaacttcaagtagttatgatatacatacagctagaagttggaggcttgctcttttgatgaaaaatagcataatttttggaagtcccttggatctaaggtgctatgaagttttttctgaatttgaatatagttcgtcatgtgttgcttaattctgttaagatctttactggttttcacttcacatctagatttaattgggaagattgtaaggaaccattagttatatatcattttgagtgatatggaaggatataac

SEQ ID NO: 288440 - DNA, 321 bp, Glycine max
  unsure (1)..(321): unsure at all n locations
agctttcacattctcgtatcttctcatgggacttctatttggtgtatgtacaacactcttgctgcatattatctcgttcttttatgcaggtgtgactgatacatcttttattttcctataacttctttctatttttggttgtttgaataaccggttaaacccggtgaaccacccgtcctcatncgattacccagtttaattcttgttttactggttttagtctggttttctgggagggtggttcaatgttgctattggattggatgcctggttcccggttggaccagttgaaccggtcgatccgatcttgttttgaaaacc

SEQ ID NO: 288441 - DNA, 552 bp, Glycine max
  unsure (1)..(552): unsure at all n locations
agagacantttgataccatgcgatgcgactgacgcgacactatacactactcnggctaggaaggcactctgtgagcgtacagaacagggagcttacctatagagtgcaggagctcgagatgcagagctgactgatgaggtgcatatgaagaatgagctgaacacttgagtcatatcggagacactctcatctcactgacgttacaaacaccgcgatgggtcatcgcatgataggtgatagacggacgtatcatcctagataatatatctggccatcactctgacgagactcatggactacaattctggctatagcaactaaaccttaaattccctgaccactgtcacatctaagctcacatcattgagactggtccatgacatgagccctatcctaattagaagctacttacacacaccgttgtaatgggtcatgtcaccttcttgagatgataatcgggagcttatcctcgcacgcacataatggctatactgacccccatggccctatacatcaaatctcgtagtatcagtaccgtactcgatgactgct

SEQ ID NO: 288442 - DNA, 424 bp, Glycine max
  unsure (1)..(424): unsure at all n locations
agctttgaagtttgacttggtccttcagttagagggtcatccatcatgtaagtagccccaaaaccatgaatggaccccttatgaggcaaaacagttttcatagcagttgggtgttcccccgttatgttgttatggaaatagaagtggagttgggtgagtttttcttccacgggttctgtggatggatactgttgtgcaaacacttcactagttgcgggtaaggaacttgacatgataacaatgagatggaagccaaagaggagatacacaactgaagccatcttggtactacttttcggcatgttagccaatggttgcgaacaactatatatataggcagaagatatatgtaccttgtggaatactntattaaaaatgattatgtgtaagttattttaagtaaaaatgggattaaataatccat

SEQ ID NO: 288443 - DNA, 440 bp, Glycine max
tgtatgatgtttgtttggctacataatacctaatatgcggtgatctctctatctccaaatgttttgggctttctacttttcttgaagaatataacttgagtccacagtgtttcacgaaccatgttcttttggaaaaattgtatttattcatctgtcttggtgtaggtgaacttttgttggtaccacaatgtttttcataatataattagtatattcaatggatacaccgagcttaatccggtacattatagaattttctatactaacatattgtccaagactaagttcacagtatatatttataaaacaccgcaaagttacccgagatgtgaccacccatgtgaactgtactgaaggtcttcattgttaataaatgattccattgcttgctctaatcagcaccattacactagtttgtctgtgatctgttgatatctata

SEQ ID NO: 288444 - DNA, 349 bp, Glycine max
  unsure (1)..(349): unsure at all n locations
agcttcgatttctatgcctaagtcttgttgttggcactttactctagcctctacaattgtccacacactcaagatggcagccatatgtgctcaaattcgttccactaaccaagttgtacaaaaccacacacaaatgccattgaggcatttcactgaacacttggtgggcgcatgtttagacatgaataaatgaggaatggcggcaatgctacatgcccattcatatcagaacccaagatatgcctatggtcattctctacaaccccccaatttaaataacaactatggatatgacatacattgtctcatggattttgcanacatagacaattaaagcactaaaacacat

SEQ ID NO: 288445 - DNA, 370 bp, Glycine max
  unsure (1)..(370): unsure at all n locations
agcttctacatatgggactgngaacactctaagggcccttgtcctaatggtataaaatatatgttcatcatggatttatgggatgtaatgaaaaaatattttttggcatttcttgatgaattacacataaatgggagactagataaagtggtcagtagatcttttattgttctgttacctgaaaaaagaaaacctaatgtctatgggggataatatatccctgatagggtgtttgtataaaatgttggcacagatgtttgctaataagttaaaatgggttattgatgatgttatttccacaacccaatctacttttatatcagggaggaaaatgctggatcgggtactcattgctattgattggttcatg

SEQ ID NO: 288446 - DNA, 355 bp, Glycine max
tcaagcttgtccttggtttagacatgattgatacatgatttgggacttgtaggattcaatttgggcaaaattggatgagggaaagtgtgatttcgaaaatctgcactttatgcagaattttgctgtcaaataggtgcaacagaattttggctttgtgcagaaagtgttgtgtaattgctggctgtggaaagagtagtatagattgtgttctggacgttttctagcagattccaacggtcataatgtagatttatgtgctagagacttccagtaaaattttcgagtcgatccaactgttaacgaattggaacgaagagaatattactggcgtatttgaatgttgaaagctgtgata

SEQ ID NO: 288447 - DNA, 404 bp, Glycine max
  unsure (1)..(404): unsure at all n locations
tcctcggtgccattcctgcgaaggcaaacatttgtatagttagttttagtgggacattactcttaaagcaaaaatggcatgtaacctcctcccataaatacaaacatcaatgtaaatttagagcaagcttatgcgcatatttccttacaaacgttctcttgcacaagacatttaaccgaaaaaatgcacccatatacaatcaaggcagcttcgttacctagattatttacacgtacctccaagatgtatttgttacttacatcacacacatctctttggctaaattcacatacatgcatactcaaagcantttgnggtaccaaaaattgcacatgtgcacatcttggcatttctaatacctattcatacgcaaacttcatgatgaatcttgactacccacacaa

SEQ ID NO: 288448 - DNA, 435 bp, Glycine max
  unsure (1)..(435): unsure at all n locations
agcttacaactcatataatgtcacatcaagaattaatgacacacttattcacatccaaaactcattcacaatttcacatctcataatgttacaatccatcatcacaagttttcacgtatctcacaattcaacacctattctactntgcacttttactcaatctcaatgacaatattataatctcaaggcaacatattattccacaattcatcacatatttcatttataagcattgctcatgaattatacaatacccacgacctaacactcgtatttcaaacacgtttaacatattgcgctataatttaacactggttcctgaataggaaacctacactntctcttanacattgtgcatcanaagttnttctcaagataacactggtcagaatattgtataattcatagctcacaatataattattgtcacataaa

SEQ ID NO: 288449 - DNA, 432 bp, Glycine max
  unsure (1)..(432): unsure at all n locations
tcaagaatcaagatcaagatcaagattcanaattcaagattcattattcaagagaagacttaatcaagataagtatgaaaggacttttcaaaaactgagtagcacatggatttttcacaaaacatgtttaccaaagagtttttactctctggtaatcgattaccagattattgtaattgattaccaatagcaaaatggatttgaaaaagttttcaaactgaatttacaacgttccaattgatttcaaaaagttttaattgattacaatgttttggtaatcgattaccagtgcctttgaacgttgaaattcaaattcaaatgtgaagagtcacatcctttcacataaaagccttgtgtaatcgattacactgatttggtaattgattaccagtgaattgtttctgaataaatcanaatatgtaactcttcaaa

SEQ ID NO: 288450 - DNA, 449 bp, Glycine max
  unsure (1)..(449): unsure at all n locations
agcttatccattctacccattgaaacgatagatcctgaagaanatggggggaggggggttagcattatagaatagaataacagaattactttgatttaaatcctggcaaccagaagatagcattacctgccaaattggcaattcctatgcagacatttgcaatgtctgatggcactccagcacttttaaaaacagttgaagagaaataaaacacagcatttataccagatagctgttgtaaagcanatagggttgatccaataaaaacaactgctaaacgaacttgtgaataaaaaataacttttggaaacctaaggaaaccagtgaccagataacaacaatggcaaatacactcacaagtcacaactatcccagagacaaaccaggaaaaatgcatacctttagaatgacgaccatgaangcaattcgacagcttcacactatcacta

SEQ ID NO: 288451 - DNA, 455 bp, Glycine max
  unsure (1)..(455): unsure at all n locations
tgttgctaatgctggacagatcctcttangaaacctggtaaattgtgagagtggagatttcttatatggactgtatgttcattntttgttgtggactctcttcaataactaagctttattacatgctcaaattcatgtagttgtggactcaataattgcttatagcatgagaatgatgaggagattgaataactatttgatgattcaccctgtaccttcgttaatttttcactttgttgcaacaacaaaattaaaaaaaaaaaaaaaaaaagagcttatcaactcctttcacacttcacaggaaaaagagcctgaaacttgtgtaccacaaacaagttctagtcattcccaagttttcattgttatttgttagtcctcgtacacaaaacttgaattctttgaacttgtttgaacaaatacttattagtacttanatttcctccatttctaaatat

SEQ ID NO: 288452 - DNA, 408 bp, Glycine max
  unsure (1)..(408): unsure at all n locations
agctnntgcgttcgatttcttagtgcaattctccattctcaacctttttcggagccccatggattgagttttcgttcatgcgtactccaccttcgagtatggagccatgcgtagtgattgcttagttcaattctccattctcaacccctttttcgcagccccatgaattgcgatttggttcatgtgtcctccaccttcgagtctggagccatgcgtagtgattgcttagtgcaattctccattctccaccctttgtcggagcccatgaattgcgtattcgttcatgtgtcctccaccttcgagtttgaagctctgcgtagtgatttcttagtgcaattctccattctcaagctttatcggagccccatgaattgagttatcgttcatgcctcctccaccttcgagttt

SEQ ID NO: 288453 - DNA, 426 bp, Glycine max
  unsure (1)..(426): unsure at all n locations
ntacagcggatgccactctactccaaattcttgaaggatatgttttcaatgaaacataagtatattcaccaagaaaacattatagtggaaggacattgtagtcttgtgattcaaaagatccttccacccaagcataaagaccttgggagtataactatttcttgttcaattggagaagtcactatgggaaaagctcttattgacctgngagccagtataaatttaatgttgctctccatgtgtagaatgttgggagcgttagagatcatgcccactagaatgactctacaattggctgaccgctccattaccagaccatatggagtaattgcagatgtgctggtcaaagggaaacatctcatcttcccggtagacttcgtggtattggatatttgtgaatatactgacattcctgtaatattggga

SEQ ID NO: 288454 - DNA, 376 bp, Glycine max
  unsure (1)..(376): unsure at all n locations
agcttgcncacttgtcttattctatatgaagggctctgatttcttgagtagtttgtagaatggctttccctttttggtgagctttgggaagaacctggacagacatgctagcctttcattcagcttcagcttctacacttcttggatgttggttgggttgcgcatgatcagtatggtagtgcatttgttgnggttggcttcaatcccctagtgagtgatcatgaagtcgaggaacatgcctctgtctacccaaacagtacatttatcatggttgaggcacatgtcatattagtgaagtttccacaagacttcttccaggtcagtcacatgttgggctatgctccgagacatgtctatgatgtcgtgcacatatacc

SEQ ID NO: 288455 - DNA, 407 bp, Glycine max
ctgaacatcggtaaacctttcatgtaagcttcttatggagttaatatcttccattatgcatgacagccccctatccattgaatgtctcaggtgttttactgctcttttaactgcaaagattatttatattacagtaggacaagtaccataggcactgcgtgatacatacgataatataatcctgtaagaacagaaaaaacaacccgacatgaagccacatccctaccctacaagacacgcattaactaaaaactagaggcattgttggaatcccatgtgctggccttcataagtctatcccataacaatctccaggcataagataaagctctaggagggattttaatctcccatagttgatggaagcccaggtgctggccttcataaagctgctcagctttaatgac

SEQ ID NO: 288456 - DNA, 432 bp, Glycine max
  unsure (1)..(432): unsure at all n locations
agctttgaagaaacaattacaagctatctacgtgaattattctttcatactttntgtaaatacttttaaagatacaaagctctcaaaacaccttgtatactttgagagaaaacactaaaagtgttgagtgttatatctatttgtaagatgattatatattttagttagtgtgaaaacttctaacaaatcttgttgatttgtttagagccagatgtggcttggtaggacaaggagtactgggttttaaatcaaggttgggggtagagcttgcaagtgaaagagtcagaagtggcaataagtaatacttgtaactntgataagttagtggaaacttggtgggtgctaagaattggacttagtctcgaggttgagacaaactagtataaattccttgtgtggtttttgttgttaactaattcataccctaatttc

SEQ ID NO: 288457 - DNA, 472 bp, Glycine max
  unsure (1)..(472): unsure at all n locations
ctcctttctgggttgatgacccagtatgggtaggtgacccagaatatgttgtangttgccttttggttattggctctggtagagccagtagaacctcttttccttttgtactggatcttcctcctctgccggaggaactagacaccataggaggcatcgggaattttctgtaaaaattcacgggtgagatagtcaggtagagagttggaagagcccttgatatattctatattaaaatcaaagacacttaaaattgcttgccatcttgcaaaaatctgttttgaggcaaggttttttacatccttctgtanaatgtctttggctgatttgcagtcaacccttactaaaaatttttgatttaataaatcagattgaaatttggaaatgcacaaaacaattgctaaaacttcttttttgacagttgaatactttaattgtgcaggattccagtgttntgaagtatatgcaatga

SEQ ID NO: 288458 - DNA, 420 bp, Glycine max
  unsure (1)..(420): unsure at all n locations
agctntgacttatccaatgaagaaaggtgggccatggtactgttttcttctttattntatctatttttttagggggagtttgatttggtttgaaagaaggagtaagataagaagtgagagatgattcactctgattgccatttgtttgagagaggtgctagagaattggtcgcactattaaatgggacaaagggaaatccttggacattttatcatagtcacttggtgagttntaatctaacacactcctacattttataaaacatgtattaatgatggctcaaagttacgtacaagtctgtggctgggtgctatttaatcgttggataactctaaagtgcttttgactacttacaataatttaaggatactcccatacctttgtgaataattactcatttgacattgtttacacatgac

SEQ ID NO: 288459 - DNA, 435 bp, Glycine max
ggtagtcattataagagaaagaacatgtgattagaattatgaatgttatgctagttttttgtcagattgattgtgaagaaatgcattaattgtaacccggtgagagtgtgatccttatttttgagagaaaacggctatcattaagtactgacttttgcatgaatctcttaattatggactgaatgcatgaatttgaggatgatgaaggccatgttttgattgtgatagccacttagccaaaaagctgaccatgtgcatgaatgatttatcccttgcacccagttttgagctgaatgaatgcttgattgattgaaccttgagcctatacagttttatcttctgctactttgtcttacgttgtaggagagcatcatccacagaaaagcttagttcaaggcagatttgtcccaaatttggggagttatatgtcaaaat

SEQ ID NO: 288460 - DNA, 413 bp, Glycine max
  unsure (1)..(413): unsure at all n locations
agccctatanatttttatatggcttgaaacaagcactgaggcagtggtacaagaagtttaatgagtttatcagcaactcaggattcaacagatgtgacatgaaccattgctgctatgttaagaaatatactaatagttatgttatccttatcgtgtatgttgatgacatgttgattgcaggatctagtatgacagaaattaacaggttgaagcaacagttggcagaaaactttgaaatgaaggatcttggtccagctaaacaaatccttggtatgagaattcttagaaacagatcagaaagaattttgaagttgtctcatgagaaatatatacacaaagttgcttgacaagttttaccttgaagattctaagaccaggaatacccctttgggatctcattagaagtttcaaag

SEQ ID NO: 288461 - DNA, 399 bp, Glycine max
cggcaaccgtttggtactagaaaacctacttccatgctttatttgtaaaaacatcttatataatcatgcatacaagtgacaacttattcatattctcctctctaatttttctctggcataaaaagcgaacaataaattcaaaagcatataaggagataatatgatatgtataaaaatatgccccttttcttcccagagacaatttcatctcattttataacaacaaagttgcttagtactaaatattatgatcactttggtgtgactactcagggaatcaccacatatgattacatcatagccttgagggagcacgagcaggagcaacaaggcattggaggtcagcagagtccccatatgtcgcctgttagctcccttactggaatgagcagtgcaagc

SEQ ID NO: 288462 - DNA, 435 bp, Glycine max
  unsure (1)..(435): unsure at all n locations
agcttatattttatctcactatccggcgtgaatggggttactgctttacatggaaaagggggggttttagaggctcagttttgtgttggacatattgacaatgatgatgcaaatgaggtttcaccagcttctaaaaggaaaaaagtcacagctaacccaaatttcacaaaatgtcaatcggaattgagtgctgtgattgtgccttccaccacatctgaagctcctatgagtttcagtgataaccaagaacatcagagagaagttgcttttgaaagcatgggtatgattattctgtctagtgctcagtcaatgccttattcagaggatattactaanatgcctgagaatgttttggctggnggatcttttgagtctattgatgcanataaggaaaccatgagttctgagcatttggaattgggcattcggatatag

SEQ ID NO: 288463 - DNA, 453 bp, Glycine max
  unsure (1)..(453): unsure at all n locations
tctcgctcttgcactttcaagcacgattgtctgtctccaatttgttatggctttcacgcaccttccatagtcatcttgcanacacatgctcgtccctgttatgtttttgttcatatggaagactcaaatatacattgcactctatccaaggcttcctccacgatctctttacactcttccagccatggagaaactcttcacctctcttaataatgactttctcattaaggacctccttattctcctaggttttatatatcattactccttcatatgcttccataacaacatggccatactttgttgatttgctatcaaccttgaaagcatgttgaagaacagtngattacatgaatctgcttgaaggatcgagccaacgataagcaaggcctatagaaaatattaacagtcgattactttaaatatatatgttggactgtttgctaacatata

SEQ ID NO: 288464 - DNA, 397 bp, Glycine max
  unsure (1)..(397): unsure at all n locations
agcttcctcatcttttgttggcagtgcaacctacccattttttagtcatgcacattgagggatgcaatatctgtggtgaggcccatgagtcaagcatgtgcatggtccaagatgatgtatccaaagaagtcaactgtatgatcattccacaccatcaagggttccatcaaggacgacctccaggatacaatcaggggggaaaattctctcagggccaaggttggagatcccaccccgggaatagcttcaacaaaaatcatggagtttcatctaatcagcctcccaatcaatggcctgatttatatgagataaccactaagctagaagacactctgaatcagtttatgtaggtttctctatcanatcataagagcactgagtctgccatcagaaatct

SEQ ID NO: 288465 - DNA, 439 bp, Glycine max
  unsure (1)..(439): unsure at all n locations
tcaggagacgctgaatcaattcatgcagatattcatgtccaactatatgatcatggagtcctccatcaagaacctggagatacaagtaagacaattagccaaacaaatggctgatagacccaccagcagctntggagccaacatagagaagaacctataggaggaacgcaggggggtgttgactagaagccagatgagagcgcaaggagaaaaagagaaagctaaaggagaatagtctgaggaaggaatgggcagacaaagaagaagagaatgaggaagaagagaagaaggaaaaagagacagattaatagaagaaggtcttaacctctaagaccaaaagccagctagcctgagaggctatgaaagaagagccactatcctctctaaaggagcccctatatcctttagtaccatcaaagaagaataagcatcactactt

SEQ ID NO: 288466 - DNA, 426 bp, Glycine max
  unsure (1)..(426): unsure at all n locations
agcttcttattgttccagatggacgtgatgggcgagcattcacccttagcgtgattcatttattatattttaaaagcgaatgagaattaaaatcaattatactacttttaaaatattttatttttttaaagattagtattaattattaatttattagaccatataaattctgattgttttctcanatatcacgtaggccgagacatcaaaagacctgtgtttgaatgaaagacaactcttatacaagccctcgcacaggcaccaattagtgctaccctttntatgggacacaatgggaattttcctgagtgacgcaagtaattctattcagttcacttctagaatggaagatatgcagctcttaattgtncgtttcatattataggaagtacatatcaagacgccaaacccgatatcactaattaa

SEQ ID NO: 288467 - DNA, 463 bp, Glycine max
tactgttagaacttcttcagatccaatctcatgaccaccatagacaaaaagtttccccccgctattattggcacaccaatgtagaacaataatagggagtcttctatcagctgatgataattgaagcttgacaacattgtttgacaatctttcaacttgttggtcagggggaaagtcagcagttgacaaatcccaaaacattatatcaccatctacataacccacaacaaccaccgatccatcattagatgcccaagatacagagcttatctccttatcctcctcttcatggtctaatttatcatcagaaagctgaaccctagagtcatttggataactagtcactatttttctcttcaatttgatgtccttgtggcctctaatgagaacaattcgatcttcagaagcatcccagagtaccatcaaaccattttcgtatgcaattagcagtctgcaaaatgac

SEQ ID NO: 288468 - DNA, 423 bp, Glycine max
  unsure (1)..(423): unsure at all n locations
gcatcttnattggtgccgaaggcatacttgagtacaaaaaaagtgaaacaaaattgcttaacctatttatttaattntacttatctcanactttntgggaagtgctacattattattatttttccagcgaggttgattgtggtattcttcggaggacaaggattagacatctagagcttaattagtgattgggacatattgttggaagtgggaataggaaattgatcaagctcaacaaactatgcatttatttaagcattcggttcatgtgatagtgaggcagcactcccatcatcaacaagttttgaggtcatttcctttntaaagttttttcttgtcttaatatatcatcgatcatatacaacttgtagatattgacctgttattggatcggatggangagaggtaatagagctaatacag

SEQ ID NO: 288469 - DNA, 427 bp, Glycine max
taaaccataatacaccatcttcaacccatgcaaaaccactataccgtagtgcatacagcataagcttaaagaatacagacaacacaaatatcatcgtgaatgatgagaagaatatccaaacaaccagccctctcttgccagttgatgggtctttaatatttgttgaatccggctagcttcaaccaattctaacaccgaccacgcaaccacaaagtgcatcctttggttgtactcaaaacagggagacttggcacatgtgaacctctggaacaagtttcattcagcacttctggttttgctgatagcatgtgccaacaacaaggggattgatataccatagcctaagaaatggagtactgggttcatctcatatagctttagaagagttctgcaattctgtaatggaatagtagtaaatcacaaaatg

SEQ ID NO: 288470 - DNA, 449 bp, Glycine max
agctttcaacatgagtcttcacatataaccatcatgaagcagagaactaacaaaactacccttcatatctcccaaaaccccatacccacgaaatttaagagagaaagaagtccacccatacctgaattttcgaagtcccactcgtagccacgcacttcacgaccccgaatatgccctcctttcgcgatttggagcagaaatgatggccaaaggttggagctttgtgtggatcttcaatggagaatgaagaagaagagaatggcaacgtgagggagagagagagctgtctgaaattttgtggcgctgagtgaagagagagagagttgctccttgggtttaaatgacagggtcttctctatttttctattattctattcaagctatgccacatgtcttcatttgagtggagcaagaatgcccactttcccttcttaattgtgactcatact

SEQ ID NO: 288471 - DNA, 465 bp, Glycine max
tctacttatgtggcagggcgggcttccttcaccttcttgtctcctacgctaactttgaccactgttcttccttcccgcgatgcttcttttcacgtccgcctgagtgggcttatagcctaaaccatacttcccacgatttccttgggtatttatcaggctagttatgccgccgttgcttctgcctaaacccatcctgagttcataaccgttccccaacataactcgggccatcattaccgctgcatcggacatacaaggctgcccatagagggagtccacggatgaaatgctgaccacctcgaaagactggagagcagtttctaacgattcttccgcggcttccacattaggcatggaggatgggcagctcaccaagatattttactcgtctgcacgatgaccaagtgcccctccactacgaatttcaacttttggggagtgtataaggcacaactcccactgaat

SEQ ID NO: 288472 - DNA, 324 bp, Glycine max
  unsure (1)..(324): unsure at all n locations
ttgcatgcaagctngctgnctacagtttgttgatgcacctatatcactatgggtagtggcggagactgcagttgtttcgcccatgacaatggcgaaccatgcatgcatacatagttgctcctgtcacgctagacctagcctgctaccctacctttgcgcctaccctgctgcaacgccaaacctatcctgctcccctccccctgcgtgcctacagtgcctgaggtgtatcatcattggcactggcgataccctccccacgttagggctgacctatatngccagttgcagtggcaaacatcactggctatctcgccagcgatagtg

SEQ ID NO: 288473 - DNA, 576 bp, Glycine max
  unsure (1)..(576): unsure at all n locations
agcctcgtcgtacntcanttccgaagacaccgcacggtacgcatccgctcactacatataannaaannannaagagggnttttgatgcctcctagacngaccnatanatactaaagccggaacaaatagaccgacaagtcgaacaccacaagcaagggctgttctagtattgacgacgagacggagcctgcgaacacgtcgccagacagaagcggcaaccgctagaagatcaccttcagcagaacgcactctatcacacgcagcgaccggacattcggagcgcacgcaactagaaagaccaacgctacacaggcacgccaaacaacacctctctttcaataacaaccacgcgcgcaccagagcgagcgacctacaacccgaagagcacgtccaaccacccgaagacttaacgagcagatgacaatgagctgccgcaagcttgacctgatcatccgagatcgatacgaacaatgaccacacacacccatgggagacaatgcagcaaagactacgcatactcgtgacaacaggcacataccgagaccctggacagaggaagtgaacggacaccacacg

SEQ ID NO: 288474 - DNA, 367 bp, Glycine max
  unsure (1)..(367): unsure at all n locations
gccggaggtattaattgatattcaccancanaatgggcacactgaaggaatgattggcacacctgataagaaatagaatgataactaaacttactgaatatacaagcagtttgagaacaacaacttactactaaatggagtaactggaatgaatgtgagatgtagaaaccttcaaagatgtgcacacccatgagacttttgtgacagattatgcagacctcacacccaatgggtattacagaattattcccaaagatacagacaccaaggcatgacaaaatctattatactgatcacaattccctgtcataccgatacagtatgaacaatacggacagacaccggaaccatttataagcttaaagta

SEQ ID NO: 288475 - DNA, 442 bp, Glycine max
  unsure (1)..(442): unsure at all n locations
agcttaataaatttcctattgatccacattgtgtatgtatgattgcatggaatgagatgaaatgcaaaattgggaattgattgttagttgtttggatgaacaaacacttacctgaaacacttgtgtgcttgagataaatgttggctttgtgaggaaagaagcttagttaaccttcctggaagcttgacatacttgctaaccattttcatctctaaagagtattattgcatgcttctatcttgagattatgacaaatgctaatttgggggagatgatgatctgtgaaatgtatgcagtcatctcagatattgtggttggtactttctgaacaggtcattaatctaacttagcatagttagctctcttttgcttgngacaagcacaactctaaatttgggggagtttgataattgatgtacataagtagattatgttattaaaa

SEQ ID NO: 288476 - DNA, 474 bp, Glycine max
  unsure (1)..(474): unsure at all n locations
tctccctatgacaacccaccattcatctttgctggagaaaaagtcaatatctaaaggatgcatgtggttatacaccaagtttggtcatgaggggtcattgtagaaggacctaaaaatccaatatttgatagtgcacgcccacacttnctacaacatactacttagtagaccatctntgaatgtgatcggngctatagtgttcacccccatttggctatganattccccccaaataaaggatccatcataacagtccacaacgaccagaggaacgttagggaaggttacatggtaagcctcaagattaaccgtttggtaaaaagtgagtcgtgtcgaactgtgcactatgtagaaattatggtagggacctgttatgacttttggcaagcgtaccaattgtcactatagattntacatntataaaagagttcgtctccacagggactcgagttacttaattcattcggataaagg

SEQ ID NO: 288477 - DNA, 334 bp, Glycine max
agcttgatcattacaattatctaatcattccaatccactcaaatcattcaattgctcattcaaatcatactcaaacactcatttcatactaaaaaatccactgcatatcattgtcaatcaattcaatgttcaaacacgctcttggtagaagcaaacaactcatagtgctgaaatttaaataattgaaatttaaaagaactgaaatataaaacctgaaattaatatgactaaacataaatcataaaatatctaagaataaactaaaattctcaagatgcataaatttaaatgtcctgctcatcttgtggctgatccaatgctggagctgctgatg

SEQ ID NO: 288478 - DNA, 463 bp, Glycine max
ctataatactaagctcgtaaagttctccttctttgtttcctgtatacacacaagatccactcttatgctttaggttgagctttctaatagcagcccatttaatccctctgcccagtcctctgcaattataggagagtattatcatgattaataatacatgaagttcatgaagttctccccaattgcatttgtcatggtattgagaagtcacaacatcaccaaactgttttccagttgccatttttgaaagttgggatcccccttttctggctgtttggggtcacccgagaataaggtacaatggtgtgtataaatatgggtacaagactgattctgtcactaatttagagctaaaatcaggaaccaaaatccctataattgttgaactaagaaggaaagaaatatagcacatctattatagctgacaatcagatcgaatgattttgctaattctcgaatcatc

SEQ ID NO: 288479 - DNA, 181 bp, Glycine max
aagagccggacgggaccacagagcacgcagcagcaacctggggaaacagacaagacacaggagcgaggtgacggagaggaaccgcacgaacacacaaagaacgggagcaaacaaaaagaaccacacacacatagcaggacaaagaaccaactaagcagaacgccagcccgacaagagaaac

SEQ ID NO: 288480 - DNA, 431 bp, Glycine max
  unsure (1)..(431): unsure at all n locations
agtgtttcattctttagttgttttaaaaactgaaattcgtatggcgcgcttagcatgcccatgtgacgtttgagtttaaaacccaagcgcttagcctagcctcacgctaagcccaacttgaagtggtaaagtccagtgagcatctggggcttagcgcagcaggctgcacttagcgctttctgcaacacaaaattatctgcaatatgctcttagcctgatatgtgaggcttagcgtaccatcaagcttcaacttacagagagtagttcatgcttaacgcaacaggcgcgctaagcgcacttccatgaattcaaaacttgtaagagattggcacttagcgcttcttgtcccgctaagcccagcttaagaactcatttacaaaatggatctanggcttatcgtaggatagcgcgcttagcgctgctataataaa

SEQ ID NO: 288481 - DNA, 452 bp, Glycine max
tcgagaattgcccaaactccctctccatttctgatttaggcttttattgtggccttgttggtgcttgtgtgcttagcgcaactctggctcgcttagtgcgcattagtgaatttcggcttagcgctcgtcttttcgcttagcgaatggacttaaatggtgcacttaacgagattagcccttgctcagcgaacatgcatagctcattcttctttcagattcttcctcgcgctcagccaaaggagtgttgcactcagtggatggctcgctaagccaaaagattggcttagcgagcggatgataattagcatttcacagacttgcctaattaacctgaaattgagaggaaatgattgttaaacacacaaaatgggagtactaagtatttattacctatctttaacaaaaagtaattacaacactacaaaataaccataaattggaggaatttgata

SEQ ID NO: 288482 - DNA, 488 bp, Glycine max
  unsure (1)..(488): unsure at all n locations
gagggactttgatganctcagacctccanaaccaaaactagtcgtagagaccaggttatctagagagaaaagtagtttttagtcaagagcctaagcaagattggactgatgagacatcgcccaaagaccgtcattatcctctttttgatagggcctacacactcttcccactacatactagtgcactcaccatctttgactgtgaccaggtctatactggtctcccacctcacacactgaaaataccctccaataatcgatccatcataaccgtcctctcagactagagagactgtagggaagggttcttggtaagcccaatactagccgttccgaatacagagacgcgagccatctgtgcacttattagaaactacggatggcaactgcatagactctcagccactccacctaccgtaactatatacatacacttttaagagactcgactcgataagacgcgagtaacctattaactcggatgagcg

SEQ ID NO: 288483 - DNA, 426 bp, Glycine max
  unsure (1)..(426): unsure at all n locations
agcttctattttagctgaaccattntatcaataaacacacgttgagttttattcagacaattagagtttatctcttttatcttagtgagagtgattctcctaaattcttgagtgattcaagaacaccttggctgtatcaaaggactttcacaacctttgtgtgttgccctcgctggaaagagtgattctttccttcctttcatcatcacccttgatctttcaaaccacaattccagacgatccacctctgcccagaattatctcgaggccataactcccattttacgcactcaaattaagtgattcttgagcctaaattgaatttcagaacgagacctttcacctcgttttgaatcacctcatttggagccctgtagcttcagatatcggcatttctatatttctgtccacgcaccacttaaccta

SEQ ID NO: 288484 - DNA, 449 bp, Glycine max
  unsure (1)..(449): unsure at all n locations
tgccttgccccatgatatatntgagggacttatgatcactatgtttgactaattccttgngataaaggtagtgttgccatgttttcaaagcccgtactaaggcatacaactcctaatcataagttgaatagttaagggtaggaccacttagcttttcactaaaataagcaattggatggccttcttgcatcaacacagccccaatcccaacatttgaagcatcacactcaatttcaaaagaattttgaaagtttggcaacgcgagtatggtggcattagttagcttttgcttaagaacattgaaagcttcttcttgtttctctccccatttgaaaccaacattnttcttgagcacttcattgagaggtgctgccaatgtgctaaaatccttcacaaatcgtctataaaaacttgctaagccatgtgtcgcaacctacccttcggcggga

SEQ ID NO: 288485 - DNA, 440 bp, Glycine max
  unsure (1)..(440): unsure at all n locations
agcttccacaatatccaagcaatttaatatccaaacatcatgaactaccctaaaccaagaaaacagggcagaggcagaaaactctgtccaaaacacattccaatagcacagctttccctactcaaataccccagtaacattctcttcgcttcgattcgttaaccattggatcgactcgaanattttactggaggtccctagtacataagtctacattttgaccgttgggatcagctagaaaattttcagaacccaatatgtactacctttcccataaccaataatgcataagcattttctgcacaagaacaaaaattctgctgcacaattcaacaaccaatttctgcataatagggcaaatnttcgaaatccctcttgcccttcatccaatttgctcanattggatcctacaagtcttaaatcatgtatatatcatatct

SEQ ID NO: 288486 - DNA, 446 bp, Glycine max
taagctccttcaactgcacaaggctcttaatatttgaaaagtattcttgtggaacattcacccgacgaagacactgacaaaaacttatcttcttctttttggacaaggtatggcaagctgggggcaagaaaattttcttcccatcagaccttggatgcaactatgatcatatccccatatcagctagatcttgataggtattcaagtcatccttcgtcttgccttgaatgttaaggagcgttccaatcacactgtcacaaaaaattttctccacattcataacatcaatacaatgtctaacgtctagatcagaccagtacagaagatcaaagatgatggacctcttcttccatatgcaactattacttttatccttcttttgggtctttccaaatacagtattcagggtgttgaacccgctgatatacctgctcaccagtcaacag

SEQ ID NO: 288487 - DNA, 376 bp, Glycine max
ttcaagctttggattgttaatcgcaccacgtttcaagaagagtagagggcgccacctttgctgagtggttatattagcattttgttagttgaaataaaggctcaaacttgtgttaaagtggttgttaattggatttgcaccacctataggcttgttctaatttgaagaaattaaggtttaataaggtggaaactctaggcttgtggctgtctcttggctgaccaggagttgtgcatatttacacatgctttgtgtcttaattctagttttgattaggtataatggcaccaccaattgttgatattggtgatcatttcatcttctcactattgtaaccaacttgatgtcattcctatttataggctacacattttct

SEQ ID NO: 288488 - DNA, 427 bp, Glycine max
tcagacaacatgtcataatagattacgatggacctgtaattaattataacaaagagtttttgcctcttgaagaaacttttcttcacactaaccatgatgatgaatgatgcaatatagatatcatatgtactaagatgcaacatacaagataaaaaccaatacaaatgccactcaagggaattaggcatgtaaaagtcaaaacatcttcaaaacttcttcaagcttttccttgaaaggttgattaccatgtggctcatattgctccttctatctctaacaatgtcatcacaataaatggcatggaagtttggaaggtaaagcaacatacacatatgcatcgtactaccactcattatgatatcaatattacacacttattttcctcgtacgtcactatcaccttcatagagtataataatcatgtcta

SEQ ID NO: 288489 - DNA, 361 bp, Glycine max
  unsure (1)..(361): unsure at all n locations
ttaagcttgtaatgttaagaaaagagcaacgcacacagtcatataatacggaacaagtattaaaaaaaacatataaatataaaataacaaaacaaatcaaaacaaaaactataagcatataaataaagtgtgtgtgttgctatttaagacaaagaaaagctaagtgtggaaaggcaagtaatagagctggaataaaatgacaaaggttgatctatggatgaatgctttcttagaacctaagcttttgcatactatagaaaccatgaattgattgcagcccaggctcgttacaagcctaaaaaagtccttcagattcagttngtgtgttctcgactatatggcaagagatgaattgaaaaga

SEQ ID NO: 288490 - DNA, 402 bp, Glycine max
  unsure (1)..(402): unsure at all n locations
ctgagatggtatctggtcttagaanttaatttgctaagatcctattctgtgcgattggccaacctgaggaatggtgtagtcttgctgctgactacttgcattgtggccccctgcagctcccattcatatacctagggatgcctataggtgttaaccctagaaggaaggtggtgtgggagcctataatcagaaaanttgaagccaaattgaacaaatggaaccacagaagcatctctatggctggcagaattaccttaatcaatgctgtcttgacagctttgcccttgttttatatgtcttntttcagggccccttcagcagtcatcaagaggctcactactatccaaagacaatttctttggggtggaaacttggaaggaaaaaagatagcttggatctcat

SEQ ID NO: 288491 - DNA, 444 bp, Glycine max
  unsure (1)..(444): unsure at all n locations
agcttattattgtgacgttgaatganatgcattntgtcaaagttntgttaaagagctacaaattanagtgtggcttanattataatatattatttttttataacagagttgaaagatttgaccgtgcactntatatatccatctttatgagtgaaatttcttcaaatcttanataaatgaaaaaaaaaagagccaatataagctataaattaattaagaaaggaagaaacctctcttcttggaattggatgactactgagttgtgatttgtctttaattacttgcgactatcccatgccaataaactgaaagtgagaaaagagcagattaaggaagaagcaagctaaacatgatngaaggatatggatatggatatggatggcgtactaccattccgtagaaaaccaacatggagtaacgaagcangataatactgagagcatg

SEQ ID NO: 288492 - DNA, 457 bp, Glycine max
  unsure (1)..(457): unsure at all n locations
tgagctgctgattntgatgtatatcttgagttaatataaaatctataattatcatctatataataaggatttcgattcaactatggcagaatcaagatatccttttccctcctcttccacattccctaattattgctgacaaacttgatgattcaaattttttgctgtggtgacagcaaattgaaccggcgatatcatctcacatcatcttcagtgttgtgttgtaaatccagcgattatgtgtggaaaccaagtccagcaatctgtggcatgctagacttggtcatccaaactttcatgtactgaaacttgttctacaacactgtgacgtatgtacctcctgttaataaaaatgttgatgtctgtgcttcttgttgcgatggccagtcacatacactcccttcatctcctgccactactacctatggtgctccttcggaatcgattttagtgaccc

SEQ ID NO: 288493 - DNA, 411 bp, Glycine max
  unsure (1)..(411): unsure at all n locations
agctttaccattaatttatattgatcaggagtaaaaagggggaaatcttgatctcctcagtctttagtaacaagcaccgtcttttactgtatcgttatctacttttcaatgagtgtgcacttttgtccattaactaaatttcatataagaacaactaagaaatgaatagcaaggttactgagttgaatcctgtgatcctacaatatcaaaactcatcctgcagtggtagtattgcttagaatcatcgtagcgagtatgatgtgattattattacctatcatcacattatcaaagttgttgtaatcaattctaagtctattatatgaatgtntatttgatgtaatccattaaattatcatggtgatatctttatggatgagctattacgccaaagctatattaccttctgaa

SEQ ID NO: 288494 - DNA, 460 bp, Glycine max
  unsure (1)..(460): unsure at all n locations
ntgtactttttaatgacctggattggttttggtagtgagatntattgttggtgtggtagttgttgtttacaagggtagagaatttgaagggtgtagattgtttgcctggccagtggccactattgtagtgttgcacatggtgtgcagtttggtttggcttggtttggtttcattggtctcatataattgtgctttttggttgcagctggggccctgacaggagctatagctggtgctctagcagctaaagccactaagagtggtcttctccggggagttacattgggtgccattgccggctctatactctctgtggaggtgttggaagctatccgtgcctattggtgtatggagcaaactggctcacggagtgcatcatctatgtgtggtagtcattctcttcttgatttccttggtctctttgtgagcacaatgatttgtattaactctcataattatg

SEQ ID NO: 288495 - DNA, 394 bp, Glycine max
agcttctcgatctattatgcgcctgaatcggacctccgagttaaaagttatgaccattaaaatttctcaagagcttccgttgattaattccgtgcgtctcgatatattatgtgcctgaatcggacctctgagctaaaagttatgaccatatagaatatctcgagagcttgcgttgttcaatttcatgcgtctcgatatattatttgcctgaatcggacctccgagttaaaagttatgaccatttgaatttcttgagagctctcgttgttcaatttcgagcgtctcgatatattatgttcctgaatcgaacctccgagtgactatttatgaccatctgaatagctcatcagcttccattgttcaatttggagcatctcgatatatgatgcgcctg

SEQ ID NO: 288496 - DNA, 388 bp, Glycine max
  unsure (1)..(388): unsure at all n locations
ctcaagaaattcanatggtcctaacttttaactcggaggtccgattgatgtggtttttatatcgacacgctccaaattgaacaatggaagctcttgagcaattcacatggtcataaatagtcagtcggaggtccgattcaggcgcataatttatcgagacgctcgatattgaacaacggaagctctcaagaagttcatatggtcataactattaagtcggaggtccgattcacgcacataatatatctagacgcacgaaattgaacaacggaagctctcgagaaattcaaatggtcaaaacttttaactcggaggtccgattcaggcacattatatatcgagacgctcaaaattgaacaacggaagctctcgagagattcatatggtc

SEQ ID NO: 288497 - DNA, 421 bp, Glycine max
  unsure (1)..(421): unsure at all n locations
agctnggatatatctatcttactcagcctaatgtatgagaatgactattacagtcagtgttaagacagttctccctaagatcaataatgctaaagagtttatgggattagtgagagagcgctctcaaacaactgataagtctcttgctgaaacattaatgagtacactgaccaccatgaagtttaatggtttgtgtactatgcatgaacatgtcattgagatgacaaacattacagcaagacttanaaccttccttgatcagtttatttttaacttattaccgtttgagtatggctcattccaaatgagttataataccatgaaacataaacgaaatgtgcatgaattgcacaatatggtagtttaagaaggaacggtgtttaagaatcaagatagtcactgagtccattatgtaagacac

SEQ ID NO: 288498 - DNA, 456 bp, Glycine max
cgtgatagatatgaatgttcaaaaccaatacaagagagagaattttattctttattttattctaatcgaccataaaaagttaaataaaaataaatgtggactttgaaactctgattatcttcgttattattatattagttaaattaaacaattttagtaaggacgtctagctagctcaatagattgatatagtatttaatttctgtggataaaaaaaatctttgtttgatactttaattttattctattctaaaagaaattatttttattaatagcttaattatataattcgtcatttaattataattaaaaattccattgagttcgtcaattattaaaacattaaaatctcttaattgtttaaaacatttccgttattattttttgtccattacagaatcaattatataattgagtcctttattaaattaatgaaattgcacatgtgatcacaca

SEQ ID NO: 288499 - DNA, 192 bp, Glycine max
agctgttacaatatccattctattcaatttcctttgtcatgacaccacgctctaccatgaaacatagagcggaggcagagcactctacacatgtctcattccaattccacagctcttcctactcacatacctcactaacagtacattcgcttcgaatcgacaaccattgcatcggctcgactcataaactga

SEQ ID NO: 288500 - DNA, 241 bp, Glycine max
ctataaatctaagcttcttataagctgaaccattgtatcaagatacacatgttgagttttattcttattattacagtccatctcttttatcttagtgagagtgattctcctaaattcttgagtgatgaaagaacaccctgtctgtatcaaatgactctcacaacctttgtgtgtggacctctgcggatagagtgattctttccttactttcatcctcaaccttgttctttcaaaacacaat

SEQ ID NO: 288501 - DNA, 405 bp, Glycine max
  unsure (1)..(405): unsure at all n locations
agctttgagttttntcaaccattgaatcaaaattctaatgtatatgtatatatctatctatatttgtttaccaatgatcgaaattttaatttgacaacaatgattgatttggtactatatgtaaaggaagcttaatactttgtcagccgttggttataaattttaattaataattattgatttcattcaataaatatctagtatacttaaacatttattgttgaatcaaaattctaattctataacaatcattcatatggctattgtaaaaatatttgtagaaaagacatccaatattttatgcaacggaatttttttgtaaaaaagtttacacatttacaacaaacagaattttttactcccttgattgtattttactcccatcgttttataatcaatttaaaa

SEQ ID NO: 288502 - DNA, 467 bp, Glycine max
  unsure (1)..(467): unsure at all n locations
tagcgcgaagaagatccacgaagaagcccanagacatgctttgctcaccctctacccacacaaatatataataataataaaaggaaaaataatgcgggattaattaaaagttttaaaacacatttaaataaaaacaattcaaaaagataaaatgtttaaatccacttagtgaaatcataatataacttgttcgaataaatgataaaattgtcttggctcacaacaaggccacccattttaaatggagagaagtcacactaaaacagaaaacatataataactatatcattcatggatttataacatatgaaataaaatgctatgactcgatgttgcatatatcagaatattttcttgtcagaggctaagtctctccatcttcactatagaactcatcatatgctaactcacctgaaacaatatggtaatcaacccaaacacaaacacattgtgagtgagttatcaca

SEQ ID NO: 288503 - DNA, 428 bp, Glycine max
  unsure (1)..(428): unsure at all n locations
agcttctagcttaatggacttaccttgacttaattccttttatagcccttttgagccttgtttccctttccttgctttgaagctcactacaagctttaagtgaaaaaccatgatatcaccatatccttaaggaattttggagctttggaactggtttgggaataagtgtgggggtttttgtttcattggataacatgttttgttggtcatgcttcatgatatattatgagccatacttgatgtacattgcatattggttaaatgttggacatgctgaatatgatgttgtttctcaaaggctacagagtaaaacaaaaaagaatcgaaaaagaaaaagaacagcagtagagatgagtgaataagatcttaaatgaccaaagaatgatgagactcttggctctactctntatgtctaaattttatcttta

SEQ ID NO: 288504 - DNA, 465 bp, Glycine max
cttcttggtgggttgatgcactctatctcgtagaatggtatgatcactatcagacatattctcaatcaattcagttgcctcttcaagggttttcaattctatcttccctcctgctgaagcatctaacaactgcttggtttgtggtctcagcccatctataaacatgttcaattgaattggctcagagaatccatgtgtgggagtctttcttaacaaaccccgaaacctctccaatgcttcactcaaggactcatcagggaactggtgaaatgatgaaataacaactttcccttttgcagtctttgactcggggaagtatttcttcagaaatttctcaacaacttcctcccacgtcttcaaatttttgcctttgaatgaatggagccacttcttggcttcccctgccaaagaaaatgagaataaactgagcctgatggcatcatttggcactcctgcaatctttat

SEQ ID NO: 288505 - DNA, 438 bp, Glycine max
  unsure (1)..(438): unsure at all n locations
ntcatattcatatatagatcattgcaacttgcaaacttcattacaaccagccaatgatgtgaattcttcagtttgtgtcatgtacacttcctctttcaactcaccattaaggaaagttgttttcacatccatttgccatatctcataatcatagtatgctactatggcaagtagaatccgaatttatttgagcattgccacaggagaaaatgtttcgtcataatctattttttgctgttgacaatatcctttatcaacaaggcgagctttatacgtctcgacctttccatctgctccaatctttttcttgtaaacccatttacaaccagattggtttatatcctttgaagcttcaactaaagtccatactttgtagatcttcattgattctatttcaaattccatggcatttttccatttgttgcaatacgagcttcn

SEQ ID NO: 288506 - DNA, 420 bp, Glycine max
tcaatgcctgctgtattctttgatttctcgtctccatggattggtattaatgaatagcaggctcaagtctaaaatacagtcttccaaacttgtattaagttaaagtccaaagtacaagttctccataagataatttcagcaaggaaagatgcagtaaaaggagaaatggagaatcaagttagcaaatactcaaacatgtttgaattttcgattttttatgagtcagatcaaccggtaatgctaaattcaagaactcatgtgtgtcttaatcacgagctaatttttcttatatataatattgataccaaattgacgataaattactaatttacttgcaaacgaagaaactggtatttcaacctaaaagggacaaataattgacgatagcaatttttataaaatatttaattatcttaaaaa

SEQ ID NO: 288507 - DNA, 408 bp, Glycine max
  unsure (1)..(408): unsure at all n locations
agcttctatattatctgttccattntatcaataaacacaagttgagttttattcagaaaattagagtttatctcttttatcttagtgagagtgattctcctaaattcttgagtgattcaagaacaccttggctgtatcaaaggactttcacaacctttgtgtgttgccctcgctggaaagagtgattctttccttcctttcatcatcacccttgntctttcaaaccacaattccagagaatccacctctgcccagaattatctcgtggccataactcccattttacgcactcaaattaagtgattcttgagcctaaattgaatttcataacgagacctttcacctcgttatggaatcacctcatttggagccctgtagcttcagttattgccatttctatatttctgt

SEQ ID NO: 288508 - DNA, 445 bp, Glycine max
  unsure (1)..(445): unsure at all n locations
tgccttgccccatgatatatttgagggacttatgatcactatgtatgacaaattccttgngataaaggtagtgttgccatgttttcaaagcccgtactaaggcatacaactcctaatcataagttgaatagttaagggtaggaccacttagcttttcactaaaataagcaattggatggccttcttgcatcaacacagccccaatcccaacatttgaagcatcacactcaatttcaaaagatttttgaaagtttggcaacgcgagtatggnggcattagttagctgttgcttaagaacattgaaagcttcttcttgtttctctccccatttgaaaccaacatttttcttgagcacttcattgagaggtgctgccaatgtgctaaaatccttcacaaatcgtctataaaaacttgctaagccatgtgtcgcaacctacccttctgc

SEQ ID NO: 288509 - DNA, 353 bp, Glycine max
  unsure (1)..(353): unsure at all n locations
agcttagcattgttgtgcttagcggcaccatgaaattcagaanattcactaagtatggnggcttagtgagcaaggctcgctcagcccaatggctgccgtaatgaaatgggcttagcccagataggcttgacttagcgcacgactttcaaaaaaaaattggactaagttacccgggcttagcgattcagcctcgcttagccccaagtatctcaacaggaggatgagtgttcatcctcacaagatgagcttgcttagcgcggtaggtgcgcttagcgagttcgtctagaaatgcatatattcaatgaatattgatgaactcgcttagcatagcatgctcgcttagcgagttcatt

SEQ ID NO: 288510 - DNA, 421 bp, Glycine max
  unsure (1)..(421): unsure at all n locations
tatagcctttgtgaatctgaggcacaactntgaaatgatatatatctctcatgtaaaggatcctcattcgatgatatataactaanagggactctntcactctcacttgataggtagatagtatattttgattggaatgtgcggcatcgacatgcgttctgcttgatgtaatttttaaaattataatattctttctaatatggctactaatgtacgtttagtggagaataaataactatttcttccattntccgtcctttcttcttagataaaagacttgattgctgaaattgagttgcttgcacaagagtttataaatcgtgagcagcaagttctttctgtgtacatgagtgtntttgaacagtgtgttagtcggtcaacttctcaacaaagttctgttgtttcttcacctgctcataca

SEQ ID NO: 288511 - DNA, 386 bp, Glycine max
  unsure (1)..(386): unsure at all n locations
tcaagcttattctctattggacataaggtaatatatatttttgtattccttttgtttttgtcttgcataagctctggctttgttattatttattcatacatatgttggttttgttgactatgaatattgtattatgtgtggcaccactttttgtttctctattaagttntaaccttttccatatcgttggtgattattggatatggctgcaatttaatataaaggcctanagagtgactcaactatgcatgtatcgtgtacattacaaacttggggtgcgtctgaattactttatttttgtatctagaaatgctgttagtcaaactactagagaacttctatcgaaaagctattttatgaaataaatattagctaaacccaagaat

SEQ ID NO: 288512 - DNA, 324 bp, Glycine max
tgaaggcaaactggatgcattggttaacttggtaacccagctggtcttgtgtcataccctaatttcgtccggggacctttgcttgatgacatgcgacctttctttggtccttgtgaggtgcttgacacccatcattatgcagtttgcgaaattccaggacatgcctaaaaaccaaataaatattgatgcacaatccgtaagtctacgtgacacatcggaaatcaaatggaagcatcgttgcataattaagtgaggttccgtaagtcaaagaggggatgattatgtcattctgatggttccgtatcattacggaaagataacaag

SEQ ID NO: 288513 - DNA, 411 bp, Glycine max
  unsure (1)..(411): unsure at all n locations
agcttgacctttcccgacccaacccgagcatagtcggtcagtgagaacctgtgatgtacctaagcaggcgagctcctggcagtcaacagataaaaggaaaataagaccacaaagcaaggaggcttgtggtggctggccagctgtgaatnttgtgtaatatgtggattgtggcctctggtaatcgattaccaagggtgggtaatcgattacaaggcttataattgaagacaggaggctaagatggtctctggtaatcgattaccaaggggtgtaatcgattaccaggcttgaaaacgaagtcaggatacttaaggagcctctggtaatcgattaccagcctgtgtaatcgattacacagaggaatgggtcactggtaatcgattaccatgcatgtgtaatcgcatacatagt

SEQ ID NO: 288514 - DNA, 453 bp, Glycine max
  unsure (1)..(453): unsure at all n locations
tctatataagctgaaccattntatcaataaacacaagtttagttttattcagaaaattagagtttatctcttttatcttagtgagagtgattctcctaaattcttgagtgattcaagaacaccctggctgtatcaaaggactttcacaacctttgtgtgttgccctcgctggaaagagtgattctttccttcctatcatctccacccttgttctttcaaaccacaattccagaaaatccacctctgcccaaaattatctcgtgaccataactcccatttcacacactcaaattaagtgattcttgatcctaaattgaatttcaaaacgagatctttcacctcgttttggaatcacctcatttggagccctgtagcttccgttattgccatttctatatttctgtccagccaccacttaacctacgttgtaccatcccattcatccattttatg

SEQ ID NO: 288515 - DNA, 434 bp, Glycine max
  unsure (1)..(434): unsure at all n locations
agctntgaaatctgaagtttaatattcaaatgatcaaagttcanaaaaaatgcacacacatgacctctatttatagcctaagtgtcacacaaaattggagggtttgaaattgaatttgtggagccaaactttggagccaaaatttcactaattatgattagtgaattttagttatggttcagcccactaatccaagatcaaatataatattctccactaagtgtgcttaggtgtcatgaggcatgaaaagcatgaaggacatgcacaaagtgtgactatatgatgtggcaatgaggtgtagtaagcaaatgctcacctgcccctctaaaatntaattggattgngcttctaccaattcaattaaatttatttccaaccacacacatcaaatatccacttagtgcatgtgaaattacataactacccctaataca

SEQ ID NO: 288516 - DNA, 467 bp, Glycine max
  unsure (1)..(467): unsure at all n locations
taataccagcagaagtaaaggcaaacatcatgttatatgtccttatgttttgttggtaatttttaccatcagctgtattttggtcaaacagaagttgatgcagaagtttaagtggattctgtaacaatgaacgttcaactttaccatctccacaacataagctgaaccttgggcttgaactatttttacatttttctattctttcattataccacattttgcattacagtgactacattgcatgagctggtcaccaagatcaaaatactctgaaatggttaaattagatatgagtaaatgatggtaaccattgattatattttgacaggaatatgtaaattatagcatgatagataaaagtatattttggattgactattttaatttgaattntaaactgaagtacttggatcagacatttatcttctgtgttagttgcagagtcattagatgagaattgacaattt

SEQ ID NO: 288517 - DNA, 429 bp, Glycine max
  unsure (1)..(429): unsure at all n locations
agcttgtatatttccnctttttatggtncatttggagtaaatcttgtagataagtctccttttatggttaacgttgtctctagaacatttccattggatttaacgatgaaatctgtgcattttcacgtgaaaaagaggctaagttctgaattgcaaaatgtagcagttgggctaagcgcataaccaccgcctaacgcagcttcagcgtgcatagcgcaaaggagaatctggcagagcatcagcatcaaagtcgcgcgctaagcgcgagataagtgagctaagcacagcatgtgccttcagccaggctaagctcgagactggcactaagcccaatttcacttactcacgctaagcatgatcgtggcgctaagcgcagtgttgcaatttcagagcctatttaaagcctgtcttgtgaagaatatggtacac

SEQ ID NO: 288518 - DNA, 470 bp, Glycine max
  unsure (1)..(470): unsure at all n locations
tgtagggttaaagtctcacgattgtcacgtgctcatgcaacaatttgtttccgtggctatacgagacatcttgccaaacaaagtcaggttcacgataacttgcctgtgctttttcttccatgctatgtgtagcaaagtgattgatccagtaatgtttgatgagttggaaaacgagaccgcaattatactatgccagttggagatgtattttccccctgctttctttgacatcatgattcacttgattgtgcatctggtcagagaaatcaaatgtcgtggtcctgtttatctacggtggatgtacccggttgagcgatacatgaagatcttaaaagagtatacaaagaatctatatcatccgaaagcatctattgttgagaggtacattgcagaagaagccattgaatnttgttcagaatacttagagacggctaaagctgttgggcttcctgagtgtcngcatgatgaca

SEQ ID NO: 288519 - DNA, 330 bp, Glycine max
  unsure (1)..(330): unsure at all n locations
agcttgcttgttcttgtttataattcacgcctgaataaattagaatagctttatgatagtttgaatgtttgatttttcatctaattttagtctattttggtgtagaaataaatgaagaataaagatagatggtgttgggtgccaattcgagacccttttataggaaattttttgaggtagaagggatcagacatgtcaagctcaacgcacacttcangctaaaggaattgtttctcctgcatggtatttgggctcaacgcccactttatgctcaaagcgcagtcacttaatctagtactgctgttgcaagcacgcttaacacgacatgct

SEQ ID NO: 288520 - DNA, 426 bp, Glycine max
  unsure (1)..(426): unsure at all n locations
acctataaatactcaagcttgtattccagatctttngaaggctgctctcacttgtctggacaatgtgtttgactctgacggatctcttcgtgccttgagggctaatgtattatctcgtgaatcctgttgcttggttagattatatctttgctgcttcatttgcttttgctgaaatactatgattcactatntttatgtaagaaatgatgtgttgggagcactaatagaactaagcttatgccttctaaaatggtatggtacaatctatggtcaagtggaaaacatgacccatatcttgaagctttcctaggaatccatgtcattattatatgtgataactgataactacatttaatacgtatcctcctcccttaatccatattgctgtagagaatactcacttgntctgctctctgacttctgtat

SEQ ID NO: 288521 - DNA, 375 bp, Glycine max
  unsure (1)..(375): unsure at all n locations
agctttcgatgttccggtctgtgagacgacagtcacgtgttcgcgatatgcanagatgatgttccgagtactttggatttggtccgaccatgccctcctgatttccagctgggaaattggcgagtggaggaacgcccctgcatttacgcaacaagcataatgtagacctttacggccctaaaagctctatagttgggcctatgctttagagatttcatttctggaaggctctgtgtctttcgcttttgaatgcatagtacaaggatctttcttcactctagtcctggtctctacccattctcattcatttgcatgttgactatcttttctaatacagcatattcgatgacgagtccccctgaggtactaatacct

SEQ ID NO: 288522 - DNA, 394 bp, Glycine max
  unsure (1)..(394): unsure at all n locations
nttcattaaccaagttgacaaatgtgatccctctagtccaattgttatgattaatgaaaatgctagaactagcanaatttcacgtttgtggattcttgctctttagccttaccaacatccaagttcagagctgaatagtatttgatgttatgtttcaccaaaatgtgatttttatagtgctagtgtatgcctatattctatttggatcttatatgagatttggtgcccttaatattctagttgtatgttgaaacacatgattgtaagtttatgttaagcaacctgctagatccccaactttagtttatatttcatcatttcatgttataagtatcttattctgccattactgtgttattaatccatcatgcttcgaataagagagaacctgaca

SEQ ID NO: 288523 - DNA, 368 bp, Glycine max
  unsure (1)..(368): unsure at all n locations
agagtgtcttggataagacgcttagagaggacgctttaatggacgacgcgactgagcgaggggggggaggggnannnnnnnnnnnnnnnnccccccccccnncncccccccccccccccnccccncccccccccncccccccccccccccnnccncnccccccccccccccccccncccccccnncccnccnccccctccccccccnccacccccccccccccnccccccctcccccctcccccccccccctccttncccccccctccctcccctccccccctccttccccctcccccccctcctctcccccctcctctcctcctcccccttcccctccnttcccccccccccccctccccccccccg

SEQ ID NO: 288524 - DNA, 465 bp, Glycine max
  unsure (1)..(465): unsure at all n locations
tgcttctacagttnttatcgttttttcgcaagattgtttttataccaaatagaagtcgtttaaggtgttggacctttaaacgatcttttgattcttgaaaggagagaatcgttaaggcgcttgaccctttgaaaaatctcttgattttttttaacagagagaatcactaaggcgctggacccttttcgacgatctcttgatttttgaaaagggagaaagttaagttgttgtgttctacttatttatgttattggattttgagagtttaaatatgtgatagaagaattcagcaatgcaacaaaggaagggtccaattntttatgcaattatttgaatatttacttctaatacataaacaattaaaactaataaaatattaaaaaaaagtatgtatcattaatattatggatacgtctagagaaaaaacatataaatctagctaatagtagtgagttagctaattga

SEQ ID NO: 288525 - DNA, 440 bp, Glycine max
  unsure (1)..(440): unsure at all n locations
agctttgatgttctgaaacatttaaaatcaaacaacaatcagaaattcatcactttaatactaacacagtgcattatagctaacttacatatgggcctgtttcttgcaacagaagcaatcttttaaaatgttccacaagggtagaagaatgtcttcatacctgcagagcaaatgttatacttgttattacgaatgggaagtattgagtcattgtgtgctgtcttgagctaatttcttttgtgtttatactatctccttgttttttctgccattcaaaggactgaccagtatagtttctatatcatcaaaacataaggtgttttcaaagctcaatgaggcaaccccttgacaattattcatgcgtgattcaacatgcaaagttataacagatgaaggcagcttncacagttaccactaacagcatctagcctgattaagat

SEQ ID NO: 288526 - DNA, 329 bp, Glycine max
ggacctataaaactaagcttgacaatatgtgggtctggttatactgtctactttctgtactctttttcgatgaagcactgaatctcatctcacatgataagacatgcatgaagaccatagactctgtacacactcacatcttaatactgagcacagctacttatgaggagaactacactgagctaccctacctgatatgatgtagacacacttccctgacatcatacatgactttacacaattttaccctactttcaatactacgagtgatacactgatatacatgactacctgcctgtactggaccaagggtcattatacaaagtctt

SEQ ID NO: 288527 - DNA, 425 bp, Glycine max
agcttcggattatgttgaacatcacagtaatgcctcatccattctttgcataaatatgacctctcatctcctcttttttggtacctagtgtttgtggaattttatatatcaattagctattaagaagcagattgcatgtgaagctttctttggaatcattactcattgtaaatgcattcattttattccatgggatatattccataatccccacttatttttgttagtgtgcgcatatcattcagtgtattattaacccttttttctatgcaacttataccgttattatttctaagtaggtcctgttcaattttcaaggtgagttaacaatattgataacgtatttgttaaaattaagcatacatcggaatttagtattaagcatacatttgctggtctctttaaatgtattttacccacagcta

SEQ ID NO: 288528 - DNA, 473 bp, Glycine max
  unsure (1)..(473): unsure at all n locations
tgcttanacttgtgatcattctgcacagaacgcaacctatttattattaacaatntcatatcactctcctaaacttacaacatacaaatttaagcaagaattcagataacaaattccactctcctcccttctatttaaccaactcaaaacagttcaaaatccaattgaccactaatcacaaccaatggaactcggattctcgtactatcatttccacaaagacacaaacagctaataaagtcggtattatgtaaagcttgctcgctcgcatagtacctcatcagcaagaattttagagcagttgaagcaaacacaacgcattatagttaagacggtcttcaaaaaaccaatatggaacattggcttagcaagctccaagtgcccaaaatggccagggcactcagccatactcgccgtgcaagtttcacacttcaactgtctgtcaatgggtccaagccgagggtcactcaatc

SEQ ID NO: 288529 - DNA, 351 bp, Glycine max
  unsure (1)..(351): unsure at all n locations
agcttgtttcttacagtaatcatggaggtggcatatggcagatatgcctccatctttacaatccatgacttgaaagcacttaccttacacctganaagttttagcccaaatttgaatagcgattgtctctattaatcccctagttacttgccttgcctatcacactcacctatagaatcttaccagcttcaatgataccttaccagctntaataacatagtagaattgatcagccacagcattgaagcaagttgccccaatttttccaccatcagaatccacaacatcaaaagattaatcctaccagcataatagaggtagacattcttggcctatagagttttactactg

SEQ ID NO: 288530 - DNA, 453 bp, Glycine max
  unsure (1)..(453): unsure at all n locations
tgagacttaattgctntgttcttcccataagcagtagtcttcagttcactctcacccatctccattacaagcctttcttcttcctgaacacacatggtcattaattcattgatagaccatttatctttatgtgtgttgtaggaaatcttaaatggcccatattcatgtggaagggtgttcaaaatgaaatgcactangaaggactcagacatatcaacctctagtttcttaagttgagctgagatatctcgcattttcatgatgtactcacgcacacctttcacactggtgagccgaagagaagaaaacttcatgatcaaggtgcttgctaaagtcttatctgaagtgatgaactggtcatcaatggccttaagcaagtctcggaccttttcatgctggtcaacagaaccacgtatcccagccgagattttagtcttaatgaacatcacgctg

SEQ ID NO: 288531 - DNA, 371 bp, Glycine max
  unsure (1)..(371): unsure at all n locations
agtatctgtgttatagcctccctctttggttgtgctcgcacagttggccctcctccaatatcagggggtggcccaggaaccgttaaaaggaaactactggtcccttaaccgggagttcaagtctcggttaagcatttaaggacagaggaccttaaattctcttaaggtgtagacgtggagcacactgaanatgaggacacgtagccctctaaaggtgagggcgtgcagccctctcaagacgaggatgtgtagtcctatgatggcgaggacatgtaatcctctaaaggtgagggcatgtccccctttgaaaatggnggacatgtagtcctctgatggcgaggacgtgtagtcctctaaaggcgaggacgtgt

SEQ ID NO: 288532 - DNA, 466 bp, Glycine max
  unsure (1)..(466): unsure at all n locations
tctttgaganaacttccttgagaagctagagcttagctacacactcccatctaanaactaagctcacctccttgagaagcttccttgagaagctagagcttagctacacacacccctctaataactaagctcacctccttaagaagagaagctagagcttagctacacacccctataatacctaagctcacttccatgacaaaatacatgaaaatacaaaaaaaaatcctactacaaagactactcaaaatgccctgaaatacaagactaaaaccctatactgctagaatggccaaaatacaaggcctaaaagaagaataaaaacctattctaatatttacaaagaagagtggacccaaccttgacccatgggctcaaaaatctaccctaaggttcattagaaccctaaggccttctttatcagctctagcccaatcctcttggagcctcttgctcatggctctgg

SEQ ID NO: 288533 - DNA, 375 bp, Glycine max
  unsure (1)..(375): unsure at all n locations
tagcttgagctctcacccaatcttgcaacacaatgttgggtccaaggttatcaaactcgacagtttacgtagactcgtaagagttccatagactcaactcgtagacttatacgagtccacttcatataaaaataataacaaaatatctataaataacataccaattaaacattntaacaatataataaagcagaatagtaaatcataaatttcacaatactgaaataaccaagtctagtaatgcatcactactagataataacttgcagattttatagtagtggtagagcattcccatcaaggatttgatgttattagagaatacgggtttgatgttattagaggtgagagtttttcaattcaggaacaacacac

SEQ ID NO: 288534 - DNA, 437 bp, Glycine max
  unsure (1)..(437): unsure at all n locations
ctgaaggtgcgtagcccaccattntccatagtagaatactggttatgtgtctactatcattgtcatcgttnttttgtcattgaggtgccactttgagctgccaggttctccacctttgggcgtattctttgaaagatttatgccccctttttgcacatgttctgtagttgcatcctatccgaagacattatactgacactgcctaacgaaggcaaccactaggtccttccaagaatggactcgggaaggttccaagttagtgtaccaggtaacagctacccagtaagactttcttggaaggaatgtatcagtaattccttatcttttgcgcatgcccccatcttccgataatacatctttagatgcttcttggggcaagtagtccccttgtacttgtcaaagtccagcacctttgactngggaggggtgatgatatt

SEQ ID NO: 288535 - DNA, 438 bp, Glycine max
catatagtttatatgtataaccacatctggcggggtgaccgttctagcacagtccaacatataatcatggggcacgaccagaaccggggatgagaaatgaatgagccatgaaccgagaggatgtctcacaggtagcttatgaagacagaagacactcagtcccattcttagggatgctaggcacacggctgaactgagagaccatgaacctgctaacgggagggcgctattgcctaatcagacaaagatgagctctacgatggaggcttagactagtattgcacatcaagaggcgggacggacgcacggagtgagcgtgactagggctccaacgaatgggacgagaagagattcccccatgcgatgacgataattcatatacaagtgagggcctgaatcgccatttagctggtgacaacatacagcacatatggcaag

SEQ ID NO: 288536 - DNA, 254 bp, Glycine max
  unsure (1)..(254): unsure at all n locations
actcaagctcaccaccttgaggacaaggaggattatcaagggccatggaacgatatgtatactcacgangcaccaagggcaacggcgcaggaggaacgacagaccaacaccaagagaagggtgaaacagccaacttacctggaggacgacacgacttgagggcattgccggaagaagaacctacgaaccacgagcccaatacagctcgtcgtacatgaattctcagagcccacacatgcaaaacaacaacgaga

SEQ ID NO: 288537 - DNA, 334 bp, Glycine max
  unsure (1)..(334): unsure at all n locations
agcatgcgangttatacgtcgtgtatcagatgaccaatggtccctgctgctgtgctccagatttcataagaatcattggtggataggcagatagataagctagactattatggccttcactcaagaatcatctttcttccactatagacaactttgtctatactatatgtaacaattccagagttaatttttggagagatacctggtgcttggattgacccatctatagagatttgctaattccccttcctcattacaagctcctttccttatctgtatctgacttcaggcacctaaacaactggatcatccctacaaccttcttgatcgtgtt

SEQ ID NO: 288538 - DNA, 394 bp, Glycine max
tcgctctgcgacaaatactcagatctcttcgggaacgtgaactctatcttctatcaccttcgtctacgcgacgccaatcacaacccaacaagttccaacactccgttgaaccaccgcagtcttgtaaagctcgacattgcgaggtcctatcttatctttcaggaggcaccttccctcgaagaaggaatactctatttctctctcgatctcgatcctgccatctaacaacgtacatgtgaaaagatcacaagttggaatgtttagttgagactaaaaccagatcattgcattactactttggaagctataatgcgatgagaaccggagaatgctccacacataagctattggctaccaagatccattactctaatttcagacatattattatgtt

SEQ ID NO: 288539 - DNA, 429 bp, Glycine max
  unsure (1)..(429): unsure at all n locations
agcttgnggtgtattntgtctcttactgttctattgccagcttgtttagctattaaacttacctattntttcactttttttttctgactattcattattataatattagtaaataactctagaattttgttgatttgtatatttgtgttatttttcatatttagaccttgtatttgtatcttttgtgttttcatcactcagttccatttcaatatctcagttgcacacttcttttcaaagaatcattatacaagtatatatatttggactctattttccttcgtaaaaaangtttgctgatctttctttatgactaatgtcagaaggtttcatatcaaagtatcgtacatgatgtttcagtagaaactaactggatatttgacatggattctcttggtggcaattatcagtatatgtacaaatatatat

SEQ ID NO: 288540 - DNA, 476 bp, Glycine max
  unsure (1)..(476): unsure at all n locations
gcttgttggtccaggttgcaggaccaatacacactcaatntgcttttatccaaccttaccaacaaggttgagtataatcgaaaaataatggaattcttcaagtatgtcattaagggtttaattcttcttaatgtgtatgaaaaaacaaactttgttgagaaaaacaaaatttactagaataatctttatgtctcagaataaattagtctttgaggatcacttaagggatattcttggtgaaaataataaaattaaatccaaccttcaacttcatttgaaccttaattatgtaaaattttcaattattatanctatttatatcatgctatgctcatccatgtgcacacaagtacctaaacactatacactangcttagaattagcctattcttttccaaatttaccgtnttagaatgtacgcgcnctccctatanggaccagctcaacaaaatttggttgcgttgtctatatcaatg

SEQ ID NO: 288541 - DNA, 353 bp, Glycine max
agcttatcatgttaactatattgaagttgtgtttttgtactttctttctcgccaaaacgcagacaccaccaccgtttcctccgttacgtaattaagacaaaacgcacggaaaagtaacattaatgttgattaatgttgtcgtttggcgtcggtttcttcgccattaccaaacgaaaccgcgtttatttcgtctggacgatgagacagtcgcggtgggccccgcgcagtcaaatggccatgttgtcccgggtactgacgtgttagatatgacttttcttttggtgagatgacagcgataaatccgacctgagtggcgtctccgacgcatagatcaagcagttgacggcggagct

SEQ ID NO: 288542 - DNA, 457 bp, Glycine max
cgccgccgccaactccctctccacgcagctgccagagttctgcttcgtcgtccacctcctctgcttcccggaggtccagcccagcctcgagaaacacaccgaagacgtcgatttccaaacctacgataactctcagaacttctccaactacggaacgagtcgacccggcggaaccgactcgttcagaaactacgccaccaccttctccagccgttccgacaacagtttccgccgctacagccgccgatccgccggccacgaggacagcttcgtcctctacggaggctccatcggcgacatctaccagaccttcaacacctatggcacttcctccgctggcggcgccggcgagttcaaacagtacgccaccgaatcaaacttccccgagcttgatttcaccacctactccgacagctccggcgggaggaggcagtcgttctcgagctacggcgagaac

SEQ ID NO: 288543 - DNA, 477 bp, Glycine max
  unsure (1)..(477): unsure at all n locations
natcttaacatanaaatgacatgctaatccctctgatttagaactaactcatgcacacgtttagtgtaacacatttatgcacaggggtatgtgtaaaatatcctactatttatgtcaacgtacaaggacatccaacacattctagttaccatacatatatatatatatatatatatatatatatatatatatatatatatatatatatatatatatatatatatatatatatatatatatntctgaaaagaacacacattctcatgctcaaggcactgcgtgaaaattcacacctaatcacattctatatattttgctatcacacactacctacacatatttgaagcacatatcataagatattcattgtgtcactcacatttatttatatgcatatnggagagctatatacgtcgtgcacatacttgcatttaaaaaagggaattacatgccctcatacattcatttatgaagcgn

SEQ ID NO: 288544 - DNA, 412 bp, Glycine max
  unsure (1)..(412): unsure at all n locations
agcttagaagttatctanaatggcatatcactaaattggcttcaacacaaagtgagcttgataaattgaagcaagaaaatgaaaaacttgtttcaagttataaagcaaccggttgtgtttgtgcttctacatctcttaatatggattattgcaaatctttgcaagatgagtttgaaaagtttaaaaatgatcacgatgaagaaagtatgaagttgtaaactgagatttcctatcttanagatcatttgaataaaggaaagagtgatcttagtcacttactcagtgtgcaaaagcatactaccaataaaactggtttggggtataatgagcaaattgacttttataagaaaactaagttngcaccctccaaaaaggtgaacccaaacaaagtctccaaaaagaanaacatagt

SEQ ID NO: 288545 - DNA, 463 bp, Glycine max
  unsure (1)..(463): unsure at all n locations
ntataacggaggacaactagagcgattgatgaccatcatctactttaatgacccttgagaaggcctagtgtctaactaaggacaataaactaagcgctggttgggaggcaagccaacatattttgtaaaaatggagtcatttttttgtattcattccaaaaaaaacagcccaacagctgcaaatagaaaacaggaggtgcagaaagtaaaggcccagcaggtgaagtcagcaataggagaggtgacaatagcaaaagagaagtgggctacacgaagccacgcgcttagcgcacgtccaggcgctaagcgcccaggtacgttttcaaatttttgaattttaaaattctaagggaaaaccaagggacgcttcccttggtgcgcttagcggccatgtgcgcgctaagcgcgtgaatcataaattacagggcagttttcgaaactgcctgacccctcagtgaccttt

SEQ ID NO: 288546 - DNA, 413 bp, Glycine max
  unsure (1)..(413): unsure at all n locations
agcttgtaggattatggngtatccatcacatgtggtactaggtggcggtcgggcgatggtgcaaaacaattctccacatccacaaatcacgtataacccaccatcccatgttgcccacctcaactgagctcacatactcccacgtagcccttatcctcgttcctctcaacgccgggtccccatcaatcctcccaagcttccacaacatccaagtaattcaacatccaagcatcatgaactaacacatccaagaaaacagggcagaggcagaaaactctgcccaaaacacaaaccaacatcacaacttttcacactcaattaccccagtaatattctcttcgttccaattcgttaaccgttggatcgactcanaaattntactggaagtctctagcacataaatctacattatg

SEQ ID NO: 288547 - DNA, 457 bp, Glycine max
  unsure (1)..(457): unsure at all n locations
tgctatttganactatagtcattntcattgtcatgtgaaaacacatacacacagcataacaatattatggaaattattttccagaaattactcctaccaaaaggattagtaccagcttattgatcatacaaaaacctatgttccaaatcacccaaaataaaggatggactatctttttttttctaatgaaagttgttgagaatcacgaatttaatgtataatgatatgataggatatgatatctgatttagaggaaactgaatatcctctaattatgtataaccaatactacctgtctatataaacaagcatctgttgtgtattctaacacactgttttagtctactatccctctatattttatactattttacaaaagtaaaccctttgaaacanattangagcaganaananaaacaagagattaacaatacaaaatggagtgcctcttcaaaca

SEQ ID NO: 288548 - DNA, 321 bp, Glycine max
agcctgtcggttgcgattgacgaagggcgcacaagacgacgttagtctctgcatgctatcaggcttttcgtcttacagacagcaaaaaagaatgtttatacggataaccactcgggtttttccgcccgtcagcgtgactcacatgtcagtatgacaaatcttgtgagcgcggaagatgacgtaaatctccgcgtgtcaaagggcttgtcggccgcgattgacgaaagacgtacaagacgtcgttagtctctgcgtgctatcaggctttacgtcttaactgacaccaaaaagaatggttatacggataaccactcgggtatt

SEQ ID NO: 288549 - DNA, 393 bp, Glycine max
  unsure (1)..(393): unsure at all n locations
agcttcttttgtttgggatgtgtgctctatcacgcaagattgtatggtcactagcagccatattcttaattaattccatggcttcttcaggggtcttcaattntatttttccccctgcagaagcatctaaaagcttcttggattgtggccttaacccgtcactaaaaatattgagttggattggttctgaaaatccatgagtaggtgtctttcttagtaacccacgaaatctttccaaagcctcactcaaggactcgtctggaaattgatgaaaggatgagatgacagcttttccttcagcagtcttggactctatgaagtatttcttcaagtatttttcaaccacttcattccaagtcttaagactgttaccttataatgaatggagccatc

SEQ ID NO: 288550 - DNA, 468 bp, Glycine max
  unsure (1)..(468): unsure at all n locations
ctttattcttagttntgccgaactgatcaaaattcanatgatctatggcnccttcattttatttcttgagcaaactaatgctcagacttggtactttaactaatctttggtcttcttttctatgacagccacaaaatgttccaggaataggtgagttggctcttggtccgctcatgcttggggcttcanatacactgcttaacgctgaccattacggtgtctatttcaaaggaatgcctctcttgaatggaaaggtgggcataccattctcctttatgtggtaattgggtatctggggtacctgaaaacttacggttgagtttgtctaatcaggtattacggaggcatggagatgtatttgagcgtactgctagaggatactatcatgcacatggtcgttcggatgatacgatgaaccttggnggaatcaaggggaaatatttgcctatgtattaattattaaaatag

SEQ ID NO: 288551 - DNA, 447 bp, Glycine max
  unsure (1)..(447): unsure at all n locations
ctcatgtcaacgatggagcaaatgctagtgctgttgggaggtttctcaattgctgatttctacccttcaatcaaagtgcttccattgctcacaggaatgaaaagtaaacttgaaagggcgcacagagagaatgacaagatcctacaaaatatggtcaaggatcacaaggaaaatgagaacaagaatggggtgacgcacgaggatattattgatattcttctcanaactcanaagagagatgacttggaaattcccttgactcacaacaacgtcaaagcactcatctgggttagtatgcaattttctttaacattactttaagattcccatgtatacaactatatacgtgcatagatatgaaatttgctgaaataataacttacactttaatatatatagagagagagggagagagagaaaattgagtagcgacttattaataaaata

SEQ ID NO: 288552 - DNA, 464 bp, Glycine max
  unsure (1)..(464): unsure at all n locations
tcctcggagccatttcctacaaagacacatccaactaatatttatcatgaaaattattttgcatgaaatacataaccatactattttagttatcccaagtatagcaaccaagaagtcaaccaattcttttgtggtctttattaattgtaggtgttaccatacaactaataaagatcaccactcaatgtgtattattttgaaagaaagaatttgatattctgcaaccatttatgcgtaatgcacccaccttggtgcagcaagtttaaccaaacaaataggccaattcaattcgaacaactttaagcattcatatgacttatgtaattgcatctaaagcaatgtccaaaacctcaagtttagctcacccttggcatttaattntaacaacctaagttgatcattgtcgcgacctgccctccgcgtgggccaagggtgcgtcttccatcanaggaaaacgcgtggag

SEQ ID NO: 288553 - DNA, 382 bp, Glycine max
  unsure (1)..(382): unsure at all n locations
agcttgtaaaggcttagagaatatnggctgtatgatcctgtggaggctttagtatagaaagaataccataaagtgcttgatcttagtggaaagcctacaggtgaaggtattggatgtagccagagtggggtgaaccaatataaatcattggtgtttcatttgcttccttactacttattgtttgatgttgcgtgttgaagttttgtttcagaaaaaggtttttataaaattggtttaatatttagaagcaaaacctactttgttctaagagaagagaagatagaaactcatagtcaacaggttttgtatcatttgtgagtatgttctgaagtagtaaccaacaagattacttggaagtattacttgaaaatattcaccaatc

SEQ ID NO: 288554 - DNA, 327 bp, Glycine max
acacctgacatcacctatgcaggaagtgtttgtgcaaaatatcaagccaatcctaagataagtcacttgaatcaagtagagagacatctgaaagatgtatatggcaccagcgactatgggattatgtactgccatcgttcagatccatcgctggtcgggaatcgtgacgctgattgcgctggacgtgcacacgacagaaaaagcacttctggagaacgttcctattggggaaccaatcctatatcatgggtcaacaagaagcagaactgtgtgtcctatctactgcagaagccgagtatattgcagcaggagacactcgacacaact

SEQ ID NO: 288555 - DNA, 150 bp, Glycine max
ggaaaaacggcccggagccaagacacgagccgccactttgaactgaggaccacagaggagaagagccaaagagccagaaaccaaacaaacagataagaaaatgaacgaaggcaaaagccaactcccagcatagcaacacaaaccaaagag

SEQ ID NO: 288556 - DNA, 413 bp, Glycine max
cgtgcgcacatcgttcacttatatgatatccactccttatgtttgaagtataggataccttcagccacttatcacaacgcggtggacaaaagtgggcagaatacattgaatggacatcacagccaatgcctaacgtattatgtgcttcactatacatgtccacacattattgcagcttatcgagcgtgaactactaccaatatatagatgttggttacacaaatgagcacattttaaaagcttacttcgcacaatgatggtctcttgggaatgaagcggctattcctgcttctgatgacgcatggacacttatccctaacccaactacaattcgtgcgaaaggtcggcctatatcaacaaggataatgaacgacatggattggctcgaaccatctgatcaccgacaaatatgt

SEQ ID NO: 288557 - DNA, 288 bp, Glycine max
agctttattagaacaaaattgcctaaatcatttccaaatatgcatgtgaattaagaagcatcaacaagaattaagccatggctattgtgcaagcaatcaatggggcaaaaacacaccaaaagattatgatgatggatggctcaaattctcacaaaggtaaacttatcactttcaaattgagctttcaaaactatcatgacatgtagaggaaaaataacgattttcaatcacacaatgtcaagagacttttattttcagaacaattacccatttcttgaacatatccta

SEQ ID NO: 288558 - DNA, 432 bp, Glycine max
tgtgaaattcaccctgatcccgatgccatacgccgacttgttgtcggccatgatcaccaaccaaatggcggtggtaaacctagggaagatctaccagtctcccttcccttgatggtacaaccccaacgcaacctatgcttatcatggaggtgtctcggggcattcaatagaacaatgcgtggctttcaaacacaaggtccaaagtttgattgacgcagggtggctgacattcaaagaggacaacctaaatgtgagtacaaaacctcttgccagtcatgggggatccgcagttaatgcggtggaggagtataaaccttgggggctgaagcagatggaagatgtggtaacctctaggaggtttatattagaatcgttgtgcgaagcgggcatgatttgccttgacgggcataagggagattcttgtttgatgca

SEQ ID NO: 288559 - DNA, 374 bp, Glycine max
  unsure (1)..(374): unsure at all n locations
agcnttgatgcatcatttggagaggttaatgaaacaacgagatgatgcgctccatgagaggttggatcaaatggagaatagagatcataatgaagaagaaaggaggagaagagggaatgatggtgttcctagacaaaaccgaattgatggtattaaactcaacattcctccatttaaaggaaagaatgatccggaggcctacttggagtgggagatgaaaatagagcatgtattctcatgcaacaactgaggaggacaaaaaggtgaagcttgccgcccacggaatttccgactatgctcttgtgtggtggaacaagctacaaaaggagagagcaagaaatgaagagccaatggttgatacatggacggagatg

SEQ ID NO: 288560 - DNA, 439 bp, Glycine max
  unsure (1)..(439): unsure at all n locations
acactataaaactaagcttgagatattaaacaacaatactnttactcgttgtctgattgagtcatgtaatatttcgagacgctcgaaattgaatacggaagctctgagcaaattcaaacgacaataactttttactcggatgtctgattgaatcccataatatatcgacaagctcgaaatagaatcttgatgctctgagcaaattcaaacgacaataactttttactcggatgtctgattgagtcctgtaatatatcgagacgcttgaaattgaatacggaagctctgagcaaattcaaacgacaataactttctactcggatgtctgattgaatcccataatatatcgacacgctcgaaatagaatcttgatgctctgagcacattcaaacgaccataactttttactcggatgtccgattgagtcctgtaatatatc

SEQ ID NO: 288561 - DNA, 366 bp, Glycine max
  unsure (1)..(366): unsure at all n locations
agctttttatagtgcagaaaatgttaggtgcaatgcagttgcacacaaaatgctgacttttcgtacaagaatgatgaggtcccacttacacgcatatgttggatagcattccaaggtattatagaatttgggaatacattnttatatttcatcaacattttggtaaccccaaatgtattaaatagggtaaaagccattttcaatctcaataactgatgttcttttatttagagatttaggagttcaaaataagataagaggttnttcgttgtttactacaagtcttagctagaatcacatgaaattcanaattaaatatatcttaccaacatcaaactccaatgttgcaacgttgaagtccaacac

SEQ ID NO: 288562 - DNA, 433 bp, Glycine max
tattgtatagtgtgaaaaaagtatgtatataaaaatgtatttgtatatatcacagatattcaaccaattaaataatcagtaataataattaatataaaatgaaaacaaatatatagaaatgataaaagaatagttattaataaagcaaaagagataaagatagaagatactgacaaaaattaggaaacatgaaaactactattttacgtatttgttgcaattgataccatttctatttgtttaactatattgttgcataatattaatatgttttacatgtacaggacatgctctgctgcttcaagccaactgtggacatgaatcttacatttgaggagatataagtttgtgcatatgtgttcaaccctaatgtcgacccgaggtacgtagctaacagtatagtgatacttgtagataagttttcgttcatata

SEQ ID NO: 288563 - DNA, 389 bp, Glycine max
acttctatagcctatgtaccataggcatcaagctaatctattagagtagacgagtagaatgactccctattctgtagtaattatagttaattatgttagttgacctcaaccaaccttacgttactcgtcagttactactgttagatgtaataactgactagctgaagaataagtactacagatgttactgacttaactagagtaggatgatgttacaactccattcccgaattctgagatcacaccctcttttcattaccgaaataatgttatggcattatagagcacttgattgcatcctgagtaacaaaggctttcgcaaacacatgatgggtgataagaggagtgctgctgttggatactaacaataggttgtgaatatgattagt

SEQ ID NO: 288564 - DNA, 365 bp, Glycine max
  unsure (1)..(365): unsure at all n locations
agtttgttggattatggggtacccgtcatatatggtactaggtggcgatcgggcgatggtgcaaatcaactctcccacatccacatatcaaacatgaacccaccatccctagttgcccaccttcaactgagctcacgtactcctacgtagcccttatcctcgttcctctcagcaccgcatctctggttccagtccctcgcgtttctctgcacccgtcggggcccgttttcgatagtaggcaatatatatatatatatcanaacgctcagaatgaaaccctganggtggttcagaggttaggtttgtaaatttttagtggcacgcaaaacgaataattttagactaattaattgagaataatctat

SEQ ID NO: 288565 - DNA, 425 bp, Glycine max
tgtgaagataagcaattatttctttaaaataagtttaaccattgaattatggctcaatatgtttgactgattacccaagccattttggggtagggttgaatatatggcaataattgacacctggtgccttccacattttgaaatatgacagaatcgtaactataagtgtcacaattatcctgtgtagtacgttattttgattggcataaaggaacatgtgatatgatattttttagtatttacatttacttatcactatgtatttctttcaggttaataagaaatgtatgttttaaatttttgcttatatagtgttaactgctaaggaagctaagctatcttatttttatatagatctaaaaattctagcactgatatccagaattcattatggcttgagctgttttttttctttgtctaacagt

SEQ ID NO: 288566 - DNA, 325 bp, Glycine max
  unsure (1)..(325): unsure at all n locations
agcttggattatgagtgagatagaagaggtacaggaacagatgaaggctgacatggaggccatgaaggagcagatgacaacgatgatggaagcaatgatgagcatgaggaagatgatggaggttaacaccgctatagttggtgttgcaagcactaatactgaggtggacccgatccacccgtccgatttcaatcgagtgggtcgtccggtctcggatgtagtaggccaaggaggcaaggcagcagaaaatgcatggnggccccattatgttgaagttcagagcaagcattcttttccgccatatggtntgcctcccaattataca

SEQ ID NO: 288567 - DNA, 418 bp, Glycine max
  unsure (1)..(418): unsure at all n locations
tatattntacaataaaaatatctgtttgagagatgttttgttgaccttagccaaacaatcaatccacaattatttttcaattattattctaatcgattttttttttgaaatttaaccttttatttcagttatttactcatattcctagtagatcacctttagtgaaataagaggctgatttctcctcttagtgatcatatcgattgattcaaacattcaaaacattcaaattttgaaatcatgttagagtagttgtagctgaattttgttcgactaattgttgattattcatgtgaaaaaaattggcatgtctggtacgaccaatgtaggtgaattgatcaaacaatttgaatcacgaacgaagttttaccaacatatgcatttgcattctcgtaagactactatgcgtgagatgaat

SEQ ID NO: 288568 - DNA, 371 bp, Glycine max
  unsure (1)..(371): unsure at all n locations
atctgctcgtcttgctgatatttatcatgcacactnttctgatgatgacctangaacaattagggatcaacttgaaacttatgtgcttcaagtgagaagaaatgcttctttgtccacttgtgaagatgttcaaagtttggctatgaagatggttcagactgagaaacatttggtatttccattggtttataaacttattgagctagctntgatattgccggtgtcgacagcatccgttgaaagagctntttcatcaatgaagattatcaagtctaaattgcgcaataagatcaacgatgtgtggttcaatgacttgatggtatgttacaccgagcgggagatattcaagtcgcttgatgatattgatatta

SEQ ID NO: 288569 - DNA, 432 bp, Glycine max
tgtgaaatcaatggaatccaagattccgtttgactctagtcgttcaattctattcttagaaatgtgacctaagcgtttgtgctataatactcctgagtttgtatcatcaattctaagcttagtaccatgcaatcttgcattaaaggattcaccataggaggctacagtatcaagtaaatgtagattatcattaagcaagagtgaaccagatccaacaatatctgaattaaaagacaacctgaacacattgtttccaaatgaacacaaataacctaatttgtccaaataagaaacagaaaccaaatttcgtctaaatgacggtacaacaaaagtgtctttcacatccaaataaaaaacagtacataataaaaatctaaagtgccctatagctttcacttccaccgatctaccatctccaacatagatcaatct

SEQ ID NO: 288570 - DNA, 409 bp, Glycine max
  unsure (1)..(409): unsure at all n locations
agcttttcgattcattctatgtacccgtagtggtccacattgtgtttcgtgcatttttattctcgttttgtttactttttataccccctgttgacgtgcttaagccattttacttaagtcgtttctcgctcaacttaaaagtaaaataaatttccaccgaacgtttgaattgtattatccattaacttcggttaaaataaattccgaccgttcggtcatgccgtaaccacgttggaaatcaaaaagaggtaaaaaataatataataatcaaaaagacatcttttagtaaaataaagcggaaaatcaatcggacgttttctctttgggatttctcattcttaatcgaattgattaataactaaagtgaaactaaggctaanatcaactcgcctagtcaagctcgtccaca

SEQ ID NO: 288571 - DNA, 432 bp, Glycine max
tatgcgcatatttccttacaaacgttctcttgcacttgatattctattaaccgaaaaaaatgcacccatatacaatcaaggcagcttcgtttacctagattatttacacgtacttccaaggtgtatttgttacttacatcacacacctccttggctaaattcacacacatgcatactcaaagcattttggggtaccaaaaattgcacatgtgcacatcttggtatttctaatacctatacatacacaaacttcatgatgaatcttgactatctacacaataaggtgctacattttatgctcttttcaagtttttgctacctaaagccgcatgcaaattcaagtatattttcctttgctgactaaaattgtattcaaattaaaaggtatacattctctggtaatgtatcttctttacataacatgcaacatat

SEQ ID NO: 288572 - DNA, 430 bp, Glycine max
  unsure (1)..(430): unsure at all n locations
agttttataatgtagcagttccagggaccatcgacgaacgggcgatcaatacaaaaagaatactcaatccatgggaaaggaatgaaaatcacacactntgcctcaactctgctaaagcaattggatgtacagtggtcaacattggcactcangacttcattgaaggaagggtatgtttgtaggccttctagtttccacccataaaagcagaattattgtgggcatgtacactgcagaaccacaaaatttaagatttaatttaatttataaatgaaatctggtcagatttgattatttctcgatcaaagtaattctcaatcaagttaaccccttttttaaatgattccgaatgctggtaaagtatctntatagcatgctacattnttttacagtcaaagcctntctctattctttntggcaatgctacaca

SEQ ID NO: 288573 - DNA, 429 bp, Glycine max
  unsure (1)..(429): unsure at all n locations
tgttgaagtctaaatagatggtgactagacatttngtgattcaaactccatagaaggtatatagcaactatttaattaaaaaacaacctaagaattcatttagttcatatatttcgaggagagctactggtttgtttggagtagtgcattcagatgtgtgtggaccatttatggttccttctcttggtgggaacaatattttgtttcctttgtagatgaatttagcagaatgttgtggatctttcttatcaagtccaagtcaaaaaaattttcaatctttaagaattttaagttacttgttgaaaagcaatctgaaaaaacatattaagatacttatgactgatggtggagttgagttgagtatacctttaaagagtttgaagattattgcaaaggatntggcattcaacatgaagtgatattaatatg

SEQ ID NO: 288574 - DNA, 344 bp, Glycine max
  unsure (1)..(344): unsure at all n locations
tttatctttcttgtggggcttctatggtggctggatctttgagcttcaatgaggtcctttaatggtgattttccaccatggagatgcagcggaagacaaaggagaagatgtgagaggaggcaccatccactatggaataagccatggaagaaagagcttcaccaccaagatgagccttggataagaagctcggagaggatgcttcaatggaggaaaagaaagacggagagaaagagagaggggggagcacganattgaacgaagatnaagggagagaagttgaactttgagttgtgtctcacaagactctcattcatcanagttacaacaagtggtacacatgc

SEQ ID NO: 288575 - DNA, 432 bp, Glycine max
tctttaagagtttcatgcagtacaacctgcccactcttcaattatgcaaattgggggatgcaacatctgtggtggggcccatgagttaggtaagtgcatatcccaacacgatgcatccaaagaattcaactacatggctaatccatatcatcaagggttccatcaaggaggacctcttcgatacaatcagggagaaactttttcttaaggccaaggttggagatcccatcctgggaataatttcaataaagatagacaatccatccatttcaccttccaaccaagggcctaatctttatgagaggaccaccaagctagaagacactctgactcaatttatgcaagtttccttgtcaaatcacaagagcacggagttagctatcaagaaattggaggtgcaagtgggccaactacctaagcaactagatgaag

SEQ ID NO: 288576 - DNA, 264 bp, Glycine max
tacattgatgtttgtatttatgggaggagggtgtatgtcatttttggtttaaaaagagtgtcccactggtaaaactaactttccaaatgtttgccttctcacgaaatggccccgaggaagcttgcctcaaagaggtccccgaaagacaaagcagccgaaggaactatttccgctccggagtatgataatcaccgctttatgagtgctgtacaccaacagcgcttcgaggccatcaaggatggtcgtttctccgggagcgacgcg

SEQ ID NO: 288577 - DNA, 429 bp, Glycine max
  unsure (1)..(429): unsure at all n locations
actcagcttggcaataagtactcccgcatttatctctgtatgcattgtatgtaggtctcgtcctttgtcacgggaagccggaaggtccatatcaccttcttaattgtacacatggggcactgcgcccccaaatgcacaagtaagaagagataattttccgggctctcgtgtccgtaaaatgcattcatatcatgcaccacataagcatctcttcataacatcataatggacatatcctgcatttgtccgttatcatattccagcctcacattttgcatgagtcatggcatcatcatgcatatgcgttcaacaaactttttgatctgcaaaattgcataccatttgttttcatgtttgctcatccttgcgttntcctctacaaaacataaacaaaaaagggggaagcgtgaaacttcacactacattctt

SEQ ID NO: 288578 - DNA, 236 bp, Glycine max
tatctcttcaaatcattttgaaaaggcacgaactacctatatatatgtgtgtctgatttcaaaaagcaagagagagatattccaagagaacttcattgtcaaatgctctctcaacaacttttgggcacacacttagcaatctattaagagttcatccaacaacttcaatagtaatatccttcttttaaagagagaattcttcttcttcttattaaaagagattgattaacggaccg

SEQ ID NO: 288579 - DNA, 430 bp, Glycine max
tgataaatctatatatggtttaaaacaagcctcccgtttttggtaccttaagtttcatgggataatttcttcatttggttttgatgaaaaccccatggatcaatgcatataccacaaggtcagtgggagtaaaatatgttttctttttttatatgtagatgatattttacttgtagccaatgatcaagttttgctacatgaggtgaaacaatttctctctaagaattttgaaatgaaggatatgggtgatgcatcttatgtcatcgacattaagattcatagagatagatctcgaggtattttgggtctatcacaggaaacttatattaacaaaattctagagagatttcagatgaaagattgttcaccaaatgttgctctcattgtgaagggtgataggtttaatttgaaccaatgtccaaagaatgac

SEQ ID NO: 288580 - DNA, 412 bp, Glycine max
gcccaaaccataacttcgatgatgttgcacaactgcctatcttctatagtggtttgaaacctcaaaccaagatggtcttgattcctcaactagaggcactatgatgtccatgagtccagaggaagctattataatgattgactccgtagcagctagtgattatcaaagtcatcacgatagagctccaactcaaataaaagttataatggagttggacacttagaaaaaaaactcttgacacaacaaattgaggccttaacaaagcagatatgccaacttccacagcaatatcaccaaggtggaccacataaaaaaaattaagctcaccgagttcaacacattttgagatgtgaattctgtggtggtaaccatcataatggccactgttcagcacctagtgatggacaacaag

SEQ ID NO: 288581 - DNA, 433 bp, Glycine max
  unsure (1)..(433): unsure at all n locations
atgctgcaaacatttataatagacctcctcaacagtctattcaacaacaacagaataattatgacctttcaagcaataaatacaatccgggttggaggaatcatccaaatctaagatggacaagtcctccacaacaacaacagcctgttgatcgaggccatacccgaatcaaataaacattaaaaatgcagtatctaggaagtgatcctaggtcgtctcccaatgagcaatggtcaaccaaatgttcataacaaatagtaataaaatagtaacgaattgggggggggggaggatntattttaacaatattgtttaaattttgagttgattaatctcatcacgacatagttatctaccttatttgaacatttggttaataatcatatatatatatatatatatatatatatatatatatatatatatatatatg

SEQ ID NO: 288582 - DNA, 376 bp, Glycine max
  unsure (1)..(376): unsure at all n locations
agcttttggtatgatctgggacctaaccatggcagaggtctccacagaggccattgtctccctcgcccaatattatgaccagcccgtgatgtgcttcacctttgtggacttgcaattatcacccacagaggaagacgttgaagaaatcctgagatgccctctgggaggaaggaaaccatacctattctcgggattctatccctctttaactagaatttccaagatatgccaaatctcaacgcacgaattaagccacagaaaggaagtcgaaaatggggtggttggagtaccaatgaaatgctaggaagttaaagcaatactcttggangtaaaggcgaatgggccccgttcatggacatcctcgcacttttgatct

SEQ ID NO: 288583 - DNA, 433 bp, Glycine max
  unsure (1)..(433): unsure at all n locations
nttcaattcattctatgtacccgtggtggtccacattttgtttcatgtatttttattctcattttcatttactttttatacccccttttgacgtgcttaagccatttatttaagtcatttctcgcttaaactaaaaataaaataaattttccaccgatcgtttggattgtatcatctgttaattttggttaaaatgaattccgaccgttcggtcgtgccgtaaccacgttggaaatcaaaaaagaggtaaaataataatataataataaaaaaataccttttagtaaagtaaagcgaacaatcaatcggacgttttctctttgggatttctcattcttaattgaattgactaataactaaagtgaaatcaaggctaaaatcaaactcacctagtcaagctcgtccacaataataggtttttgaaagtctatca

SEQ ID NO: 288584 - DNA, 341 bp, Glycine max
  unsure (1)..(341): unsure at all n locations
agctttatatacaccaacagcaaattttttttcaagcaccacaaactctaactcaaactcaaaagactcaaacagaagagaagaagagaatgcatatttggtagatattctatgtgcaaacagccttatttaaagggaaagggaagaggatggtttcccctattacgtttcaactgttctgaaccttgaaaatatcagtcatgttcaattntttcttcattatttctgcaaatcctatacctgaaccctagcaaagagtacaaagccatgcatgaaccccctatactgaacctaccctcatgcatgttgcactgcacgggttgtatcttgctagtttcact

SEQ ID NO: 288585 - DNA, 408 bp, Glycine max
tccaacacacattggttgtatggacaggtttgttattgtattgacaaaacaccttttttgaggagttgggagaggtggatcggttgaaggatgatccatgatttgcattataggacttttgtggtaaggttgcttacccttgtgtattgcatgagcaatggcaacaaatgaggtatcattgttgttgtcatccctcttgagataactctcaaagtcaagagaagatcatgaagctcttcaaagtcaatcggtttttcatgagtgtgaagagctgtagaaacctccttgtactcagcacttagcccatttaaggtgtgaatgacaatgtctgcatcgtccagtggatcattggtgatggctaattcatcagtcaaagattatattccatggagataatcactcatggat

SEQ ID NO: 288586 - DNA, 393 bp, Glycine max
  unsure (1)..(393): unsure at all n locations
agcttgtatggttaaagtctcacgattttcacgtgctcatgcaacaattgttagtcgtggctatacaagacatcttgccaaacaaagtcaggttagccataactcgcctgtgctttttcttccatgctatatgtagcaaagtcattgatcctgtcaagtttgatgagttggaaaatgaggccgcaattatactgtgccagttggagatgtttttccccctgctttctttgacatcatgattcacttgattgtgcatttggtctgagaaatcaaatgttgtgatcctgtttatctacggtggatgtacccggttgagcgatacatanagatcttangagggtatacaaagaatctatatcgtccagaagcatctattgttgagaggtacattac

SEQ ID NO: 288587 - DNA, 434 bp, Glycine max
tcttggatgcttactccagatacaactagattaggatttttgctccaaaggaggcgaagatgacatttatcactaaagataccaacttttgctaaagggctatgccctttcagcctaaaaaatgtagacgctacataccaatgactgatggaccgagtctttaaacaacaaataagacaaaacatcaaggtatatgtggacaacgttggcggtaagtctcgaagcatagtccaacatgtggcagatctgcaagaagtcttcaaggaactttacaagtatgacatgcgcctcaaccctgaaaaatgtactttcggggtaggcagaggcaagttcctcgacttcatgatcactcaccaagggattgaagccaaccctaacaaatgccctaccatactagagatgcacagcccgaccaacatccaagaagtctagaa

SEQ ID NO: 288588 - DNA, 386 bp, Glycine max
  unsure (1)..(386): unsure at all n locations
agtttatagtcttcttgatagaggaataacaaagatcctaatccactagtacctgttgataaaatcaaacaaaacaatgtaattataattttaattaaaaaaagacataagttttttcaactttatttttttcatttatgtccttttataattgttctcttatttttaaatttacgtatccattaaataaaaaaaacgtagtaatcaagaactgaaaatagaaaatataaatttttaaataaactaaaaataatgtgtagataaacggataaatcttcaatttctaaataaatggttgaaaataagaattatacctatntaatttattagtaaaaatcattttaattaacttaaaatacattntgtcaactataaatagagaatac

SEQ ID NO: 288589 - DNA, 472 bp, Glycine max
  unsure (1)..(472): unsure at all n locations
aggcgcaatgatccgtggattctcaggaccttgaaactaagcttggcattgtataattttctaaaagattattttttattntttatttattttttaatttgtagataaataaaattattaatttttaatttatagtagtatattaaatacaaaagtagatataataaatgtgaatattacttttgagtgttcatttttatattatggatattatttaccatctaattgattttttgtgtttataattaatcaatttaaatgtattttcagtaaaattaaaaaaatttaaatttgttaaaattgtgtgatttattttatcctttcagagttatttattttaacaatattgtttaaattttgagttgattaatctcatcacgacatagttttctaccttatttgaacatttggttaataattatatatatatatatatatatatatatatatatatatatatatatatatatan

SEQ ID NO: 288590 - DNA, 377 bp, Glycine max
  unsure (1)..(377): unsure at all n locations
agctttacattatattntagtaatgacccactaacctagaattaaaataacttaatgccattaacctagggaattaaaaaaaaaaacttaatggctgagtgtaactgaaattgtggcaaccaaaagtcacccccaacagccaacaagtcagccaccatttggtctcccaaaaggttgaggcctaggttgccaattgggcccttattacaacttgaactaaacctactaaagccctttaagttgattaacccaaaacatatttttggtcagccaactntacaaggattgggccattatttagacaaactaaacactctaaaattgagacaaagtggtgccatttagtccttctccatttgngccatgatacaactcac

SEQ ID NO: 288591 - DNA, 425 bp, Glycine max
tgtggattaggggttggttgtgcatgtttggcagattttgtagaagcttgtggttaaagggtctgttttgtctttctcataatctttgaaggagcttgtagttaaggggtttgttttttctttttcacaatatttgaagaagcttgtgtttgaggtgcttgtttcctttaattcagctaaccaccttttggttgaattccctaaaccaataataagtgtcattttaagtaattaacatataaaagatgttaactaatgtaaataaagattagagacttaccaagttactttccttattagttgctgcatctttgtcatttttcgtgtgttgagggataagttctttcttagcttgattgaataacatgtactatgttgtcattcctagtgactctgctgtcaagaactgtgttgttattgtggcg

SEQ ID NO: 288592 - DNA, 359 bp, Glycine max
  unsure (1)..(359): unsure at all n locations
atctttgagcaaattcaggcgacaatatctttttactcgtatgtctgattgagtcccgtcatataacgagacgctcgaaattgaatgttgaagctctgagccaattcaaacgacaataactttttactcggatgtctgattgaatcctgtcatatatcgagacgctcgaaattgaatgttgaacctctgagcgaattcaaacgacaataactttttactcagatgtctgatatagtctcgtaatatatcgagacgctcgaaattgaatgttgaagctctgagcaaattcaaacgacaataactttntactcggatgtctgattgagtcccgtcatacatcgagacgctcaaaattgaat

SEQ ID NO: 288593 - DNA, 427 bp, Glycine max
  unsure (1)..(427): unsure at all n locations
tcaacattcaattttgagcgtctcgtaattttactgtattcaatcagacatccgagtaaaaatttattgtcgtttggattggctcagagattcaacattcaatttcgagcgtctcgatatattacgggcctcaatcagacatccgagtaaaaagttattgtcgtttgaattggttcagagcttcaacattcaatttcgagcgtctcgatatatgaccggactcaatcagacatccgagtaaaaagttattgtcgtttgaattggctcaaagcttcaacattcaattttgagcgtctcgatatattacgggactcaatcagacatccgagtaaaaagttattgtcgtttgaattggctcagagattcaacattcaatntcgagcgtctcgatatattacgggactcattcagacatccgagtaaaaag

SEQ ID NO: 288594 - DNA, 360 bp, Glycine max
  unsure (1)..(360): unsure at all n locations
agctttangagatctgaaactcaacttcctcttcctccatggaagtatgctgcgcttggaactttgtactaaataaggctgagaagaagaagcagtagaatcctccctctgtgaacacccaacatcagacttgcgatggctgtaataaacccagtcttcatcattacaatttactctcgcattggaatgaaaaaatcccccagcatttgcagaagccagtgttccataactgaatgacttcctaacactggaatcctccttccccccatctgtttcaccttcctcagaatcatcaagtgactcagaatccaaaggataattgtattcaccatcctcactcctagagcaccttncttcact

SEQ ID NO: 288595 - DNA, 414 bp, Glycine max
  unsure (1)..(414): unsure at all n locations
tagccattgcgaattatatgcagtcgaacatatattattatgatctttatctttattctttagtataaacagaaaagatcgactttgatcagtatatgtcctatggcaatctattaaacaatttaattaattaattattcgacagaatacatatctgcaagtttcaatatatattttattcaacccaaaacttatctatatcaggaatatgagtaattatgtttcaacaccataaatatttaaagaaaaaagtaaattagttcgatatagctataactaaatcatagcagattatcaatcaagttacatgtagtagtgtatcctattgaaatgaaactatctttgagagtcttatgagctaagcacgttagaatntggaattagggtatcaggtggcccatgcattccaccact

SEQ ID NO: 288596 - DNA, 419 bp, Glycine max
  unsure (1)..(419): unsure at all n locations
agttttttcttgtttctctccccatttgaaaccaacatttttcttgagcacttcattgagaggtgctgccaatgtgctaaaatccttcacaaattgtctataaaaacttgctaagccatgaaaactcctcacctcggtcacggacttangtgtaggccattcttgaatagccctaaccttctcctcatcaacttgcactccttttgaactcacaacaaaaccaagaaacacaacatggttagtacaaaagatgcatttttcaagattggcatacaattgttcttctctaagcacagtcaagacagattntaaatgatcaatatgcaaatcaagtgaagtgttatagataagaatatcatcaaagtacaccacaacgaactttcctatgaactctctcaaatatggttcatagtctcatg

SEQ ID NO: 288597 - DNA, 431 bp, Glycine max
tccatcactgtatttggccagtttcatgattctctatattaagaagaaccgatacatccacagtgacaaaattatggtggaaggcaattgtagtgttgttgttcaacacattcttccacctaagtacaaagaacttggagttgtcatgataccgtgttccattggtaaggttgctgtaggaaaagctctcatagacttgggagctagtatcaacttaatgcctctttccatgtgctggtgacttggagagatagtgataatacatacacgcatgaccctctagttagcttattgctccatcgcaagaccatatggagtgattgaagatgttttggggaaggtgaaacaccttatattcccagctaattttgttgcgatagacatagaagaggacgctgatattcctctcattcttggtcccccattcatgt

SEQ ID NO: 288598 - DNA, 404 bp, Glycine max
  unsure (1)..(404): unsure at all n locations
catgttagcttcaacccactgataataggacatagactaaaatacagnggtagtatttttacgaattcaattgatatatgatagtggtcaataaacatatatgatctctaaaagcttacatgttgacattgactattcagtttatacctatataaattatctaattctggtgagggattgatgttgaattaaaaaaaactaacggaagatgtaaaaaatgaaagttctcttagccaataaaagaagtaatccttaatagcatgtagaaatgtgggttttctgtctccgaccgagtntgttttcttctaattggatcagaatattgtaacaaaaattgcattttgtgcacattcatttataatatgtaaataaataaataaattgagtcttgtacacattttcag

SEQ ID NO: 288599 - DNA, 430 bp, Glycine max
tgtccagacactacattgattgaacagtataatacatttcgaagaagaaaataggaaaaagcttagatacagttccttggtttttgatgttgttttccaatcagaattggagtttcactttagaagtccacataatatagatttgcattaaaggattctgtagattattgaaatgaaactccaattctaactgaaaacagcaccaattgcacctaaagaactgtatgcaagttttgtccaaagaaatataccttgaaaccgtgacacaaccgcagatggcaagaagcaaacctcgtagaaggaatcatatccaaccaaaagacaaatcaagtaaatgactccacagacaaccaccactgcagaagtgagaaacggaatgctttcccaccattggctcatcctagtaggaaacccggcctgagtcaattaa

SEQ ID NO: 288600 - DNA, 373 bp, Glycine max
  unsure (1)..(373): unsure at all n locations
tctagctttcatcaagtggtatcagagcacaagagcttcaagtaggtgctccttaaacctccattaattttcagctttaccttctcctccatttttgtttcttcattnttctccatgtatctcctcacatgacttgttttgaattttgttaacatgattttttagaatttccaccgattaaacttgctatagaagatagatttgattttctatggttcaaatttcttgctcttgttcttgaaccacgaattgtgttgagtttaagttcctttgagtcttgtcttggctatttttgtgggtgaaacctaaaccatanaattcttacaaaaacattaaagtagaagaaaaacctcaaaatatagagtgacttgtc

SEQ ID NO: 288601 - DNA, 426 bp, Glycine max
  unsure (1)..(426): unsure at all n locations
tgaacctcatcgccactactagatgactccacttnctatctttctcctaaagacaacaccaagttaaaatcaatcatcacaattacttgccatcaaagctactacctttgcccataacttttccccttaggtcatagggagcatatacattaatcacctttgttggacaagaggcctcaataacttaagagggggagaaattaagtttcaaaatttcccactaactaacttttaacccttttttaaatgataggctcgaaatgcagaagaagaagcaacaatcaatttaataatgttctttaaacatgcaagacaaaattgattgcaataacataaatgagataagggaagagagaaatgcaaactcaatttatattggttcggccacttcacatgtctatgtccagtcctcaagcaacccacttg

SEQ ID NO: 288602 - DNA, 411 bp, Glycine max
  unsure (1)..(411): unsure at all n locations
agcttgtatgattatggggtacccatcacatgtggtactaggtggcggtcgggcgatggtgcaattcaactctccacatccacagatcacacataaacccaccatccccagttgcccaccttcactgagctcacgtactcccacgtagcccttatcttcgttcctctcaacacctggtccccatcaatctctccaagcttccacaacatccaagcaattcaacatcccaaacatcatgaactatcaaaaccaaggaaaacatggcagaggcagaaaactctgcccaacacaaacaaatatcacagcttttctcacttaaaaaccccagtaacattctcctcgttccaattcgttaaccgttggatcgactcanannatttactggaagtctctagcacataagtctacatt

SEQ ID NO: 288603 - DNA, 433 bp, Glycine max
tcaatacagtgacactagtgttgcaacaaaggagctgtcttagtcttttggatgggatacatatgattctttcatgcagcatgatgttcaagaactaaatcgggttctctgtgaaaaacttgaagacaaaatgaaggtatggcaagagatttggaatgtttgttcatgattcttcttgatgagtgatcataccaaatggttgttgtatgttatttttcttcaggaaactgttgttgagggaactatacaaaagttatttgaaggacaccatatgaattacattgaatgcatcaatgtagactacaaatcaactagaaaggagtcattttatggtacttccttatgcattttgaattcaattatatgtttagttcttctttgttatgtaattctaatttagtttttgcatatgcatgttagatcttcagcttga

SEQ ID NO: 288604 - DNA, 305 bp, Glycine max
  unsure (1)..(305): unsure at all n locations
agctttctgacctgagcatttgaattgagaaaaagctcattatcttcacggcagaattccccaatagcacgtacatcaacaaggttcccagagtctctaatttgaagaatgtgtatagtttgatagcgaagtgatacaattgccaataggtcatcatacaagaagacccccatattatgggttanattaacgaagtcattactgaagaccttcttgtccaagatctctccatcttccagtctaatttagtaattaatacgtgagaaatgggaacaatacataatctagagtgaacagagtatgat

SEQ ID NO: 288605 - DNA, 432 bp, Glycine max
  unsure (1)..(432): unsure at all n locations
tcaacaccaaatcctggacagaatctttgttaagtattaaaggatcaatcttattccataaaccacaactctgccaaacctccaagctacaagcacaagtgatgaaagtattgcatgccaacaattcttcaaggcatctgcacatgaaaaagttttgtggatttatttaatcaccatgattacaagtttttgaagaaaacttcgatacacaagccagaggataacgcagtgaaactcatgtaacaataattagggggcatttgttttaagatattgagcaagattttaaaaaatgtgaacctaaaaatatcacattctgatgtttaatacaagttgtaaaaaataattaatttttagaaatatattctaatgaagaatattcttaaaaataaaatttcataacttanaacaagcatcctcttaacatatcat

SEQ ID NO: 288606 - DNA, 386 bp, Glycine max
  unsure (1)..(386): unsure at all n locations
agctttgtttgacatacatgaagaaacaaagaatttctcacgagtggactgtgctcagattctagtattcactttgtccctttagatgatatcttcatcgttaaggataataataaatgacaagatttgactggtaagaattgtgaaggataccattgtggtggtaaatcattgaggttataacatgggtagctatagaactaacgaagattgagtttccaatgaaggaagtaaaatggagctcaaaataggctcatccatgttagagcactttatggactttgatctggaggaagataggaataaagaggggttatggaagcangaggcagatcggaaagcacgacaaggtgttcaatcagagaagaaacatttctattcccact

SEQ ID NO: 288607 - DNA, 429 bp, Glycine max
  unsure (1)..(429): unsure at all n locations
tgtgcttcgaccaacccagcctcaatttacgtgccattgtgtaagttcttgcttaaaagtgcaaccttcaatgggaaatgtaacaacaagggtatttctataacaattgatggcactttggtggctccttcagattatagggtcaccgaaaactccggtaactggttggaattcgagcgtgtcaacggagtttcgattcacggcggggcgcttgacggccaaggcactgccttgtgggattgcaagaactccggcaaaggaaactgccccagcggagccacggtatgttaaattaattaatttaactctcatggattgaacattattcgttgacatgcacaatttcttgctcccattattattgttntgatttgatgttggaggtggagttgtggacttggtgattactgagagtttcttagtggggga

SEQ ID NO: 288608 - DNA, 390 bp, Glycine max
  unsure (1)..(390): unsure at all n locations
agcttgtactctantgtgtgtgtgtgtgtgtgtgtgtgatatgtgcagtangttaacagcttctaaaagttatgtaaacttaggggcaagaggttaacatttgtaaaggacaagcccttcgtcctctcctctccccaatttcattcactactttataagttggtggaaggacctgctctcatcacaacagcagcagcccaacagtgtaattaaaatagagacagcttggaaggtgggcaggggagataaatttagattttgggaggaccgatggttggaatctgaagcactgctaatggagaaatacccaangctgtaccaaatctcgtgtcaacanaatcaaaccataatgcnagtgatgagtcacttgagtagcggatgggaatggag

SEQ ID NO: 288609 - DNA, 413 bp, Glycine max
  unsure (1)..(413): unsure at all n locations
ntgcaacaaatagtggctaatttgagggcgatccaattgtatgaggggacccaacatctagaggcctgcatgcgtgggttgctagttacatgtattgcttgtcgctggagcagacccatcaactgccctaactcttttagactggtgatccctaggctcttgaccttgacttgatagaacctctttttaagcgaaggtgtttgacttgatcccatgttttactaaagtgtgcgaatcaaaacttcaacatctatcatgggtgggatggatgaatgcatgaagaaatgcatatgacacaaatgcaatttatgaatacgggagcccgggaaattgtctccttcttagatacaacgtcttgnggtagcacagtgcccgacgtatgtatttaagaaggtgacacaaaccctccattg

SEQ ID NO: 288610 - DNA, 344 bp, Glycine max
  unsure (1)..(344): unsure at all n locations
agcttttttgttatagtcactatttacgtatcaactatgatccatatattttcagcattatctattatattctcttaaaaaaatcccaaataacaataactacacatttattcatattaaaagtgaattgacgtgtttgtagaattaattttgaattaacatggctctatagaattgattgtaagtaaacataagtttgtagtatataatatgattattgtttggaaatttgctaccaaaactgatattgtgggcaattactacaatgacttgagttcaagagtacacattgaacaaatagcatgactaataatacgactcaagttagtgtngattcaaaagct

SEQ ID NO: 288611 - DNA, 412 bp, Glycine max
tacccccactattacccacaaccacccaccaaacctttcttgttaagaaaatgacatcggcagaaatgcacttgagaagagaaaggggcctatgctttacttgtgatgacaagttttcccctagccatcgttgtcctaataagcaatattttgttccacagtgggaagaagaggatgaacctgcattacaaccagatccaccagacgaggttgagacagctggtgaccctagtttgcaagatcatcatttgtcttataatgctttaaaaggctcatcaagtcttggaacaatgaagttacaatgatcaatgcatgtgattgcgattgcagattctacgtcatcacgtgagcctatatatgcccttatacttactatctaccgtctgaagtacctatagaaccattctaattg

SEQ ID NO: 288612 - DNA, 361 bp, Glycine max
  unsure (1)..(361): unsure at all n locations
attctttgaagataccgagaaagatagagctgtttgtaattttagtcctttgttctgtttgatactccataataaaatggtatattactattattattatttgttctaataaatcatttactattattattttattttatggcttgcgaaataaaaagaagataggaggtttttctagaggtgaatgatgagaccattccatgcctcttcaattaagtgtttttcattgaatctctatatttttgtcgggtcaataacatatttttgttatcagctggtgatcttattgatgatgagacttggcctncaattgtcctaatcattcatcatgatattgccaataagataccgattcatgctc

SEQ ID NO: 288613 - DNA, 425 bp, Glycine max
tttcgattcattctatgtacccgtagtggtccacattgtgtttcgtgcatttttattctcgttttgtttactttttatacccccctcttaacgtgcttaagccattttacttaagtcatttctcgcttaacttaaaaataaaataaatttccaccgaacgtttgaattgtattatccgttaacttcggttaaaataaattccgaccgttcggtcgtaccgtaaccacgttggaaatcaaaaaaggaggtaaaaaataatataataataaaaaaaacatcttttagcaaaataaagcggaaaatcaatcggacgttttctctttgggatttctcattcttaatcgaattgattaataacgaaagtgaaactagggctaatatcaactcgcctagtcaagctcgtccacaaaaataggcttttgaag

SEQ ID NO: 288614 - DNA, 338 bp, Glycine max
agtttattagttgtgaaatttgtaagacttaattcaccccccccccctcttaagttattgaggccacttgtccaacaaggacactatcttaatgagcttaagcattatctcgatggtaggtatatttctccttgcgaaagagaccacttgttgttgaaagattgaactttcattttctggtttgattcaataatatttgaagatgatgacaacattgatgctctgctctccaagccaattgttaaggagtccatgtttacttggctacaagctaatagcatgttcaatgaaggacaacatctaacatatgtgcaattcataacaaagtttacatatgt

SEQ ID NO: 288615 - DNA, 422 bp, Glycine max
  unsure (1)..(422): unsure at all n locations
cgttacagaacttaggaaaaatcagaacaagcttgttgtacatcgttcgcgtgtacgatatccactcgacaaggtttgaagtagaggagaccttcaatcctataacgcaacgtggcggacaaaaatgggcagttaacttgaatggccattattgtcaatgcggaaggtattctgcgcttcactatccatgttcacacattattgcaacttgtggttacgtgagcatgaactactaccaatatatagatgttgtttacaccaatgagcacatgttanaagcatactccgcacagtggtggcctcttgcgaatgaaacggcaattcctccttctgatgaggcatggacactaattcctgacccaactacaattcgtgcgataggtcggtcataatcaacatggataacgaatgagatggattga

SEQ ID NO: 288616 - DNA, 387 bp, Glycine max
  unsure (1)..(387): unsure at all n locations
atcttttctctaagcttcttatccaaggcactctcttggtggtgaaacttctccttccatggcttattctttagtagatggctcctcctttcacctcttctcctttatcttctgttacatctccatgatgaaaaatcaccattgaagggcctctttgaagctcaaagatccagcctccatagaaggttctcaagaaagcttccatcagtaaatgtagccattaacttatgcgtaattntaatattttaaaacaataatatgttatttcttccaacaggttaagagcatcattagtgggagtatgtactcaatagcaatgggagataaacatactaaaagaaccccacacttgtgtatcaacaatgttatcacaatatcacataaagc

SEQ ID NO: 288617 - DNA, 414 bp, Glycine max
  unsure (1)..(414): unsure at all n locations
tgtaggattatggggtacccatcacatgtggtactatgtggcggtcgggcgatggtgcacaacaagttttccacatccacaaatcgcgcataaatccaccatcccctgttgcccacctccaactgagctcacgtactcccacgtagcccatatcctcgtttttctcaaccccgtgtccccatcaatccttccaagcttccccaacatccaggtaattcatcatccaaatcatcacaaactaaaaaatcaagcaaaatagggcaaaggcagaaaactctgccccaaactcaaaccaaaatcacagctttttctcacttaaagaccccagtaacatttccttcgttccaatttgttaaccggtggattggactcgaaaatntactggaagtctctagtacataagtctacattttg

SEQ ID NO: 288618 - DNA, 409 bp, Glycine max
  unsure (1)..(409): unsure at all n locations
agcttttgcttttcactaacataagctcatttaatattcaaggcttgtcaggtttcagaggcttaattcggaactatgatggataatgtaattccctgggagttgatgtcttgatggtttatactttacgacacttcagtcgatgacacttcacttaactttcttgttagttaaaatctttcactaatcagaatccttcgtaagtagtccttttcgatatattcataaccaactatgataccactcttagcacccgactgctttcaggattaatgactgtccttgtaaaccatcaaaagactcttttaacatactttnttctcattcacacactttccagagnactctntatgagattacccatctcataaatatntcaagacaaacacacttaactgtgaaattctta

SEQ ID NO: 288619 - DNA, 430 bp, Glycine max
tgccatttgcattattagagaatctaccgtgagcttttctaaaaaaccactatgaaaaataaattaaacaaataaaaaaaccacaattaaaagagggtatgaataagatatgcatatttttcaatggatcctaacaatgcacaaaaatgagagagatagaaaatggaaaaatgatctcaaggtaacaaacaattcatgagcacttgatcacaaaatgcaaagtggataagtagttaagtcaaaattaagaatgctccatggtgatagaaatttttcaaacaacactcaaccctgtcaaatgtgtatgggtttgtgtttacacttaaacaccacatgtaatgatgtaagctccatttgagcttgtatgcctacgatcttcttcatcaatggattcattgacttcttgaaaggtgaatgtgcgcagaatgga

SEQ ID NO: 288620 - DNA, 386 bp, Glycine max
  unsure (1)..(386): unsure at all n locations
agcttctctgagtattccttaaagcttattattgacaaaactttgcacataagtttaatattgaactatttttcaaatcactagacgagagtccatagggcccttaatcacacatagagatagattacctaagtggtaattcgcctatgaaggcccaaggtccatggcccaaaaaggtttgtataaaaaagttgagacccctgggtaaagaccatttctcattcttgcatttactatcctatttattgcttagagtcaaaacttgacttgggcatcaaagtaccttttgttggtacccccctttggaccaaacactanagcaagacgaatagtgtaatgacccgcctcgtcgctacgatatcacttattataaaatgtgacatcat

SEQ ID NO: 288621 - DNA, 420 bp, Glycine max
  unsure (1)..(420): unsure at all n locations
ntaccggtatccccattttcagaaaatggaggtgtttattcaagtcactgctatgctcgctgttggcttaatccaacctagccatagtctgttctcttctccgatactcctagttaagaagaaagacggaacctggcattaaagggcactaaaggaaatcacggttaaagattgttttcctatgccaaccattgatgaattactcgacgatttgggccaagcatcatggtttttgaagctcgatttatgccaaggatttcatcagatacgtatggtcaagacttacattcataagacagcttttcaaatgcactagggacattatgagtttaaggtcatgccctttggcctttataatgccccttctacttctcaagcaaccatgaatgatgcgctccaaccatttctgaggaaatatgt

SEQ ID NO: 288622 - DNA, 388 bp, Glycine max
  unsure (1)..(388): unsure at all n locations
tctagcttgttcgaagatcctcgagacgtcatacgaggggccaatctttcggaaaagactttcaagaagtttttgaagatttctcttgatgaaaactataacctgcattcttttgagttcaaccattcccacttctgcaccatggggtttgttacctggtgggagaaatattattcgacccgttcagttggagacactactatcatgatctgcagactcgagagtggttntatacaaccaacggtcgagaatatccgctcaaaccttcaagctcgaggtattaaattccttttgactttctanattgatatgtactattggcttctctaatattcttatttcaagcaaaacaatcatgacgaagaanagtggctgaacgtctcgagct

SEQ ID NO: 288623 - DNA, 427 bp, Glycine max
ttcctttgagaatccacgaagcattatttctcttgtttaccaaagttaatgtcgctgattgaatggcagcaaaaagtgacaaaatagctgtactagagtattgacatgggtattttttgctaatctttgcttgtataatgaaccatgaagaccacaggaggcaacctagagtcagaagtatggagcctacaatccatttctctaacttggcagctggaagcgtgcttgtaattttgtttgctatgtgttgagattgtgggttgataaggggcattcctttataaaggaccaataacaaagctccaccaatgcacaccaaagttcccatgactttggctgtaccactcttgctttgcatgttcaccttctctaccctagaaaaatttcaagccaaaggatcaaaagtatttttcttgtattccacaat

SEQ ID NO: 288624 - DNA, 375 bp, Glycine max
  unsure (1)..(375): unsure at all n locations
agctttatggagattcatgcatcagggaacaatttcactttaaaagtgggtcccaattggcttcctaattttcagcttttccatttggatgtgagatcatggcagttaggtcccagctttccatcgtggattaagtcacaaaacaaacttgaatatttagacatgtctaacgcagggattattgattctattcccacacagatgtgggaagcacttcctcaggttttgtatttaaacctctctcataatcacatccatggtgagagtgggactacattaaagaatccaatatctatccccgttattgatctaagctcanatcacttgtgtggtaaataccctatctttcaagtgatgtgtctcagttagatcttt

SEQ ID NO: 288625 - DNA, 428 bp, Glycine max
tagagagattcccgatctgagagggtactgctccgtctgcaacagctctcaggtcaagatacaccaaatttgagagattcccaatctgaggaggaatcttccccatgaatccagtatgagagaggttgaggtgagtcaaggaagtcattgtcccaaggaaagaaggaattgacataccttctccaaggtattcattggcgctcaagtccaagtaattcaaatgctttaaatcagccaaacaaggacttatctctccaccaaagctccatctcctataagcttcccaatcatcattgaaaatagaatctgaagagttgaggtgaagctgaagaagatgggaagtaaggttgtggcagaggactccataccagtggcaacagttggtattattatgattccaagaccaaagcctattggaaggatctatg

SEQ ID NO: 288626 - DNA, 375 bp, Glycine max
  unsure (1)..(375): unsure at all n locations
agcttgtctggttcttccattaattggagtccccaccattgtttctgctccaactctttgctctttgttgtctaggaagagcacatcaccctcaaaattttgaatcctcaacatgataaaaagactatatttttaagcatggtggtgcaatgaaactgaagaacaagagcaacccatgatttanaatgagctggagattggaaaaatggatatagaaatgagaaaaaaacaaaatggtaccttcaaatttgaaggaagtggtggtgtggatgtgagtgataatggtggccagttctggtttttggtgaccattttgaagcacaagcacttatgtagagaagcatatgagagagagagagagagactatgactaat

SEQ ID NO: 288627 - DNA, 444 bp, Glycine max
cgaccttagaaactcagctatgcattgaagttggatctttgccttcagtttttacacgtgcctacaattgatatggtcatacatccatcaaatatctctaattaaaatgaaattatgcggttcattacagaaaataaaatatttactttttatatgagaaaatcaaatgctgatattatgaatacatatataataaactagagtaacacccgtgctatgtagaagtaggggaagaaaaaagtttcaaatagttgctccatacttttaattaaagagagtgtagagtaataaaaaaaaaattggtgtgtaggccaatacgatttttatttttttacagatatcaaccataaataaatgtatgtaattaattaagctagcaacatttgtctggttcaaagtagtcctgaacattaaattcttctacaattattggtgtacatttat

SEQ ID NO: 288628 - DNA, 292 bp, Glycine max
tgagtatttttcccttcacttttttgctttccattttataaatttgtcatattcttgataaaatttgcagcttcatcatttaggccaagcactgtcaaatctatggaatcttatggacacatcatacagtgagcgacaatctttttcccatggtaatcaattgttgtcactctcatctgcagaagtaacagatccgggaagtcttactctagaaatagtccagcaggtaggtatctaacttaaatgatccatagaaaatatcggaaactcaaatatttaaaaagtctacaac

SEQ ID NO: 288629 - DNA, 429 bp, Glycine max
tatgtgaagtgaccaaatgaagaatgaaaatgagttgttcgatggtgcatgtgggggttttgtgctgcctatagatgcaggaatcgtagttaaatgggttttaagctactgaagtgaactatgtggatatggcttcttgtgcattagaaatagccaagtaaaattctgaagaactacttactaccttggtattgagattgaggggttgttctgttcccagcttccttcttccttccgttatcaattattttattcaactctatcgcaccttgctaaaattcttaagcttaggctgttgaatttccttttgttcaattatagaaagagaaggaaaatatattgatttgactcctgagaaacaggggttgtaccggatcaagaaaaatgttttggaatcggatggttgtttgttgtgcctaattgtctata

SEQ ID NO: 288630 - DNA, 365 bp, Glycine max
  unsure (1)..(365): unsure at all n locations
agtcttatcttatcatttagtaaaaaaaaaaaaagttggggacagtgtgtttcttttatctgtcaactttctcccgttttctcaattaaaatgggtttaatgatgacccacgttatggaaacaaattattgttctcacatanaatttgtatccattcgcttaatcaacaacatcatcgctaaagagcttaaattggtgggcatcaagaaccaatttccttatagaagagaatgcgcccattattccaacacccgtgaagaccaccataattgaggtgttaatccaataagtgaaggatgaatttggaggcttgtatgtcatgttgtacataagcataggcagaacgaaatccaaagggatgaaac

SEQ ID NO: 288631 - DNA, 434 bp, Glycine max
  unsure (1)..(434): unsure at all n locations
ntccaagatggccaagttcaagcctaacgatgggttatttattgaaaggtgcaatacaattctgtgtatgacattcaaattttactatgttagtaggtaagattaaggattgggcagtgttgtcatggactatcgaaaagatttccaagtaacaagaagcatccgatgatgttcgatagaattcatatattgttgttgctttagaaatatatttgttatttaattccaattatattttgaccaatttcattttacgtttttaacaaaactctttataattntagtctgctataatatacgaatcattgtagagtaatatcttaaaattttaatgattaactaagatcagtgtattatgcatttcaattaatataaaaacttgtatatctcatagtatataaaaacttgcatacttcataggaaatatttgataa

SEQ ID NO: 288632 - DNA, 414 bp, Glycine max
  unsure (1)..(414): unsure at all n locations
agcttatcatgtataaactatntaaaatcgtaaggaataactttttataagattgaactgaaaataaataaattttggtggataaaaatcgtaacaaattgtgaaatcgtaaactcaatgaacaaagagggactaaaagtaacttttcgaaaatttgagggactaataaaaataattttttttgagaactaaaaaatacttaccgaaatttgaaagattaaaaatatatttaagccttaaatcaatcttataaaatcagcttgtaagatgaaagatgtcccacacttatatacactaattngactatatctctagacaatgtgatctcgaacacaacctctcatgtcaaagataggatatctcgtgcgtgaagtttgcacgattggaagttatgggtagtgtgatagatgtccg

SEQ ID NO: 288633 - DNA, 438 bp, Glycine max
actcagcttccttaggaaccttgaaggatatatatatttctttgcttggttccttgtattacaacatactttcatttccatttgatttgcaccactccacctttcacacagtaggtaaaacctttggagtccatggctcccatcgagattacattcttcttaagctatagaacatgaaaacattggttaaagttataacaattccatcatgcattttgatttgtaagaacctatgccaactaccttgcaagcggcattgtatccattagagcaataccactaaattattctcataggtcttgaactagcttttgtgtggacacatatgatatgaacaacctgagtcatccattatccaaaatactgttgttgttgatcaacaatcgagagtaccaaattagttttttgatgaggaattgttggatcaagtggcctcag

SEQ ID NO: 288634 - DNA, 309 bp, Glycine max
  unsure (1)..(309): unsure at all n locations
agcttgtctcatttagatccaggaaagacaaggcggttgaaggaaccagttctgctcccgaatatgacagccatcattttatgagcattgaccaccagcaacgcttcgaagccatcaaaggatggtcattccttcgggagagacatgtccagctcanggacgacgagtatactgacttccaggaagagatagttcgccggcggtgggcatcgctggttacccccatggccaagttcgacccagacgtagtcctcgagttttatgccaatgctnggcctacagaggagggtgtgcgagatatgcgttctt

SEQ ID NO: 288635 - DNA, 423 bp, Glycine max
  unsure (1)..(423): unsure at all n locations
ntgtgtaatcgattacccttatttggtaatcgattactcagtgactgtttatgataaatcaaaagatgtaactcttcaaaaaggtttttgactttttcaaattggttttaagtttttctaaaagttataactcttctaaatggtcttcttgaccagacatgaagagtctataaaagaaaggctttgttttgcatttcaatgatcaaaaacacttattcatacaatcctttacaagccttgaatctctttgaacttcttattcttccttgtaccaaaagctttctgaagttttctggttttctaaaccttgaaaacttgtgctattcatcttttcattctcttctccctttgccaaaaagaattcgccaaggactaaccgcctgaatctnttttgtgtctctcttctcccttttccaaaagaac

SEQ ID NO: 288636 - DNA, 390 bp, Glycine max
  unsure (1)..(390): unsure at all n locations
atttttttatgtgtctagctactatataaaataacaacatctatatggttattttttaaaaagaaaaatagtgaaaataaaaatatgaatcggtgaaattaaagaaaaagtatagtaatatggagaattgagttgatgatgatgacctgcatgagcatagaaccatgcagggccgagtgcttgaatgtgcctaaagtagcgtgcggtgatggctcccattggtaacaaaatgccccacgatatggcgttaacggtgccatggatcactctcaacgtcgtgagatccgtgtgctgtggagccgacgaacccgacaatacgtcanaggtaacaatggaagacagatcggtggaagtagttggatgaatggtgggagagtagccctgaacgta

SEQ ID NO: 288637 - DNA, 424 bp, Glycine max
tgtgttggaccgtaatatatctactcctaagaaatttatccaaaataattattattttaattttttttaatgtaatattaattatttttttcacttatacttttatatatttaataatcaactataaaatttaaaaataaattaatgatgtaagattaattttataaaattattatttttttcattttttttattattttttcttaatttatataaaataacttaggatgataattattttaggatgaaatatgattaaacaaaatctatctcagtaaatgggttaacagtccgagcaagaataaaaatattaaaaaatatgaaaattataaaaaacaaaatatagccaaaacctacgtgcaagagagtgacatggggttgcaagataataaatgactgatgtatcaattatttgtttacttaa

SEQ ID NO: 288638 - DNA, 311 bp, Glycine max
  unsure (1)..(311): unsure at all n locations
agcttccaaaatatccaaaaaattcaattccaattatcatgaaaccaccctaaaccaagaaaacagagtagaggcagaaaactctgcccaagactcattcaaattccacagttttccctactcaaataccccagtaacattctcttagttccgattcgttaaccattggatcaccttgaaacgtttactggaggttcctagtacataaatctacattntgaccgttgggatctactagaaaatatctagaacacgagatatactnacctttccgtgactggtgctgcacaagcattntttctgcacatttg

SEQ ID NO: 288639 - DNA, 401 bp, Glycine max
tgtaccagccactaaaccttcaatttcaagtgtaggtcttttctaatttcttgaccttcctcctacgagagaccaacttcaactcagtatgttcctgtaaataattataattaattagataaattaaaattgtatataaaatttaaatatgttataattaaagaaataactacctctcttgcccacactttggctaccacatgattaacatatgatgtcaacactaatgtatcttggggcccacctggaaaaccctatgaatcatcacctacattctttgtaattggatcatgaggatcctcatgagtctcatcagcagcatcatcgatatgcccattatcctcgacaatagttgcagttgttcattatctacgtgtcgacactatcaatcttcgacgctg

SEQ ID NO: 288640 - DNA, 268 bp, Glycine max
tatctcttcaaatcattttgaaaaggcacgaactacctatatatatgggggtctgatttccaaaagcaagagagagatattcccagagaacttcattgtcaaatgctctctcaacaacttttgggcgaacacttgccaatctattaagagttcatccaagaacttcaaatgtaatatccttcttttaaagagagaattcttcttcttcttattaaaagagattgattaatggaccgagagtctcttaagttgtaaggattcctgaaca

SEQ ID NO: 288641 - DNA, 431 bp, Glycine max
tgataaatctatatatggtttaaaacaagcctcctgtctgtggtaccttaagtttcatgggataatttcttcatttggttttgatgaaaaccccatggatcaatgcatataccacaaggtcagtgggagtaaaatatgttttctttttttatatgtagatgatattttacttgtagccaatgatcaagttttgctacatgaggtgaaacaatttctctctaagaattttgaaatgaaggatatgggtgatgcatcttatgtcatcgacattaagattcatagagatagatctcgaggtattttgggtctatcacaggaaacttatattaacaaaattctagagagatttcagatgaaagattgttcaccaaatgttgctctcattgtgaagggtgataggtttaatttgaaccaatgtccaaagaatgact

SEQ ID NO: 288642 - DNA, 410 bp, Glycine max
  unsure (1)..(410): unsure at all n locations
agctttatagcataaacgagattntgcaagaaattaaaattgcaaaaagagtttgatcctattttaattaatgacatataatgtttattgtataatagaacctaaaatgttaattacttaatttatgtttggactggcgttcatttggagtgttgttcattatgtgcacgacagtgtgtgctctcatacggatccaacggtcgattgtaaaagacacttccaaaatactttttgaaatctgattttgagaacttcaagcaaactcaatcatgtccttattagttaaacaaagacacttattaattaaataaaaagtaaagcaatttcatttattatatctaattccgtattaactacttatcgnaagtacatcaccacaacagacatgcacatatgtacacagtaattaa

SEQ ID NO: 288643 - DNA, 430 bp, Glycine max
  unsure (1)..(430): unsure at all n locations
nttgcccaatatagctttgaaattntctcccccttgttcacaaccaagttacccttggtgagttttcactttccagaaccatggtggttatcataaccagcatcatcaagtacctgcacagagatcaaattaaagcgaacatctagagcatgtttcactcctctaagtagcaactgtattcccatgttggtttgcaaacaaacatcaccaacaccaatcaccttggacacgtcatcattacccatcttcaagactccaaaatcacctggagtgtaagatgtgaagaactccttcctgactgtaacatgcaatgtagtaccactatcaattatccacatattcttatcagatacaagattaagcgaatcagggtcatggagaataacaagatcatcactggtagcagtagtcacacagtcatcatcatgat

SEQ ID NO: 288644 - DNA, 428 bp, Glycine max
  unsure (1)..(428): unsure at all n locations
agcttgtttctacaaataaagggcgagtctggggtaagaatgaatgaaaaaggtgaagattattctatggatgaatactctcctagaacctaagattttgaatcctagagaaaccatgaattatttgcagcctaacccctttacaagcctagaaagtccttcggattcattttgtgttcatggctgtatgatatgagaagaaatgcaaaggttggaacttgtgttggttgtttatgatggaataagcctaaacacttgagcttgagtgaaacaatggctgtgaggttttggttgatgatccttccttgatttttgtcatgcttactagcttatttcagctgtgattctaatgcttatgctcctatctttgaaaattgcatgcttgtgagaagtaattgatntaagcattccatggtattcagttcata

SEQ ID NO: 288645 - DNA, 426 bp, Glycine max
tggactcaaagagaaacttagaatggctctagagtattagtaaaaaaactataaaataaagactcaacaaacctctagctttggcacttgttttcacagtaattttcaattgaaatttcggaactaagattggtataacataggcaccaattatagaataaattttgagccaaaacaacaagcgcacttccctttcactttttttttcctggatactgatttttctgccaacttgtgtgatttttagtattttttcctgttatccaaatcacttggttctttttttataacttttttccagatgtctagcaaattcagtaaaactttcagctcaaaattcgaagtaaccaattctcagtaatttttacaagtttgtatgtccaagctgccagcaccaacgatttttttttaagcatggtatattga

SEQ ID NO: 288646 - DNA, 369 bp, Glycine max
  unsure (1)..(369): unsure at all n locations
agcttcgtgcttaaatatgtatggcaaaacttcattactgttgttcaagacatagaagtgagcttgtaacaaatcttctacacttggagtgatcacctgcagtcctcttgaacccttaccacccactctgtcatcatgccgacactcangaagcccaacaactttagccttctctaagtattctgaacaaaattcaatggcttcttctgcaatgtacctctcaacaatagatgcttccggacgatatagattctttgtatacccttttaagatcttcatgtatcgctcaaccgggtacatccaccgtagataaacaggaccacaacatttgatttctcttgaccagatgcacatcaagtgaatcatgat

SEQ ID NO: 288647 - DNA, 421 bp, Glycine max
  unsure (1)..(421): unsure at all n locations
tccattgttgagtttttgcttcccttttcatgctttatttcactccccacaagtaagtgcaatttcccttggttatttggctctccattgatgtgttttggtgctttagttgctcattttttgcaaaattcgtgaagcaatttgcatctaaatccatgcttgttttgtggagttgaggatttgaatgagaaggccttaggcctatgttgtattctgaagcaatggggcatgccacattgcccccattctcttgcaatttatgtccaaacatgtgcccatcaagtgctcggtgaaatgccccaatgatatatgaatatgattttgcaaaattgggatggtggggctgttttgtgtatgtagagacagcataggaaagtcgaaatagatgcccaaatgcaatcccaagcttangaacccaaac

SEQ ID NO: 288648 - DNA, 360 bp, Glycine max
  unsure (1)..(360): unsure at all n locations
agctttgcgaaaagcttgccgctagagctgacccatcaactgccctaactccttaaggccggtgacatctatgcccttaatcttgacttgatagaatctttttccgatttgatttgtccccatgatttacctaaaatggggtgaatcaaggctcttatatgaatgatgcaatgcacatgcatggaacgaaaagaagaaaaacaagtggtagtttacatatacgagaccgaaaaagatccatctttntaatactacgctctangcattgcggcgccctaacgtatgcattacanagtgacgcgttactctaaagagacaagatatcactagatatacagcacaactataatttatgtgcta

SEQ ID NO: 288649 - DNA, 425 bp, Glycine max
tgtatgagtactgggaaagattcaaaaaattgtgtgctagctgtcctcaccaccagatttctgagcaactccttcttcaatatttctatgagggacttagcaacatggagaagagtatgattgatgctgctagtggtggagctcttggtgatatgacccctgctgaggctaggaatttgattaagaagatggattccaactcccaacaattcagtgcaagaaatgatgctattgtccttagaggagtccatgaggtggccacggattcatcttcatctactgaaaataaaaagcttgagggaaaacttgatgccttggttaatctagtaacttagcttgccatgaatcagaaatctgcacctgttgcaagagtctgtggtctatgttcttctgcagatcaccatacagatctttgtccttctttg

SEQ ID NO: 288650 - DNA, 424 bp, Glycine max
  unsure (1)..(424): unsure at all n locations
agcttatgataatgaagttgttacaaattttatcttgaatgaaactgtgccaaaaatagatgtcatgaagttgttacaatatataatgcacttaataaccttgcaaataaacttcagataatcttaatctttggaaatgtattgatattaggacaaatggtcatcacatatgcaacaaacatatagccatcctaatttactcagttacatgaagctngttatgttcaaaatatcacacatgcaaattgatgacaccttatagataatagccttagaagttgattatcatgactcanaattaagggtttcaccattacactatcatatcatttaaccacaacagagaatttaatacaaagtcacactaaacttgagttacatcacatctacttatggcactaagtataaacattgcatgaagtat

SEQ ID NO: 288651 - DNA, 467 bp, Glycine max
  unsure (1)..(467): unsure at all n locations
gcgatggccnttgaagacctcagtcataccngcgacactataaaatactcacgcttgaggaacaatgggcctaccctacacctgagatgngtgattcaaatgtgtccaatgccccacggatgttttattggaaattaaaatccttcnaaaaaaacaatatataaattcgcccaataagggccaaaatgaagtgccacaggtgctctaaaaggtgaaggagcatttgtcagccccaaaggggtgaccaaaaactcctatatggccctggggtgccgaaaagtggtttggttaaattaagccccttcatcttaaatatttggtgacctcctataggcgcactttttaaaacaccaggcccttcctattattcatctactcctcaatggtggggtgggggttaatccttaccgactcgcggtcttatttgaccattcccccaacagcctgtctcctcctcttttaccacg

SEQ ID NO: 288652 - DNA, 318 bp, Glycine max
agcttgtgttttcaacccttatcactgctttatgtaaagctagagaagtcacttctgattctaggacactggagagtcttcaccccgccattaatttggcatatgtgaagaagaactattggaatcttgatgatctaatagtgactttcagagggcctatgaaggccaacgggaagaaatcgaagactctcccatcttttgaggttccctctaccacatcagcaccaacttcttcttacctaggtacttctgctcatcaccaacttctttagattttcttttacactaagatgctcatgccatgatgcaagcctacct

SEQ ID NO: 288653 - DNA, 434 bp, Glycine max
  unsure (1)..(434): unsure at all n locations
ccgctntttggagtagaaacatgggaccaacacattttattttttaaagtcgtatctagtcaagatctgagagaccatacaagtttcctagcggtttctaattatatgggccattaagtctatcatatgctgacaatagccgagaagcccatgaatttcttcggggccggagtaggtgtctgccattgccttggccttggctaataatcgaggaagttcttgactcccgttcaaggtaagagcaaaccggtccatccacatggttgcctcttggtgtaaagagtcgatcacccttcctctagcctcttttttcgcgtatactagggcatactcgtccgcgaccctatgctcgtgggccgtggctagacttaactcttcttggtacttggcaatgatagctagcatgttggtctccgtctcgcataaacgctgag

SEQ ID NO: 288654 - DNA, 193 bp, Glycine max
catggcggtgcaaagctgacagtctctgtctggagagagaaagagatacgcggggaatgttgctcgctttgaggatggagttccgcgcgatctcggttcttcatgtgcgcacacgtggcaagttgcccttccccacgctgagattgaattctcactgtgtacatgtatcatagggtccctcacaccttgccaa

SEQ ID NO: 288655 - DNA, 566 bp, Glycine max
  unsure (1)..(566): unsure at all n locations
tgtacacgcgatacacgtatggtatggtaattacgattatcgcgatatataagagaantgtgacgacacacanacccacaagaggagggcattgatgacctcgatagacacgcccgctannacaaanaanaccccagcatgcatgaaaagtggcaaagcaaacaaacactttcttctaacaggcatcaccagccgaagtgagagaaaacaaacacttgcaatgaacattcacggcaatgggcaaaagccagaacataatgataacgacttacagggagcaaaataagtgaactgaccgctgctgatgattagaaatcggcatataagatggataccagcgcgcaacaattcactgcacgcaatgaagcaagaatacctagatgagacctcgaggagtggacggaatagtcgaaacgccacacaactaaggagctgagagaaaacgtgatggacatgctaagaaagacaccgaacatgaaatgaatcacataccatataccagaaccacagacgaagcaccataagactaaacacatcaccaaaagagcgacgccgtgctacaagac

SEQ ID NO: 288656 - DNA, 170 bp, Glycine max
  unsure (1)..(170): unsure at all n locations
ggtggttatggctcgccaatggaggtggtggtgctgaagcgttgangaggtaaaggctgaaaggttgcggaacgagatatctcatggatacacatattgcttaggcaatgcctggacgtccactgatgagacaggaatagtaacggtgacagataggaactgatctacgt

SEQ ID NO: 288657 - DNA, 504 bp, Glycine max
  unsure (1)..(504): unsure at all n locations
ggaatcacagcagcaacaantatgtaatagaacaaacaaccnccccagggattgaacttgaacaccaccaaanaccaactccagaactcaaagcttttatagacacaccaaatctttggagcaaagcaggatacaatcaggacattcctcctcctgaaactcctatcgaccactcgctatcataagaggagaatcaccgccctttcaatttatgcaatctatactggggcatacccgataccctattttataagacaggaccaaacttccgaagttatgcaagaaattcctctcttagcattactaggaacacagtaatagaaattggccatcacaaagccttcgtagcaaccttagcatggacaatacgtctatatgtacaataaaagcgcacactcggaatcatagaaacaaaattactcaactgtacaacaatacgaccgcagaatcagaagcgtcatacctaacacacgaagacctctcctcaactgcatacacaaaccn

SEQ ID NO: 288658 - DNA, 391 bp, Glycine max
  unsure (1)..(391): unsure at all n locations
tggtgagctctgatatcgcacttggaaggggaatatctatcaatacgaccttataaaatatcacatgaagcccaaaacacattatgtcatattatcaggaggttttaaggaatacctggatccgtagagagctngatcaactcgcagcggaatctaagagtaggcacagacaatttggattaatgaccttgctcaaccaagtcacattcttctcttatgagaccttcgctttctcttcagatggtgagaggacgaattgcttattgagtttgtgtattggggaccataaccatatcttatgtggtaaacctattatggtaccattatcccttagtggaccacactgattctcgctcattaagttcatatccattcttctggcagtctaatg

SEQ ID NO: 288659 - DNA, 434 bp, Glycine max
cgtaggattatggggtacccatcacatgtggtactaggtgtcggtcgggcgatggtgcacatcaagttttccacatccacaaagcgcgcataaacccaccatcccctgttgcccacctccaactgagctcacgtagcccatatcctcgtttctctcaacaccgggtccccatcaatcctctcaagcttccacaacatccaagcaaaacaacattcaaacagcacaagctatcacagccaagcaaaacagagcaaaggcagaaaactctgccacaacaccaaccaaatcacagcttttctcacttaaagaccccagtaacaattcctacgatccaattcgttaaccgctggatcgactccaaaattttactggaagtatatagtacatgagcctacattgtgaccgttgggatctactagcaaacatccagaact

SEQ ID NO: 288660 - DNA, 568 bp, Glycine max
  unsure (1)..(568): unsure at all n locations
cccccctcacccngcagaggatcggacacagccacggccccacgatacaaccccacnncccaacaacagagcggtnngnttgatgccatgaacctcacggcgaataaactcggcccgcgggaacctcaagagtccacccgcaggcgcgcaatcttttttacaacgctccatacacactcgagacatcgtctcaaagatcccaacgggcacgtaacggaaaaagagcctctaaacttgcacacccaagtctgagaagagccaacagtgaacaaacgctgggcatccacactattgaggcagccccacgtagcacgctctagagagcctatataaaggctctctccacaagcttcctcgtggctaccatgagaagccatctcaagaggactcactgacaagatagaccctaactatccacacccctctatcaactaaaataactaccctaagaagtatgaccgatgacaaaacgcacccaataaccgaccatccaacataatccctatcaggcgcatccattatacatgaaactgangcacacagccatctcacggtgcgccggaccgcc

SEQ ID NO: 288661 - DNA, 386 bp, Glycine max
tatagcaggtccacatgctcgccgattgtttgtctgacatatacaatggctcaaactaatacgaggatacacatactccatcacaagtgctgcatcgtcaatgtcaaatatgatgctcacaacatgtcgttgttaacatagagataccagagtggcattaccatgaactcataaatgacatggactgttccagatgctgcatgatgaacatctacactactcatgcacataactagtaaaacgtacataatgtactcataccataactatactagcaaatcctaatgcacataacatcatatcgattgtaagaatcgtataattgttcctgactgtcctgtgtctgaacgcactactatctacacaaaagagctacagagaccatc

SEQ ID NO: 288662 - DNA, 575 bp, Glycine max
  unsure (1)..(575): unsure at all n locations
gagatgcnnntttaatncccgtaaggancancngacacntatataaaatcacncgcgtcgtacacctatgagctatattgtgtgtggagaagatttatcgataatcaagcgttatatcccacctaggaacaatgaggcgtgtactaccatcccgctatttcatcccttccgcactatccgacctcgcatagtcacatgcgtaggaaccatacacctattaaatgcgtacgatgtatgaggaactctccacatggataccacgttctcatcatatacaagactatcatcattgctnagacattaactatcaggctcatgacctgtccagttactcgataaggaccactactctttgagaagacgaaatgcctaataccataatagatctcgaccctcaaaccgagtgaggcgcggctccctacaccgaattgttcaaacctaagagatggctcgaacatctcactatcattatctgactcagaaacagacacacgcaagactaacaagtatgctctattgatagctccaaacaaacatgtctgaatcagctaatattgactgcgtctagtataacg

SEQ ID NO: 288663 - DNA, 377 bp, Glycine max
atgcttctttcactaatttataactggagaatatatttatgtttaacaaaactagttcataagttatataaaagtttactaatttttgaaaatttattacaatgacttattcaattataatagttgattaaaattgggaattgaagtagtgtaagataataaaaatggacatatatttttacataaattctagagtaaaatatgtttttagtccttaaaaaaatttacaaatttgattttagtcattaaacaatcttatttttgtccccctaatatagaaataataatgtcacaatatatactatcaagatcgaagatagagtatttccaatttagaggagcaaatacagacaaaagaatttagatgactctaaatc

SEQ ID NO: 288664 - DNA, 233 bp, Glycine max
ccactatctgcacgccaagactatatctccatccacagacggaactcaaaaaccccaacggcggagaagcgcggaaatgaattccagaccatgagtccaaatgtaaagacaagccaacggcaaaaaaggccaacatcgtaacaacatagggacagatctgagcgtatgctggaaaagagaaagaacagagcgagggataagacatccactacaaacataaactgaagaagccc

SEQ ID NO: 288665 - DNA, 574 bp, Glycine max
  unsure (1)..(574): unsure at all n locations
cgaccccgccacacgcaacagcgtaacggcggactacgcgaacaacaagagaacttcccnccncancnacaggagggtnannttgaagccgtngaacacccaaggcgaanacgagcacggcacccggagatccacnagagacgaccggcaagcacgcaagcttagcatgaaaggaggcgcgaagcgccaacaacaagctaacctgaagaacaccgcacaggagcacagcacacgaaaaggcgcgaagcctgaaacactcaccgcaacgcgaagctagatgcacgcgaaacctcgcatctcaagcaaagcgcagaatgcagaaagacaataggtgaagcagaaccactacccaagaggctagggaaagatacacagatgtcatagagcccaagaagccttcggcacagaggaacgcgacggacgaccacacacaacctgaagagaacaatgaggaaccgcgagacacaccactangacgaagaggcgacagacaatggagacagccacatcgacgatagcaacgcgaaggacgccacgccgaccgcgcagaacccgaagacagaacaccaaaccg

SEQ ID NO: 288666 - DNA, 523 bp, Glycine max
  unsure (1)..(523): unsure at all n locations
acgccccagcgagaaaagaacgacggaaggaaaaacacacacccagagacttgagccctgaccccccnaanaaaaacaacaccgaaaaaccaagaaaccaccgcaaccntaatttcagaccagaaagggaaaccaggggcggagcaaaaaggacccacaaacagagcaggggaacacagacacggcccacggaacacacacagccgcgggagacgaacccacagaagaaacgcacggcacaaacgccacagccgccgcaaacagaaagggccgcatccaaatacaaacacccgaacaaaaaacgcgaaagaaccgccgaagagcaccacagatcgagccaacgacaaaagccgcggcaaaaacaaagcccaaaaaagcacggcgaacactcggcggacagacagaaggagcacgcgcagacaccgacagcgaccaccaataagcagaccaaggacacacgaccctaagaagggacaaacggcacaagaacccgacgcacgaacacaacgagacaagcaggaat

SEQ ID NO: 288667 - DNA, 449 bp, Glycine max
  unsure (1)..(449): unsure at all n locations
attcagctcggacccgggatcctctgagtcacctgcggctgcaatttttttttgggtagatgaagatgtaaaggaggatgaggatgtagaagaggaagagaaatgtagggatgagactcagaagcaacttgaagaggcaagaaaagaaaatcataaactacataagaagcttgatgttaagagaagaaaaagatcgattctgctttgtgtcgtacgactgtgtttggtaatcacattattctcctgtgttgtgcgcgtgtggaactaagtagggagttccataatgtgaggatataccaagggaaggaagtctattggattacgatttaaaaaaaaattataaaaaaaattgtgttatttaatcagaatttttaaatgttataaataacgtctgtgatattcaattacaatntttaagattttctacagaagacataaatccgatgata

SEQ ID NO: 288668 - DNA, 432 bp, Glycine max
  unsure (1)..(432): unsure at all n locations
tcgtgacgaactatttatggaaaaacttcattgtngttatttagtatatacaaatgagtttgttgcaatttctctaacatgcaaccctcgtgaaccctttcctcccactctctcatcatgctgagacttgggaagcccaaaaggttccaccttttcaatgtactttaaacaaaatttaatagcttcttttgcaatgtacctttcaacaatggatgcttcaagatggtatatattcttcgtatacccttttaagatcttcatttatcgctcaaccggacacatccatcgtaaataaataggatcacacaattgaacttcccttaccagatgaacaattaagtgaaccatgatgtccaaaaatgaaggaggaaaatacatctccagctaacataagataatagcagtctcattttccaagtcatctaactttat

SEQ ID NO: 288669 - DNA, 402 bp, Glycine max
ttgcttgttaaatatgtctatcgcatttccctcgtggtgtaaaatgttacattgttctgctgaataattgcaaaaaggggctatgttatttgtccagtttttattttctgaatgtcttttggggttgataataatgcttagaatttacgttttggatctaattcaatccgaaagttaacttgtgaggacctattttttggctatatcgctagttaatacagaaatctcaacacactcttcttatgttagaaataaatttgatcaagtactatgactatgagtattcaagaccgaaacatagaaatgaccaatgcaatttagtaggaaaacctcttatgcgtctgaagttaatttctaatgtaatacaatgtttcaattcaacattggaataccataattgat

SEQ ID NO: 288670 - DNA, 425 bp, Glycine max
  unsure (1)..(425): unsure at all n locations
ttcaacgccggccacttcatatatcnttcccattgctaccaagagtgtacaatgatcacgttgcacatacaaccccatagtcggtatcacattagcaacacgttcttcccttgacaatgaggtcacaacagtttcagcattggtctcctctgggctcacacgtgcacctaattggtgtatatctatatctgcctcagttgggggagagtactgcgatcccctttgggataactccgttttgatggcctccttcaactcctatttcattctctctagactccattttgttttcttcttccagctcattcctccattcttcctcaagggttccaattatctcagccacctgttgttgggtgatggatgtggacgagttgctggaaccacatgatgcccttccatattattgactaattgtgacacta

SEQ ID NO: 288671 - DNA, 374 bp, Glycine max
  unsure (1)..(374): unsure at all n locations
tctagcttgcctcanagagatccagganagacaaggcggttgaaggaaccagttctgctcccgaatatgacagccatcattttaggagcattgaccaccagcaacgcttcgaagccatcaaaggatggtcattccttcgggagagacatgtccagctcagggacgacgagtatactgacttccaggaagagatagttcgccggcggtgggcatcgctggttacccccatggccaagttcgacccagacgtagtcctcgagttttatgccaatgcttggcctacagaggagggtgtgcgagatatgcgttcttgggtgaggggtcagtggatccctttcgatgcggatgccctcagccagttcttgggataccct

SEQ ID NO: 288672 - DNA, 419 bp, Glycine max
ttgtgtaatcgattacccttatttggtaatcgtttatcagtgactgtctatgataaatcaaaagatgtaactcttcaaaaaggtttttgactttttcaaattggttttaagtttttctaaaagttataactcttctaaatggtcttcttgaccagacatgaagagtctataaaagaaaggctttgttttgcatttcaatgatcaaaaacacttattcatacaatcctttacaagccttgaatctctttgaacttcttattcttccttgtaccaaaagctatctgaagttgtctgggtttctaaaccttgaaaacttgtgctattcatcttttcattctcttctccctttgccaaaaagaattcgccaaggactaaccgcctgaatctcttttgtgtctctcttctcccttttccaaaag

SEQ ID NO: 288673 - DNA, 282 bp, Glycine max
  unsure (1)..(282): unsure at all n locations
cgagaatggttatatatctagcacaagaattgagccacattctaattgattggttctatatattcatcacaacaatagaacctgactcaaatatttntttaacaaatcttcttaatatatctctagaagctagagcagtgataataagggagatgcatcaatacatgacatcaagatagatagcaaccgtgatgttgaataattctacaaagttcactaatgtgataggactntgattgtgatccctactaanaaccaagcttaacanaaggaaactttctc

SEQ ID NO: 288674 - DNA, 430 bp, Glycine max
  unsure (1)..(430): unsure at all n locations
tcaagccaaggccagactcttgtgcatccagaggcttctttgaaaaaatgccaaactcccttcaaaaaatctaatttcaagcttaaataggtgggttggtccgtgctcgcgtgcttagcacaaatcttaatcgcttagcgcgcataagtggattttggcttagcgcacttctctcgcttagcggatgagctgaaggggtgcacttgatgacctggagcggtgcgctcagcgaacctgacagctcatcttcttctggattcttcctcgcacttagccactgagtgtcgcacttaatgaatgctcgctaagccagcagattggcttagcgagaaggtgaaaacaacacttttgccaatttgcctaattaacctgaaattgagagtaatttattattaaacacaaaaaataaaagtatanaatttctattacc

SEQ ID NO: 288675 - DNA, 362 bp, Glycine max
  unsure (1)..(362): unsure at all n locations
tctgggagaccaatgtcaagtggtcgcgatatgcgaagatgatgttccgagtactttggatttggtacgaccatgcccttctgatttccaactgggaaattggcgagtggaagaacgccccggcatttacgcaacgagcataatgtaaacctttacggttttaaaagctctatagttgggcctaggctttagagtttttcctttggttaaggctntgtgtcttttggttttgaatntataatacaaggatctttcttcatctgttcctatgtctctacccattctcattcattngcatgtntacttctttntctgaaacggcagatccgatgacgagntccccgaaggtactaatacctggg

SEQ ID NO: 288676 - DNA, 433 bp, Glycine max
taaagtatgcccgagtcattcatccctatgagatgttgttgaagtattggcgatcagaattgccattccttggattatagggttgaaccaagctcatgcttttacaaaaaggttcatcaagtcaagttgaaatatggaagtaaccgtcttgcaaaattggggcaaaagatgaatcgagtcacatcactgcttcgtctactgccaaacatatttaggattattgatgtccttgttacttccagtttcaccttgacaaagatgtcatggaccatgttgaaaatctaaattgattcaaccccatatcttgcgtaaaaattcgcaatacttcaactgtacatcattcgcatgcatccatgcttttcattggttgcattgctcgttgcattctttccttgaaaaataaaataaaatgaacttaatcattgttataaaa

SEQ ID NO: 288677 - DNA, 323 bp, Glycine max
  unsure (1)..(323): unsure at all n locations
atcatcaaaacattcagcttgatcctttgtctacattatgttgacaccagagccatcgccaactaattactaatcagtaccatgataaggattgttacagtgtagatttttgcacaatagtccatgatccagttattttgcaacggaataaggtgtggtcttggcatgatgagtactangtccacttggacattntggatagccatgaagtttatagcaaaccatggcagtgttccctagtttctcatagtattgacaaactaacatttttgttatgcctcgaaatatggatctgccatatgttgaagtggtttgttaacatt

SEQ ID NO: 288678 - DNA, 427 bp, Glycine max
  unsure (1)..(427): unsure at all n locations
tatgttaatgggtcttaagaggaaagctcactaacattcttaaacttacttattaaacatgctcatgaaaactattttttctcaattaaaataaatcccttttattttcctacaacaataacccaaactaatatttatttatttatttatttatttgcaatatataatatattgtgagaaaattacattagcactccctcaaatattgacttattacacagacaccccattcataaaattgcatttcttttgcacccccttcgtgtctttgttaacttatgctacttaaaagtgaaaggtcaaaattaaccttctcacttaaccagcactcaacacaccttntgtttattgtttatgaaatttgaaaacaacaaatgtgctctactagggtttgatagcgagggggagcatgttgctcatgttgttg

SEQ ID NO: 288679 - DNA, 397 bp, Glycine max
  unsure (1)..(397): unsure at all n locations
agctttatacttgagattgaatagtttacaatctccgtccagatctagaagtcatagacaaccaacttaagaagaaaaagaggaaaaggagtattcatatggaacaagtcatggaagaaggcgaagaggtgaaccaagaatagataatcatttggggagcattaagatgacaatccctacatttcaaggcaaaaacaatcctgagttgtatttagagtgggagtgaaaggttgaacatgtgtttgattgccataattattctgaggaaaaaaagatttaactagttgttgttgaattccttgattatgctagtatttggtgggatcaacttgtgactaatangcacagaaatggtgaaaggcctattagtagatgggaggagatgaagactgtcatg

SEQ ID NO: 288680 - DNA, 421 bp, Glycine max
actcagctttttggaaacttcttgaaagctgagctagctttcacactcctctcataactaagctcacctccttgagaagcttccttaagaagattcgtaaagaagctagagcttagctacacatacctctctaatagctaagctcacctccttgagatgagaagctagagcttagctacacaccccctataatagctaagctcacccccatgacaaaaaacatgaaaataaaaaaaaaaagtccttattacaaagacaactcaaaatgccccgaaatacaaggctaaaaccctatactactagaatggccaaaatacaaggccttgacgaaggaaaaacctattctaatatttacaaagataagcgggctcatacttagcccatgggctcgaaatctaccctaaggctcatgagaacccta

SEQ ID NO: 288681 - DNA, 73 bp, Glycine max
tgacgaacactatattaaagcatgctataccctgagagctacgcacctatgacacggacctaagtgtaagcca

SEQ ID NO: 288682 - DNA, 411 bp, Glycine max
tggtggcacttgaaatatcatcagcagcagatgctaccttatcaaagacaaacaaaggtagttaccgattcttcttcattgctatcattgattgttacttttgtcttcatgacatctgttcccactccaaatgaacaagatttagtcgaaatatttatcatcccatgttacaagccttatcatatgctctatcttaagttaaatgtttttctaatgtgttttaactaaaaaaacaaatgagaatgaaaatcgtctaccgattgtctttttataaaaacaaaaagaatggaatggtttggtctaataaatattggagagacataaaacatgaaaaaaaacgtaatttttaagagaaacagtgctctgcttctcaacatggatgaacaacatattatataattagacaaatgc

SEQ ID NO: 288683 - DNA, 397 bp, Glycine max
  unsure (1)..(397): unsure at all n locations
attttgtatctacatagagtagaagatagatcattgatccatcctccaccttgttgtgataaacacaacaatcatagagacttctcttgaatccttggctggtgataaagctatcaaacctcatgtaccattgccttggagattgtttcaaaccatacaaggacctttgcagttgacaaacatacctttcttttacttgaacttcaaacccttcacgctgtttcattagaatattttcttccaatcttccatggagaaaagcagtcttgacatcaagttgttcaagttccagatcttggtttgccactatagcaagcagaaccctgatggatgtatgcctaaccataagagaaaaaatntcgttgaaatctatntcttctttctagctgaatccctt

SEQ ID NO: 288684 - DNA, 438 bp, Glycine max
gacctataaaactcagcttatgtctgaatatatgctctacttgagtgtttgttgaactattgtacataactcgtgaaatgaaatccatgtttaggttgatttgtttcctgaatatttacctaaatagattgattctaattccataaacttatttactgtacaattatcattgaaatacagcacacgttattcagtccaatcaatggagtgatttttggtttttctagttcatagtcatagcagacccatgcattagcgccccctaacccacatatactaaagggataaattgatttgggccattttgttcttttattaagtgaatggttagtgctaggtgggttaaaaacaaggctaggtagggttaacccttaggccaaaacccacatcgataactctacataaaaggagacaatagatttgagaaataagaacaca

SEQ ID NO: 288685 - DNA, 381 bp, Glycine max
  unsure (1)..(381): unsure at all n locations
agcttgtattgtaagaaatgacaagaaactacggaatccgaaatagaatcaatgaagatcaacaaagtatgggctttagttgaagcttcaaaggatataaaaccaattggttgtaaatgagcttacaagaaaaggattggagcaaattggaaggttgaaacctacaaagctcatcttgttgccaagggatatgtcaaaagtaaggtatagattatgacaaaacttttctcccgtggcaatgctcanatcaattcggattctttttgctatagtagcatattatgatcatganatatgaaatggatatggaaaatggttttacttaatggtgagctaaaataatgtgtatatgacacaacctganggatcacaccttgtctg

SEQ ID NO: 288686 - DNA, 430 bp, Glycine max
tgcagggttaattcaggattatggtagcgcagaactatttgaggtatgtatgtaattctcatagactttaatttttatgcggtgtaaaaaattttacattgtcaatcaatcagaaatcatcatcagtgtgatttttaacatagttattgtaaaagtaaacaaatttgtcatattgtgattgaataacagtgtaaagagtgcataaactgtttactcattcttataattttacaactttatctgcatgagctaattatgtagcttgaaattgggggcatgagaactataagatagtatactaggagtggatttataaatttctttgatttaaactataattttagagtcattttgctatcaagttgttgtactgcactgattaacttatgaacttatggctgcattccattgtttctgcaatgtgtgattt

SEQ ID NO: 288687 - DNA, 332 bp, Glycine max
ttctttttacatggagtcttacacaagttgcaggaatgcaacggactcaacggtttcttaactgcagtaaccaactactcagtggcttaactaaccgcccctaggttcatacaaagtgtgacctaactatacatgcatgcagtcacgtgcctatacgtactcctccaggtgccttggtctcgtgatactccttcatggtcgtggctcgtgtgttgcaagatgtggagcttcattcatgttgctgctgctaacatcatccacccctgagaaaaccaccttgtgctcaagatggtgggcattgcaaacatctgtccatttctcccatgtcgagt

SEQ ID NO: 288688 - DNA, 424 bp, Glycine max
tgtgtcacgattcactgtgacagtcaaagtgtcattttcttagaaaatcaccaaatgtaccatgagaggacaaagcacatagatgtgaaactacacttcatcatagatgtgattgaatctgagaaggtgaaggtggagaaggtttcaacaaaagaaaacctggctgatatgttcacaaagtccctctctagtgtcaagttcaagcactgcctggacttgatcaattttgaagatgcctaaagcagattggtagaagtgcagccctaaatcacaaggtagacacttgctgatttggagtcaaggtggagatttgtggtgtgtgactcaaaatcacattggctcaagtgagaaggttttaaagtggtgttgtcataactgtgttcagtcattataattgaattaggtttcacaccaatgtatagtc

SEQ ID NO: 288689 - DNA, 412 bp, Glycine max
  unsure (1)..(412): unsure at all n locations
atctttatacagtttatctttcttacacttgagttttggaagaccaattactaagtctttcctaattagatgatttaaatgatgcatattaatgtgtgcagtcctacaatgccacaaccatgaatcatctattttactcaccaagcaacttagttcatgaaaaacatgcttgctcattcaacatatagatgttacctattctcttaccaatgtggataacttaatcagatatggcttcacttataaggcatcaatttctattaaattcaatcttgaaatctttatcacacagttgactaatgctaagaagattatgctgtagtccatccatatataacatattatntatctngaatttgcgttgattccttatatntgcttctcccatttatctctctttggtaattgctac

SEQ ID NO: 288690 - DNA, 430 bp, Glycine max
acagcttcattaagaggcttcctctagaagcttcctcgtgacttcttcgagaagctttctcaagaggcttctttgagaagctacatccttatctatccacccctctattaactaaattaacttccttaaaaattattacggatgaaaataacgcaacaaataatcaaacatcaaacataattactaataatatatatatatatatatatatatatatatatatatatatatatcaaggtgttacaactctcccacccttttagaaatttcgtgctcaaaatttaccttactcaaacaaggatgggtgagcttctcgcatctgactttctaattcccacgtggcatcttctcctgatgcacctccccatatcaccttgaccaacggaatctctttccctcttaggtgtggtgtacgcctatcctcgatcct

SEQ ID NO: 288691 - DNA, 417 bp, Glycine max
  unsure (1)..(417): unsure at all n locations
agcttaatgatggaatacttaattgttggtgatgaacaaaagcgcaaaacggaatcaaaaaatgcaaaaaatgattaccctaaggctgcaaactcgtaaatcccgagggtattgcttttgaatggggggtaaagatgtttttgaatgcaaaagcgttcccctccctcgtttttatattttggtgcaagggttgctcgcgggcgagctcanctcgcccaggtgagctaacctgccattgttttttttgttttttttttacgggaaacataaccatggccccctctctatacacgttaacgtttgcctactcgaacctacttaagttagaattaggcatcgattacttatttaaaacaaacaatagtaataatcactgtgaattccaggatactggttgcctgcatgacgtctctgttg

SEQ ID NO: 288692 - DNA, 426 bp, Glycine max
  unsure (1)..(426): unsure at all n locations
tgcctatctgatgcagcagtaatgatggcccgagtttgttggggaacggttacgaacccggaatgggtttaggcaaagacaacggcggtataactagcctgataaatgccaaaggaaatcgtgggaagtatgggttaggctataagcccactcaggcagatataaagagaagcatcgcgggaaggaagagcggtagtcaaaactcgcggttgagacaagaaggtgaaggaagcccaccctgccacataagtaggagctntataagcgcgggtctgggagacgaaggtcaagtggtcgcgatatacgaagatgatgttccgagtacattggatttggtacgaccatgtcctcctgatttccagctgggaaattggcaagtgaaggaacgctccggcatttacgcaaagagcataatgtaaaccttta

SEQ ID NO: 288693 - DNA, 368 bp, Glycine max
tcttcttcgtgcttaaatatgtatggcaaaacttcattactgttgttcaagacatagaagtgagcttgtaacaaatcttctacacttggagtgatcacctgcagtcctcttgaacccttaccacccactctgtcatcatgccgacactcaggaagcccaacaactttagccttctctaagtattctgaacaaaattcaatggcttcttctgcaatgtacctctcaacaatagatgcttccggacgatatagattctttgtatacccttttaagatcttcatgtatcgctcaaccgggtacatccaccgtagataacaggaccacaacatttgatttctctgacagatgcacatcaagtgaatcatgat

SEQ ID NO: 288694 - DNA, 420 bp, Glycine max
  unsure (1)..(420): unsure at all n locations
tccattgttgagttnttgcttcccttttcatgctttatttcactccccacaagtaagtgcaatttcccttggttatttggctctccattgatgtgttttggtgctttagttgctcattttttgcaaaattcgtgaagcaatttgcatctaaatccatgcttgttttgtggagttgaggatttgaatgagaaggccttaggcctatgttgtattctgaagcaatggggcatgccacattgcccccattctcttgcaatttatgtccaaacatgtgcccatcaagtgctcggtgaaatgccccaatgatatatgaatatgattttgcaaaattgggatggtggggctgttttgtgtatgtagagacagcataggaaagtcgaaatagatgcccaaatgcaatcccaagcttaggaacccaaa

SEQ ID NO: 288695 - DNA, 327 bp, Glycine max
agcttggcgtgcaaaatacaccttattatcacatctccggagtacagagttcagactgccactgcagttctgatgggggtaggaaaattgatgaacaaaatgaattacaaacaaatattcaagaaaaaaaaaaggatagcacgtacagattagtttattagacattgtaaaacaaaagctataaaagaaaacactttaagtatcaaaaagggacacattaagtatcaaaaagggacaaagatgaaggaaacacttaggttttaaaactttgaagttgtttgtagcctacaaaaatgcattgatttgataagagtgttcaagttatta

SEQ ID NO: 288696 - DNA, 431 bp, Glycine max
  unsure (1)..(431): unsure at all n locations
tttatccncagcctcaatggaagctgggtataatttttacaaaggtggcagggcaagtcgaacctgtaaaaaaataaagtgtttggtaaagaaaaaaaaatgggtatttcatttcataccacatttacacaatgctacattgtaacaagtcttacaggaattttttcagcaagaagctttcgtattccatgagctctagactccacctttacatccactcctgaaacatattcaggataaagcaccagaagctccatgatatttgtaagatacggatttaaaaatccaccaagcttgtccacaactgcctccaaagtgatgagaacataaaaatgggattcatttgaggctgataaaacatcaatggtttcgggtttcatatcagccaatactcgacgagatgacttcatcacattgtccataatcttggg

SEQ ID NO: 288697 - DNA, 87 bp, Glycine max
cagcttatattgtaacctcgaccgtcgaataaaatgcgatagacatagagaccgcgacacccaaagacttagagagacatatatata

SEQ ID NO: 288698 - DNA, 362 bp, Glycine max
tctgaagagagtgacgaggctcaagccctataggcatatcttgtaagagcctgtgttgtctgcgagaatttcacgtccatatgcacatacaaactctgctgaagagtatgatgaactaccgtatgtcaatatgtccaccgatgaacccttggaatgagacaccatcaagggccgtagggaacaacacgacctaagcgaattttcggggggctttatcaggcaacaatagtgagctcaagctcccaagaggtgaaaggaatcatcacgggtcaaaggcatgatcttgatcgacgagctgcaggtttgccttaggtcgaatagacatttgtcccaacacctaagcgagattgaagggaatatgt

SEQ ID NO: 288699 - DNA, 308 bp, Glycine max
  unsure (1)..(308): unsure at all n locations
tttttttatttggcttgatgaattcttaaaagaaattaattgaaaccaatgacgattaacttcaactggaagtcaagaaaaatggtcaaaaaggaaaacttacgctatttatttgaaaaaagccgtaacccgaaatttgtatggaccaaaactgctatgcccaaaatacaataaatgatagggaaaatgcattntttttatatatatataatgacattggggccaactaacttcttttttatgaattaattttattaaaaaatgatgtggattgaccactttattaatactcannatgaaacattact

SEQ ID NO: 288700 - DNA, 430 bp, Glycine max
tgtccacaaaaataggtttttgaagtttgtaatttaattttctcactaagtaaaatggatcattttcaaggtccaacgccttaaaatgatcacctcttaaagtaaaaaagaatcacttgataagaaagaactacgtaggtctgatttcctcatcgcaattgaggaatacgtaggagcaaagggaaacacccttgtcaaccacaaaaagagaaaaatataaaaagggtataaaagatataaagacataaaaagggaacataaaaatcaaagtcatgtttgcacattcgatcaaaggctgccgtcccttgggacggacgtgtggggtgctaataccttccccgtgcgtaaatacaactcccgaacctttcacttaaaagttcgtagatcgcgtcttttccggtttttccgacgttttcctcacataaacgtt

SEQ ID NO: 288701 - DNA, 386 bp, Glycine max
  unsure (1)..(386): unsure at all n locations
agcttgtcggatttggtcttcaccggcaaaaggatcgaagtgggtctaaaaagaggcaaatttggtcatcctgctttgatgaanattggggcaagtgaagagggtgagaatgatggagaaacccatgttgtgactaccattcctatatggccaagtttcccaccaacccaacaatgtcattactcagccaataacaacccatctccttacccaccacccagttatccacaaaggccatccctaaataaaactacaaaacccacctaccacacgaccaatgctaaacaccactnttagcacgaaccgaagcaccaaccaacagggaattttgcagcanacagcctgtagaattcacctcacattctggtgtcatatgctaaatggta

SEQ ID NO: 288702 - DNA, 431 bp, Glycine max
  unsure (1)..(431): unsure at all n locations
tctcaaggaggtgagcttagttatgagaggggtgtgtgttctaagctctagcttctcaaggaagttttctcaaagaagcttctcaaggaagttttctcaagaaagtttctcaaggaagctacctagtctataaatagaagcatgtgtaacacttgttgtaactttgatgaatgaaagtcttatgagacacacttcaaagttctacttctccccctcttttattccttcaatttcgtgctcccccctctctctttctctccctctttcttttcctccattgaagcatccttccaagcttcttatccaaggctcatcctggtggtgaagctccttcttccattgcttattccctagtggatggcgcctcccctctcctcttctcctttgccttccgctgcatcntccatggtgaaaatgaccattgaaggacc

SEQ ID NO: 288703 - DNA, 361 bp, Glycine max
  unsure (1)..(361): unsure at all n locations
agcttttatccactgatcataggacatagactaaaatacagtggtagtatttttaagaattcaattgatatatgatagcgggcaataaacatatatgatttctaaaagcttacatgttgacattgactattcagtttatacctatataaattatctaattctggtgagggattgatgttgaattaacaaaaactaacggaagatgtaaaaaatgaaagtctcttagccaaaacagaagtatccttatagcatgtagaaatgtgggtttctgctccgaccgagtttgtttcttctaattggtcaaaatatttaacaaaattgcatttgtgccancatttatatatgaaaaaaataataaatt

SEQ ID NO: 288704 - DNA, 432 bp, Glycine max
tgtccagacactacattgattgaacagtataatacaattttaagaagaaaataggaaaaagcttagatacagttccttggtttttgatgttgttttccaatcagaattggagtttcactttagaagtccacataatatagatttgcattaaaggattctgtagattattgaaatgaaactccaattctaactgaaaacagcaccaattgcacctaaagaactgtatgcaagttttgtccaaagaaatataccttgaaaccgtgacacaaccgcagatggcaagaagcaaacctcgtagaaggaatcatatccaaccaaaagacaaatcaagtaaatgactccacagacaaccaccactgcagaagtgagaaacggaatgctttcccaccattggctcatcctagtaggaaacccggcctgagtcaattaagc

SEQ ID NO: 288705 - DNA, 341 bp, Glycine max
agcttttctgaatgaaagtggcgtttttggaattttaacaatactttcttattattctatggatctgtttcgaattctgattgttaatttgtagttcttattgctgtgggaaactgtgaataggtttttgcttttaaatccgtcggtgactaggtgggggggtaaacgaacatcctgttgcggagttatacgattaaaccgcacttgctgctcttgttctgattctggattttacatgtttctaatttttattttatcgaggttaatgtccgctttagaactgattataacggttacaacataatataacggttctgaattatgtccgcaatatttttggt

SEQ ID NO: 288706 - DNA, 433 bp, Glycine max
  unsure (1)..(433): unsure at all n locations
ctgattntgtgaggaagataacggttcacttactatctatctttattacattcaaataacacatatatacatacagcaagaagaggagagagacagcttaacaagacaagacatattgttgtcttctaccataagctaagcaggaaattaggtaagataaaaaaaatagaaaatacacataattctaacactccccctcaagttggagcatataaatcgtatgcaccaagcttggagcatataaactgaatcttaggcctccttaaggacttagtcaaaatatcagctggctgatcattaaaattaatgaactcagtgacaatttctttggacagtagcttctctcggataaagtgacagtcaatctctatgtgcttggtcctcttatggaagactggatttgaagcaatgtgaatagcagcctgattatcac

SEQ ID NO: 288707 - DNA, 346 bp, Glycine max
  unsure (1)..(346): unsure at all n locations
atcttatgagagagtcaaagatcaaattgagaggaaaaataaaagttatgctaaacaagccaacaaagggagaaagaaggttgtcttcaaacccggagattgggtttgggtgcacatgagaaaagaaaggtttccggaacaaaggaaaacaaagcttcaaccaaggggagatggaccatttcaagtgcttgaaagaatcaatgacaacgcttacaaagttgagctgcccggtgagtataatgttagttccaccttcaatgtctctgatttatctctntntgatgcagaatggagaatccgattgaggacaaatccttctcaagagggagagaatgatgangacatg

SEQ ID NO: 288708 - DNA, 491 bp, Glycine max
  unsure (1)..(491): unsure at all n locations
ggaccgatgcaccaagcgcgaggaaggataaaaagaggaaagacctcaaaccaaccccccccacggagcttttgaactagagaancgcgcacaaaaaaacccgcgcggacaaaacaggggacgaaccgcaactaatttcccccacgaaacagcggcggggggagggcgcaccacctaatacagagacccccgcaaaagaaaaagagacaccccggggaaaaaaaacacagcgagggcgacaccccacggcccaagggaggacctcgagaaccagagggaaccccccggcaaccgacaaagggaaaaaaaaaaacgggcggaacagagaccgacccggaaaggaacgccgacaaaacaagggtggggcgaacgaaaaagggggcccccccggaacaagagaggggggacaaaccccgcggcggaaaacccccgcacagaactcaaaaggaaaaagggggcctccgggagcaacagggaccacacaagaggcg

SEQ ID NO: 288709 - DNA, 405 bp, Glycine max
  unsure (1)..(405): unsure at all n locations
agctttctatataaatgaccaataattataacagaattttatcttttcaatatcatttgacttacgaagttaggacacccaatatccaagtgatctcaattcacaagttactttttattttaagcagtatgcaaggcacaaaggaactgagatttctccacgccaaattaaatatcagggaagccttaaaaaataaccccattattacattgtctaagctgtgagatatacataagtggaatggtgactctagcataatcaattgaggatcatattttctgcaacttggaacattgctcaaggatgatagctatgatttcacatgcatagtagcttagcattcaaagaaaattntcattatctgctagctaggcagtaagtgaagttgagaaagatatcactact

SEQ ID NO: 288710 - DNA, 427 bp, Glycine max
aactcagcttcagtggagagagatctcattgttctaacccttgtattagtgtaagggagattgacaaagaaattggaagaaattttataaaggatcttatggtgaatgatattgttgaaagatacctgggaatcacccagattctgtatgatctcctaatagataattatgtagttaatgctgtactattttatgatagtgagtaatgtgtggaacatgcagaataggcaggaatcaatcataacttctgtctattatggacatctatttccactgttgtaccttagactaagcgaaatctatatgtacagagaactacaatcaattagaaataattcctcacattttgtcctctcctttattatataaatgcctatccttgatccattgtggggtgacttacatagccatgcttcaggcccacata

SEQ ID NO: 288711 - DNA, 408 bp, Glycine max
  unsure (1)..(408): unsure at all n locations
atctataagtagctttcgggagaaaaagagcatgccaacaagcttagatgtaatatttgggagaaaaagagaataccagtccaattcctgtgccaaatacaagtctcccaagcaccaatacaggaaaattaggagctaatgctgttacaagggctccaacaagataaactactgcagatccaatcagctcctttcttctacctaaaaaatcaaatttgtcacaccagtttcacccgggaaggaaatagcaaaaatgatagctgacaaaaggggaaattacctaagaagtcagcaacattgaaggccaacacagagccaattaaggcaccatacaatgatccactagtctgcanaagacagtanatgccatttgcccagtttatattncagatcaatatatatatggag

SEQ ID NO: 288712 - DNA, 417 bp, Glycine max
tgtacatatgaaagtcatctccatattctgaagaattatgatgatgaagttacatacaaaggagaaaaaaaggtatctccacgcaataaacaataggagagattaacaaatgttatcatcacaagtcaaggctaaaagattcaaacttttaatagtattatggaaagatcgagcatagaacaaagaagatagttatatgagaggcacatatacaaaattattttcagtaaaagtcaaagatatttgacattacagttgtcaccaattacatcattgaactggatgaaattccacaagccaagaatgttcagattagtaggtaaggaaacctaaggcagtattgagtatacattgtaaatgggttggattattggatattagtggaaccttattatgaatattacacattgtactcac

SEQ ID NO: 288713 - DNA, 388 bp, Glycine max
  unsure (1)..(388): unsure at all n locations
agctttctttagcagcttctatgagaagctaacgttttaactactaacaccctttntaataactaaacccacctccttgaaaataattacggataaaaataacacaacaaatataatcaaacatcaagcataattactaaatatatatagatatatatatatcagggtgttacactaagcgcgagatcagtgtgctaagtgcagtagttgtcttcaaccaggctcagcacacgactagtgctaagctcaaatccactcactcgcgctaagcgcgagggtggcgctaagcgcaacatcgtgaattcaaagcctatttaaagtctgtcttgtgcaaaattanggtacaagttgtataataaccagtgcacaaaatttcacagcacaccac

SEQ ID NO: 288714 - DNA, 403 bp, Glycine max
  unsure (1)..(403): unsure at all n locations
tccttttaatgcgtcacatttaaagccgagctcgattttggtgcgagcctttgatggtactcggtgggaagtaatgggggaaatcgacattcccattcagataggcccccacacttgcaatgtggtgtttcaagtaatggatataaatcctgcctatagctgcctcttgggaagaccgtagattcatgccctgngagtggtcccttcaacgcttcaccagaaattgaagttcgcagtgggtggacttttagtgatagtgtcgggtgaagaggacatgttagtgagttgcccttcctccgcaccatacgtagaagcggtggaagaatcattggaaacgactttccaatcctttgaggtggtgagctgcgcctcggtggaaccaagtccgtcgctaccttctctc

SEQ ID NO: 288715 - DNA, 321 bp, Glycine max
agctttcatgcttatgagaagaacagtgacctaggcatgggagaggtctgcacagaggccattgtctccctcgcccaatattatgaccagccgttgaagtgcttcacctttggggacttccaattatcacccacggtggaagagtttgaagaaatcctgtgatgccctctgggaggaaagaaaccatacctcctctcgggattctatacctctttagctacaatttccaagatagtccgaatctcaacgcaggaattataccacagaaaggaagtcgaaaatggggtggttggagtaccaaggaaatgcttggaagtaaaa

SEQ ID NO: 288716 - DNA, 404 bp, Glycine max
cgcggttcaattcattctatgtacccgcggcggaccttattttgctacatgtattaatatacacaggtcattcactttttatacccccttttgacgtgcttaagccatttatttaagtcatttctcgcttaaactaaaaataaaataaattttccaccgatcgtgtggattgtatcatctgttaattttggttaaaatgaattccgaccgttcggtcgtgccgaaaccacgttggaaatcaaaaaagaggtaaaataataatataataataaaaaaataccttttagtaaagtaaagcgaaaaatcaatcggacgttttctctttgggatttctcattcttaattgaattgactaatagctaaagtgaaatcaatgctaagatcaaactcacctagtcaagctc

SEQ ID NO: 288717 - DNA, 373 bp, Glycine max
ttatctttaagttaaattaaacttaccattgttatcgatttctaaaaagtaaggtatttatttatggaattggtccaaggggccaaccgtgtgaccttgattgcatcaaaagtacatccgcgcatgcctcaaccacagtttccacggaccttgttccatagttccttctcgccattagaactagtattatcatacaaaattaattaaacatttaaatatatttttagttcagaaatatggttgtttaatctcttaaataaaagttattttttaaattctacaattgatcaatatattattttagccctttcatcagacacttgttgtaaaagagtctgtaatatttatagcttaatctttaatactgttctag

SEQ ID NO: 288718 - DNA, 429 bp, Glycine max
  unsure (1)..(429): unsure at all n locations
tcanagaataaagacaacaacatggtctaaagttgttctcattgataagattatgcggtctgccaaagcacaaattaaattacacaaactaataaataattacccttccattctaatcatgaacaatttttcatcttttagctttggccactgcttttggcacggttaaggttgtgtctaacataatttttacattagatagtattttcatatcatctggtgcatctgttataaaataataatcgtcctattatacatgaataataataataaataaatataagagaatataattttataaaattaattttatatcatcattaatttatttataaattttgttgtccaatattaatattataaaagatataagcaaaaaaataattaatattacactgaaaaattaaaataataattattntgaaataa

SEQ ID NO: 288719 - DNA, 282 bp, Glycine max
  unsure (1)..(282): unsure at all n locations
atcttatttcctaaatttcaattgaaaattaatgtgaaaacaagttccaaagctagaggtttgttgagtctttnttttagttttttttttactctactctagagccattctaagtttctctttaagttctagcttgcttctatgtccttttcattgctttaattgttgaataatccttgaaaaattgtcttgttaaaactccattggtttagctntaatttaattnttttggtctttggttattgcttgtctctttgttttcttgtttgtgagttgtcatat

SEQ ID NO: 288720 - DNA, 430 bp, Glycine max
  unsure (1)..(430): unsure at all n locations
taacaaaaggcatgcgaagagggtggaattcttatatcaattcccttatgttatcaaacataaaaagggaaaaggtaatattgtagccggtgctctttctcggcgtcatgcattactttctatgcttgaaacaaaattgattggtcttgaatgtttgaaaagcatgtatgaaaatgatgaaacttttggagaaatttttaaaaatcgtgaaaaattttcagaaaatggtttctttagacatgaaggctttcttttcaaagaaaacaaattgtgtgtgcctaaatgttctactacaaatttgcttgtttgtgaagcacatgaaggaggtttaatggggcattttggggtccaaaagactctagaaacattacaagaacattnttattggcctcatatganaaaggatgtgcagaaantttgtgaacattgc

SEQ ID NO: 288721 - DNA, 243 bp, Glycine max
cagcttttttcgaggtacttacccggtgaagatcgaagaacgatgaagaacgaatgaagaacgtcgaagaacggttgaaatctttgcgaaattcctcaccgaaaacgttaccgaaacgtttcggaagcgcctcggcttaaattttcttcacggaaacaatttttccaagccaattcgaaagagagagaagtgcctaaggggctgaccccttccttcttgccttcctcccctatttatagcaaa

SEQ ID NO: 288722 - DNA, 363 bp, Glycine max
tcatgatgaatcaagattgattcagagagtttcgatgttttcaaagatgatgacaaaaagctctaaagtcatgagcacttcatgatacaaacgatgatgatctcacgactcaatacatgagttcaagattgaatcatcaacactccatggctcacatggaaatttgatttcaagagtcaacaattaagtttcaagactcaagttccatgaatcaatatcaagattcaagaatcaagagaagacttaatcggcatatgtattagaaagttctttcatgaactgattagcacatgaatttttctcaaaaccttataccatgactttctagtctctggtaatcgattacatgatcatcgcaatcga

SEQ ID NO: 288723 - DNA, 414 bp, Glycine max
tgccgctttttatgtctagtgattctagagagaaaaaggtccaagttccagagagttttgagaagatttgctgggtgaagatctaccgaaacccaagcttgaaacggaagccgttttgagagctcgagaagaagttgtgagtggttgtgagaacctaaaagtgaaagaaacattcttcccacttttaattttgcaatctttcatcttgctcttttctttggtggaaaggaggctttccggttatggaaagctcaaatcctctgttggatcttccttggaggtacttgatgtaaatatcttactatctatctaatgatgttttatgtggtctttgtgctatcagactttcattctagtatgcctttaccctgatcatatagatgcatgctttgtagggtcattcaacagtgaaag

SEQ ID NO: 288724 - DNA, 417 bp, Glycine max
  unsure (1)..(417): unsure at all n locations
nttaaattcaaatttggaaattgcaaattgtttcagatttcaatttagccactggtaattgattacatcctctggtaatcgattaccagagaggaaatagcatagttttgaaaagataattgttcttaaaatttttttgtaaaatatttcctttagccaaacctgtgcagcatcaattaaggaattctttctaagatcctatcaactaagtatatcgttcttcttgcatttctgaattcttgacttgaatcgcgcttatctttggcatcatcaaaacttcatatcatatatgcttctacaatctccccttttttgatgatgacaataatctaaaatcaagataaacgatacaccattgataatgcgtgctcacaacccttacacccccttaagattgaaatttatgcctaagttctc

SEQ ID NO: 288725 - DNA, 291 bp, Glycine max
  unsure (1)..(291): unsure at all n locations
agcttgtcaangatgtgagcttaangatgagacgggcgtgtgtaactaaactctaacttatcaaggaagttttctcaaagaatcttctcaaggaagctttctcaacaaagcttctcaaggaagctacctaatctatacatagaagcatgcgtaacactcggtgcatctttgatgaatgagagtcttgtgagacatacttcanagttgcacttctatccctcttttattcctgtactttgacgctcccgcctctctgtttgtctccctctgtcttttactacattgaagcat

SEQ ID NO: 288726 - DNA, 416 bp, Glycine max
  unsure (1)..(416): unsure at all n locations
gcttgtccgggaacagttatgcatgagttcatagatgtgtgctttcttgcgtccttccgaacagagtccaataagtatgacaacattaacatgagaagttctactgatacactattagaaaatatgttttctacatcggttatttatgactttcaacatcggcttttcagccgatgttgaaagtaccgacgttgatagtattatcgttaacatcggcttttgagaaaccgatgttaacgtaaaattaccaacatcggttatataaataaccgatgttgctaatatgaattacacccagacaatgtatattaatgttgaaagttaacatcggttcttactgaaaaccgatgttgttatcaagaanttttctttatataatgtctgtgtagacaaccgatgttaacgaatgtgtgact

SEQ ID NO: 288727 - DNA, 365 bp, Glycine max
  unsure (1)..(365): unsure at all n locations
agcttctatcacacttcagaaatcttctcaaagatcccaacggtcagatcatggaaaagtgtcttgtgaagttgcaaaccaaatttagagaagatccaacggttaacgaaggttgggaagcgtttttaccgaggcagcttcatgtagctttctctagaagcttcattaagaggcttcctccagaagcttcattaagaggcttatagcacagtccagacatcttctaaaagatcccaacggtcatatcatggacaagtgtcttgtggagttgcagaccanatttcgagaagatccaacggttaacgaacgctgggcattcgttttacagaggcagcttcatgtagctttctctagaagcttcatta

SEQ ID NO: 288728 - DNA, 416 bp, Glycine max
tgggaggattgatagggacccagtgttgagagaaatgatgatatgggctacgtgggagtacgtgagctcagttggaggtgggcaacagggaatggtgggtttatacatgatttgtggatgtggaaaactttttgtgcaccatcgcccgaccgccacctagtaccacatgtgatgggtaccccatattcctacaagcttgagatgaggaagtgtagaagggtgaaacttcctgcttttattcgttgaccacagagtggtacctggagatatgtcgcggggatcaggagaccttggggacgtcaggtggggtgctattgcccaaaaccaagcttgaccaatcccaacccaacccgggcatagccagtcagtgagaacctgtgatgtacctaagcaggcgagctcttgcagtcaacaga

SEQ ID NO: 288729 - DNA, 372 bp, Glycine max
  unsure (1)..(372): unsure at all n locations
agctttttggttttaaataaaaaggggtttctcttttctattattttatttaagcaatgccacatgtctccatttgagtggagcaaaaagggcctactttccctttttgactgtgacccatactcagtcacaaaagtgagaaaaatctgacctttgaaatgctaaaatcctgcctcggtttgcatgttgtttctctggttccagttcctcgtgtttctctgcgtccgtcagggtcagttttcgaaagtacgcaatatatatatcagaacgctcagaataaaaccccgagcgtggttcagaggttggtttcgttaaattntaagtcgcacgcacaacgatgattttaaactaattaattaagaattaacccat

SEQ ID NO: 288730 - DNA, 414 bp, Glycine max
  unsure (1)..(414): unsure at all n locations
ntgtggatttagtcttcgccgggaaaaggatcgtttctggtctgaaaagaggcaaatttgatcaccctactttgataagtgagaaaactagggcaaatgaagagggtgagaatgaaggagaaacccatgttgtgactgccattcctatacggccaagtttcccaccaacccaacaatgtcattactcaaccaataccaacccttctccttacccaccacccagttatccacaaaggccatccttaaatcaaccacaaaacccacctaccacaaaaaaatgcccaaacaccacccttagcgaaaaccaaaaaggaattttgcagcaaaaagcctgcaggattcaccccaaattccgatgtcatatgctaacttgatcccatatctactcgataattcaatggtatccataacccc

SEQ ID NO: 288731 - DNA, 412 bp, Glycine max
  unsure (1)..(412): unsure at all n locations
agcttatccgacctcccattaacagcgcctacatagaaaagtattgcatgccaaggcaagcacaacagcagggtcaggcacaaccgcagatgcaccattggcacctctacgacaaccaccatctctagagtccatctctgctcacatgcggaggatggagctccagatgcacgcatatatgcagcatgtgatcgactagcaggcagccaatcatatgggtcaggtgcagctaaataagagcttttaccgatacaccttgcatcaacagagccaagatatcatccctttcccgtggcctacccccaaccagttcagggccacagttgcatggcctggagataggcccgattntcaaacagggccaggactcgcatggacccccagagataaagatggagcacaggatgatgat

SEQ ID NO: 288732 - DNA, 351 bp, Glycine max
actgagggggctcacttctatcctaaatcagctcctcattactacggcccttttaaggtgttggagaaagtcggagcaacggcctacagactttctgaatctgcaaggatacattcggttttccatgtgtcactatcgaaaaaagctgtacgtgattacaatgttgaggagacacttcccttcccttggagttggttagtgacaatgcaacaagtatggaaccagaggcacatctataattagctccgcctctggagcattaagcaccatctttttcctagaaattctatatacctggtttctagtctggtattttcgctttcatggaccacacagtcaatgctacattta

SEQ ID NO: 288733 - DNA, 358 bp, Glycine max
agctttatggcaatttgatggctacatgagcacttaacacacaccacttagcagccaagactattagtatggacgactaaaattaagagacgataaagcttttaaatagtggaagaaactgaactataaaaaatacacggaggaccaacaattcattgaaaccataaaaatctaagctcagacccaaatcatgattaaaaaaaagtacatgctacgttgagttaagagtattccagaacaagcttaacaaataacaaagatggagcacattttaattattctttataataatggattccttttctttttctttttaatattgatgcatttcttatagtttataggaagtaagtgtaat

SEQ ID NO: 288734 - DNA, 421 bp, Glycine max
  unsure (1)..(421): unsure at all n locations
taacgtgtagtcgtgaattatgtaaaaaattccatttagtgactntctctagactccaacttttgggtggctctcacggatcaatgtctacttaccaagtcaaatacattttacccttcctcttggatgctagactgattctcatatgagttaattactgtcactaattccaactcttcaaaccttaatttacgactaggttgcgtttcacagaattagtagtatcttgtttaattctacatgtgaacactacttgtgaaattctaaccacgtgaagacattgaatggtagctagaataagcatccttaattaatcacttgatataattaatatgatgttgaaaagttaatcctgctcgaggcaaccttgatatcaacccttatgaataacattgattgaccgactcttttttttatatat

SEQ ID NO: 288735 - DNA, 264 bp, Glycine max
agcttgtgcatcctgtaccctgatgaggatgacgcatatgttcttataactggactcatccatttgcattacaacattcatggccttgcaggagaatacccgcgcaaacatttgaaggaatctcatattgtgagctccaccatgaagcccccacatgtccatgatgatcacatatatctgaacgctgttactcactcattagaaggagtggcacccgactggatgtattaccatgctacgatgaccgtcaccagctgcgatgac

SEQ ID NO: 288736 - DNA, 232 bp, Glycine max
tgatgacttggagactacaacaggcgatcgagctatatttctagaggaagcccaaatcgggacctgactgtatctagagctgtgggaggtatcatatgcatatgaagccctgctgagacagacatctacagactagtggattaaggaacgcgacaggatacaacttattttcacgaacctgtgaatgtcctaagaaactatactgctcttcagggtctcttcattgatggga

SEQ ID NO: 288737 - DNA, 370 bp, Glycine max
ttagcttgcacactcaaagggacatctcacctatatctttatgaaaaactatcatgtacatctgtccattacacaaaaataacaccatctaagcaaacttaactgagtagagactagttctctccttcttccataccaatatgtcctcctcactcagaatcaaattaatacttctaaagtcatgacctttttttatctaagcaaattattatatttatttctcctaatgatatagagatttctccattcccatctccacaatcaatttccctccctccggtcacctaaacctaacaccctggcttttatggctactacaaggttgtataatctagtatacttcctatatgtgaaaataaagcactttcac

SEQ ID NO: 288738 - DNA, 430 bp, Glycine max
  unsure (1)..(430): unsure at all n locations
tattgcttggaaaccaacactagataagatactctgtttnttgaatttatctcacaagaataccatcaatgacaatgaagtattgtgtgtgggatgtgttttgactgtaaatatacttggcacttgttctttgaatgcaatttttttctctagagtttggtgcggttactttagctggtggggtattcattttgcacaatataatgactctccttcgaacttctcacaattcgtgggtttgccaagttgcaatgattagaatgagttaccgtgataacaatttggtttgtagtgttttgggcaaaatggaggactcgtagttttcttgtttttaaaactataagaatgagttttgatcaaattgtttaacagtcaagatacacctttgtcaattaattagtactatatgtgattnttttntactgtccct

SEQ ID NO: 288739 - DNA, 340 bp, Glycine max
  unsure (1)..(340): unsure at all n locations
agcttttgaatgtgaagaacttcaattaaagttctaacaacatcattatgcattttttatttgtacagaacctataccgacaaacttataaggagcattgttatccatgagaaccttaccaccaaaattcttctcatatgtcacaaaccaatgcctatgttgacacatatgataagagcaacttgagtctagtacccactgtttagaatgttgttatagttgttcaccaacagccagaaccaaattgctttttgatgaggaattattctaaacaagagcatcaatagaatctttctttgctttctttggatagtcttgccttcaatgatntgattctttg

SEQ ID NO: 288740 - DNA, 426 bp, Glycine max
  unsure (1)..(426): unsure at all n locations
ntgagtctaaagaaaaagtcagtttctcaactctatctgaaagtgtcagaacatttagcctgaagacttctagtttctgagtaacgagagcatcatgcagaaaataataacagagaaacttcgggtgatgggtgcttagaggatagtcagaatagatgcattgcttcaaaattgtgtcaatccagcagtcatattgaagtctttctcgatgaatctaatattccttttaatgatactttgatgcctcaagatacatttggaggtgaaaattcttagcaactacaggttgagtcaattccacatgttgcacttccagatggaatccagcataagatttctggaagtaaactctggtctaaaacatgaaacagatctataactcanagatcaaaatggcttacaacggcaaattgctagtgttaaagc

SEQ ID NO: 288741 - DNA, 352 bp, Glycine max
  unsure (1)..(352): unsure at all n locations
tagctttgaagttctagtcattatttacgtttcaactttgttccatatattttcggcattttctattttattctcttaaaaaaatcccaaataacaataactacacatttattcatattaaaagtgaattgaggtgtttgtagaattaattttgaattaacatggttctatagaattgattgtaagtaaacataagtttgtagtatataatatgattattgtttggaaatttgctaccaaaactggatttgtgggcaattactaaaatgactngagttcaagagtacacattgaacaaatagcatgactaataatacgactcaagttagtgttgattcanaagctatttcta

SEQ ID NO: 288742 - DNA, 406 bp, Glycine max
  unsure (1)..(406): unsure at all n locations
tacccgcactattacccacaaccacccaccatatttatcaatgttaagaaaatgacatcggcagaaatgcacttgagaagagaaaggggcctatgctttacttgtgatgacaagttttcccctagccatcgttgtcctaataagcaatattttgttccacagtgggaagaagaggatgaacctgcattacaaccagatccaccagacgaggttgagacagctggtgaccctagtttgcaagatcatcatttgtcttataatgctttaaaaggctcatcaagtcttggaacaatgaagtttcaaggatcaataaatggattgngagtgcagattctactagataatgggagttcagataatttcctccagcctagactatctcaatgcctgaagttacctatagaac

SEQ ID NO: 288743 - DNA, 392 bp, Glycine max
agcttgttcttaaattcagttaagagcaacgcagagctcacattatctgcttcaactcctaaacaatccaaaatttttggcttctggttttatgtcaatacatcaaaatcttatgttttacttgtgtcatcatgtaatgcttcctctactattgattccataaaacagaaaaaaaaacactaaaaaatgaaacctaatatcatcaacaacataaaccaaaatttttggctgctggttttgtgcccattccccacatttgatcttcgatgatccaatctacaaatctcccccccgccccccataaaaatgaataaaagacagaaaataaaagatacttcagaaaccagttcagaaagaaaaaagcgctaaatgtaatatccaatcgaaaaatt

SEQ ID NO: 288744 - DNA, 436 bp, Glycine max
  unsure (1)..(436): unsure at all n locations
tganatgaggaagtgtggaaaggtgagacttcctacttttattcgttgaccacagagtgatacctggagatatgtcgcgggggtcaggagaccttggtgacgtcaggtggggtgctattgcccaaaaccaagcttgaccaatcccgacccaacccgggcatagtcagtcagtgagaacctgtgatgtacctaaacaggcgagctcttggcagtcaaccgataaaagaacaaagaccacaaagcaaggaggcttatgtggtggctggccagctgtgaatcttgagtgatatatgggatatggcctctggtaatcgattaccaagggtgggtaatcgattacaaggcttataaacgagatcaggaagctaagagggcttatggtaatcgattacaaaggggcgtaatcgattaccaggcttanaaatatgactggaat

SEQ ID NO: 288745 - DNA, 395 bp, Glycine max
agcttgaaggtaaactagatgccttggttaacctggtaacccaactggccatgaataaaaaatctgcacctgtcgccagactctgtggtttatgctcctctactgaccaccacacagacctttgcccttctatgcaacaatctgaagcaattgaacagcttgaagcttatgcttcaaacatctacaatagacctcctcaacctcagcatcaaaatcagtcacaacagaacaattatgacctctccagcaacaggtacaatcccgggtggaggaatcatcccaaccttagatggtcaaatccttcacaacaatagccttattttcagaatgctactggcccaagcagaccatacgttcctccaccaatccagcagcaacaacaacaacaacaacag

SEQ ID NO: 288746 - DNA, 422 bp, Glycine max
tcatagcttagcaagtgctcagtttcctgccaatgtaccccagaaagttgataagcacttcttcacagtgggccttggcacaactccctgccctcaaaatcaaacttgtcaaggacccaccaatgcaacaaaatttgcagcatcagtgaacaatgtctcttttatacaaccaaccactgcacttcttcaagcccacttctttggtcaatccaatggagtttactccccttactttcctattagtccattggttccatttaactatacaggcactccaccaaacaataccatggtgagcaatgggacaaaggttgtggttcttcccttcaacacaagtgtagaactagtgatgcaggacaccagcattcttggtgctgaaagtcaccctctccatttgcatggctttaacttctttgttgttg

SEQ ID NO: 288747 - DNA, 376 bp, Glycine max
agcttctacattcaattttgagcgtctcgtaatattacgggactcaatcagacatccgagtaaaaatttattgtcgtttggattggctcagagattcaacattcaatttcgagcgtctccatatattacgggactcattcagacatccgagtaaaaagctattgcagtttgaattagcttagagcttcaacaatcaatttcgagcgtctcgatatatcacgagactcaatcagacatccgagtaaaaagttattgtcgtttgaattggctcagagcttccacattcaatctcgagcgtgtcgatatattacaggcgtcaatcacacatccgagtaaaaagttattgtctgttgaatttgctcagagctttaacatt

SEQ ID NO: 288748 - DNA, 443 bp, Glycine max
  unsure (1)..(443): unsure at all n locations
ctgagccaattcaaacgacatattctttntactcggatgtctgattgagtcctgtaatataacgagacgctcgaaattgaatattgaacctctgaggaaattcaaacgacaataacttttttctcggatgtttgattgagactcgtattatatcgagacgctcgaaattgaatgttgaagctctgagctaattcaaacgacaataacgttttactcggatgtctgaatgagtcccgtaatatatcgagacgctcgaaattgaatgttgaatctctgagccaatccaaacgacaataaatttttactcggatgtctgattgaggcccgtaatatatcgagacgctcgaaattgaatgtggaagctctgagcaaattcaaacgacaataactttttactcggatgtctgattgaatcctgtcatatatcgagacgctcganattg

SEQ ID NO: 288749 - DNA, 391 bp, Glycine max
agcttgttcgcattatatcactaaaaaggattttaaggtccaatacctcagtttttctcaccaagaaaaaaatggatcattttaaggtccaacgccttaaaaggaccaccttccaagtaaaaagaatcgcttgattcgctcttttgaaagaactacgtaggtctgatttcctcttcgatggagggtacgtaggagcaagagccccgcttttgtcgacctcaaaaattaaaaagaaataaaagtttaaatacataatttcacacaattctaatttaaggctgttatcctttgggataaatgtgagaggtgctaataccttcctcaaacgtaaatacaactctcgaatctggaatattcttcatgaccagtttccttcggttttttcgacgtt

SEQ ID NO: 288750 - DNA, 443 bp, Glycine max
tgttgctcgtatggtgttgtttccattgttgccttggtttagtgtatgtctttatgttctacatttggattcagattgcacgtatttgatttttttgttaaaataaggattacgggtaacaagtttattattaaacttatttatgtgcaatacttaaattgcacttaaggacttcaattgatatctttaaagacttaagttaaaccagttggaaatagacatgtttgagatcatattgcatacaatttccatgttgctcattcatattgatatatatcattgagtgtattgacgaaagccatggcgattccattattgcatgtaattttcaagtgaacgtctaaagataaataacatacaaatgtgtgcctaaggaattgtgatacaattgttacactactagaaaaatgcaatttcacgaaagaaattagcgaccaatgtat

SEQ ID NO: 288751 - DNA, 388 bp, Glycine max
agcttataaacaatgtgagttgactctaacttatcgaataactcatccatagttggaagatggaattaagccttcattataggagtattcatggctcaatagtccatgcacatttgccaggaccattcttcttcctatgaagaaacacttattaagaatagggacatgtagggctaaatccaaccattggccaagaaattcgagaccttatccttaatttctaatttctgggcatgaggatatctgtatgggcgaaccttgaccaaagcagcattatggaaaagagggaaggaatggttcatggatcgtgctagcatgatgtgagtgggttcctcaaataggaatatgtattccataggcatctaatgaagaatgatgtaattcatgg

SEQ ID NO: 288752 - DNA, 441 bp, Glycine max
tggcattctcaatggtggaaggacctccgaaagctatatcttcagcctgagttcaatcttattcattagcagatggtatggaaggtacggggaggggaaaaaaattaaattctggaaagataaatggttaggggatgattgtaaacttgaacagcaatataatcagttgttcttgattagtggtcagcagaatagtaccatctcgaacatgggaagcttctctcaaggcaattggtgttggggcttaaagtggagaaggaatctatttgattatgagcaacatatagctatggcatttatggaagcaattactgatatacaaatccaacctcatatgcaggatattatggtctggatagctgatcccagtggtgtatattccactaagtcagcctacagattattgatgaccagcaatcaaattccagaggccaacatctt

SEQ ID NO: 288753 - DNA, 257 bp, Glycine max
acatgaccggctatgtgcgttctactatacatagtgaacagataacgcgcataaatccagtaggcactacgtcgcctgctagtatcgcttctttaacgacttgagctggacgccgaatcacttgaaggtcactagaccaaaacttaggttacaattggctttggacttggtcgaatatagctcggccatgttgtgtatgccatactcacacctttgtgtggatgagcagaagtgaacattacaggtgatggcggtgc

SEQ ID NO: 288754 - DNA, 319 bp, Glycine max
tgaaccagtgccggtgagagtgcgaacttaatctgtgagtgcacggctggcattgagtagtagtctttgcgtcaatctctgaatactacaatgaaatgtatgaaggtgcacatgatgaacgccatgattggatatataagctgttatacgctctatacgactaacttctgtataaaaatcattatccaaaccttgtatagttccccaatttatggttactctggagtaaattttgccaataaatcttgtttttgttggacaagcggcctcccatatcttaagaaggaggggggggggcgcataaaatgatcccgctcta

SEQ ID NO: 288755 - DNA, 376 bp, Glycine max
agcttgtttcctttacaattggagtcatgactaatgaacatgtacttctcacttttgtcatccaacttgtttgtatctcatttggcatgtgcacatgaccaatgcttccaaacacttttagatgtgaaatgacgggcttacttccattccatgcttcttgtggtgattatcctcatacactctttgatggagactggttagaaaggtaaactgcacaagccactgcttctgcccagaactcctttggaagtcttatgtggatcaagaggcctcaaaatacttatgaagggggggtcgaattaattattcctaaacctatactaataaagaaatcactcttctaacgcttttacttacgtttgtgagagaatattga

SEQ ID NO: 288756 - DNA, 410 bp, Glycine max
tcatgaattgtaattagaaagttctttttcactctctcatataatatattggatcattaaaatagtcgattctcttaaaatgttgatgagtgtataatatgtggattaaacttaatacccgtatgtgcaattaatggctccacacaaaatctaaagttcgctaacgagcataatcatcctaacaagaaatccatagtgacagtgacgacttaatgtataatttattccatttttggatgtaccaggttccaaatattactttcaatgcaactactttatctcctcaattagtggcaaccccgctggtcgcctcttgcccctggctcgttcaaatgtaacattgatgtagcgtttatagcatatcagcacacctgcaccccgggattgggtttatgcctttgtgatgctga

SEQ ID NO: 288757 - DNA, 380 bp, Glycine max
tagctttcatcaagtggtaatcagagcacaagagcttcaagtaggtgctccttaaacctacattaattgtttttctttaccttctcttccattgttgtttcttcatttttctccatgtatctcctcacatgtcttgttctaaatgtcgttaacatgattctttaaagtttccagcgattaaacttgctatagaagttacatttgattttatatggatcaaatttcttgttcttgttcttgaaccatgaattgtgttgagtctaggttccttcgagttttgtcttgtaattatttgaggctgaaacctaaaccataaaattcttacaaaaatattaaagttgaagaaaacctcataaatctatagtgacttgttcacctat

SEQ ID NO: 288758 - DNA, 436 bp, Glycine max
tgaatcggacctcagtgtgaaatgttatgaccattttaatttcacgagagcttccgttgttcattttcgaacgtctctatatgtgatgcgccttaatctaacatccgtgtgaaaagttatgaccatttgaatttctcaagagcttacgttgttcaattatgagcctctcgacatattatgcgcccgaatcggacatccgtttaaaaagttaagaccatttgtatttctcgaaagcttccttggttcaattccgagcatctcgacatattatttgcccgaatctgaccttcgtgtgaaaagttatgaccatttgaatttctcgagagcttccaatgtttaatttcgagcgactcgatatattataagcatgaatcggaccttagtgtaaaaagttatgaccatttgaatttctcaagagcttccgttgatcaatttt

SEQ ID NO: 288759 - DNA, 302 bp, Glycine max
cctgcttgcttttataataatggactcgacattcatgttctttacctaaggaattcttaccaatacaaatatggatcattttagaggcggatgctcttaatggaccacctttccgctaataagaatcgctgcgattagctcttttgatttagactaccatgtatgatgtctcttcttggacggaccgtaggagcaatagccctgattgggtgcactctcagcaattagcatagacataaaagttacctttcgttatatcgcacaaatctgatctaaggctgctatcctttgctataaatgcg

SEQ ID NO: 288760 - DNA, 403 bp, Glycine max
tgtgcagtgttggtggtgttactgatctacattgttgattattaacagtgactgccacatacgggtaaaatgtatacggatccgcaagctactaacttcataaattatagactgagagctcgacatgggtttcaacgagaggcctatgatttgtcgcgccaaatggactcaccatatgtggagtattcaccactctctaattactgtaagttctatgaacctattatcctatgataccccaatgttccttattaagaatactatttctaagcatataccttagcatctcacacatggaacttagccacataccgtcacatctaacatatggaccataatcacatacactgctatctcataggtagaacatagccacatactttaacatctgactgatggacca

SEQ ID NO: 288761 - DNA, 292 bp, Glycine max
gggtgaaacttcctgcttttattcgatgaccgtaaagtggtacctgtagatatgtaccgggggtcaccagaccttgtggacgtcaggtggggtgctattgcccaaaaccaagcttgaccaatcccgacccaatccgggcatagacagacaatgagaacctgcgatgtttctaagcacgcgagcttctggcatacaacagatggatggaacatagaccacggtgcaacgatgcttgtgcggtggttggccacctatgaacttgattgatatatcggatatgggctctggtaat

SEQ ID NO: 288762 - DNA, 450 bp, Glycine max
gacactatgaaactaagcttacaagtaagcttccatcaagtggtattagatctcaattatcttaagtaggctctccttaaacctccattaattgtcagctttaccttctcctccattgatgtttcttcattgttctccatgtatctgctcacatgtcttgtgctaaattatgttaacatgattctttagaatttacaccgattaaacttgctatagaagctagatttgactttctatggttcaaatatcttagtcttgttcttgaaccatgaattgtgctgagtttaagttcctttgagttttgtcttgcaattttattggctgaaacctaaaccatataattcttacaaaaacattaaagtcgaaaaaaacctcaaaaatctagagtgactcgttcacctattgtatttctgtcaaagaagtcatgtctagtcatgacactcgtcacat

SEQ ID NO: 288763 - DNA, 460 bp, Glycine max
  unsure (1)..(460): unsure at all n locations
gagaacgtganccgaggccttgatgcctctaacacactgggcgaangcacctcggacccggagatcctataaagtcgacctgtatgcattttagcttttctactactggggtgtcttcccaaacctcaaatgtattgcacggctacacaatcaactaggagattccattattaaaagacagaattactctcaaatctgcacctttcctagatgttaattaacccgccgtaacaccactttcttttaaaatatagggtgttaataactgcacaagactattgacggccaacacttctcttatattgacttggatttttaatcaacacctttctcgtcccaaattcaaaattgattcgcaaatgtgttgggaaaataccattagattgggcgcaatttgcgcccaataaacataatcggcctttttctcctcttttcctcttacgacatgtcgaacaatact

SEQ ID NO: 288764 - DNA, 185 bp, Glycine max
taaggatctcaaacaaaggctgataggctggagcagagatactgtaggtgacttgcgctttaaggttaagcagctgcagcaaaagctgaatgaattggaagattccatgcctcaccaaccttctaaccagcaagtccttcagttgaagaatattcaggctaagctatggcaataggctaagttgc

SEQ ID NO: 288765 - DNA, 368 bp, Glycine max
agcttcagtattcaatttcgagcgtctcaatatattacgggactcaatcagacatccgagtaaaatgttatcttcggttgaattagctctgaggctcacaattcaatttcgagcgtctagatatattacgggactcaatcagacatccgaacagaaagttattgtcgcttgaattatctcagaacttcataattcaatatcgatcgtctcaatatatttcgggactcaatcatacatctgagtaaaaaagttattgtcgtttgaatttgctgagagcttaaacattcaattacaagcgtgtcgatctattacgggactcaatcagacattcgagttagaagtgattgtccgtcgaatttgctcggagc

SEQ ID NO: 288766 - DNA, 430 bp, Glycine max
tctagtcatccataaacctcctcattggtacggtccagcaaacgttgcatctgtgcattcatcgcatccagtaacagacgttgacctccgtccaactgatgatactcgtcaccaccaccacctgctccagccataattcaacaggaaaaaaaatgtgcaataaaaattattaaggttttaggacctcacaacactctactcacgtgtttaactcttagatggtagtacactcgtgtttaatgctctcaatataggcttttgtgtaatgtattccctcttgccttttaccactcatgtttcctcttaagttcctggatggaccaaattagacacacaaggtaatataaaataaaaggaaagacaatataatgatcacaaacagatttgatttgggataacaacttggactttgatttggataataatatat

SEQ ID NO: 288767 - DNA, 393 bp, Glycine max
agcttttaagataccgagaaagatagagctgtttgtaattttagtcctttgttctgtttgatactccataataaaatggtatattactattattattatttgttctaataaatcatttactattattattttattttatggtttgcgaaataaaaagaagataggaggtttttctagaggtgaatgatgagaccattccatgcctcttcaattaagtgtttttcattgaatctctatatttttgtcgggtcaataacatatttttgttatcagctggtgatcttattgatgatgagaattggcctccaattttcctaatcattcatcatgatattgccaataagataccgattcatgctcaaaggctgcaatatttggcctttgcaagttggt

SEQ ID NO: 288768 - DNA, 451 bp, Glycine max
  unsure (1)..(451): unsure at all n locations
ctttcgattcattctatgtacccgtagtggtccacattgtgtttcgtgcatttttattctcgttttgtttactttttatacccccctcttaacgtgcttaagccattttacttaagtcatttctcgcttaacttaaaaataaaataaatttccaccgaacgtttgaattgtattatccgttaacttcggttaaaataaattccgaccgttcggtcgtaccgtaaccacgttggaaatcaaaaaaggaggtaaaaaataatataataataaaaaaaacatcttttagcaaaataaagcggaaaatcaatcggacgttttctctttgggatttctcattcttaatcgaattgattaataacgaaagtgaaactagggctaaaatcaactcgcctagtcaagctcgtccacaaaaataggctnttgaagttggtcatttcaatntctcactaag

SEQ ID NO: 288769 - DNA, 389 bp, Glycine max
agcttggcattgaacataacttttctgcacctagaacccctcaacaaaatggagttgttgaaagaaaaaataggtctttggaagaaattgctagaaccttattaaatgatactcctcttccaaaatatttttgggctgaagccgataatactgcatgctatatcatgaatagggctttaataagacccattttaaagaaaactccatatgaactattcaatggtaggaaaccaaacatctcgcatcttcatgtttttggttgcaagtgttttgtattaaacaatggaaaaagaaaacttaggaaagtttgatgctaagtaagatgaaggaattttccttggttattctttgcatagtaaagcttatagaatatataataagataacaat

SEQ ID NO: 288770 - DNA, 441 bp, Glycine max
  unsure (1)..(441): unsure at all n locations
ntggaatgaatttgttttctagcaaaacaaattattatacctatagttcataaggctaaatggaccaatctaagttttgtgcttttatttgttttttgcttagctagtctcttcttaagtaatctcccttgtttttcttgaacaataggtggcagaacgtaacaatgatcctcaattggcagacttcattgagagcgagttcttgtatgagcaggtaaaacttgcagttgaattcatagtatggttggatttcataagatataagactccttgaccattgtatgtaatacaatactctgaactctttacgtcctanaataattgttgtcttttacacggatcaagaaaataataataaataaatgaatgaaatagtaattntacacaagtaaccttacattatcattaatttatttctaaattctataattggttctcaat

SEQ ID NO: 288771 - DNA, 393 bp, Glycine max
agcttataaggtgttgtccaatcgggtgcctggatgatgggggtggtagtcaacgctcttttgaggcaatcaaaagcctctttgcatctgtcattaaagtcaaactccacctccttttgcaacaagttggacagtggaagggctacttttctaaaatcccttataaagcgcctgtagaattctgcatgaccaagaaaagatcacacctctcgcacacaagaggggtaaggcaattgtgaaataacagaaatttttgcaggatctacttcaatacccttattggaaataatgtggcctaaaactataccttgctcaaccataaaatgacatttttcaaaatttagaacaaggttagtttcaatgcatctattcaaaactttttccaaactattc

SEQ ID NO: 288772 - DNA, 444 bp, Glycine max
  unsure (1)..(444): unsure at all n locations
tgcttctacaatctcccnctttntgatgatgacaacttctgaaatctagaaacacacacacacacacactttttcctagtcgatcactcacataaatttccattctcccccattggttttgaatttatgcttctcttaaaaataagttgattactcatgtgagttcttgatttaatccctatttctctccccctttggcatcaacaaaaagccaacgtgtgtaacaaatttgaagcatacaaatacaactaagcatccatacaatattcatgggataatttaaaccaaattatgaagcaagaatcatgaagcaagaacaatgaatagatcaaatataaaatccacatagagaaaagcatatagaaatcaagcaagataataaattatcctcacattataatagaagcatatgtgcataaataacacataagtcataagtcatca

SEQ ID NO: 288773 - DNA, 295 bp, Glycine max
ctgaacacggatgatagtccagaggaaagcccttccaccaaatatgcaacttcctattcaagaaacaagaaaatattcaatttagtgaaaaaatgaattatagataatttatttaataaatgggttccaaacaatttgagtgagtacgagatatgtttccatattgatgttaaatattggttcacgcataattaactctgcatgacaacttaatcagacattctaactagctatttttagtacaattttcttattcaaactattttctttattcacaggatctaaacttgagata

SEQ ID NO: 288774 - DNA, 379 bp, Glycine max
ttgggcttacaagctcccgagggtgccctattgtgagctacattttatttacgcaaatacccttacgaagcccccaaattaaggacttatcataatttgaaacccttatgctctctcagaaccctgaaacaacgtcaaagatatcaaaataaggctcacgggtctattcaaacacatcattattactcttggctcaccaggggtgcaagggataaattcattataagttggctttaaatgccgaacgactaaaatacaaagaaacatggccggagaacatatccaccttatgcagataatctagcagtctaagagtgatgcagactacgaattaaagcgacgcctctattataagttacacaaacaccgggacaagata

SEQ ID NO: 288775 - DNA, 382 bp, Glycine max
tgatatggtctacaccgatgaaaggatcatagtgagtctataatgaggctaatctgatcatcatactttgataaatgccaaaaaaaaatggggctaatacatagggtgaggatgaaggagaagcccgtgctgagactgccattcctatacagcgaagttttccaccgacccagaaatgacattactcagccaataccctaccttgttcttactcaccgcccagtaatccacaaaggccatccctaaaacaaccacaaaggctgtcttccgtacttgcaatgacgaacatcacctttatcacacaccaagagcaccatcctatagatgaatcttgccgcgagaaagcctgtagaattcaccccatttccagtgtcatatgctg

SEQ ID NO: 288776 - DNA, 472 bp, Glycine max
  unsure (1)..(472): unsure at all n locations
agaatcttttttgaacctgagacntgcgagcacgtgacactatnnaagacgtctgcctgcnaggatgtgataaaggatcactcacgagctgttactctttgtaatncctatactgacgcgttataacattgactggccattacatgaccatggcaagacaggaaaaactcttacatcacccagcatagaacgctggcttctggtccccctttactgccctatggtaatcgcttggatgacagtaccactcttgcttaacaatgttctttaaacaaatattgtggacggaacgtgctgagcattttttcttcgcaaaagacggtatacctatcggatagcggccctgacatcctgtatgcatgatgccttcatgaacccactcggaatcggtattgacgatcgacttatgattttgaacttgctgactttgattttgcctgagcttggcatatcaaataacttggaagcttcg

SEQ ID NO: 288777 - DNA, 392 bp, Glycine max
tgcttgtttgattatggggtacccatcacatgtggtactaggtggcggtcgggcgatggtgcacaacaagtttttccacattcacaatgcgcgcataaacccaccatcccctgttgcccacctgcaactgagctcgcgtactcccacgtagcccatatcctcgtttctctcaacaccgggtccccatcaatcctctcaagcttccacaacatccaagcaaaacaacattcaaacagcacaagctatcacagccaagcaaaacagagcaaaggcagaaaactctgctcaacacatcaaccaaaatcacagtttttctcacgtaaagaccacagtaacaattctttcgatccaattcgttaaccgttggatcgactccaaaatcttactggaag

SEQ ID NO: 288778 - DNA, 109 bp, Glycine max
cgcatccagacaagaagcattcaacacgcgctgacgcgataaagaagaagtggaccaaaaagtaattgcaggggaaatccaacagggcctaagtggaggggtgagaagc

SEQ ID NO: 288779 - DNA, 386 bp, Glycine max
tagcttgtgttgagctctaggagtcgttataggcatgaaatagtcatctacacgaggagtgttcttccccttttgagacttggcagaaacggatgattttggagttcttcttaaatcctcaactattcttacaaggtcttcattaaaggtattactttcctcaaattgttcttgcatttttcttttcttgattttgtcattttgttcaagtacttgtttcatttgatgttggacattaacaagaaccttcttgcaaagcctcaacttggcctttttgtccaaccaagtgagccttgaacctattaataccacctcccttaacctatttttcacaatataaatacacatcattgtcacttttgtataaccttcatcaatttgtttac

SEQ ID NO: 288780 - DNA, 439 bp, Glycine max
  unsure (1)..(439): unsure at all n locations
ntaacctcatcgtctctcacagtctttagatttgggagctcttccagtccttttgttcggactctcagccacttatgatagccgccgatgatcccattactgcttcccctaagctctctgtcctttcttcacgccgcatcccatgccttgcgaactccttggagtaccctcgcgttgtggtcactgaaacctcgtgcgatgaaaggcgtgatgctttcgtctgatggcactcctctcatgggacatccttcgcatgaagatagaatcctgattcttccttccttctagcgagggaaccatttaacagacgcccctccatgctagccaagagttggtgcacaacaaacaattcttgcgccgctcttttcacatccccggtcgaatgtgtcatacatggccaaaatggcgacgatcgggctttcctttccatgatgaaacg

SEQ ID NO: 288781 - DNA, 382 bp, Glycine max
agctttttagtttccaagtgccaattcgtcctcttctttagtccagtcttcttctggcttcaattcatcagcgggctttccttctgtgtccagcatcttgggatgttcccagcctttgatgacagctttccaggttctgctatccagtgatttgaggaaggccaccattcttgctttccagtattcatagttgcttccatcaagaattggtggactgttcactggtcctccttctttctccatgttcatcagaatttatctccccacatctcactctgtgattgcgagtgttggctctgataccaattgaaattctgataccatgggacagatgtcgtacaggatgtcacgacatcacgcttcagaacatgcagcatatgtg

SEQ ID NO: 288782 - DNA, 438 bp, Glycine max
tgcatgattcacattctccccctttctcaagcaaattcttaattctttttgacatcatcaaaatcttcatgatttacattctccccctttttgatgatgacaaccacctgtaggttaggagcaacaacaaagaaaaaatatctatttgaatataatttactcccccttggttttgcaatgattgcttatatgagacagttgaagatttcatatttttcatatgtaaacaaattgtctcataaagaataaataatttttcttactattttatcttttatctttctctccccctttgtcaacatcaaaaacaaatcatgaatagagaggagaaagatgttaccacttgttgattacatacatatattttatcttttatcttgttgattgcaatgtatgagaatgaagtgataccaaaaggcattataacaatcatttaat

SEQ ID NO: 288783 - DNA, 516 bp, Glycine max
  unsure (1)..(516): unsure at all n locations
acacagccagccccacccgactacacaaanacaaccannnnnnnnnnnnnnnnaaaaagggggngtggagcgtagncatcgaacacncnaaccnnacaagcganccnnaaagcccgcccgcaggcaggcaancaatttatgacatacacgcccaangaaccaccgacctcaggagcacgcacgcaagagatgaacacgctagaacgaaacacgcccaacatacacacagaagagccgaggaccacgaaggcccaaggaaagacccaacaccaaacgacgaccaaaccaaacgacacccaagaagacaagccacaaggagacaagagaggagaagcacacaacaacacccacgggagcaaaaacaagaggacgcaacagcggacaaaagaagaacaacaggaagcaagccagcgaacacacacgacaccaagaaaacgacaaacccggaaaaaccaacaagacagaacccgggaccaccaagacgcagacaaaagaacacaaagcacaagacgggcg

SEQ ID NO: 288784 - DNA, 378 bp, Glycine max
agctttttatctaaggaacattcttggtggtgaagctccttcttccatggcttattccctagtggatggcgtctaccatctcctcttcttctttgccttacgctgcatctccatggtggaaaatcaccattgaaggacctcattgaagctcaaagattcagcctccatagaagctccacaagcaagcttccatcaatgaataacatgattctttacaatttccaccgagtaatcttgctatagaagctacatttgattctctatggttcaaatttcttgttcttgttcttgatcttgaaccatgaattgtgttgagtacacgttcctttgagttttgacttgttattttttgcggctgaaacctacaccataaaatta

SEQ ID NO: 288785 - DNA, 343 bp, Glycine max
  unsure (1)..(343): unsure at all n locations
aaatgaggaataccttttgcatttacgcgtctacatcgataggcaaatctgttactgatattcctcacaaatgttaagacccacgtactttctgtgtaccttgcgttattgggaacaacattgttaagaatgccatgctagatttatgagcatgagtgagtgccatgcctttgtctattntcaattatatatcctatggaccttggcaatctacatatggcctaattcatgtggcaaatagaatagttgcttaccctacagctttcatataggatgtactgatgagggttggtgaacttatttaccctgttgattattatgtgcatgatattgaagaatgatt

SEQ ID NO: 288786 - DNA, 367 bp, Glycine max
tcttgcttgtacattgcacaatgttggtgttcggatgaccttatgacttatgcatgctgcattcttgtggatcttgcattcacattacattattggtgacattcttttcattactggaaagcttatattgttattactggggaagcagcacacatttatggccatcgtccgtgatagaaaggaatcataatggatggataagataatatcataaggagccatcccacttcttgaaccatataattgatcatatggctgggctaaccctcctggggatgcattcatggttacaggccctgagtattttacaacaaggcgtaaggatccatctggtgaatatatgctcaaacctctccgttttgattgg

SEQ ID NO: 288787 - DNA, 430 bp, Glycine max
  unsure (1)..(430): unsure at all n locations
tggggttggttgttttttttataaaaaatgtccgacaacttttagattcttttgacaaaaatgccttactcttttatctctcagatttatagcacctgtgaactttgactggattgagaatttggctaggtcttgttggacgtgtaacgtgtgacattgagcctagattataataaatggaaaccaagtagcttcctgtcaaattcaaactcgttgatgaaaaactatggccacattaattaagactgtttacaagggcttttgatttttagaagctgatagttgaagttgttaagagaatctaagcttgctcagattctgcaaatcctgtgacaaaacaacagcaagaggtgacgaaagaaatagtcaatagtgaaggattccgctgatgggaaggaagacaaangtgtttgactcggaactagaaagt

SEQ ID NO: 288788 - DNA, 394 bp, Glycine max
agcttctagtcgtccatagacctcctctgtggtacggtctagcaaacgttgcatctgtgcattcatcgcatccactaacagacgttgagcgccgtccaactgatggtactcgtcaccaccaccacctgctccagccataattcaacaggaaaaaaaaaatgtgcaataaaaattattaaggtttcaggacctcacaacactctactcacgtctcttagatggtagtacactcgtgtttaatgctctcaataggcttttgtgtaatgtattccctcttgccttttaccactcgtgtttcctcttaagttcctggatggaccaaattagacacacaaggtaatataaaataaaaggaaagacaatataatgatcacaaacagatttgatttgggat

SEQ ID NO: 288789 - DNA, 387 bp, Glycine max
  unsure (1)..(387): unsure at all n locations
tcgccggatgatgccgatcgaacatttcccaagcgacatcatccaattgttcttcagggattgaatagaataaacaatggccggtgtcggtcactatatggccccgactgatatccttcagccgacattgcgcaatttcttttacaaacgctggccgaaaatgtttttttacggtagaggaagttttttgtttttgggttccctaaaaaaattgcaatgtaggtcgggtagggtttttccgtgcgaagctcaacctganggttgtgcttcgggcgacactgacatgttctcatttagtcggccaaaaaaccgttacccaaccccgggaggaaaaaaaccatctttcacaaaaatggatggaaaaaaaaatgatacctgacgtcggcg

SEQ ID NO: 288790 - DNA, 387 bp, Glycine max
agcttattctttttggccttgcaagcgaaggagctcatcacaaccaacacgcttacactgcagcaagatgtttgtacctggtaattggttcagttagctttttatatcagaaaatattaattgttaattttgttagtttttattaagagggaatcaaactcgagcctttttttgtctttacttcctttttaacctctcaatcaattttatattccgaattggtttggttacttaattaatactttgtggttcttcctcttccccactatgtatttcattgcatgtatagtgtatacaacttagcaattacgtaacgtaatatatatgtactgtgttgtgttatactgggatgtaggatttggagaagcatcaccagaagcaaaggct

SEQ ID NO: 288791 - DNA, 445 bp, Glycine max
tgatctgctatagggttaccatcagattcggatgcattatgctgatatccccaagattgctttcagaacccaccacgtccattacgagtttaacgtattgttgtttgggttgtgcaacgcaccgtcgtccttccaagccaccatgaacctgctttttcgatcgtatctccgccacttcatcatcgtcttcttcgacgatatcctcatatacagttcttctttcgaggctcacctgagccatttggaaactgcttttcaggtgctgcttgacaatcattctgttttgaaattgtctaaatgtttctttgtgcagcctcaggtggagtaccttggacacatggtttcttgacgaggagtggaacctgtggcttctaaagtcgcagccattcatcaatggcatgttcctcattccatcaaagtcgttcgcatctttctaggcctcgca

SEQ ID NO: 288792 - DNA, 389 bp, Glycine max
agcttcttagtttcagatgatgcagatgggtttgtagctacctcatgcactcctctaatgactatggcatcatttctggcgctaaactgctaggagttggaagccatcttctctattaaatttctggcttcagcaggagtcatgtctccaagggctccatcactggtagaatctatcatacttctctccatattactgagtccttcataaaaatattggagaagaagctgttctgaaatctgatggtgggggcaactggcacatagtttcttaaatctctcccagtactcatacaggctctctccactgagttgtctaatacctgagatatatttcctaatggttgtggtcctggaagcacggataatgttttctaagaatactctctt

SEQ ID NO: 288793 - DNA, 438 bp, Glycine max
tcaagaataatgacatcatccaattatttatttcccgaagggaattctataaataggcctcctatttttaatggcgtgggttaccattattggaaaacccgcatgcaaatttttatagaggtaatagatctgaatatctgggaagcaatagaaattgggccctacattcccactatggtggcaggaaatacaaccatagaaaaacctagggaagaatcgagtgaggaagaaaagagattagttcattacaatttaaaagccaaaaatataattacatctgctttaggaatggatgagtactttagggtatcaaattgtaaaagtgcaaaagatatgtgggataccctacaattaacacatgaaggtacaacagatgtaaaaagatctaggataaatacattgactcgtgaatatgaattatttagaatgaatccaaat

SEQ ID NO: 288794 - DNA, 389 bp, Glycine max
agcttgtatatattgtttgtgaaggacaaaagtgacttagtgataaagaatacttgggtcttaatcttaggggaagattaagtgtagtgccaggagtgacctatagagtactcattgtagctagaagtggcatagagaatacttgattgtaatcaaagaattaattagtgaaatccttcaaagtttgaaggaaaactggacgtagcccaagagttgggatgaaccaatataaaacttgtgttttctttactgcttctatataactagttcttttccatatgttactcctacactactctatccaagttttgtgaactgattttctaagcacataatgatttcaaaccccttggacgaaacccaacgtctattaatatctatttgagaaa

SEQ ID NO: 288795 - DNA, 431 bp, Glycine max
  unsure (1)..(431): unsure at all n locations
ntacagaaataagacacaaactatcttgcacaaaaacattccttcatttattcttgtaaaactttctataattctttgtataaacactaagctctcaaaacatctttgtaaaccttgagagaaaagactaaaagtactgagaaatatatatgtttgcaatatgatatgatattagtctgtgtgaaaacctccaacaaatcttattgatttgtctagaaccaacagtggctaaggttgaggaaccttggctggggttatagctaacactgaattatcgagtagatatgggagcaagttagcataggacaccgaaattggggtgaattctataggctttttcgttggaatattccctccctggttggcatcttggtttgtgttaagggtggtgtttggcattggatgtgcggcaggcaggctctgtggttgat

SEQ ID NO: 288796 - DNA, 394 bp, Glycine max
agcttctagagcatgtatctttacttgacaactatcatgagttgacagcttgtagaaccattctgaggtattctttttgaggttcccattttgaggaacctttctaatgagcattctgaaggatcattacaatagttattatgatgtttgctgagaaaaaaattcatacttgatagattctgttgatgaagttcatgttgataaacctttatgaagtagtacaacttcatcaaacttgacacttcttcatagctgcaaacatttataagtagattgcttcaaaaacactaagtgaagattcaattgttggtgtgatagtgttttgtccatagttagacagtgtagtatcttcagacttctattatgatgcttctcatcaaagcatgaatcgtat

SEQ ID NO: 288797 - DNA, 444 bp, Glycine max
taatacaccgccactacatctaataaatgaaaaattattaatttaatgcatactatgctactcatgtaacaatgaatttgagattcatattaccttgtaaccaatgaatacgatggtgtccgattaactcttgctgcaatgaagggcatacgataccatgcccaagattgcaacaatgacgcacagccacccatggttttggcatcaaggttagtggctctacacaattctttgtacaatgttgctagacaagcagagccccaactatatcacctgactcagttgagatcagcaaacacaatgagatacatcaaatgaacccaatttctcatcttgttcggcattaaaaccccaccaattagccgcaaaatgtaagctttacaattctcttctaactgttgttgtgttggttctgagggaagtgcaacatattatcttgcaatc

SEQ ID NO: 288798 - DNA, 382 bp, Glycine max
ttgctttacatcccgatcaagagctcggaaaagggatgctaatactgctgcactcctactgtaatgacttgcctcaatcaaattcgataatcaaatgatatacataaaatgaactctcgcacctgatgtatctggcatcaaacagtcgcctatcagcatcatgatatgagctatagcatgttttgcaatgacaacatcaccagcattaactggaagttgctgacaattttgctgcgaccaacttagataaatcattttaccctttacatacttaccatgtggagtgtgccttatttatgcttgacgagcaacacgtacatcaccggcgatgatactagttatcaacagtccatcaatcctcaggcccaactgtatggtcaca

SEQ ID NO: 288799 - DNA, 439 bp, Glycine max
tattaaagaatacatttatgctggatttagaggtcttattgcaaaataaattatcataaatatcatattgggccttaaaaaaagcttatagccttaaataagtttgattcgcctcttataaagggtaaagtctatctatttttatctttttgtctcatgtatgagtaacaatgattttaatattatattttacataaagtttgttttctcattggcccattaaccgattaaactatttaatgccaaattatacttttttgaaatctttaatatgaaataagttaaataaactaatagattaaacttaacttccaaaaagatgtaatcaaatttgtgtacttagttgccatggaattcaatgaattcctttgaaacttggttgcgaggtttgagggctctaaaacgaaaccagaaatgcaggaaggcttacacagacaat

SEQ ID NO: 288800 - DNA, 385 bp, Glycine max
agcttgctcaaaacaaaatctaacattccgatccactcaattcatacaatttctcattcaactcaatcacaacacttcatttcatacgaaatcaaaccactgaatatcatattcaatcagttcactgttcaaacatgcttttgtacaagctacaaacactaaaacaacataaatttaaaagtctggaatttaaaagactaataaagcataaactaaataactgataaaataaaactgttcataatttgcaaaaaattttaaaaaaaaactatgcaaaatttaaaactcttggtcatcctactgctggtcttctgcatgctcgttcagatccagcactagagcagctggtggatcctgtgaaatgggatgctcttgctccaatgct

SEQ ID NO: 288801 - DNA, 439 bp, Glycine max
tgtaggattatggcgtacccatcacatgtggtactaggtggcggtcgggcgatggtgcacaacaagttttccacatgcacaatgcgcgcataaacccaccatcccctgttgcccacctccaactgagctcacgtactcccacgtagcccatatgctcgtttctctcaacaccgggtccccatcaatcctcccaagcttccacaacatccaagcaaaacaacattcaaacagcacaagctatcacagccaagcaaaacagagcaaaggcagaaaactttgccaaaacaccaaccaaatcacaacttttctcacttaaagaccccagtaacaattccttcgatccaattcgttaaccgttggatcgactccaaaattttactggaagtctatagtacatgaacctacattgtgaccgttgggatctactagcaaacatcca

SEQ ID NO: 288802 - DNA, 397 bp, Glycine max
ttgcttctatgctgcaccaacgactatgtattattaacttagcatatctacactttaacatatagcatgaaatgaagagcctgctagatctgactacctataagcgaactttacattttatatataaatataatgaactattccttgattcaatacacgctagcaggacaccgacagatgctttgaaagtctcataccgatatacatgttccaggatagtgacaaccattcgtgctcaacgacgcgttctaccttccttaggtatatgcagcagcacatgatcatgtataatcttatatatgacaattgctagttatatatgttgagggaaatcttccttaagatgtaatttctattggtagacgtccgggatatcaagaaaatgtaatcaaaaaat

SEQ ID NO: 288803 - DNA, 439 bp, Glycine max
ttgataaatatttatatgaaatatattcacttaaaatgctatatatttagggtaataatggatggagacattatacgtttttgttactaaagattttatttaactaaatttaaattgttcgtataaacaatttaaactaattatatgatgtattgtattaattaatatttaataatactgcattaatagaatatatatatatatatatatatatatatatatatatatatatatatatatatatatatatatatatatatatatatatatatatatatatatatatatatatatttacgcatataaatatatatagaattttttgtttttagtatttcgtatattccacaactagataggatctctatagataatgagatatgtatatggcattatatatataacattgatgatagatatgttctctaccgatgtcttt

SEQ ID NO: 288804 - DNA, 390 bp, Glycine max
  unsure (1)..(390): unsure at all n locations
atgtctttatttgtgtgggacggcgggctctcttcgacttgttgtattcgacgctaactcttaccgtaagattacttgccgcgacgctagtgatcatgtgcgtactgattggctctttacctggactatacatcccacgattgtcatgggtgtataacatgctggaaatgtcgacaatgtgtatgactactgcacgcctgccgtgattagcgatgaaccagcatacaacgtgccgtcttatactggcactagacaaacagcgctgtcccatgagggactcctacgctgatatgtccaccacctgtgaactagatgtatatcagcacataatcgattctaacgccgttggaccataccgcacggctgatagtctctcttccagaatattcn

SEQ ID NO: 288805 - DNA, 409 bp, Glycine max
ggttcgaggtacttacccgttgaagatcgaagatcgatgaagaacgaatgaagaacgtcgaagaacggttgtttcctttgcgagattcctcacggaaaacgttacggaaacgtttcggaagcgcctcggcttagattttcttcacggaaacaatttttccaagcaaatttgaaagagagagaagtgcctaaggggctggaccccttccttcttcatttcctcccctatttatagcaaaataggggaggtggttgccgcccagctcgcccaggcgagctcagctcgcccaggcgagcagggttgcttcctccagaagcaaccgccttctggaggaatcttctggagggcccaagtgggcctgggtgctatttgcacccccattgttactaagtacacccccctctgcctt

SEQ ID NO: 288806 - DNA, 392 bp, Glycine max
tagcttatcacttttacattaaaaaatatatatttttcttttctagttgatatcattacatatgtgcgttgttgaaatttaaatatgccattctactgtttatggaaaaatatggagaaattaacgaggaaattaagtcaaaagatgggtaaaataagggaaaagtgcaatgcagtcgcaaggttggaatttatactgtgccataagcccataaccataagagtaatcatatttcaatattccaacggctgctacatctttttttccgaaggctgctacatcttattattgacacttattacttttcgagtttaataattatttgttgacaatataaaataatcatcacttaaataaactattattgatataattaattctaaataattatt

SEQ ID NO: 288807 - DNA, 432 bp, Glycine max
  unsure (1)..(432): unsure at all n locations
tctgtggttttttatcagcaaagataaatatattcatatatatgaaaagagtaccagaggtactttaatacagctgtttggtttctgagatttggttcctaaacagattagattaaatctagaaaggagccaaaaccaggcacctattacacttttagtatgtagcttaaaccagaattgcatcatctactaatacataaaccttgctccaagattactaggagagataatctgtttggttgaaaagttgcacatgggcgtctctagtgcttacttatgtggtgtattttgttagttggttgttctggtgtctgtaactcttgagggctacaacatctcacaccttgtgaccgttgttcaacttctcttttataaaaataccatcccaattntctctatgaatttgaataagattcatacaataatagcatc

SEQ ID NO: 288808 - DNA, 378 bp, Glycine max
agctttaacgtaaaccaaaacaccaaccaagaaatgaattttgcagcgagaaagccttagaattcaccccaattccagtgtcctatgctgacttgctcccatatctacttgataattcaatggtagccataaccctaaccaaggttcatcaacctccatttgtccgagaatactactcgaacgcaacgtgtgcttgtcatggagaagccccggggcattccattgagcattgtaggggcctgaagcgtaaggtgcaaggtctaattgatgcgggctggctgaaatttgaggagaatcgcatgtaaatcctgacattaacaagagatgccacacatggtgcaattttgaaagttgttgttagatgtctctgatgactca

SEQ ID NO: 288809 - DNA, 431 bp, Glycine max
tcacatctcgtattcgcgtcattctgatcttagtataaaggtaaccgatctacaatgtataaatgaggattcatgtcatgagtaatgtttgtaagagttcagtgtaatgatgaaaaccagaaaggtaaagtgaacaaatcttgtgcaactatgatcaaataatggtccatccgttatacaagcatatctagacctatttgttttgggatatacagtttactgaccatgagattctagttttggacctatggttttcaggttgaagtaagcatgtagctgtgtcaatatatgctgaaaagacttccactggatctttcccgatttcccttattattatttgttgtggaatttcttgaatgcattaatgtcaagtatcctgtcccaaataataaattcatattctctgttcattatgcttggcaggcgagggg

SEQ ID NO: 288810 - DNA, 372 bp, Glycine max
agcttgtcacccagctcgcccaggcaagccaggttgcatcttccaaaagcaactgccttctggaggaacatcctggaaggcctagtgggcctggtttctatttttacccttttttagtaaatacacccccatttgctttttttggtgattatttttctgtaatgttacaaaactttacgaatttcgtaacgatacttgttttattttcgtaaggttacggaacctttcgggtcatgtaattactccttttttagctttcggaatgttacggaaactcacggattgcgtaacaatacttccttttgatttccggcatgttatggaatttcacggattgcgtaacaatgcttccttttgatttccggcatgtct

SEQ ID NO: 288811 - DNA, 429 bp, Glycine max
  unsure (1)..(429): unsure at all n locations
ttgngacaagcctataccaaggctcaaataaacttgaaagttctagacaactttcccaaggtgtggaagacaacaagcacccaaaatgctagagacctaaagaacctttcctaggatgaactgttgggggttcttagagtccatgaagccaacctttcgaatagatatcatatgtgtcataccctaatttcgtccggggttcattatttgatgatatacaacctttgattggccgcttcgagatactgggcaccctttgttttacaatatgtgaagtcccgagacgtgccaaaaaatcaaaaggaagcaggcttacgcgatccatgaaaattccgtaatgtgacagaaatcgaaatgaggtgtttatcgcaatccgtgagttttcgaaacttcttcgaaagctaaaaaagagtaaattcataatctgtg

SEQ ID NO: 288812 - DNA, 387 bp, Glycine max
agctttacaacagattttagtaatgacccactaacctagaattaaaataacttaatgccattaacctagggaattaaaaaaaaaaacttaatggctgagtgtaactgaaattgtggcaaccaaaagtcacccccaacagccaacaagtcagccaccatttggtctcccaaaaggttgaggcctaggttgccaattgggcccttattacaacttgaactaaacctactaaagccctttaagttgattaacccaaaacatatttttggtcagccaactttacaaggattgggccattatttagacaaactaaacactctaaaattgagacaaagtggtgccatttagtcctcctccatttgggccatgatacaactcacaaccttggac

SEQ ID NO: 288813 - DNA, 442 bp, Glycine max
tgtggattacgggttggttgtgcatgtttggcagactttgaagaagcttgtggttaaagggtctgttttgtctttctcataatctttgaaggagcttgtagttaaggggtttgttttttctttttcacaatatttgaagaagcttgtgtttgaggtgcttgtttcctttaattcagctaaccaccttttggttgaattccctaaaccaataataagtgtcattttaagtaattaacatataaaagatgttaactaatgtaaataaagattagagacttaccaagttactttccttattagttgctgcatctttgtcattcttcgtgtgttgagggataagttctttcttagcttgattgaataacatgtactatgttgtcattcctagtgactctgctgtcaagaactgtgttgttattgtggcgtccctaaattaatgact

SEQ ID NO: 288814 - DNA, 391 bp, Glycine max
agcttcttgcttgaaaataagatgacttataggagtaattttcttcccatacaagtacttggatggaagtatattttcaagtaaatccaccatgtaatattcttgtttactactacttcataacctactcataaaaaactattgaatctattgactaacaatttttatttttcacttttctttgtcaagagtatgttgttaggtctggatgatcattcatacctatattaggttttgatgattaacaaagaatataagtggttgatatattaatgatgagtttacgacaagtggatatgatcaatgttattaacgagcttaactgttacgacaagaaaaaaatactttgtttattattaactagcatctaacgcgctaatatcaagagcat

SEQ ID NO: 288815 - DNA, 445 bp, Glycine max
  unsure (1)..(445): unsure at all n locations
tgcatgtccaagtttcttgtgccatacccagggatttcctttgatagataatagacatgttacatcttgatttgatagttcactaggattaatcttataaagttttcttttcctcttagcagtaaaaatttgggtcccattttcgtgttggatgacacacccacctttgctgaaggaaacatcaagtccaatctcacataattgacttatgctaagcagattgtatttaagtcctttaacaaatagtacattctcaatgggaggatagggatcaatacttatctttcctactctttctatcttccctccgaaaatgattgctccaccatgcatgagggtcagacattggaatatacatttttctcatgtcatgtgatgtgagcagccactgtccaggttccatgattggtgtgtttntgttgtggttgaatatatccgcaacaag

SEQ ID NO: 288816 - DNA, 393 bp, Glycine max
agctttatgcttgcttcttaatctttttctttcttggtcgggttttagccctttattccagaaaaaaaaaaatacaatatttgaaagagaaagattcgttacaaacaccaactaaaatataaaatatgttgcttaacttgctttacttttaacctgctgatgtctttgaagatagaaaaaaaaatgaatattcacgactcaaatgaagtaaagaaaaagaaaacagaatataatggatagaacattatatattttgtacgtgcagtaaagggggcgaataaacacaaaattgaagaaagtagcaagagaggggcgggtggtgcacaatcgaaatcttgaagaggaaaaatacattatattcgtgcatatgcttattagatagggggggatact

SEQ ID NO: 288817 - DNA, 440 bp, Glycine max
  unsure (1)..(440): unsure at all n locations
ctgttgtctctaattntaaactttcaaagttatcagatacttgagtagaaatttctaaagaattatctatcttttcttcatgtttcccttgaagttgtttataatcttttgaaacactattgaagtcctttctcaaattttgataagctatggacaaagtggatgagttggagagaagttcttgatattctaattgaagagtttcaaggttgtttatatttacctcttcatctgattctgaattagatccttctgatgtagtgtctactatcaaacataggtaggctttttcttcttcttcttttttcttcattggatggtgtgttgtccatctctttccatgtgcttatcaataatttcttgttctttggtttgaagtactttttcttgtcagttattttatcaagatctggacattctgacttgaaatgtcctagttt

SEQ ID NO: 288818 - DNA, 392 bp, Glycine max
agctttattctatctgcaatgtttaacaacttaaaggaccaatgtctgattctccccactatcttctccacaagaggcaggtaatgatggacattgagtttcttgcaagacaaaggaacccccaaatatcggacaggcagagatccctcttcaaaccttgtgatcttctttataactcgaatgatgtcacaattcaagccaccacaaaacaccttacactttgttggattaatctgtagtcctgtagacttacaaaagaaactgaaagcctttagaatcatctctatagacttctcatcacctctacaaagaagaagaacatcatctgcaaagggcaaatgagtaatcctcaatcgctcacattggctgtgattattaaagttaggatctct

SEQ ID NO: 288819 - DNA, 440 bp, Glycine max
tgtaagacaaaatacgagatggaggcgagcaaggacaaaatggcgttgtcgagaaggtcatggtgatgctccttgatggtcatcacgccagtttttgcagtgctgcctccagactcgacgacatcactattaaccaacagatagaagatgccacaataatgttattgttgttgtagattcgcatctccttttagtgcatgacaccgaggcatgcacttctcgacggtcctcaacaatggcgatgttgctgcaattttgtagatctacctttttcgaactgttgttttagggaggatgagaggtgaaggtggagcaatcattgagtgagggcaacatgaataaacaatgtataccacaactaggattttttaaagggtgaaactgaagtggtcttccatgtgtccatatttacttctaatgatcttctgctaccttctcac

SEQ ID NO: 288820 - DNA, 399 bp, Glycine max
  unsure (1)..(399): unsure at all n locations
agctttgatgatatggtcttcaccgacgaaaggatcaaagtgggtctgaaaagaggcaaatctgatcatcttgctttgataaatgcaaaaaaaaaaaagttggggcaaataaagagggtgaggatgaaggagaagcccgtgctgtgactgccattcctatacagccaagtttcccatcaacccaacgatgtcattactcagccaataaccaaccttctccttacccaccgcccagttatccacaaaggccatccctaaaataaccacaaagtctatcgtccgcacttccaatgacgaacatcacctttagcacaaaccaagagcaccaaccaagaaatgaattntggagcgagaaagcctgtagaattcaccccaattccagtgtcctatgctgacttg

SEQ ID NO: 288821 - DNA, 443 bp, Glycine max
taaagtatgcccgagtcattcatccctatgagatgttgttgaagtattggcgatcagaattgccattccttggattatagggttgaaccaagctcatgcttttacaaaaaggttcatcaagtcaagttgaaatatggaagtaaccgtcttgcaaaattggggcaaaagatgaatcgagtcacatcactgcttcgtctactgccaaacacatttaggattattgatgtccttgttacttccagtttcaccttgacaaagatgtcgtggaccatgttgaaaatctaaattgattcaaccccatatcctgcgtaaaaattcgcaatcttcaactgtacatcattcgcatacatccatgcttttcattggttgcattgctcattgcattctttccttgaaaaagaaaataaaaataaataaataaataaaataaaataaaaatgatc

SEQ ID NO: 288822 - DNA, 371 bp, Glycine max
ttgcttgacacccagatcacccatacgagcaaggttgcttccttcagaagcaccagacttctggatggcccaagtgggcctggttgctatttgcaccccccattcttactaagtacaccctctgccttttttaggagataatttattcacaaagttacggaaacttatgattttcgttacgatacttgttttctttccataatgtgacggaaccttgctgattacataatcatccactttctgacttactgaatgttacggaacctaactaattgtgcaacgatgcttacatttaactatctgagtgtcacggatacctacagatagtgcataatattttcttttattttccggcacgatccagaattcac

SEQ ID NO: 288823 - DNA, 434 bp, Glycine max
tagagaatactaagtcgaagttttgaaggtttttaatgctggtttggatgttgcttccagaggcaagcaaagaatattgagtggaatttgtagaggtttaaaatatagggtgtagaagcttgtagatgattcaaaagaaagaattccaaaattgtgtgcttgatcttaatggaaaaatcctgccagtgtaggtattggatgtagccaaggttagggtgtgtgttgtatctttatttactgttctcatttagttgtagcagttacatatttattcttaactttgaaaaacctttgtttcacaaaagctttactcttatatttcatcaaaagatttttacaaagtagatataatgttcagaagcaacatgcaccttgtaaaagaaaagtgaaaatcaaaatatgtgagataacataattggtgatatgaagagtag

SEQ ID NO: 288824 - DNA, 387 bp, Glycine max
ttgcttgtagaggatgcttcaatggaggaaaagaaagatgatgagaaagagagagggggggagcatgaaattgaaggaataaaaagggagagaagttgaaatttgagttgtgtctcacaagactctcattcatcaaagttgcaacatgtgctacacatgcttctatttataaattaggtagcttccttgagaaactttcttgagaaaactttcttgacaagcttctttgagaaaactttcttgagaagctagagcttagctacacacacccctctcataactaagctcacctccttgagaagcttccttaagaagattcctatagaagctagagcttagctacacatacctctctaatagctaagctcacctccttgagatgagaag

SEQ ID NO: 288825 - DNA, 440 bp, Glycine max
  unsure (1)..(440): unsure at all n locations
ctttgattntgacttgatagaaccttttcttaatcagaggtgtttgatttgatcccatgtttaataaaatgaaaagttctgtttgaatcaatactctgatatcctatcatggaggaaataggatgaattcatgaagggatgcttatgttgtgcatgacacaaatacattttacggacatgagagcccggaagatcgtcttttcttacttgcaacatttggcagcacagtgccccatgtatgcatttaagaagacaatacagaccttccgacttcctgtgacaaaatgacgagaccaaatgcaatgcatgcgcgacaacacaatacaaacataaacgcataaaaacgcatggttgatagcacagaagaggaacgtacaagcatgtcaatatcatcaaacaattatacaacagagatgcacatgagcatgacactaaaaata

SEQ ID NO: 288826 - DNA, 363 bp, Glycine max
ttgcttttcccccaattttctaaaaatagggggagatgtgaagtagaaaagggttcagccccttatgcacttctctctctctcgaaatagctgaggaaaattagttctgtgaagaaaatctaagccgaggcacttccataacgttaccgtgacgattccgtgagttattacgcgaagattctcgaccgttcttcaagattcatcgttcgttcttcgttttcttcagtcttgaacgggcaagtacctcaaaccgagcttttcaattcattctatgtacccgtggtggtccacattttgtttcatgtgttgtgtattctcgtttccatttaccttatatgcccccttcagacgtgcctaagccat

SEQ ID NO: 288827 - DNA, 434 bp, Glycine max
  unsure (1)..(434): unsure at all n locations
tctcccncaattttctataaatagggggagaagtgaagtataaaagggttcagccccttaggcacttctctctctttcgaatttgcttaggaaaattgtttccgtgaagaaaatccaagccgaggcgcttccgtaacgtttccgtaacgtttccgtgagtgatttcgcgaaggttttcatccgttcttcgttcttcaacgggtaagtttgcgaatccgagactttcaattcatttcttgttttttttaatctttcatctttatttcgttcattttcgatttcttttcttccgtctttaacgcgcttttaccgtttatttaagccgttttctcacctaataaatgataaaatgaatttcaaccgatcatttgtgttgtaatctcatttaatcacttttaaaacgaaatctaaccgaccgttcacgctataacctc

SEQ ID NO: 288828 - DNA, 391 bp, Glycine max
agctttgagccaatatcttgactcaccgtaaaccttgacccagggtgagaatgtcaatccttaccctcggaagcaaaaaaaagaagagaaggaaaatttccaatcaaaggaaaaaagagaggaaaggaaattcccaatcaaagagtgggagaaagcaaaaagaaaagaaagaaaattcctaatcaaagaatgggagaaagaaaaaaagagagaaggagaagaaggaaagaaagctcctgatcaacgatcgaaagaaaacagaagaaatgtgcagagaggtctttggaccagacaatatctgaacaatacggaattgtcaccaaatgaacaaaagaaagaaaaggaaaccataacctaaaagtggtcttctccctttgattaccaaccaaaa

SEQ ID NO: 288829 - DNA, 439 bp, Glycine max
  unsure (1)..(439): unsure at all n locations
tgcccagagaatgagtccacggaggaaatgcttaccacctcaaaagactggaaagcggtttctaatgactcctctgcggcttccacataaggcatagaggacgggcagctcaccaagaggtcttcctcgcctgacacgatgaccaaatgcccctccactacgaatttcaacttttggtggagtgtagagggaacaactcccactgagctgatccacgggcgccccaacagacagctgtagggggggttaatatccattatttggaaggtgacttgacaggtgtgagggcctatttgtactgggagatcgatctctcccctaacctctcggcgggtgccgtcaaaggcatgaaccaccattgaactcggctntaagtgggaagcattgaatggtaatttctccaaagtgctcttaggcatcatgtttaaactggaaccat

SEQ ID NO: 288830 - DNA, 385 bp, Glycine max
agcttctcttggactttaagcaagcagctaactcgtcttttaagaccatgctatgtgctcgtgattggtctctctctttcccttcgaagcttgagctcattgttgctgccccacaaagctccacgaaatttgtcacgaccatgctcttccttgcgagccctcttggtttcttgttcaagggctcttgcggtagctgcattttcttcttgtaacccagcacactctttccgaacgtctgtatcgaccaacttgaatttttctttggcaagtcttgcttttcctagttcggtttttagagctcggacttcttcatcctcttctggagcttcgaagttctcttcgtcgataatctttaacttggagagccaatctaaccctcatgtac

SEQ ID NO: 288831 - DNA, 446 bp, Glycine max
  unsure (1)..(446): unsure at all n locations
ctcagctatgctgcnacattataatagaccccctcagaagcatttccaacaacagcagaataattatgatctttcaagcaacagatacaatccaggttggaggaatcatccaaatttgagatggacaagtcctccacaacaacaacagcctgtccctaccttccagaatgttgttggtccaagcaagccatatgttcctcctccaatgcaataacagtagcagaagtcacaacaaagacaacaagcaactgaggctcctcctcaaccttccttagaagagttagtgaggcaaataaccatccaaaatatgcaatttcaataagagacaagagcctccattcagagtctgacaaattagatggagcaaatggctactcagttaaaccaagctcagttccaaaattctgacaaattgccttcacagactgtgcaaaatccgaaaaatg

SEQ ID NO: 288832 - DNA, 377 bp, Glycine max
agctttatgccattcggaataggggctcgtgtctgtgttggacaacacttagccatgacagaactgaaggtgattttgtctctcattctgttgaagtttcacttctctctctcattaagttactgccattcacctgccttccgtttggttatagaacctggccagggagttgttcttaagatgacaagaatttaagcaacaatgtaacagatgaatgatgaaaacatgcaggtaatgggatggttgatatagtcataagacatcatttctctagctgatgaatgctaataagtctttttttttatccaaattagataataatattttttttttatgacaggaagatattctcatacttcgaagttatgagacgaaga

SEQ ID NO: 288833 - DNA, 431 bp, Glycine max
  unsure (1)..(431): unsure at all n locations
tgttcttctccaccacgtngaagaccgtgacatctctctttttcttttccatcgccaccttacctaggtacgttttgtcaaagctttgttgttctattgaatacttaggtcagcttggggaactcatggttaacccaaggaccttttttggtttctactgcaaggattggggaacttgtagtgacctgaggtacgtttgttgtcgcggtcactggtgctgaaaggctctcattttgattgaggcaagtcgtgctcactttgtagttctttgaatgcttaatgtctgttgtaaaactagggtagcatagtgtattgtagtgtagtgttcttcattctgtttgaggtagcgtagttaacttgtatgttcattctgtttcatgtacattgttacaaactgcattctacggaataatagttaactcgtatgaact

SEQ ID NO: 288834 - DNA, 392 bp, Glycine max
  unsure (1)..(392): unsure at all n locations
agcttattagtgggaaattttgtaagacttaattcaccccccccccctcttaagttattgaggccacttgtccaacaaggacactatcttaatgagcttaagcattatctcgatggtaggtatatttctccttgtgaaagagaccacttgttgttgaaagattgtactttcattttctggtttgattcaataatatttgaagatgatgacaacattgatgctttgctctccaagccaattgttaaggagtccatgtttacttggctacaagctaatagcattttcaatgaaggaaaacatctaacatatgtgcaattcataacaaagtttacatatgtagccaaggatagatgttggaagccacgcanaggaggttatacaattgacaggct

SEQ ID NO: 288835 - DNA, 441 bp, Glycine max
tgttacagaacttaggaaaaatcaagaacaagcttgttcgcacatcgttcgcgtgttcgatatccactcgacaaggtttgaagtagaggagaccttcaatcctataacgcaacgtggcggacaaaaatgggcagttaacttgaatggccattattgtcaatgcggaaggtattctgcgcttcactatccatgttcacacattattgcagcttgtggttacgtgagcatgaactactaccaatatatagatgttgattacaccaatgagcacatcttataagcatactccgcacagtggtggcctcttgggaatgaaacggcaattactgcttctgatgaggcatggacactaatccctgacccaactacaattcgtgcgaaaggtcggtcaaaatcaacaaggataaggaatgatatggattgagtcaaaccatctgacca

SEQ ID NO: 288836 - DNA, 390 bp, Glycine max
agctttatatgatatcaaacgaaattttttgcaacctaacatgtttattgttaacattataaacatctttgttaattaaatgacaattatttaagcagtaatatatatttgtttattacattttgtttgcacccaagccattgcacaatgctttctattttcaatgtgtagttgggtgtataggataagtgtttttagtgcttccagactagccgtttagtagcttgttgccaacctaagaatttttgtagccttgtacacaaccttattcacaagaacacaattcaggtgatagagttagatggaaaattataataattttttaactataaatataaataaatatttgtgccccacatctagattcaattattgtgaatggagtaagct

SEQ ID NO: 288837 - DNA, 451 bp, Glycine max
cgctttctttctaatcaatctgtctattgactaacatttctaattgcaatctcacaaacttgttctttctttgtctatcatacatatttgctcaaactcatgataaaacaaaatcttcatttcaaccatgtattcaatccataatcaccatttcaaactcttatcaaactgcattttcaaagaatcaagttaaactgttctttatgcatcaggactttcaaaatgtttccaaaacaaaaagtatgctataaaccatattcacatgccacaaaccataatagttcatacgtactaaaaccatacaaccactatactacacaaacataataattaaaatgtactaagaatgatataattataataataattaggacatgtaatcaaatcttgtcattcatctcgatcctgctcctcatcatcgaaatgtaacactggcgttgatgcaatccta

SEQ ID NO: 288838 - DNA, 392 bp, Glycine max
agcttcttgccattttaatgtctgcagttcacaataaagacaagtagatgaagacataacaagtaaattcttgaataatactaatacactacaatctattgcagttttgattttacctttgattcatcattagcttctttggcagcagaagcaaattcttgaatcgaagtatttagtggatgtagagtaatctgcttgtctaacaagtagctcagtatgttattgtagacctgtccaaagtacgggaagattatagactcagtaatgatataggaacacttccaagttccaacgaagccataacagtgcaacattaaaattgaataattgataaatatttattcaattcaccccacattttactctctttgcctctgccaaatatttagcct

SEQ ID NO: 288839 - DNA, 428 bp, Glycine max
gaccttcacactgcgcttacatgtccaggcctggactgtctggtccaaaatggttagacaatgggtgatttttatgccatgcaatacgatttgacagactccaaaatctgcattgaagaagagctaaaccctatcagcacatatgcaccagagatatactgctatatatctatacgcaatgataatgttattccacattttggagtaaattaaagtgaaagactatacatacacgataagaatgatcaagaaggcagaatgatttgcttccacatgctattggggatgctaaacgaagagacataccataaaaaggacaatgaaatgtacaatgcgtgattgtatgttgcgtatactccataatacgagtgatcgacaggcccgtagcaataatcattatcccgcactttttcgtgagtgtccaacga

SEQ ID NO: 288840 - DNA, 398 bp, Glycine max
agcttttgtccactttagaaccacttgaatccgttcaaaggttcaacgccttaaacggtctttttacttttaaacgattaaaatgaacctttagaagtctaacatcaaacttatgtgtaattttctttcatcaaagaactatgtaggtctgagtttctcatcgcaattgaggatacataggagcaagagccccgctattgtcgaccccaaaaagataaaaaacataaaaaatggaaaataaaagaaacttggtgtcatgattttgcacacttgattaaacgctgttgtcccttgtgacggacgcgtggggtgctaataccttccccatgtataaaaaactcttgaacctttatttcttataatttgtagacccatttttggattttctaacattttcg

SEQ ID NO: 288841 - DNA, 429 bp, Glycine max
  unsure (1)..(429): unsure at all n locations
tgtccttggtttagacatgattggtacatgatttgggacttgtagttattaatttgggcaaaattggatgagggaaagagtggttttcgaaatctgcactgtatgcagaattttgctgttgaaatgtgcagcaaaattttgtataagtgcagaaaaaagcttgtgtatggctggttgtaaaaagggtattacatatggggttctggaaattatctaagagatcccagcggtcaaaatgtagacttatgtactanagacttccagtaagattttcgagtcgatccaacggttaacgaattctaacgatggacatgttactggggtatttgtatgtgaaaagctgtgattgtgggttgtgttctgggcagagtattctgcctttgccctgttttgcttggttttgttagaccatgatgattggatgtggaa

SEQ ID NO: 288842 - DNA, 374 bp, Glycine max
tagcttgtatcagctgttacatgataccaaatggaaattgcaagcactacaaaaaaaagcagaatgacttgccatgcaacttgggacattagcacaatgatagtcattaactagataagtgctaacactaatccagctaattcggatggtatgtctgtgtctacagcactttgatccgtatatggctataatcatcaacacaagaatggttgaaatcttattacagctgataataatcaaaagatagcactaatctatcacttaaagatctaacagtgaaactgaccctactcgtaattcggcttgaaggtgtggtgtcaaaaaatgaaacatgtgcccttaatacaatccttcctagtatgaagagggtgcca

SEQ ID NO: 288843 - DNA, 415 bp, Glycine max
cgagttcaactgtccaactctcttccataatattctcgttttgaaataatgggcaaaatattcactttgtttcttaaaagtgccaaccgaggtatggtcatgggttggccttttggctcctcatgacatcctattagagtatacttactccgtctagtattgttactttgtgtattctgttatttgttgtttgtaagctgtcagtgagctgacatggagttacagctaagctgttactgagctgctctttacttacagctctaactatgtcagtaacaaattgggatagttaacacgccagctctctatatatagaggtgacactatgctcttgaacttgtctttctctttcttgaccagagagaaatcagagtctatcacactctattaccgtatcacacagcttggttgcgat

SEQ ID NO: 288844 - DNA, 365 bp, Glycine max
agctttatacctatgcttctccttcttctccttgaaaagggccaggagagacacaccagaaaccttcacgaccttgaacctgactccaggaatatcacccacggcatgaccttttcgtccaaatccagctatcatgacttcattctacaaccatcaaccacataacattaggataagcatatcagcaccaacataacagcaaaataaagtaaatatgattgatgaatcacttacattctcttcaatataatttaagcaaccgtcatttggcacaaatgcagcaatcttcttccatttttgatgagttgaccctggcacattttcaatggcagagttgggctgcttacctcataccactggcatag

SEQ ID NO: 288845 - DNA, 437 bp, Glycine max
ggcatgcatggattacttattacttattaggtgaatgtatttttatccatccctttgatccggctcagttagaagtagattttaacatgtttgagttttgaaattagatttgtatttttaagcaggttcaaattatattttaggtcattattttgggtacatttttttaaacaaatatttcaggtcattttaattcactttagtatttaattgcactgtaaaacaatttttcacactgttatccaataaccactttttaaattattttagttaataaatttataatacatgataataagtcataattagatgattgtttaaaatttttctatattattaatgtataacatttttttcatttttatatgtttcttttaatataagttttatcaacgatagcgtatcttatcttaatcttgatatacaatagcaacaag

SEQ ID NO: 288846 - DNA, 388 bp, Glycine max
ttgcttgtaactaaataggttttctgccaatgtacacataccttggtccttgtatgacccttaacaaagtaatatggattaaatctccgtaataatctttcggatcaaattacctaagattgtaatcatcctaaaacccataggtccaaatgccaataagatttgtatatataggattgagattctcaatttaaaggtctattgttcattcatttattacttatatttatggctttgagccgaaactttacttaagtatcagtataccttttgtaggtacctcatccttcggagcgagtgtttcaatgagtactactacggaatgatgcactgaagttaacgacatgtctaagagcaaagcatcaagttatctttaggcattaacatt

SEQ ID NO: 288847 - DNA, 434 bp, Glycine max
ctttcaaccgttctttgtcgttcgtcgttcgttcttcgtcgttcttcggtcttcaaccggtaagttcccgaaatcgaacttttcaaattaacttttattttcatttcatttactttccgtaccccctttcgacgtgctttagtcatttactttagtcattttctcgcctaatcaaaaaataaaataaatttccaccgatcatttgatttgtaatatccgttaatttctgttaaaatgaaatctgaccgttcggtcatgccgtaaccacgttggaaaccaaaaagaggtaaactaataatataataataaaaaaatatcttttagtaaaataaagcaaaaaaaaacaatcggacgtttctctttgagatttctctttcttaatcgaattgactaataactaaagtgaaactaaggctaacatcaactcgcaaagt

SEQ ID NO: 288848 - DNA, 469 bp, Glycine max
  unsure (1)..(469): unsure at all n locations
agtganatgagactgagactgagacctcgagnnccannaccangggctctgtgaacctctagagccgagcctgacagcctgcttgccttttgccatttcgcccagacaagcagggtggcttccttcattatccacagtccaatcgaggaatcttcagtgcggcccaaatgggccatgttgccatatgcacccctattgattactaagtgcaccatatctgccaccattttgctgcgatactttattcgcaaagacactggaccttacccattattcaactatacctgctatctttccagaatgttacagtaccgtgaggatgacataatcatatccctacataatgtacggaatgttacattaccttcctaatagtgccaccaagtcttgcttagatcatccgcgagatactgaacccaaatgaatgtgcactacttatgtcagagatatcagcctgtccacaatgacc

SEQ ID NO: 288849 - DNA, 388 bp, Glycine max
gcctcatagaggtccaggaatgacaaggcggttgtagttatctgttctctcccggagcacgacagtcaccgcttgaggatcgtgtacaccacagcgcttcgaagccatcaagggatggtcgattctccgggagcgacgcagtccacgcttcagggacagacgacgtatactagacttttccatgagcgagatacgggcgccaagcggtgggcaccactggttactcctatggccaagtatgatccaaaactagtccttgaattttatgccaatgcttggcctacataggagggcgtgcgtgacatgagatactgggttatgggctatcggattccattcgatgccgacgctatcaaccagttcctgggatatccgaaggtgatggaag

SEQ ID NO: 288850 - DNA, 295 bp, Glycine max
ggggaaatgatgaggattcttttgataggccaaggtacaaaaaagtctaaggttgtgtttcaatggggtcttttatcgtgggaacccaatgttgatatctggagcaaaacaaatttgggtgtcaaggtgtctgtcttcgtccaaactcctatatcactccattatgaacgcatgacaatgatgatttgacaaccacatgcaaaattagtcatggctacagccaggtgggcactcaagcatcccatatatggcattgtgatactacggctgtgaatctacacatacagaccctttg

SEQ ID NO: 288851 - DNA, 431 bp, Glycine max
ctttctgtgtggagtgatgaactctgtcgcgcattatggcttgatcattggctgacatattctcaattagctcagttgcctctagaggggtcttcagctttatttttccccttgctgaagcatcttgatggaagcttgcttctggggcttctatggaggctggatctttgagcttcaatgaggtcctttaatggtgattttccaccatggagatgcagtggaagaaaaatgacaagaggtgagaggaggcgccatccactagggaataagccatggaagaaggagcttcaccaccaagatgagccttggataagaagcttggagaggatgtctcaatggacgaaaagaacgaatgagagaaagagaaagggggggagcacgacattgaaggaagacaaagggagagaagtcgaactttgagttgtgtctca

SEQ ID NO: 288852 - DNA, 375 bp, Glycine max
ttgcgtgttagcttgttcttcatgccccagtgatgccacattgcgattttatgcatggcatggatgcctgggtactataactttgatgacttatgaaggtgcgacacctatctgacttagagagagatgcacatgcgctgcttatttcttacactcattttcttattgcgaggctaatatccaatcaccatccattggacagattgatgcatactctttaactggagttgatgatggcttgtgttatgcttttatgatcaactaacctgatttgcttcttcatatacactagtgtgctcttggagacgatgccgtatatcgactgatcatcatgctcctttatgctgattaccttgaaaagttcatcatttctca

SEQ ID NO: 288853 - DNA, 413 bp, Glycine max
ctggaaaccggagtggtcatgacatcgactatggaacttattctcagtatggtggtataaccatgggcaaatcaactctgtatatcgctctcattagtcttcatatcgataggagaaattccacaaggttatcataacgattgaatcgttcatttaaataataaattaacacagcagacatgataaaacttacctgtgtgtaagtaataaaatatagtgattaaaactatatcttacactgtcactataatgatatcaaatatcaagagacttaaacattgcatattttatgggaacaaaaataatggtattgtcctactctgatttgaaattgacttggtgaacttctaaaaccatgtatgagttggaggtactataatacatgaaatccacttagacgctaccaaccattt

SEQ ID NO: 288854 - DNA, 465 bp, Glycine max
  unsure (1)..(465): unsure at all n locations
cgtgggcttgagcttgactgacgccatcgaaatcagggcaatggatcttggacccggagatgctctcaggcgacctgtttgctgtcatcctttgaggcgcacgtagttataagatatgtaagtgataccatggctcttacatcgtgtagagtatcctgaaggaaccgttttcatggatgtaatctctatcctcgacaggggagtgctcaattataccatccatatgtatcgtagacttcgataagaagcacctgcgtgtactactatagagagaacttatgcacaatgcttactattcatctaaatgatgggaggcgttacactagatgtaactttgattaatgacagtcttgtagactcttgtactagctcaacacctttgacttttcgtacatgataacacgctcccacctgctctattcttccacactaactctactacattgagcctccttgactgagtcn

SEQ ID NO: 288855 - DNA, 421 bp, Glycine max
  unsure (1)..(421): unsure at all n locations
ntgaccaaatcccagcaacagttgtttccttatagacttgtctcaacaccttgtcttcgaaactgagaataattgcactgtgtgccttctgcagtagtgctttcttatccccatcacccatcatcttttcgagtttggcttttccatcaagtgcttctaccaagccatcttcaatcgccatagtccaaaattattttgccctgtgaacttttcaacctcacacttggccgagcccatttcttgaatcgaactcaaaatcgctccatgctcaccgcaccaatttgttgtgccaagatcagattttaattcacaaaagaatgagtttcttgtatgaacaagaataagctaaatgcaggaaaaaagatgaacagaaaaactacactgtgctcatagcaatcacttttcatatctctgcaaaaaa

SEQ ID NO: 288856 - DNA, 390 bp, Glycine max
agcttattccgaggacagtttattatcatgcacagcctgcaagagttggctcataacaggccaatcatacctatagagcattttcttgagcaagtagcctggcctgaagctcaacttccattggtgagacccaacgaggctgcccctcctgagcccacacctacacaggttgatccagagccagcagacccataatctccagtgatgaatccaccttcttctcctgagcttgaagtggttcccccatctccacctctgattatcatctccgatttcccatctagagaaactgctgctccccctgattcaccagctggagaagtagctgatccccctgatttcctagttggaggagctgctgatctttctgattcctcatccaaagaagtt

SEQ ID NO: 288857 - DNA, 444 bp, Glycine max
  unsure (1)..(444): unsure at all n locations
tctggtgggacatcttgatgcaatcctccctaggaagggaccaatcactagaaccatgagcaagaggctccaagaagattgggctagagctgctgaagaaggccctagggttctcatgaaccttagggtagatttctgagcccatgggccaaggttgggtccaattatctttgtacatattagactaggatgtcattatatttggtccttgtatatagggctccatattgtaggtagggtaccctagaaatataggatttttcagcccttgtattttttgggcacctagactagtttttatattaggggtagttntgtaatttcacatgcactaagtggatatttgatgtgtgtggttggaaataaatttaattgaattggtagaagcccaatccaattaaatnttagagggggaggtgagcatttgcttactacaccccattg

SEQ ID NO: 288858 - DNA, 421 bp, Glycine max
ctcggacccgggatccttaagcacctgcagctgcagcttttggttctcacccaccatcttttcatagtagagtaccgataatgtgtctaccatcacgattatcgtctccctttccattattgggggtaccacctgtgccgccagatccctccaccttttgggcgtgttctttgaatgatccgtccccctttttgcacatgttctgtagatgcatcctatacggaaccatatcaaaattgtactgatactgcctaacaaaggcaaccattatgtccttccaagaatggactcgggaaggttccaagttagtgtaccaggtaacagctgccccagtaagactttcttggaaggaatgtatcagcaattcctcatcttttgcgtgttcccccatcttctgacgatacatctttagatggttctt

SEQ ID NO: 288859 - DNA, 445 bp, Glycine max
  unsure (1)..(445): unsure at all n locations
tataacatgattntgtgttncacatcccctggagcatattttgacttatcattcaacaaagacaagggaccaccaacttacagaattcaaggtcaatcttgccatctaatagggagtttattaccaatgccaggaaaacctcctaaattttctcacttgtatatctatggtacagagaataaaatccaaaatagaattggaggcttaaggtaaactataattcttataacagatactaaagtcataataataaattgattgttcttaggttatattaacttacaagtttaataatgcagatttgggaaccaacttgatccaaagattgttgccaagttaaaagatatgttttaccatcataatgtctttgctaaatctttcggaatggcaaaggaaatatttgagaagataaaatcacatgatctgaaattgcaatagatatctc

SEQ ID NO: 288860 - DNA, 393 bp, Glycine max
agctttttcttcttatctcatggaggtgagcttagctattagagaggtatgtgtagctaagctctagcttctttaggaatcttctgaaggaagcttctcaaggaggtaagcttagttatgagaggggtgtgtttagctaagctctagcttctcaaggaagttttctcaaagaagcttctcaaggaagttttctcacgaaagcttctccaggaagctacctagtctataaatagaagcatgtgtaacacttgttgtaactttgatgaatgagagtcttgagagacacaactcaaagttcaactcctctccctttttcttccttcaatttcgtgctcccccctctctctatctccccctctttcttttcctccattgaagcatcctctccaaggc

SEQ ID NO: 288861 - DNA, 444 bp, Glycine max
gcttcttcgaagggcatggttatttccagtttgttgaaaatatctaagattctcgccttatgacgcttcttctccttcttggaaggtaccacgggatatggtacttccgaaccttcattcacagctttttctcttttcttctctctagcttattcacttctactcctctcttcattcttatttttttcatatttttcattttctttttctttttcttggtcatttaattcttttttcttcactattatttgtttttctttttcctgattgctttcacctctcacatcatctttcttttcatcagtacatttcttttcagcagctttcttcttggatacaacactatactcatcctacgcctccataaacctcttattccttgtcatcacagctttgcattcctccttgggattcttttctatattcaccacaaaactattggat

SEQ ID NO: 288862 - DNA, 382 bp, Glycine max
agctttattgttttatatctctttgatgcaacatatataatacttttcttttttttatgaatgttaaacaattattattttttatgctgctagtgattttggagcacaaattgtgcccccaaaaagaattttgaagatgcttccaaaactctttgatcatcaagatcaaaatgttcgtgcatcctctaaagggttgactcttgaactttgccgttggattggtaaagatagtgtaaaatcaattgtgtttgagacaatgagagacacaatggtaagctaaactagttgtctatttttgttgttgatttgatttgttatgttctcctccatatccaaatcttagagtacctttcttcccatttctgtatagaaaagagctaaa

SEQ ID NO: 288863 - DNA, 442 bp, Glycine max
  unsure (1)..(442): unsure at all n locations
ggctcagagaaggagtccacggaggaaatgcttaccaccttatatgtctggaaagcggnttctaatgactcctctgcggactctacataaggcatagaggatggacaactcaccaagatgtcttcctcgcctgacacgatgaccagatgcccttccactacgaatttcaacttttggtggagtgtagagggaacaactcccactgagtggatccacggacgtcccaacagacagttgtagggggggttaatatccattatttggaaagtgacttgacaggtgtgagggcctatctgtactgcgagatcgatctctcccctaacctctaggcgggtgccgtcgaaggcacgaaccaccattgaactcggctctaagtgggaagcattgaatggtagtttctccaaagtgctcttaggcatcacgtttaaactggaaccattat

SEQ ID NO: 288864 - DNA, 384 bp, Glycine max
ttatcttttatccaaatggacttaccttgaattaattcctttgatagcccctttgagcctatgttcccctttctttgttttgaagctcattataagccttaagtgaaaaaccatgatatcaccttacccttaagtaattttggagctttggaattgttttaagctgggaataagtgtggggggtatgtttcattgcaagatatgattcttggccatgcttgatgtatctgtatattgcctatttcttgctttaatcttcaaattcgatcttcaaaaaaaaaattaattgctgcaaattcgtactattcataaaaaaaaagaaagaaaagaagtgaagttgaataaatgtggtcttgttatgaagacttgatttgggagccttga

SEQ ID NO: 288865 - DNA, 439 bp, Glycine max
tgcttgtggagcttctatggaggctggatcttttagcttcaatgaggtccttcaatggtgatttttcaccatggagatgcagcgaaaggcaaaggagaagaggataggggaggcaccatccactagggaataagccaaggaagaaggagcttcaccaccaagaattgccttggataagaagcttgaagaggatgctttaatgaaggaaaagaaagagagaaggggggagcacgaaattgaaggaataaaagaaggaaagaagtggaactttgaagtgtatctcataagactttcattcatcaaagttacaacaagtgttacacatgcttctatttatagactaggtagcttccatgagaagctctcttaagaaaacttccttgagaagtttctttgagaaaacttccttgagaagctagagtttagctacacacaccca

SEQ ID NO: 288866 - DNA, 365 bp, Glycine max
tttgcttttatcttggcacaacaccatgttgaacaaatgatcattcatcactaatacaaaataaaaagaaaaaaataatctaacggcatgcttagagttagaagtacgaattttacccaattgtttttttcacacaagttgatgatttcaccaaagcaacggaaaataaccaaaaacataaatggatttgtttcgaatgcacatataatttacactagcattcaaaacaactagttcaaaagtcattttgacagagaaaagaaaataaaattacactaacactgcatcaaaattaaaccataaataaaggcttaactactgtgtagtccctggatctagggaccctattttttttaatccctaaa

SEQ ID NO: 288867 - DNA, 437 bp, Glycine max
  unsure (1)..(437): unsure at all n locations
tcacaaaagtttatatggcttgaaacaagcaccgttgctgtgatacaaaatgtncaatgagtttatgagcaactcaggattcaaaagatgtgacatggaccattgctgctatgttaagaaatatactaatagttatgttatcattgtcgtgtatgttgatgacatgttgattgcaggatctagtatgacagatattaacaagttgaagtagcagtgggcagaaaactttgaaatgaaggatcttggtccagctaaacaaatccttggtatgagaattcttagaaacagatcagaatgaatcttaaagctatctcaagagaaatatatacacanattgcttgacaggttctaccttggagattctaagaccaggaatacccctttgggatctcatttgaagttttcaaagaagcaatctttgcagacagatgaagaaa

SEQ ID NO: 288868 - DNA, 389 bp, Glycine max
ttagcttttttattagacctcgatcggtcgtccttactggccgacgccgactgtcatttttttcgatcaatatcggtgaataatattttttttgccgaagtgggctaatgttttcctggccgaataaatcggaacatgccagtttcgggcaaaacgaaacatcggttgagctcacacgaaaaaacctagccgacctacattgtaagttttttatgcaacaccgaaacaagaaaacttcccctgccgtaagaaaaaacattatcggccagcgagcgttttttttttaaaaaaaaattgcgcaatgtcggctgaaaaatatcagtcggggccatttcacgaccgatgtcggctattgagttttctattcaatccctgaatgaaatttgaat

SEQ ID NO: 288869 - DNA, 436 bp, Glycine max
ttcactcggatgtccgatgcacgcgcatcatatatcgagttgtctcgaaattgaacaacggaagctctcgagaaattgaaatgatcataacttttcactcagatgtccgattcagacgcataatatatcgagacgctcgaaattgaactacggaagctctcgagaaatttaaatgattatgaattctcactcggatgtccaattgaggaacatcagatatcgagacgctcgaaattgaacaacggaacctctcatgaaattcagatggtcataacttttcacacggagatccgattcaagcacatcacatatggagacgttcgatattgaaccacggaagatctcgagaaattcaaatggtcataacttttcactcggatgtccgattcacgcgcatgatatatcgagacgctcaaaattgtacaacggaagctct

SEQ ID NO: 288870 - DNA, 370 bp, Glycine max
tcacctatgtacaatgtagacactgataatatggttaaataaatgattacgttttttaatttattatttttgatcgatttaatcttttattattttcaatctaattcgatcctctaattaaaaaaaaaagatattctcatcctccatgttgataatttgtccataaagaataattagaagacttcgaactaaaataataaatgtgagggggaaaaataatgtaacctttgatttcgtgtgactggggtaaaaaataaagactatataaactacccgctgcatcaattccctccgctctgataataaagccactcgccgctctctgtaccctcctctctctatcttagcgtatgtcttattacaacttatc

SEQ ID NO: 288871 - DNA, 438 bp, Glycine max
ttaatgttgtgactaacaaggtgcataacagagaatgggatttggtaaagtttacacacaacatatatgtatcttctattttaatttcagaaataacctttgattgtggagcagttatacttggctaatcaagagaaattccacaaagtggctgacaaaaattactggaaagctattggggagatcattcctcgagaggttcccaacattgagaagaaaagaagcaaagtggatcacgagaataagccatcaatcacagtcgtccaaggcccatagcctggctaacccacagatctttctaggatgaggcagatattgttgaagctgaaacatacaccaccagctcacatgattccccctcctactgcacctgctaaagacgccatagatgggaacgatggaaaagacggaatagaaacagcatctaaagccaatgga

SEQ ID NO: 288872 - DNA, 328 bp, Glycine max
tagcttgcagcaaattcaaacagcaataactattttctcggattttggattgagtctcgtcatatatcgagacgctcgaaattaaaaatggtagacccgatcaaattcaaacgacaatgactatttacactgatgtctgattgagtcctatcatatattgagatgcgcaaaattaaaaatggaagctccctgcatattcatacgacaataactttttatacttggatctgcgattgagtaccttaatatatcgagaggctcgaaatttgtaatcgaaagctccgatcaaattcaaacaacgataagtattgactcggatgtgcgattg

SEQ ID NO: 288873 - DNA, 431 bp, Glycine max
tatgaagaagtggtgttgatacattgtgtgatcaaacggatatggatttgactttcacaagcaccactactagaaaatgtagatttaacattgtcaagttaacattggtttttgataaaaccgatgttaacataaacactatgacataattgtaaataatgtgtatactttaacatcgtttttgttttggaaaaccaatgttaacgtatgataagttaacatcagtttcttccagaaaaccaatgttaacgttaacatcatctggttaacatcacttttctttttattggaaaccaatgttgaacctacatttagaaatattagaacgcaagccttattttccttgttttctcttcttctccgtctaagctttgtctttgtgagtctatccctctctacaaccttatcgccattgtgacacctcgccacta

SEQ ID NO: 288874 - DNA, 376 bp, Glycine max
  unsure (1)..(376): unsure at all n locations
agcttttagttgcttggacaacaacttattttgggccaacaaggcatcttgagatgaaagctctaataaactctttttggtaggaatatgaactctatcatgcaaaattgcatggtcactggcaaccatattttcaattaagtccatggcttcttcaagtgtcttcacggccataacccattaatgaagatgttcaactatataggctctgaaaaagctacagtgggagttttctgtagcaagctatagaatctttcttatgcctcactcaaagattcatcgagaaactgatggaatgaagaaactacaacttttccctctacaattttagactctgggagatatttntctagacacttctcaacaacttcatact

SEQ ID NO: 288875 - DNA, 424 bp, Glycine max
  unsure (1)..(424): unsure at all n locations
taagggaagaagatgaaccaattcaaaatcagttctgcatatttctagttgggtacaacttttggctcgttgaggtagtattcaatttcataaaatgttgtatctagagcattttgggtgggtcacacgtttgttgactcgctgggctaaatgttctgtctgggatgtgattttggctggctaggctttaatctagttgtttatatgatgattatttaaattttccttaaactcttcctttctttttttttatgattcaaatgactttaaaatatttttgcaaatatattatacttatttgtatgatgattatgtcattcttgacctgtttatattatgttaatgtgattgcattgttgaagtgatgatataggtatatgttntacttattgtagtgagaaatacccttaacgttctattgatg

SEQ ID NO: 288876 - DNA, 391 bp, Glycine max
agcttgcaaattcgtgttccagccagacttatttcatgttccatatcaacaaggcaggatgactcttaaaagttaaaacagaactatacacacgcattggcctagtttcaaatcaaacttctctggcacaatagaaaaaagttaagatgcataaattaattttaatttacaagtttgatttattttaacttctaattttctttttttttttctggtaagtgtttattgagaactttatagtaacttgactgcagtcatagatatacaaagagaccctatccatataatactcatttcaatagcattcaaattttgacataaggaaattcaaaagggaatgaaaactcactaagtgttaaagaagaaaatgcttcctccatccttagtagca

SEQ ID NO: 288877 - DNA, 275 bp, Glycine max
  unsure (1)..(275): unsure at all n locations
ctgtaactcagtgttaagtattgtttctttcaatgtatgatttgtcacacacatggttggcanacgccacaaccancatctaaactacaataggttgattcaacattgttaacttaacattgcattctgataaccacccagtaaacattaacactatgacgtaaatggtacaaatgtgcatactttaacatcttctttgttttggacaaccaatgctaacgcatgataagttaacatcagtttttacagaaacccaatgttagcgccaacatcat

SEQ ID NO: 288878 - DNA, 389 bp, Glycine max
agcttatgcttttctttatattgtcacacagatttcatattcttaatggctgctgttttttcagacacttcctatttttcttgatggccttgttactgcatggggcgctatcctaatttctgtgacattaattcttttgtttggtgaggtgagaaagttctgtccttatatgattttaagtataatacattcatgtcacagattaagtgcttgtgttgattgtttagaggttggaacctggaacaaaaatctggtggcacagcacccgttttgtttggttcacgttttttccatttgtgaaagacattttttgttaattagaatcaattccagttgaagtgggaaccactagcttctcattcctctaatgttatgtttggcaataaaaa

SEQ ID NO: 288879 - DNA, 444 bp, Glycine max
tccccatcttcccagcaccaaccaccaacactccagaatctgcaaatgaggaatccggtagcttcatcagtgcaagctccacagcagccgagcttacagaaactgatccagatgaaatgttagtctcggttctaacccgcttcccaaccgatatcgcctgcttgaacaaaccactgattttcttatcaaaaccaggcactccctgtccagctttcacaacctgcttcacctgagcaagaatttgaccttccccaagaacaagtgagtcaagccctgacgccacttcaaatagatgctgcgcggcgtacgcgttatacagcaaaacttggtgctcccgaagctcaggtattgaaatccactcacctaaacaaaaaacacaaccatgagttttcctttccaaacaaaaacaagaacttagcatgggtaaatcacctatttcgtcca

SEQ ID NO: 288880 - DNA, 389 bp, Glycine max
agctttatagcctttgccttttctatttgagatgcgaggtggaataccatcaacgagcttccaatatatgacttaatgtggttggattctatacataacagaagatctcattcgagttgaccctgctcatagctgagatccatgtctcatcaagattgagctttctgcgatagatgattccactctttactgcatattaagaaccttcatctctttgagacacacttcaaaacagaatgatattctctaggaactcttgctaggcacattagataaagatcatctggaaggccacagataactagggaattagtggcttctatctcattgacactatctgatgatacttttgcatgatctaaatgctccattgtataattcagatgacc

SEQ ID NO: 288881 - DNA, 416 bp, Glycine max
tgtcaaatggaaggataggataccctatgctttctggaatttcaacccaacagtgtctattattaggagagaactctgcaagtgcaacaccacagaaaaacatgattggaatgcaagaatatatgacatagtaaatatataatctaaaaatttacttttgttataggttaatgcattaattatctcaagattaaattaacacattttttctctctctcttttcaacaatggttgcgagagagagcaagtaattttgagaactcaaaacttgaaaatgaatgtacctttaggtaaagttttgaagcatattatatgattgtgatttttttaaataattattatagaaggggttagtttacttttttgaatctgtcacatataaacttttttagattgtacttactaaattttgaaac

SEQ ID NO: 288882 - DNA, 392 bp, Glycine max
agcttgacaggttcatgtgcaggtgcaggtgctgctgctagtggaggcacttcaatttgcttgccagacctcatggtgatggcactcacatttttcgaatttttcacagtctgtgaaggcaatttgtcagaattttaggactgagcttggttcaactgagtagccatctgccccatttgatttatcagactctgaatggaggctcttgtctcttgctaaaattgcatattctggatggttatttgcctcactagctcttctaaggaaggttgcgaaggggccttagttgcttgttgtctttgttgttgttgttgttgttgctgcattggaggaggaacatatggcttgcttggaccaacaccattctggaaagcatggcatgctgttgttgt

SEQ ID NO: 288883 - DNA, 434 bp, Glycine max
  unsure (1)..(434): unsure at all n locations
tctnccccaattntctataaatagggggagaagtgaagtgaaaaatgattcagccccttaggcacttctctctctttcgaatttgcttggaaaaattgtttccgtgaagaaaatccaagccgaggtgcttccgaaacgtttccgtaacgtttccgtgaggaatttcgtgaaggtttcgaccgttcttcgacgttcttcattcgttcttcatcgttcttcgatcttcaacgggtaagtacctcgaaccaagcttttcgattcattctatgtacctgtggtggtctacattgtgtttcgtgtatttttattctcgtttcatttactttctatacccccttttgacgtgcttaagccattttatttaagtcatttctcgcttaaactaaaaataaaataaatttccaccgatcgtttgaattgtattatccgttaac

SEQ ID NO: 288884 - DNA, 394 bp, Glycine max
agcttcttcttatttagcttcaaccatgtattttggacatagtcaacaaatattttataacatgtccaccaatttgtaaatcttttcaataattcattatacgattccttatccagagattgcaacaacagttcccaagcatccatgacatcttgccactcttcaaccttattcatatggattttgcattttgtgttgacattctttgtaatatggaatagacataacaagttggttgaagaagtaaaaatagtctccaatgcattcatgaaagtaagatccctaacattgacaataacctgagacaacacatcatctttcacagacaatcctttcaccttacttaaagcccattaaaaaattatccgttgtctcataacttaaataagcaaag

SEQ ID NO: 288885 - DNA, 443 bp, Glycine max
tgcttgtggagcttctatggaggctggatctttgagcttcaatggggtcctttaatggtgattctccaccatggagatgcagcggaagacaaaggaaaagaggtgagaggaggcgccatccattaaggaataagccatggaagaaggagcttcaccaccaagatgagccttggataagaagcttggaaggatgcttcaatggaggaaaataaagagggagagaaagagagaggggggagcacgaaattgaaggaataaaagagggagagaagtggaactttgaattatgtctcacaagactctcattcatcaaagttacaacaagtgttacacatgcttctatttatagactaggtagcttccttgagaagctttcttgagaaaacttccttgagaagcttctttgagaaaacttccttgagaagctagagcttagctacaca

SEQ ID NO: 288886 - DNA, 385 bp, Glycine max
ttgcttttataggtgaaatcaggtgcagccatttcccttatagtcctctcacgaggtggaggttgtgccatgttctcagaatgcgcaaaatcagaatgctcagaattataatgctcaagatcaggatgttcaaaatcaccaataacagaatgcacagattcaccagttatggaatgctcagaatgatcaaaaaggtataaaatgatgcctaaataatctatgtaatgtcctatctatctcaggatcaaagggttgtaagtcagatggattgcctctagtcatacactacattcagcatgcacacaactagttgccttgtcatgtaaataaaggtgtaggtttgaactacagctaccctcaaatgatatctaaatgacttgaaatt

SEQ ID NO: 288887 - DNA, 432 bp, Glycine max
  unsure (1)..(432): unsure at all n locations
ngaaggacatgcacaaagtgtgactatatgatgtggtaatatggtgtagcaagcaaatgctcacctccccctctaaaatttaattggattgagcttctcccaattcaattaaatttattttccaacacacacatcaaatattaacttaatgcatatgaaattacaaaactacccctaatctaaaaactagtctaggtgccccaaaatacaagggctgaaaaatcatacatttgtagggtaccctacctacgttatggagccctaaataaaaggcccaaaaataatgaaaccttaatctaatatgtactaaaataagtgggctcacacttagcccatgggcctaaaatctatcctaaggttcatgagaaccctanggtcttctcttgcatctctagcccaatctacttggagtcttctatccaatgcccttgc

SEQ ID NO: 288888 - DNA, 381 bp, Glycine max
agctttttgtacaagcaatcaactcaaagtactgaaatttaaataattgaaatttaaagaactgaaacataaaaactaaaatttaaatgactgaacataaatcataaaataacttaaataaactaaaatgttcaaaatgcacaaatttaaatgtcctgctcctgtgattgctcttgtgcatgctcattgagatccaacaattgagcagctggtgaattctgagggatatgttgctctagctcagatgctggtgaagatggcatggattcatcaggtatgggtactggggatggctttcgaatttggtctgtggaagtctcatccttctgagccatctgtacacctgaatcaaaataaaagggctcaagaggagtgagctca

SEQ ID NO: 288889 - DNA, 438 bp, Glycine max
  unsure (1)..(438): unsure at all n locations
ntgagggaacccgccattnttcataatagaacactggtaatgtgtctactatcattgttatcatttctttctccgtctttgagggaaccacttgggctgccagatctctccacctttgggtgtattctttgaaagattcatgccccctttttgcacatgttctatagttgcatcctatccggagccatatcagaattgtactaatactgcctaacgaaggcaaccattaggtcctttcaagaatggactcgggaaggttccaagttagtgtaccaggtaacaactacgctagtaagacttttttggaagaaatgtatcagtagttcctcatcttttgcgtatgcccccatcttctgacaatacatctttagatggttcttgcggcaagtagtccccttttactctctggtaatcgattaccatattgttgtcatcgat

SEQ ID NO: 288890 - DNA, 386 bp, Glycine max
agcttcttgcgtagccgctcttggcgctcagaaaatcccaaaaacaaatccctcttattactagctattttgaattctttagttcctgaatgtacaaccttcaaattgttgcgcgttcccctctatgagaatgaggaggatcttcataggacttcatccagctgatgtttgtcgtcagtttcatcatccaccacccttttcttccgtgccttctcacgttcattgttgataaacccatatttatgccttcttcccttcatgtcttgttatatcacaactttagctgaatctcccatcttcaacatagttgaatctcctgtcttattctccaatgacacactttgatggcctgtatctcttttcttcgtatgttctactgcttcagc

SEQ ID NO: 288891 - DNA, 438 bp, Glycine max
tcggaagatagtgatgaggtacaagccctaaatgcagagcttgaaagagcccgagtagtcgaagagaagttcaagtccatagccatcaaagtctgaaaagagtatgatgaactaagggacgtcaatatggccaccgctgatgccttggaacgagaaaccaagaaggcccaaaaggaagaacacgaccaaagcaaagttttgaggggctttatagggcagcaatagtgagctcaagctccgaagaggtgaaaggaatcatcacgggtcaaaggcatgatcttgaaggacgagctaaaggtttgccttaagtcgaaaagaaatttgtcccaacagttaagcgagactgaagggaatatgtgggccatcatcgataagtgcaaagagaagctaaatctagcggcgactcacgagcataggctagaggatgagtacgccaag

SEQ ID NO: 288892 - DNA, 364 bp, Glycine max
cgctttcaaaacatacatctggttcagctactgttgcaattgcttgtatatttgtcatactacgtaaccatatggatgcacggacatttggagcggttgaacccaatagaggcactgcagcactgcttgaggacacaatggatttgattgtacgcattgatttgcttatttatatcaaaccaacggcacatgggacatgtctcatgaaattaagtggctcaaaggctaaggaagcttcacaaaaaagggtggagacctagaagatcaatatgattatgtaatggggatgctgaagaatatggccttgtaagatgctctacttcattcgtatcttcttgttactcacaaacgtgtgtgctacatg

SEQ ID NO: 288893 - DNA, 318 bp, Glycine max
  unsure (1)..(318): unsure at all n locations
catcaatggtgtggaactcacctacgcccatggtgccgacaccagtaggactggaagccgggacggagaaacatctcaaacttacacctgtgatgactcagcactcttgggcaggtgaacgatagtcctgtcatgcacgcagaaaatgagaagttangcccatcattactatgcaaaagcgtggatcgttggtggttgaactctaacttgagcaagtcatcagcagggagatccgctttgctattcaatgccacactacatgtgagagtatcatcatagagctagttatgagccgctgcgacaccctctatatcttgc

SEQ ID NO: 288894 - DNA, 470 bp, Glycine max
  unsure (1)..(470): unsure at all n locations
tggagccnctgannctgagcttgatgcatcgatatctgggcgaatcagctcggacccgggatcctctaagtcgacctgctgcatgttgctttttaaaagaacgcaaagcaaaaactgaatcaacacgcacaggaagttcagaatcctgcattctggatacaacacactgcaaagccctccggaagttgttctggtctgagaagttaatatgggcatattgtcctgcaacccatgctgcctgnttttcacaggaaaattaaagtgtagtctaaataataattccatcgcatggttatattgtattttagaaggagactggaataataataaaaaaattgcagcatgcagttctttgatctctctgtttttctccctctctatcctccctgttatgctcttccctctttatctttctgtctttcagtatctctctcttccccacctaaatcctatatcacatggggattaat

SEQ ID NO: 288895 - DNA, 433 bp, Glycine max
  unsure (1)..(433): unsure at all n locations
tagcaaagaaaaagcaattganaaagtgaaactctgtcttgtttatcgcttggaagtttatttttcaaataattgatataaaagtcaatgatagtatcattaaggcatttctcacgctgtaaaagctcaatatcgctctttttgatacaaacagcatcagggtccccctttggatacgcctttttaaatgcagcagaatcatgctccactatctggtctcccaagttaatttcatcttctgagggattgaagttgaagtagaaatcaaagaaaatgttagacttgatttttttttttttttatgagggaagaaagaaataaaatataagtaactactgtctaacataagtaacactgcacctaaagaatcttgaatctagacatcttgttataaaattacttttaaataagataatatgaatgctattttttt

SEQ ID NO: 288896 - DNA, 369 bp, Glycine max
tatgcttgtacgaatgttaaaaacatcttcttcaaccatgatgatcctcgactacatctcattgaatcacatgtacacttgtagctacaacgtatcaaacctttcaccaacaaaggtctgaagaccatagaacatgtccaaaatcttttgaagaagagaggaatcttctccaccatgtagatgctcatcttcatcaatgggttgagcaccctatttgatggaagcttgcttgtggagcttctatggaggctggatctttgagctacaatgagatcctttaatggcgattttccaccatggagatgcagcggaagacaaatgacaagaggtaaaaggcggtgccatccactaaggaatataccatggaag

SEQ ID NO: 288897 - DNA, 432 bp, Glycine max
  unsure (1)..(432): unsure at all n locations
tatgctgcanatatttacaatagacctcctcaacctcagctgcaaaatcaaccacagtagaacaattatgacctctccagcaacagatacaaccctggatggaggaatcaccctatcctcagatggtccagcccttagcaacaacaacagcagcctgctccttccttccaaaatgctgctggcccaagcagaccatacattcctccactaatccaacaacagcaacaaccccagaaacagccaacagttgaggcccctccacaaccttcccttgaagaacttgtgaggcaaatgactatgcagaacatgcagtttcagcaagagaccagagcctccattcagagcttaaccaatcagataggaccattggctacccaattgaatcaacaacaatacctgaattctgacaagctgccttctcaagctgtccaa

SEQ ID NO: 288898 - DNA, 380 bp, Glycine max
agcttatgttcttggagagcattcatccatagaataaccttcatttgttttactcattcattccttccccatacttgccctttttcttaggcacttagctttcatacttgaaattatagcatacacacttattaactgtatttatacttacaacttttttttttaacacagagaaccgaaacagtgtgtatatactattttctttgaccatttcaatccttacccagtgcctcccccaaatgtggaacaaatttaccttgataataactcctccaaatttgccttgaaccatcttctgtggatgatgctctcctacaacctataataaggtagcagaagatgcaattgaatacgctcgaggttcaatcaatcaatcagtt

SEQ ID NO: 288899 - DNA, 431 bp, Glycine max
  unsure (1)..(431): unsure at all n locations
taaagtatgcccgagtcattcatccctatgatatgttgttgaagtattggcgatcggaattgccattccttggattatagggttgaaccaagctcatgcttttacaaaaaggttcatcaagtcaagttgaaatatggaagtaaccgtcttgcaaaattggggcaaaagatgaatcgagtcacatcaatgcttcgtctacttccaaacatatttaggattattgatgtccttgttacttccagtttcaccttgacaaagatgtcatggaccatgttgaaaatctaaattgattcaaccccatatcctgcgtaaatattcgcaatacttcgactgtacatcattcgcatgcatccatgcttttcattggttgcattgctcattgcattctttccttgaaaaataaaatanaataaaatacaatgaacttatca

SEQ ID NO: 288900 - DNA, 391 bp, Glycine max
agcttgccacccagctcgcccaggcgagctcagctcgcccaggcgagcagggttgcttcctccagaagcaacagccttctggaggaatcttctggagggcccaagtgggcttggttgctatttgcatccccatttttactaagtacacccccctgccttttttggtgattcttttttcgtaaagttacggaaacttacgaatttcgtaatgatacttgttttctttccgtaatgttacggaaccttgcggattacataatcatccccttttttgacttacggaatgttacgggacctcactaattgtgcaacgatgcttccatttgatttccggtgtgtcacggaaccttacggattgtgcatcaatattttcttttgttttccggcatgt

SEQ ID NO: 288901 - DNA, 440 bp, Glycine max
  unsure (1)..(440): unsure at all n locations
tctcanaatatttatttattatctttgcgaattcttgttgcttagttatcagcaacaataaattttaaaaaaaaaaactctagattctcaagtcataggcatttacaacaacgatcacattagagaggttgaataatatattaataaaaaataataactttttgcaaataaaagttttatcacaggtttagaaatatatatgttttggagtcatctactcatcagtaaaataagtttaataaaacatagtttgatcatccaatatatctatgaagtaatatttccaaaaaaggtttttaagaaaacacttggtcagaaaaaaaggtaacaaagaaaactaagataatacttaataaaatggtttaatagagatatattagcatttgatttgtactagttcacttaaataaaactaccttcaattcttctttacacaacta

SEQ ID NO: 288902 - DNA, 390 bp, Glycine max
agcttctagattagtgtactaaacaaccgcggctccggccaagctatcttggaaaaagtgtattaatagtttctcatccctagagtgcgcgcccatcttgcgacaatacatcttgagatggttcttgggacaagtcgtccctttatacttgtcgaagtccggcaccttgaattttggggggataacaacatctgataccaagcaaagatccgcgaatggatattcaccaaagccttcaacagccctcaatctctcctcgaggagatcgagtttccatctttcttcgatcgtcgggggtggtccttctgtggacaagattattggttgtgctgtgaagttgggatgatgcaaagtgttgcgtgccggcccctcgacgaggatcggtgggta

SEQ ID NO: 288903 - DNA, 444 bp, Glycine max
tgtgatggttatgttctttggccatgtgattgtgatacatataacatttcaaaggctttttcattttttgggtcgttttatctcatcagtgccctttctaggaaaaggaaaaatcgtcaaaatgaaaatgagttggtgaaggagatcaataccatcacaattacacaatacctaacatgacccaacaagtatttctaaaatctaagtgatacactgatacttcttgttagcgtgtaagtgtgtaactacgaagacatttagaaaacgtgtcatcaagctgtgaaaatatgaggtgcgacccagtactggctagcagcaaaagacgtttcattatccctgcgagcaaagagaggctcttggcagctttttccagcgcaattgatgcttaataaaatctgttttatcttttttttttcttctagaatatagataattatgtttaaa

SEQ ID NO: 288904 - DNA, 396 bp, Glycine max
  unsure (1)..(396): unsure at all n locations
agcttgcatgatttacatctccccctttctcaagcaaattcttcttgatatcatcaaaatcttcatgatttacaggtgtcttgcgggcacgatccttgcaaacaataaatgacatcaaaaatcagttgagagaagggcatacttacctatgtcataatggcgtgaccttgctggggggaacgggcaccatgtaggactaacagaggcccgtaaccagagctgggaaccctagggccctgttggacttctctgggtccactaggtgtcttgtgggcgtgatccctacaaatagtggatggcatcagaaatcagttaagccacgtgcatacttacctatgtcacgatgacatgaccttgctggggggacgggcatcctgtangactgacagaggcccg

SEQ ID NO: 288905 - DNA, 446 bp, Glycine max
  unsure (1)..(446): unsure at all n locations
tgaagganaactggatgcgttggtcaacttggtaacctagctggccttgaatcagaaatctgtacctgtcgcaagggtttgtggtctgtgctcctctgctgaccaccatatagacctttgcccttccatgcagcaacctggagcaattgagcagcctgaagcttatgctgcaaatatttacaatagacctcctcaacctcagcagcaaaatcaaccacagcagagcaattatgacctttccagcaacagatacaaccctggatggaggaatcaccctaacctcagatggtccagccctcagcaacaacaacagcagcctgctccttccttccaaaatgctgctggcccaagcagaccatacattcctccaccaatccaacaacaacaacaaccccagaaacaaccaacagttgaggcccctccacaaccttccctcgaagaacttg

SEQ ID NO: 288906 - DNA, 377 bp, Glycine max
agcttattccacttttgtaccaagactgcagggagctgacaccgtcgcaatgcatgataagaaggaactttgactaaggttaacacgctaaaacttaaaaaactaaaaaatgaaagacaaaatgataaatttactcttccattttatctccaatatctaattaggtcatcattaatataattcacaaaattggtctttcaataatttaattcacaaatttgatcccttatcttataaaatcgagcaatgatggtctttcacatcacaacgatgactcggaacatgtgaccgttgacatcacctgttaacggtcaacgtgtaattgtgatctataaaatatctaatagcgtacgattgtatagaataaggggaccaaa

SEQ ID NO: 288907 - DNA, 382 bp, Glycine max
  unsure (1)..(382): unsure at all n locations
tgtcggcangnactgtgatgacgaaggacangatattgtaaccattatgctcgaagaagtaccacaatgcggtggcataaacgagcaccgggaccgctccacgccaattcattcacaacaccacatcaacaactaagcctttgccgagaacacgatgaaaggatgagaaactaaggcgatgccaagattgtcagaagaatgaagaatgaaggggtgataatgatcaatgacagccatgtgcatgagagaaaaaaaaagagagccaaccagacatccgaaaagtccccatataaaacgatgcataaggggatgacttatccagttatataagaacttaatcatcgatgatatccatggccgtgagagacaaaaaagaatcaac

SEQ ID NO: 288908 - DNA, 384 bp, Glycine max
ttagcttgagtttaatgcatatttatataaagatataattaaagtttattagatttaaagacttgtttgaaaaaaaataacttcgataattttttgaataagttcttattatataaaagctcattataaaagtaattaaaattcaactagtaacctatttgtgtttggatatacatatatgttgataagaattggatatatacgtgttgataagagcttacataattttgaagtgtttgcatgcaatgtcaagtgaacttataaaaggttatctcattttaaaaattaaaaaaaaagtgaaccatgcataaaagtaaataagaaattaaaaactaactaaacatttaatatactaacatcatatgtattacaaaaaatattcag

SEQ ID NO: 288909 - DNA, 429 bp, Glycine max
tataagaacaaaattgcctcaatcatttccaaatatacatgtgaattaggaagcatcgacaagaatcaagccaagactattgtgcaagcaatcaatggggcaaaacacaccaaatgattatgatgatggatggctcaaattctcacaaaggtaaactcatcactttcaaattgagctttcaaaactatcatgacatgtagaggagaatcaaggatttcaagtcacaagatatcaagaaattttattttcaaaacaattacccatttcttgaacatatcctataattcaaagaaaaacatgcaaagtcgtacatgcacacaaaattgacccaaaatattaaactaaaaatccgacgaaactaacaaattaacaaattaacacaactaacaaattaacaaaaccaacaaaactagcaaaaccaaagaacac

SEQ ID NO: 288910 - DNA, 382 bp, Glycine max
tagcttcttccccagttttctataaatagggggagaagtgaagtagaaaaggggttcagccccttacgcacttctctctctttcgaatttgcttacaaaaattgtttccatgaagaaaatccaagccgaggcgcttccataacgtttccgtatgtgatttcgcgaatgttttcgaccgttcttcgacgttcttcattcgttcttcatcgttcttcagtcttcaacgggtaagtacctcacaccaagctttttaattcattctatgtacccgtggttgtccacatttgggttcatgtatttttattctcgatttcatttactttttatacccccttttgacgtgcttaagccatttatttaagtcatttctcgcttaatctaa

SEQ ID NO: 288911 - DNA, 435 bp, Glycine max
  unsure (1)..(435): unsure at all n locations
tcagcccaagcctcttgaaatgcctgcattgcatttcaatgtatatacagatgcttctattacagtaccaacttggcaacttccacaaaaaataataagtataataaaaaaatacaataccaagtaccaacttaagataacaatttaattagaattatttactgtcattcaattacaagttgctatgtgtagtaaatttatcatttttttattcaaatttatcaatttttatcataattactataaaagttatatttatgatgatttctaattgattgatattataaattttttaacacttaaatgtgtgtgcatataatgtattgaatttaaaaacataatttatttgcatatttaatagcttcacaattaaaatacgttntctatacgttaaaaagatactatattaaatactaggtggtgctgagatcactg

SEQ ID NO: 288912 - DNA, 385 bp, Glycine max
agcttgtggaaatacttacacgactgagaaaaagtgtttctatgacggttattttaagcattctacgacgatttttgaccgtcatcgtatcgaacgttgtgaattgtcccttcatttttaagacggttccaaaaagaatcatcttagaaaagctatcattctatgacgatttttaggctaattatcatcttacaatggtatctttctaagatggttttcaacaatgtgtttaaaaaaaaacaaataaaaagatgagaattctaagacggtttttccacaatcgtcttaaaaaatagactttctaagacaattttctaaaaaatcatcttagaatgtacactttttaatatgatttttcaaataaccatcttagaatattttttaa

SEQ ID NO: 288913 - DNA, 430 bp, Glycine max
tgtaacgtggtcaggttaacaagaaaatcatggtttttcatagattcaaacacttaggttctaggagagcattcacccattccatgtctacttaaagaaccactttttctttgacctcccaacctttattgacatgccacaaataacagaacatagaggttttttttttttggtatgcatttgctttcagctcatatttccttttttttttacgatgataggtattacaaaagaatgtagttctgattctctatgtatctgttactcatattcctggacataatttaaccaaaacactcccccaaatttggaacaaatttgtcttgatccataataatgctctcctatagcctaagatagggtgcacaaagatagcatttacatttagcttagggttcaatgacacattcgttcacgtttaggctcaaaa

SEQ ID NO: 288914 - DNA, 389 bp, Glycine max
tagcttgtcacccagctcgcccaggcgagcaaggttgcttcctccagaagcaacagccttctggaggaatcttctggagggcccaagtgggcctggttgctatttgcacccccatttttactaaatataccccctgcctttttttggtgattcttttttcataaagttacggaaacttacgaacttcgtaacgatacttgttttctttccgtaatgttacggaaccttgcggattacataatcatgccttttttgacttacggaatgttacggaacctcactaattgtgcaacgatgcttacttttgatttccggtgtgtcacggaaccttacgaattgtgcatcaatattttcttttgatttctggcacgtcacggaatatcacaaat

SEQ ID NO: 288915 - DNA, 436 bp, Glycine max
  unsure (1)..(436): unsure at all n locations
ntcanaatggaagggatccttgctctctatcatgggaatgttcaattagttaaatttgtaattcattgcattcttctctattcatttgatgtctattcttggtctgtgtcattgttgaagcaatttgatttatggataaaaactttatttaggctggggacattcatcaaagaaaattagccatggtggccaggcagagaagtatgttcacgtgtcatagcctgnggattgggcattagttctcttcaaagtattaataatgcagctacgttgaagctaagttgaaatttttttattctctaaggatcaattgttagaaattaggagaagataaactggtggattatgataaacatcaaacatgaacttttaggttaaattgtcaagaatataaaaaagtatgactgtagcataatcatatcggtatccatggatg

SEQ ID NO: 288916 - DNA, 388 bp, Glycine max
agcttattctccttcaactgcacaaggctcttaatatttgaagagtatccttgtggaaccttcacccgacgaagacactgacaaaaacttatcttctccttcttggacaaagtatggcaggctgggggcaagtaaattttcttcccatcagaccttggatgcaactgtgatcgtatacccatatcagctagatcttgacgagtattcaagccatccttcatcttgccttgaatgttaaggagcgtcccaatcacactgtcacaaacatttctccacatgcatgacatcaatacaatgtctaacgtcaagatcacaccagtacggaagatcaaagataattgacctcttcttccatatgcaactctgactattatccttcttttgggtc

SEQ ID NO: 288917 - DNA, 439 bp, Glycine max
  unsure (1)..(439): unsure at all n locations
nttgttgagaaacaaagtggcaaacttataaaagtcttgataagtgacaagggaaaagaagtgagttttgagaggcagttgactgttggctatacacctcaacaaaatggtgtatctgaaaggaacaatcaaaccgtgatggagaaaggaataccaaaagaattatggcctgaggctattaatacaaccgtgtacttgttgaataggtgcccaacaaaagcagtatgaaatatgacaccatttgaagcatgaaatggaagaaagcctttagtgaaccacataaaattttttggatgtgttttgctacgctcaagttcctaaagaaaagattacaaagcttgaagaagcaagtgagagatgcatctttattggctatagttccgtgtcaaagggctatagactctacaacttgaagaccaagaaagtgatcattagccga

SEQ ID NO: 288918 - DNA, 302 bp, Glycine max
agcttgttcttcatgatatggaatggtgctactcatatgctatcttcttccactactgtgattttgtttgactaacctctcagcgaccttgctatcttggagaagctcttgatgaacctctcttccgaccgagcttaccctatgactctactgaggcgatgcacattgcatggtggaggcgactttactatgatgctatctctgtctcgactatcttaatatcctgccgctaagagatatggcccgtgactatgccttattgttccatgtattgacactgctctcaatgctacaccttgatg

SEQ ID NO: 288919 - DNA, 363 bp, Glycine max
tgccgcactcgcatacaggacctggtgtgctattagaagggagatgggtgccggctcgtactagatgtcacatggactacggtcctactgccaccaccgaccttttcaagagatctctaattagacctcaggataaacgagcgggcgacatgtgctgcgatcgatcccactacactgccgtcagactatgcatgaatatcttccgatccatgttgtacttaactcccatgtgtcacgactaaccactatacacttgactatatgcattaaccaaagtagcctgactaacgaccctgatagacatgtgcggtatagtgtagcgccacaatggaacctcttatataatattgatataccactcag

SEQ ID NO: 288920 - DNA, 376 bp, Glycine max
  unsure (1)..(376): unsure at all n locations
tagctttacaactagtttctgtcttcactattttattcttgtctggttgctcaaattaaatgtattgttctaattttttaacattgctatttttctttgtatgggaaaacacacccaactcaattttttttgcttttgatgtccaccccaacccaattatgtgtgtttaagttgtattaacagtgtcatttgttatattttgtgataactgggaatttcattctgtgattgtctgtttgtgtactgggctggctntattgcagatgcaaaggagacactctcttgttttgtaatttccttctctctcactctggtgtcttaaagatgaacacgtatgtatctaccagttttgattgctttcaaaattaatacacta

SEQ ID NO: 288921 - DNA, 430 bp, Glycine max
  unsure (1)..(430): unsure at all n locations
tcaataactacattcacgactactctcaaaatangggagttaagtagtcatgcgtttacacatcaagaaagacacactcatccaagatatatatatggtccacaaggttcttgcaacactaatccacgcatcaaaggagaaatacgctaactaacaacatacacacaggatgatagaggttcgttagcacattatcaatcaatatcaagactacttgcatcacccaatggcttgccataatgtccaaccgcacttcgcaaattatagagatggccagtctcataactcatgactcaacaatgaatttatggtatagcaaacattaaggatgcgcggcacatacaagcattattattaagtcttatttaatcatgtaggagaaaatacgaataaaaattcaagcatgctcaacaaaagtactcataggtaa

SEQ ID NO: 288922 - DNA, 382 bp, Glycine max
agctttgatccctcttcaagagtcgaatttgcaatccaaagtgattgattttgttcttccttctagaggttggaattttcaaaatttttgcaaggcccttcgtttggatatttgtgatactgtccatgctttgttccctcccatcattactcatcctaaggatgtggtagcctgtaagcataaagttgatggatccttttcgttggcttctagctgtgatgctctttggaaacgttgttggtccaaatcctctttttgaagcaatctggaagtggaggggtcataaaagaaccaaagtccacctttggaaaatggctcatcaagccctgcttacgaatcagagtagacttagaagtcacatgactaacaatgctacttgtct

SEQ ID NO: 288923 - DNA, 427 bp, Glycine max
tatcagagcaatcagaggaaaatcttgaggaatgttagggaaccattagagatgtcgctatcgctgccggaacacacgtgagcccgcttagaggtaagggatgagttattcacaattgaggaatagtgagaacatgtgtagggatccttagaatatcaattggaatgggtttttgggggtgtttttgcaaattttgattctatttttacaattataactgtgaattatacatgtttgacaaatcaattgatatcccaatgagaaatttccgtgaaattgatgtatttttgtgttgagtatgaaccctaaaaattgagtttttttttaattaacataaattgtactctaactaatattctctttgattgtttattttatacaaattattgtaattttttctatatgattatgtgaaccatttgaggga

SEQ ID NO: 288924 - DNA, 384 bp, Glycine max
agcttattttctaagagatcattcatccatagatcagaccttacttgttattaattcccaacccaacacttgcctttttttaagcacttagctttcatttcattgatttgcagcacacacacttttatttatacttacagttttttttaacacacaaaactatgtgtgtatgctgctctgctttgaccatttcattcttttacccatgtctcctccaaatttgggacaaatttactttgacatataactccgcaaaatttgagacaaattttccttgaaccaaactgttctgtggatgatgctctcctacaacctaagacaaggtagcaggagataaaactgttaagctcaaagtccatcaatcaacattattcacttaaaagt

SEQ ID NO: 288925 - DNA, 443 bp, Glycine max
  unsure (1)..(443): unsure at all n locations
ntagaccaaagcaactcanaatctaggtatctaaaacctctcaatntagtggattttcaaggtttgagaagtgaaaatgagaatggggtaaatctggagcaaactctcacctcacacaagtctataaccttaatctaaacttggtcaaactggttttacgcctaaaattccaccaaatcaaaatttgactcctcaacacccaaattttaccctagaaatggctcttgccttcactttggtcttttgtttttctctcttgcacaacccaagctntctcataagtcctaaatgacatttcaaactangactaactcactntaacctccaatttctactgaatctagatttagcctttcaaaccctcaaagcatcacacttttccactcataacactacattctcactttctaaccctagattaactctacctttcatccctagca

SEQ ID NO: 288926 - DNA, 436 bp, Glycine max
tgtaatatttgagagaaaaagagaataccagtccatttcctgtgccaaatacaagtctcccaagcaccaatacaggaaaattaggagctaatgctgttacaagggctccaacaagatatactactgcagatccaatcaactcctttcttctacctaaaaaatcaaatttgtcacaccagtttcacccgggaaggaaatagcaaaaatgatagctgacaaaaggggaaattacctaagaagtcagcaacattgaaggccaacacagagccaattaaggcaccatacaatgatccactagtctgcaaaagacagtaaatgccataggcccaggttatattcaagatcaatatatatatggagtaatttcaattgtgaacaatgtgtctaatcataaaaatgacaataagacaatgtaccatgaccaaagaaaaacaac

SEQ ID NO: 288927 - DNA, 361 bp, Glycine max
  unsure (1)..(361): unsure at all n locations
agcttgttaaagaatggatgagtttgttagtnattcatgaaaggctaattttaaagattcaagttcattgagatccacctctttttttttattctgattcttcaaaatttgtattaaccatcagatatacgctggcttcctcttctccttcttcatcagaggggggtgtcgtcacatcctcccaagtgcttatgagacttatctcttccttggacttttaatgcttggtatagtcctttgatttctcaagttcttagcactttgacttgaagtgtccaagcttctttcattcattgcatataatgagactcttttatgtgtcctttttctccttgaacaccttcttggaggatttattcca

SEQ ID NO: 288928 - DNA, 433 bp, Glycine max
  unsure (1)..(433): unsure at all n locations
tgcacttcttcactctcttcaggaatttcaaccttnttcccactaagatctnttagctatgggagccaagttatcgcttgcgttctagacttcaaccatttgtaatagctgcctatgacaccattgctacttcccctaagctccttatttttcctttccactctattccatgctttacgaattctctgaagtatcttcgcattagcttcattgaaacctcacgcgatgaaaggctcaatgatttcctctgatggcgcacctctcatagggtagcctaactgtcttatggccaacacgagattataattaatacaacccctcgtccttatcaaagggacatttgggaatccttcacatgatcataacactcctgcccnccccccgccttcttttcatcgtgggaaccaactaatggatgctcccgtcatgccta

SEQ ID NO: 288929 - DNA, 370 bp, Glycine max
agcttgtatagttcccctatttatgggtatttcttattaaaatgtgtaaataaatcttggtatatgggtaacgtttgctctaaaacattttcattagaattaaagatgaaatctgtgcattttcacgtgaaaaccaatgctaagttttgaattgcaaaaagtagtagttgggctaagctcaatagtttggctaagcacataatcatcactaagcgcagcttcaacacacttagcgcaaaggagaatcttgcaaagcatcaacatccaagccgcgcgctaagcacagcatgtgccttcagccaggctaagctcgggacatgccttaagcccgaaatcacttactcgcgcttagcgcagcatcgcgatttca

SEQ ID NO: 288930 - DNA, 459 bp, Glycine max
  unsure (1)..(459): unsure at all n locations
tatccttatggctagcctccggacttcactccccgtgccacccataagatttaagccaagcccctactttcgaggggcagctcccaccttatgacgactatcccgggcaagacgatgaggaaggagatacccatctcggtcccctgctccacctcaaagatccgtccccccatgaactaccccaaccaaacatagtccgccatatcccggcttcacccacacccgtaaaagaatctgttcccttcgtggaagataagggaaagattgaggcgcttgaagagaggttgagagcagtcgagggcctcggcaattacccatcctcggatctagcagacttatgtctagtacccaatatcgtcattcctcccaaattcaaagtaccggacntttgatagtacaaagggacgacatgtncgaaagggcatcttcggatgtattgccgaaaaatgggggagtatt

SEQ ID NO: 288931 - DNA, 415 bp, Glycine max
  unsure (1)..(415): unsure at all n locations
agctattaattctagtctttaaactcctcaagcatattctaatactcatgcatcttttacattcaaaactggaaacttagattcctaggcatgagtcatccttttggcgctttagtctagcttctacaaactacccacacactcacaatgcgcantaattgattcgcaagctaagttccacaaaatcatgcgcaaatggcattgaggcatttcaccgaacacttggtgggctcatgtttaagcctgaaaatcaagggaatgggggacatgtggcatgcccctttatctcagaatgcaccctatgcctaatgccataccctacaaccccataattcaacanaaacaagacatatttcaaggataaaatcctcacattctgagcaaatacatgcaacttagaccaccaacatatatc

SEQ ID NO: 288932 - DNA, 415 bp, Glycine max
gatctggttgaaatatcttgctagaaggtgtttctattatgcttgtattccaagcattcctgacatacttcacttggcacttgaatgtgtggcaaccagtgcaccatattatccctatgtacgaagtgtggatcctgaaattgagatgcccaaacttataatgccaaagccacttacttttgctcactgttgtggctagacattcatgtcccataccattaattcctaccttaaaggatgtgttctttgacataagatcctttaaaactagtcttttcttgttgtcatacaccattagcacattatcctccattttcatcacaaatcctttctccaggaattgaccaaggcttaagagattattcttcatttcgggcacaaaaagcacaccagatatgaaagattgtttaccatc

SEQ ID NO: 288933 - DNA, 491 bp, Glycine max
agagatgtgatgctgatgacgtccgtataatacaaactctgcgtgggcgtgacaacatctgaggggtgctacatctttcgcttatagccgaagtcacacggtcatagcgaggcgattatgtcatgtgagattatatcggagcaatctctgaccttaacgaagctgtcaactttatgtatacttggggcacttgggaacacgcctaatgagactcgaatatttttcaataatatggaaacaatttgtgatacccgaacatcataaatagaggtttttggcttgtgaggtgaataatatttgaacaccacatttctatatacaccatagacaaaacggattataatgatctaataacagtagtgctgatttacaattattgcagtttcaatatgatattgattgccaggcgaccgatcgatcgaacactagccggatacgccacatttatccgaggatgtggcacttaatcaacgatgaaacttgcttaatcg

SEQ ID NO: 288934 - DNA, 385 bp, Glycine max
  unsure (1)..(385): unsure at all n locations
agcttgtttgcagaaacttaaccttagacagcataaacaacgtgaagctcctagtacaatattacatggaaacgcccagcaattcatgaaatcaaactgaattttgatgcatcggttaataaggagaaaggaattggcatggaaatggtagcccgaaatgactatggagaggtgcttggctcagctatttgtgtaatgaaaatgaatgtggaaccaaagattgcttaagccctatgttatagacgggctatcaaagtggcgggtgacttttgtttcacatgagtnggttttgaaacggactgcctcaactagtccaacgtaggaaacgcaacttgatcacatgcagagattatttctcgagcattcattgtgattgcatctcaac

SEQ ID NO: 288935 - DNA, 442 bp, Glycine max
  unsure (1)..(442): unsure at all n locations
tggagaggatgcttcaatggagganaagatagagggagatatagagagaggggggagcacgatattgaaggaataaaagaggtagagaagtggaactttgaagtatgtctcacaagaccctcattcatcaaagttacaacaagtgttacacatgcttctatttatagactaggtagcttccttgagaagctntcttgagaaaaattccttgagaagcttctttgagaaaacttccttgagaagctagagcttagctacacacacccctctcataactaagctcacctccttgagaagcttccttaagaagattcctaaaaaagctagagcttagctacacatacctctctaatagctaagctcacctccttgagatgagaagctagagcttagctacacacccnctataatagctaagctcacccccatgacanaaaacatg

SEQ ID NO: 288936 - DNA, 393 bp, Glycine max
tgtttgcaacttgtatgcatgtatcccaccatcgtctcatagtagaacacaggtaatgcgtctactattattgctatcattatcctttccatcattgtgggcactacttgagataccagatcccttcacctttgggcatatactttgaaagattcatgctctctcttacacatgttctataacttcattctattcaaaaccatatcagaatcgtactaatattgcctattgaacgcaaccataaagtccttccaagaatggacccgcgaagatttccgattagtataccatgtgatggctgcccaataagactttcctagatgaaatgcatcaccattttttcatcttttgtgtatgctcacattttctaccatacatcttaagtgattcttg

SEQ ID NO: 288937 - DNA, 427 bp, Glycine max
  unsure (1)..(427): unsure at all n locations
tcagtgtcacaagtttccgaccacgaccatggtgtatttttcacaattgtagtgtggtttctggctgatatctttaggaagctataaataggggttgttttctgtatctatgaaatcttttacctaattacgaatttaagagtnttgaagcgtggataccaccatgaggatgaattatggtcatcattcctaccttgccggtatgtctatgctaatttcatatatgtctttgagttgtgctttgatcatgagcgaccagtcaccatagtccaagggttatgatgtaactatccaatggtatccctttctctgatcttaatgaaattcctcactcttttatgttaactaatactcttcttattcttattgtcaattgggaattagtcaatctaagcttaatgaatgtattgtgggatgattttgttgt

SEQ ID NO: 288938 - DNA, 375 bp, Glycine max
tgttgcaagcttgttcaacctatcaagagtcacattctaacaacaattgttccagcttggagaattcatcaatggatggatacatggagctataagaacaattgataactgtttaatatgagttattttgataataagaatatattgaaaatatttttaaaaatatttatttaacagttattcttggcttaaatattaagatttgatatctttcttatttatgacgttgccatatgaaaaggagagattaaaagagataaagatcgaaaaaatatccaagatatcaggaaatcattactagctaaacaaatcctaaagatatcacaaatatcaataatgaagatttttaacatcacgcccaagtcactacaacaa

SEQ ID NO: 288939 - DNA, 452 bp, Glycine max
  unsure (1)..(452): unsure at all n locations
tgcactactagtagcttgccaacgtggctccaaaattgttatgatgagagaagtgacataatggaagatcaggtttgtatcataatagtcacattttgactcattaaaaaaaattattaataggatttattnttttaaagcatttctgatttttttccccttcttaaacaggataatgcaaggcttaaggatctgtgcaagacatggaactcattatgcaactcaatacacagacacccttccattaatgagaaacaagttttctttgtttcatcatctccttcatctcccacttctgtntcctcacatgaaagaaagtccaactttcaccacagccacctaaataggccaatcatttctgaatcagaagagtcaccaaatgaatgtgagtatacactgaaactggtgatgatggctatgatagcaactttataatgttcatgccagatagt

SEQ ID NO: 288940 - DNA, 401 bp, Glycine max
  unsure (1)..(401): unsure at all n locations
agcttgttacaagattctccttgcctggcacttcaaaaccttctggttgggtcatatagatgtcttcctctaaatccccatgcaagaatgcagttntaacatctaactgctccaagtgaagattctctgcagctactatgctcagaataactctgatggtagtcatctttacaactggagagaagatctctgtgaaatcaattccttgtttctgctgaaaccctntcaccacaagtctcgccttgtatcttcttctaccgtcagattcttcctttagcctatagacccacctattctgtaatgccttctttccttctggcaatntagttaaagaccacgtcttattcttttgaagggatgtcatctcatctttcatcgctagctcccactcaatagtgtca

SEQ ID NO: 288941 - DNA, 412 bp, Glycine max
  unsure (1)..(412): unsure at all n locations
tctccgtcttttccctataaatagggagcaaagggaagtttttagacgttcaaccttcctggtatctgaggatcacttgaaattagtgaaaaaaaatcgtttccgtgaagaaaatccaagccgaggcgcttccgtaacgcgtctgaaacgtttccgtgggtgattccgtgaagattttccgccatctatcgttcgttcttcatcgttcttcgtcgtcctgcggtcttcaaccgataagttcccgaaatcgaacttttcaattcattctatgtacccttggtggttcccacttgtttcgcgtacttttattttcatttcatttactttctgtatccccttttgacgtgctttagtcatttatttaagtcattntctcgcctaatcaaaaaataaaataaatntccaccgatca

SEQ ID NO: 288942 - DNA, 381 bp, Glycine max
  unsure (1)..(381): unsure at all n locations
tagcttcttttggactttgaacaagccatcaactcctctttcagaaccatgctatgtgctcgcgactggtccctttcttcccttcgcaacttgagttcattattgctaccccatagagctccgcgaaatttgttccggccgtactcttncttgcgagccctcttggtctcttgttcaaaggcttttgcggtaattgcattctcttcccgtacccgcgcactccttccgaatgtgtgtagcagccaacttgaacttctccttggcgagtattgcctttcctaactcgcttttgagagcttggacttcctcgtcctcttccggcgcttcaaaatctcttcgctgacgactnttaacttggcgagccaatctaaacctcgtatg

SEQ ID NO: 288943 - DNA, 373 bp, Glycine max
  unsure (1)..(373): unsure at all n locations
tgaaggacatgcacaaagtatgactatatgatgtgtcaatggngtgtagcaagcaaatgctcacctccccctctaaaatttaattggattgggattctcccaattcaattaaatctattttccaacacacacatganatattcactcaattcatgtgaaattacaaaactacccctaatacaaaaactagtctaggtgccctaaaatacaagggctaaaaaaatcctacatttctagggtaccttctctatattatggagccctaaatacaaggccgaanaataatgaaaccttaatctaatatgtacaaagataagtgggctcatacttagcccatgggcccgaaatctaccctaaggctcgtgagaaccct

SEQ ID NO: 288944 - DNA, 339 bp, Glycine max
tagcctttacattcaatttcgagcgtctcgatatattacgggactcaatcagacatccgagtaaaaatttattgtcgcttgaattggctcagaggctcaacattcaattttgagcgtctcgatatattacgggactcaatcagacatccgaataaaaagttattgtcctctgaattggctcataagttgaacattcaatttcgagcgtctcgatatattacgggactcaatcagacatccgagtaaatattattggccgttgattggctcacaggctaacattcaatttgagcgttcgatatataacggactcaatcagacatccagtaaaagtattgc

SEQ ID NO: 288945 - DNA, 342 bp, Glycine max
  unsure (1)..(342): unsure at all n locations
gtgagcaaattcaaacgacaataaccttnttctggatgtctgatngagncccgtaatatatcgagacgctcaaaattgaatgttgaacctctgatgcaattcaaaggacaataactttttactcggatgtctgattgagtcccgtaatatatcgagacgctcgaaaatgaatgttgaacctatgagccaattcaaacgaccataactttttactccgatgtctgattgagtcccataatatatcgagaggctcgaaattgaatggtcaacctcttagccaattcaaacgacaataacttgttactcggatgtatgattgagtcccgtaacatatcgagacgc

SEQ ID NO: 288946 - DNA, 410 bp, Glycine max
  unsure (1)..(410): unsure at all n locations
agctttgacttgagtcatcaagagattataaatatgtgaccatggcatgagtttcaagatcatcaatcatctttgaatcatctatctttcaatcttctttcaacattcttcaatcaatcttttcaactctttctacagcaatttcggattcatcttctcttcatctttcttcaaagttttggtcaatactttctctttcaagaaaagttttttgataaaaaaccttgtgctattcatctntntcattctcttctcctccatgtcggccttcatctgcctttgcacctcctgaattcttttgtgtctctcttctcccttacacaagattctaaggactaaccgcctgagaatcttttggatcttcctttcccttaagcaaagagttcaagggactaccgcctgagatattt

SEQ ID NO: 288947 - DNA, 443 bp, Glycine max
tcacagatgaccagtccatttatcatcccaccactcacgccaacttatgagttggagggtagacccatgcatatgtttagctcttggcttctattccctatgtcaataatcgcgaaaaagaagtttactacaggaaaaactacattaaaagctctctattccgtctagtctgatattacgtaaccagtccatttcgtatgtctttcgaagcgaggggccgggtttccttgtttcctttcggaggacatggtacatgccctgcaagaaaatagtctttataataataattataataataagaagtcctgttctctctcggcagctaccatcggatcatcggagttgggcagttacatctttcattcaataaccagtggttgaaggttgattcccaacaagagcaacatgttcaataagatgggagctaaaggaagactcacata

SEQ ID NO: 288948 - DNA, 253 bp, Glycine max
atacccttgtgtacatcgctccatgctattgagaggacgaacacgaataataacttacacatacaaaaaaattcccataaataatttacaatttataaattaaaagaaaagaatggtagaacaaacctgagagggtaaatgggttgtcaacctcaagtccgtgactgcaaatcattgaatccaaaccttagcttcaaatgacctgcaaatgtaggctggcccacaaatacattatctatcacacactataact

SEQ ID NO: 288949 - DNA, 454 bp, Glycine max
  unsure (1)..(454): unsure at all n locations
tagcccatcatcaatattgatttcaagaaacaaanaagcaagtatatatatcagtgaactgagccagaccaaggaaaaatacatcaaagaaaataaataatctagtatagctaattttataatcagataaagcatctaagacctgctgccatgtggtatcaacaagaggcagccgccgagcattgccagcatcaaaatccagtacaccataatccctcaaccgaatctacacagcaataactaaaataagaagtcttttgagaattaaatgcatggcattatctataagacacattgttcaaaatgagacaaacccaaaggaaggcacggattctttgcaaattcccaacaccaacaccaagagcagcctaccattagataaaaaagcaagcagaaattaagtgttgataacaaaaacaaattcatgcttgctctcttatatngaatatgaaac

SEQ ID NO: 288950 - DNA, 408 bp, Glycine max
  unsure (1)..(408): unsure at all n locations
agcttctaagaagatgtactactcacctaatgtcacctaacccacatgttgcatctctaaactcctataaaacttcatcttcaagatacactctctttgtctttgagcttcaatactccctttttggccacataactaactacttgagttttcagttaagtatttctaagtgatcaattgtcactcgctaaacaactatgaaactctaccatcaccaaacaactaaaagactcactcaatcaatgcctacaaagctactctaaccatccatgtaagtttgagcaaaacaacctctaaattaatttcaaattctcatctaataattntttttggatattaaatcttaaaaatctatctgactttaaaggatgcatgaatgtgcactcaatagtaattttcttattaata

SEQ ID NO: 288951 - DNA, 439 bp, Glycine max
  unsure (1)..(439): unsure at all n locations
tccatcaaatgaaaaccttgatctttgttccctctatcattatcattagtaacctagagtatcgatgtcaatattattctcccaaccatccttattttctactntcaccactcattctcactatcatccaagtatatccacaacacatgcaccacatctagtgaagggctttatgaagaacttggcaggttctcagataacattgcaaacaacatgacaattttaactgattcctttntctgtttgaatgagttgcangaatagaggttgcaaggaatttgagtttaatttggctactatgatatacagttttttattttcaactagatgtgcatgaaataatgcactcactctntatgattgcatccttaaaataaaaccacacagaccaccataacaaanaataaagttcttcaatgttcatccatacttaatcctt

SEQ ID NO: 288952 - DNA, 350 bp, Glycine max
  unsure (1)..(350): unsure at all n locations
agcttctactgtgaagctatcttcgtatcgagcatggccaaatatgcatgacagtcggtttgcgctttacaagttgccattgcgggttcccaaagatgaccaagaatatgctggtttatggggaagaacttttggttggcctcctggaaagccttctgaagacaagcctggaaaggctttattctttcttctgctctcttatgaggagttccagggacaacagcttctcattgcaaccaaaattttggaaggcacacactatgtgttacatcctaacggttcancaattgttacagcaaatatcaatgatccttcatcccaacccttttcctgggacactgatgcagact

SEQ ID NO: 288953 - DNA, 450 bp, Glycine max
  unsure (1)..(450): unsure at all n locations
tatcagcaacgaactgaggagtcccaaactcttcaagagtcttaagacgaactgngtttaccacaaccccaatattgttacttcccatatctgcctcttgaaacaacacagttgcccctgctttatcaacctgttaaaccacattagcaaagactgttcctttaagagaaaaaaaaaatacaattattcatgatatgcttattntgtcttcgccataaacacaatggtaaaaaatcaagggatgtcagtttcatgtcatttctgtttcctgctcatttcctaacagtttttcctttatttttctcactttctagttgaaattgtagttatattattggtactattgaaatattattttatattattaataaatactattatataacaatcaattcccacttgcaacaagtatctatcaattntgctaactctctaattgtgtgaatcact

SEQ ID NO: 288954 - DNA, 406 bp, Glycine max
  unsure (1)..(406): unsure at all n locations
agcttatgctccttcaattgcacaatgctcttaatatttgaagagtatccttatggaaacttcacccgatgaagacactaacaaaaatttatcttctcctttntggacaaagtatgacaagttgggggcaagtaaattttcttcccatcagaccttggatgcaactgtgatcatatccccatctcagctagatcttgatgggtattcaagccatccttcgtcttgccttgaatgttaaagagagtcccaatcacattgtcacatacattgttctccacatgcataacattaatacaatgtctaacgtctagatcaaaccagtacggaagatacaagagaatggacctcttcttccatatgcaagtcttaactttatcctttctttgggtctttccaaatacagtat

SEQ ID NO: 288955 - DNA, 447 bp, Glycine max
  unsure (1)..(447): unsure at all n locations
atacttagcttctgttccgttcttctaagaacatcatatatagggctagtgattttatattataancaaccttatcccaccattgatcatccaacaaagtatctttcacaaatttaacctttgcaacatcatcttccttataagaagaccattggtcactaatgatcatctcttggaggcctttcttcaatagtntgaatctcttgagcattacaatagtggaggcaaatttttgtggagcaatggaaagcaatttcaatgaatcgaatgaattgaaaattgatagtctcatagagtgactcatgacanagttttcacaaatattgcatcatccgcatattgngtgatccaagaacattcttcataagcaacattatctttttctgtattcttggctgcacatatgttcttcanagcangaattaatgtatggacaacacatggagt

SEQ ID NO: 288956 - DNA, 357 bp, Glycine max
ggtttgcaagcttgttcttcattctctacgccgacgccactggtattcaaatgcatatctgcaatatctgcctgcttccacactttaactaatgtgtactttgataattggatttttgcattgcttgttttttccctttcattgcaggtatatccagagcacatgtgccacctctggggaaggactatatgaagggctggactggctctccaacaatatagctaacaaggtatgccttgaaaatctgcatcttttgtgttcgttgcttgacctgtgatactctgatttctggttacttttctggatcacgcctaagggacattttgtggaatgccgctatcttcttgcttgctttac

SEQ ID NO: 288957 - DNA, 455 bp, Glycine max
  unsure (1)..(455): unsure at all n locations
tccttcactcttccagcacgaccaaacaaatccaccacgctgccatatatctctatatctggtgttatattataataactggtcattaatctaaaatatctcagcccttcgtccactagaccagcatggctacaagcacttagaactgccataaacaccatcttatctggtttaatatgatgagaatcatgaaacaggccaaatacagtctaaaggcccaagtggagaaggacgaaggcccaagtggagaaggacaaagcccccgagtggagaatgatgaaggcccaagtggagaaggatgaaggcccagaggcagagacactatcaagactattaattgttgctgaaggcccaaactaatttgaaggcccaagttaaataagtttctagttataatttatttttattggaattttggcccanactgtctagaaagcccatgtctatttttatct

SEQ ID NO: 288958 - DNA, 387 bp, Glycine max
  unsure (1)..(387): unsure at all n locations
agcntttacaacatccaagcaaaacaacattcacacagcacaagctatcacagcccagcaaaacagagcaaaggcagaaaactctgccaaaacaccaaccaaaaatcacagctgttcccactcaaagaccccagtaacaatgtccttcgatccaattcgttaaccgttggatcgactccaaagatttactggaagtctatagtgcataagcctacattatgaccggtgggatctactagcaaacatncagaactcattctacattactctttccacaaccagcaaatacatggatgtttctgcacttgtgcagaattctgctggcacaatttacagcagaatctgcacaaagagcatattgcgaaaccacacttccctcatcaatct

SEQ ID NO: 288959 - DNA, 402 bp, Glycine max
  unsure (1)..(402): unsure at all n locations
tgtgcctttacganaaggttcatcgagtcaagttgaagtatggaagtaaccatcttgcaaaaaattaaggcaaaagatggatcgtgttacatcgctgcttcgtctactgccaaacacatttagggctgttgatgtccctgttacttccagtttcaccttgacgaagatgtcatggaccatgttgaanatctaaattgattcaaccccatatctagtgtacaaattcgcaatacttcaactgtgcatcattcgcatacatccatgttgttcattggttgcattgctcattgcattctttccttgaaaaaaaaagaacttaatcattgttatatataaaaaaaagaacccgctntacggcgcccttaccaaacctgtgctagagctagagtaatgggtaaagca

SEQ ID NO: 288960 - DNA, 177 bp, Glycine max
  unsure (1)..(177): unsure at all n locations
tcaccccnccccccccagagctgagctatgaacgtggaaccagcaaccgagcccaccgggacccaaagcaccgctgttgcacatttgacaaccagcgggcagacaaagtggaacgccaagacaggaccaaaagactcacaagcggcgaaaaacccacgagccaccgtaacagaccac

SEQ ID NO: 288961 - DNA, 337 bp, Glycine max
tgaatatatttatgggctcaatactgcattcaaataaaagactatcgacgttcaacgttcataggatgatacgcttcaaatcttgagcgaggtaatctcttacgggacacacccggcatccgagtaaaagctatagcacttgatcttctcaaagttccatgattatttcgaggactggaaacgaacggagactaggtacgtccagtcaaatttatgtggatgactttataagagcttctggaaaaattcccggtctaaagacacggcatcttgagactctaggaacagcacgtagtgaaatacttgagattgtagaatatcacaatcgggttttcgc

SEQ ID NO: 288962 - DNA, 306 bp, Glycine max
  unsure (1)..(306): unsure at all n locations
tctatataagctgaccgatcccatcgataaacacattgngttttgtatacagaaaaccacagtgcatctattttatattaccgagagtgactctcctaaactcttgagtgatacaagatcaccctggctgcatcaaaggactttcacaacctttgagtgttgccctcgcttgatacagtgactctttgcttacttacatcttcaccgctcgttctttgcaaccaccattccagaaaatccacctctggccagaattatctcgtggccataactcccattntacgcactcatattaagagattcttg

SEQ ID NO: 288963 - DNA, 403 bp, Glycine max
  unsure (1)..(403): unsure at all n locations
agctttttatatcgngtnccttactatgtgaagctggcatcctcacatggcacgtgaagtttatgatgcatataaattcataaaaggatgtattttagtttgtcccacttgttcttcgtgaagttaagtgaaactcaaacggtcaggatgtgaatagggagatataacgttggtacggagggaggaataagttgtgggattgaatctttttactaacaagaattaacaactaatatttgttgataaaaaatcaataaccaatgtgaatagttaaaatcaaagagagaaaaagttatattttatcatattattctaacggttaatactaacctgcattgatttttttaaaaaaagtaacctggatcgacattagttggaaaattaagtgtttttctatgaagtg

SEQ ID NO: 288964 - DNA, 429 bp, Glycine max
  unsure (1)..(429): unsure at all n locations
ntactcatgaccaccaatggtctatatatatgtgacttattcacgaaattactcagagattntcagaacaacaaagtgtttatcctctcaaagagcaaattcattttatcctcttaagaattccttggccaattcaattgcaattcattaaggaattatttgagtgctcaatctgtaaaatccatctctttctagagagatttgttcttcttcttcttctcattttctaagggattaagagactgtgagtctcttgttgtaaaggatctctaaacacaaaggaaggattgtccttgtgtgtttagaacttgtaaaaggaatttacaagatagtggaactctcaagcgggttgcttgnggactggacgtatgcacaagggtgtggtcgaaccagtataaaactgagtttgcattctctcttcccttaatc

SEQ ID NO: 288965 - DNA, 299 bp, Glycine max
  unsure (1)..(299): unsure at all n locations
agaaaggaaccatctnctcgacaattctttaatctcaacaccaaaaacagctggtgcgagcgccctcactaagactgggcggctggcaagtctctcggagagataatcagacaggtcattacaaagatgaacatcttccgaaagaactaattcaagacctcctttaagaacggaaatagcaagattttttcatgaccctggatgcattaattctcagagtcatatgagaggctatcaagtcggtcaaccaacggtataagagaacttaagaacactatgctatctatatcgacagcgac

SEQ ID NO: 288966 - DNA, 399 bp, Glycine max
  unsure (1)..(399): unsure at all n locations
agcttatagtacttcacttgaaacattgtctttcttcccgactaactagatgcatgcaaaagggaaagtaatcaactcatttcttctgcataccaacatcataggatcaagaacaccgtgacaaaagtgtgatttgaggtatgtttgttttatatctgccgataactaccttgcaagccctaaaatcatacaccatttgtaattcccatcatgtcatgaatatgacacataaaatgttaatcaatctcattctgacaccaatttcaataattacagtataccaacacatattatcactcaagtgattcaaccatgatacatangattgcactatagtcataaagagaacacatttaagaagaatgacatcctaatttatatcaatactataaagctcta

SEQ ID NO: 288967 - DNA, 435 bp, Glycine max
  unsure (1)..(435): unsure at all n locations
tctagaattgcatgtaaaaaatatatggcataatttgctgtaaaggaagctttccactcaagagtgtaagtacatccattccatgttcttaggatcaacaaaatgctttaatgtgctagagctgatagtgtttagtctggaatcagaggtgcatctagaaagtcacagggaacatgtgctagagtcaccattggtcaggttctttntcttatgtgttgtaaggagaacaacaatcatcatgcacaaaaggctctttgtggtgctaagtttaagttccctagtcgtcagaagatcatagttagctggtgtcagaccctaatttcatatgggggcaatcatttgcaaacatttggattctttctagccgaattgagctgcttaacacttgattttgcaatcatttcaccttngaagtcatgattttgcacactttga

SEQ ID NO: 288968 - DNA, 395 bp, Glycine max
  unsure (1)..(395): unsure at all n locations
agctntactaatagaatcatcttgatatgactgttttggaagtcctcttacgaggctatgcttttgaagctttgagattaacctccagctagcatggtcaaacttcttattccatacncagtaatgctctttgactaaaagtaagcatgacaccttttgattggatagatcaccaagtttaatcttatagtgatttccttgtctcttagtagacaagagtaaagagttgtcctttgtttggatgatacacatatccttgttaaagttaaaggtgacattgtatccactatcatacaattgacttatgctcaacaaattatgcttcaatcctttaacaagtaaaacattattgatagaaggataataaggaatacaaaccttacctacacctatta

SEQ ID NO: 288969 - DNA, 462 bp, Glycine max
tatgctgcaaacatctacaatagacctcctcaacctcagcagcaaaatcagccacaacagaataactatgacctctccagcaacaggtacaatcccggatggaggaatcatcccaaccttatttggtcgaatccttcacaacaacagcaacaacaacaaccttactttcaaaatgctgttggcccaagcagaccatacgttcctccaccaatctagcaacaacagcaacaacagaaacaacaaacagttaaggcccctccgcaaccttcgcttgaagaacttgtgaggcaaatgactatgcaaaacatgcagtttcagcaagatatcaaagcctccattcagagcttaactaatcagatgggacagttggctacacagttaaatcaacaacagtcccagaattctgatagattaccttctcaatctgtccagaatcacaaaaatgtgagtgccattacattg

SEQ ID NO: 288970 - DNA, 404 bp, Glycine max
agcttttagtttcaagattcaagaatcaagattcaagaatccagattcaagaataatccaaagattccagactcaagaattcagaatcacgagaagactcaatcaagataagtattaaaaaatttttcccaaacattgagtagcccaagaagttttcacaaaatcattaccaaagagtgttactctttggtaatcgattaccagaagatagttattgattaccagtggtttaaaatgttaagatttcaaattcaagagttacaacttgtgtttaaaccattttaacttgtggtatcgattacacaatccttataatcaattaccagtggttctaaatggtttaatcttcaaaattcaaaatgaagagtcacatatgttgatgtgtaatcgattacaccttaatg

SEQ ID NO: 288971 - DNA, 453 bp, Glycine max
  unsure (1)..(453): unsure at all n locations
ggcttctacaattntgagattgnggactcaaatgaccagattgttaaaaaacgagggactcaattggtgaactaaatgggaggggggctgatttagtgagttggaataaataaggggactatttttgtaattaaacctttaattttcatatgtttatttattctcaatttagttatattgttaattttcagtgttatgatgttatttgccaaaaaattaacttaataaaatataataaataaattaatagtgattacaaataaaataaaatattttttatttttatacttgataattatttttcatttaattgtcatcatcataaatcattgttatcactataaacaatgtcatttattatcattacgctaataatgtatatttagtataacatctaattaaaaattcaaaagtgctttcagtgattaaaatgacaatattgtgtaagtccat

SEQ ID NO: 288972 - DNA, 279 bp, Glycine max
ccccccccccaagggtgagctgaaactgcaccaccgcccggatcttaagcacgcgctcaactttaacacttacaacacccgacgcagagcagataaccactgcaacaccaacaaagaaaaagatgcgcacaaactgtgagatacttaataaactatgaaaaaacataaaacaataactttacatacataataaatttacgaatttgcctgatcaagctaacgtgaatcgatccgggatgaaaatcaataaatacctcctggactcctaaaagtcaaaaa

SEQ ID NO: 288973 - DNA, 260 bp, Glycine max
agcttgttttattaactttctttcgatgatatattcctgtataagtttaagtctggggtgcttttgcttctctggttcattaattctcatcaatatattagaaagttacctaagaaatggacaaattcacatgtaatctgttgatttacacactttccgcccgctaaaaagtaataactcggttggatttgatatacaagaaaaacattgaacatcgatgaatatattaattctttatcttcaataaaacatcttcaaat

SEQ ID NO: 288974 - DNA, 451 bp, Glycine max
  unsure (1)..(451): unsure at all n locations
cttgagggtgcgtagcccaccatcttttcatagtagagtatcgattatgtgtctaccatcacgattatcgtctgcctttccatcattgggggtaccacttgggccgccagatccctccaccttttgggcgtgttctttgaaagatccgtccccctttttgcaaatgttctgtagttgcatcctatccagaaccatatcaaaattgtactaatactgcctaacaaaggcaaccattaagtccttccaagaatggactcgggaaggttccaagttagtgtaccaggtaacagctaccccagtaagactttcatggaaggaatgtatcaacaattcctcatcttttgcgtattccctcatcttctgacaatacatctttagatggttcttgggacaagtagtccncttgtacttgtcanagtccagcaccttgaacttgggacgggtgatgata

SEQ ID NO: 288975 - DNA, 417 bp, Glycine max
  unsure (1)..(417): unsure at all n locations
agcttcttatccaaggctcatcttggtggtgaagctccttcttccatggcttattccctaatggatggcgcctcctctcacctcttctcctttgtcttccgctgcatctccatggtggaaaatcactattaaaggacctcattgaagctcanagatccaacctccatagaaaccccacaagcaagcttccatcataaccactctatttcccctaccagggatatccaacttggtcactgcactccccatgtacatacacaacatacatcatcacaatgacattatcaacatcaacaacatctcatctcaatgtcattatcatcatcaacatgatcccatctcaatgtcattctcaacatcaacatcatctcatctcaatgacattatcaacatcaacatcatctgatttcaatgacg

SEQ ID NO: 288976 - DNA, 453 bp, Glycine max
  unsure (1)..(453): unsure at all n locations
gattcacattctccccctttgtcaagcaaattctttttgatatctatcaaacctgcatgatttacacaattcccagtaatttatacaagtttgtatgttcaagctgtcagcaccagcgatttcaacctagaaatcaagaatagtgtttatgttgcttaaggcttggatagttacaatttgtgtttgcttatgctcaatgatcttgaataacaaaattcaagagaacttaagacttattttgattcacaaatccagccacaactcagcaccacaactcaacttcatcataggaatcatgtaggaaacttagaaaacaaaaaaaagagttcaacaacaagactacttctaggaattgatttagaacatgttatgaactaaataacatgcatgaattagactcanaattctaaagataggctaagaatgacangaatacatgaacaaatgtatcta

SEQ ID NO: 288977 - DNA, 363 bp, Glycine max
  unsure (1)..(363): unsure at all n locations
agcttatagaggaagcttcaatggaggaagagaatganggaaaaagagaggggggcacgaaattgaaggagaaaaagagggagagaagttaaactttgaagtgtgtctcacaagtttcacattcatcaatgttgtgacaagtgttacacatgtttctatttatagcctaggtcattaaataaatgtaaatttcatttacatttcatgtgaatctaagaggaatattccaagaatatgccaaagacgtcttagcatattccaagaatatgccanaggcatcttagcatattccttttagatgccacaagaatggaaggaatgtgtgattctagcacatganaaaggaatatgccacaagaatat

SEQ ID NO: 288978 - DNA, 447 bp, Glycine max
  unsure (1)..(447): unsure at all n locations
tctagattagtgtaccagatgaccgctgccccagccaagctatcttgaaagaaatgcatcaacaacttcttgtccctagagtacacacccatcttgcgacaatacattttgagatgattcttaggacaagttgtccctttgtacctatcaaaatcaggtatcttgaacttcggagggatgacgacgtccggcactaagcaaaggtcggtcatgtccgcgaacggataatcgccgaagccttcaacaactctcaatctctcttcaataagatcaagtttcccctttccttctactgccaggggtggccctattggctgtgttgggtggtttcgaggttctcctgtgatgttgggctgaggtagtgcgttgggtgttggtccctcggcggggaacggngagtaggaatcaatgtctccctgagcatgcactcgacgatcctcgtggacc

SEQ ID NO: 288979 - DNA, 338 bp, Glycine max
agcttctacttatgtggcaaggcgggcttccttcaccttcttgtctccaacgcgaactttgaccatttgtcttccttcccgcgatgcttcttttcatgtctgcctgagtgggcttatagcctaaaccatacttcccacgattaccttgagtatttatcagtctagttatgccgccggtgttttttcctaaacccatcccgggctcataaccgttccccaacataactcgggccatcattaccgctgcatcggacagactaagctgcccaaaaagggagtccacggaggaaatgctgaccacctcaaaagactggagaagcagttctaacgattcttct

SEQ ID NO: 288980 - DNA, 429 bp, Glycine max
  unsure (1)..(429): unsure at all n locations
tggatcattgagctagtntatgccattggctctcgtcaattggttgatggatatacaaagtattctttccatgcttgtcattgagagatcgtgaggggatccaatgatgtaacattgtgattttcttaatgtgtagttaggtgattntaattagattgcaagagaaaataaatttaattttcatgtttaaaaaaatataataccttgtgttgtttaagtgttgtgggttaaattgttttgggcttgaaacatggttttagagggctttaatattgtaatgtttgataaaaaaaatggtaaacaatggagacatgagcaatgtaattcttgtactttacccaaaaaaaggatcacagtttagtgattttgtgtgatgagaatctctccctttttcattantaccttcttntcttcttccttgcttttcta

SEQ ID NO: 288981 - DNA, 392 bp, Glycine max
ggcgaatcagctcgacccggatccttaagtcacctgctgttgcaaactttctgtcctatatttgatattccataaggttccagatattccattcatacatctcttaaaggacgggtgtgattaacttattatacgtttaaaatttacttattaaatgataagtctttaataattaagagggatttttgttcaaaataatttggcagaaagccgtttataaagtgaaggatatgatctatctacctgttcactgggatgtgatttgaattaacatagttcaattaataaaaaattaaccggggattggttgattaaattattataatccgactaattaactaatttttctgggttgttgatccgttttgcgattttaaatttgagagaatatt

SEQ ID NO: 288982 - DNA, 443 bp, Glycine max
  unsure (1)..(443): unsure at all n locations
tataagcctcattatctggggtggtagatttcccacattttccagcactctccacccctgcaatagtactcacaagcaccacanacccaacaaggcatagcaacttcacacaataagtacaaccctccattatttctcaatattatgcttatgtctctctattagtgaaatgtttctctgttgatttcacaatgcaataacccctttggctctcatggggttttatagcctaacatgctccaaaaaagtgcttggccttgtcaccctctgattaatggagcttgcactaggacaaagggtgagttttattattgcaccacttatgaacatanagcaggtgtatacacanatttgctccacttatttgtccaatcaatgtaggtgtgtctttgccaacacaattctttttgttttcttacttccaaatgtagcattattcacag

SEQ ID NO: 288983 - DNA, 389 bp, Glycine max
  unsure (1)..(389): unsure at all n locations
tagctttcgtncctgagttntccgactatgctcttgtgtggtggaacaagctacaaaatgagagagcaagatatgaagagccaatggttgatacatggacggagatgaaaaagatcatgaggaagcggtatgtgccggctagttactcaagggacttgaaattcaagctccaaaaactaacccatagcaacaagggggttgaagagtatttcaaggaaatggatgtgctcatgattcacgctaatattgaagaagatgatgaggtaactatggctcgcattcttaatggcttgactaatgatatccatgatattgttgagctgcangagtttgttgaaatggatgatttgcttcacaagatgtccgatccactagcataatataacgag

SEQ ID NO: 288984 - DNA, 419 bp, Glycine max
  unsure (1)..(419): unsure at all n locations
ntcatagttcaattccgagcgtctcaatatattatgcgcttgaatcggacctccgagttacaagttatgaccatttgaatntctcgagagcttccgtatttcaatnttgagcgtctctatatgtgatgtgcctaaatcggacatccgagttaaaagttatgtccatttgaatttctcgagagcttccgttgttcaatttcgagcgtctctatatgtgatgcgcctaaatcggacatccaagttaaaagttatgaccatttgaatttctcgagagcttccgttgttcaatttcgagcgtctcgatatattatgcgcctgaatcggacctccgattgaaaagttatgagcatttgagttgctcaagagccttcatatggtcaattctagcgtctcgatatattatgcgcctgaatcggacc

SEQ ID NO: 288985 - DNA, 396 bp, Glycine max
  unsure (1)..(396): unsure at all n locations
agcttctcccccaattntctataaatagggggagaagtgaagtgaaaaagggttcagccccttaggcacttctctctctttcgaatntgcttggaaaaattgtttccgtgaagaaaatccaagccgaggcgcttccgaaacgtttccgtaacgtttctgtgaggaatttcgcgaaggtttcgaccgttcttcgacgttcttcattcgttcttcatcgttcttcgatcttcaacgggtaagtacctcgaaccaagcttttcgattcattctatgtacccgtggtggtccacattgtgtttcgtgtatttttattctcgtttcatttactttttatacccccctttgacgtgcttaagcccatttatttaagtcatttctcgttaaccctaaaataaa

SEQ ID NO: 288986 - DNA, 452 bp, Glycine max
  unsure (1)..(452): unsure at all n locations
tgtaggattatggngtacccgtcatatgtggtactatgtggcgatcgggcgatggtgcaagtcgactctccacatccacaaatcacacataaatccaccatccccagttgcccaccttcaactgagctcacgtactcccacgtagcccttatcctcgttcttctcaacaccgggtccccatcaatccctccaagcttccacaacatccaagcaattcaacatccaaacatcatgcactatcaaaaacaagaaaacagggcagaggcagaaaactctgcccaaaacacaaaccaataccacagctttccttactcaaataccccagtaacattctcttcgttctaattcgttcaccgttggatcgactctaaaattttactggaggtccctagtacataagtctacattntgaccgttgggatctgctataaaacgtncagaaccaaatatgt

SEQ ID NO: 288987 - DNA, 350 bp, Glycine max
ctttagcttttattacccttgcatgaaatgcgtttttataatcttatacatgaacataagtaatggtaaatatatcaacagtgtacaacattgatatattgtcttctaaaaaattaatacaaatagtgccaatccaaattgttatgacttttttctttgattattaaattcctattaatagtagtggtagttcaattcccactgccttttttttaatggtactcttttaaaacccgtttcttgtcattttcataagtttttaaacaaagaattgcatggttctttcaataatgtaaattagttttactcatttcgcactcaattaattattttttacctattttttattc

SEQ ID NO: 288988 - DNA, 431 bp, Glycine max
  unsure (1)..(431): unsure at all n locations
tatgcacagacagaatgatatgtagaaggaggtactaggtatcaaacacacgggttccatgctcaactagcagaaaatgtggagcaaacagcaagcttgctttaaggttggtgcacgtatgaagaatagtggcgtgaaagggagcaaacctggattgtgaaaatggaatacaaattgcagaattgttaatgatttctagaatattccctttacacaaaatgacaaattccgttattagggaactggtataaataaaagcatttgtaaaccattgaggggcatgaatgaatgaaatagcagatttcttcccttagctttcttcttctcttcttcttcttggaggtgttgaccctcgaagttcagctagcttttccctgcacgtnacacataattacagtanaaatgaagagtaatgcatcattaaggattga

SEQ ID NO: 288989 - DNA, 318 bp, Glycine max
  unsure (1)..(318): unsure at all n locations
agcttangctattggagggagaataaaacaatccaaaatcaatcgtacctttcaagtnacgcaaaattctttttgcggcttttagatgacgagaggtcagagcctccataaagcgacacacaatctcccaccgtattatagaatatcgggccttgtattggttagataccttaaactccccacaagactcttgaagatcatggagtctaccttctctccttcatcagactttgataacttcaagccaccttccataggtgtgttcacgggattgcactcaagcatattaaatgtcttcaacacttcttgtgtgtacct

SEQ ID NO: 288990 - DNA, 437 bp, Glycine max
  unsure (1)..(437): unsure at all n locations
ntagcacaagcganacatcagttcttnttggagaatatattaatgcacgagctngaattaagaggaggtgttgcaatataattcaacgctctaaatgtccacgtattaagctaggaataaatcatcatttggttgcttgaactgtaagaagatttggtcaagtctgttgctagattttagctatattgtacgtgaacatgtgcgtcagtttgagtcagttttatgccacttccttaggtgatgttagtcgtggaaagtggagtcagttatcaagttacttgagtctatttaagcattgttatgtactgaagtctattagagagaagaacgttgatttcctcattgatgtggctctcaagattgatatcttatccctctaattgtacatataacagacaggctaaaacatacgttttatgcattgaaatgtaattaaa

SEQ ID NO: 288991 - DNA, 357 bp, Glycine max
  unsure (1)..(357): unsure at all n locations
agcttttgtccacaagaaaaccacttgaatccgttcaaaggttcaacgccttaaacggtctttttacttttaaacgattaaaatgaacctttagaagtctaaaatcaaacttatgtgtaattttctttcatcaaagaactatgtaggtctgagtttctcatcgcaattgaggatacataggagcaagagccccgctattgtcgacccccaaaagataaaaaacataaaaaatggaaaataaaagaaacttggtgtcatgattttgcacacttgattaaacgctgntgtcccttgtgacggacgcgtggggtgctaataccttccccatgtataaaaaactcttgaacctttatttct

SEQ ID NO: 288992 - DNA, 440 bp, Glycine max
  unsure (1)..(440): unsure at all n locations
tgtccttggtttagacatgattggtacatgatttgggacttgtaggattcaatttgggcaaaattggatgagggaaagagtggttttcgaaatctgcactttatgcagaattttgctgttgaaatgtgcagcaaaattttgtataagtgcagaaaaaagcttgtgtatggctggttgtaaaaagggtattacatatggggttctggaaattttctaagagatcccaacggtcaaaatgtagacttatgtactagagacttccagtaagattttcgagtcgatccaacggttaacgaattcgaacgaaggaaatgttactggggtatttgtatgtgaaaagctgtgattntgggttgtgttttgggcagagttttctgcctttgccctgtnttgcttggttttgttagtccatgatgattggatgtggaattaatnggatg

SEQ ID NO: 288993 - DNA, 455 bp, Glycine max
  unsure (1)..(455): unsure at all n locations
tgcagagctcaataattgattggatagagaatcaaacttttatttatctgttagatgacattctgtttactcatgatcaaattaatttaattgttgaaatattttataatttacaacaataagtatcttaacattttcagacaccaaatttgatattatatattaaggttagttcaaaattgtagaaacttcagcaaaattttgaattaatattctcccatttcatgtttatccacatagtttctaactaataataagcttaataacatatgcataaatgttgaacaattaaaatgctaaaaataacatgatttatgtttttaatatcaatggctnggagttcttgatttctaacaacgaatagagaatagcactacagcaagcacactgaaggaagagtattcataaggtgcaacatcagtataaaatgggatagaagtgataaaccaccatca

SEQ ID NO: 288994 - DNA, 396 bp, Glycine max
agcttattcctctcttgatgtgtggattagtgttgagaaaacctttcgaatcgtatatatgccttggatgagtgtgtctctcttgatgtgtaggcacatgactacttaactcccttcttttgtatgtagtcatgaatgtagttggttaagtttgtgattccttaatacatccttattgattggttaattcttacttcttatatgtacgttatatacttggtataagaaccttataattctatgtatgctagtagtatagtgttctgccttaattgcatagatattatggttgttgtgatttccttgtttgagcgatgttaattcttatagttcatgacatgtataagatagattcataagaatactccgtgaccgaccttcagtctagtacaccca

SEQ ID NO: 288995 - DNA, 448 bp, Glycine max
  unsure (1)..(448): unsure at all n locations
tgtgngcccttttgttttagaatatgttatgctgaagtttgtaatagttggttgattataagattcctgatatttttattttattttattttggcgttccattttacaagacttttctttttcaattggcgtttataattatacgacgagacaatagagatgttgtgatctgttggatatatttggaaaacaaggagtgtttattcataaacaacttacctaaatcaatcaagaaaaattgagtcggattcgaattaaggtttgatgagatcaaaactgaaccatagactcgatatattaaccgatgaacacgatcttccttttatgttgataatgtgttggaacatccatgaggtatacaatgcctctngaatttgtaccgtttgacaccctataagtaatataanatctatatgggttattacttggtatttgattaatataaaat

SEQ ID NO: 288996 - DNA, 391 bp, Glycine max
  unsure (1)..(391): unsure at all n locations
agcttcacatgataatctcctttgtctttctttgtttgccttctaaggcaagagaaaaaggtcaataaagcattcaatgcatcatttaatctccttcgccaactggtcatttggacaagattaagcatctttcttttctctctttcttgtacaccaaatcttgtggcagatcgaggacatgtttcctttgtgttagaaaagatattgatattctttcttgttcacatgcatgtcttttgagaggtagtangtgatacttttcattgtcctttctgtctgctctttctcatgaagatcccaagaatataacatattgtatactntataaataatcctgcatttagcatagaatatgttntaaacttaagtntggtaaataatgatatataat

SEQ ID NO: 288997 - DNA, 455 bp, Glycine max
  unsure (1)..(455): unsure at all n locations
tatcgtaatttattacaccaattattttgaggcaatgattgattctttcaggagtctctactattatcaattacgaggtgatatgatcgattacttctcttttaaaagtgtttcagaagtgattaagaacactttaattgattacatcaagaatctaatcgatttcattgttcttgatagctttgcagtttttgggaagaatactttattcaattgaaatgataatataattgatcacattgtatatttaattgattaaagatggttataactgttttctctataaatagccaccttgtgttctcacttctaataagttctaacaacttttgaatgagctagaattacgagctgataataatgatacaaaaaaaaagaagaanaagtgcttagaaatattgtgaatcataacttctaatattggattatgaagatcagattatngaaaataagtt

SEQ ID NO: 288998 - DNA, 408 bp, Glycine max
  unsure (1)..(408): unsure at all n locations
agcttatatgccattcggaataagggctcgtgtctgtgttggacaacacttagccatgacagaactgaaggtgattttgtctctcattctgttgaagtttcacttctctctctcattaagttactgccattcacctgccttccgtttggttatagaacctggccagggagttgttcttaagatgacaagaatttaagcaacaatgtaacagatgaatgatgaaaacatgcaggtaatgggatggttgatatagtcataagacatcatttctctagctgatgaaatgctaataagttttttttttatccaaattagataataatattttttttttatgaaaggaagatattctcatacttcgaagttatgagacgaagatgatcaannattatcatttgatgaaatttt

SEQ ID NO: 288999 - DNA, 450 bp, Glycine max
  unsure (1)..(450): unsure at all n locations
cttctccaccacgttgaagaccgngacatctctctttttcttttccatcgccaccttacctaggtacgttttggcaaagctttggtgttctattgaatacttangtcaacttggggaactcatggttaacccaaggaccttttttggtttctactgcaaggaatggggaacttgtaatgacctgaggtacgtttgttgtcgtggtcactggtgctgaaaggctctcattntgattgaggcaagtcgtgctcactttgtagttctttgaatgcttaatgtctgttgtanaactanggtagcatagtgtagtgtagtgtagtgttcttcattntgtttgaggtagcgtagttaacttgtatgttcattctgtntcatgtacattgttacaaacctgcatttacggannaatagttaacttgtatgaactntcttctttntctatacatgtct

SEQ ID NO: 289000 - DNA, 378 bp, Glycine max
  unsure (1)..(378): unsure at all n locations
agcttgtatgatngatggctgaggggaagcgggcgcaagatntcgtgtgtgggttggcgccgaggattaagagggttgcagagcgcgctgatgagcgagcgcgtaagatgaagaagcatcatggcgttaagttcagttggattttcaataaagaattgcttttgtgaaatttcagttaagacttaagagataagagatagaggtcaacgtgagtcaacaggtttttggctttgtgactattttgagtcttgtttgtacgtggcattntgagtacgaataatgaacaatntaacatggattgcgtgtaatggacattgttggatccatggttgttgttctggtggatacaaaaccagtaggaactttttgttgaacgtt

SEQ ID NO: 289001 - DNA, 443 bp, Glycine max
  unsure (1)..(443): unsure at all n locations
taagctccttcaactgcacaaggctcttaatatcttaagagtatccttgctgaaccttcacccgacgaagacactgacanaaacttatcttctccttcttggacaaagtatggcatgctgggggcaagtaaattttcttcccatcagaccttggatgcaactgtgatcgtatacccatatcagctagatcttgacgggtattcaagccatccttcgtcttgccttgaatgttaaggagcgtcccaatcacactgtcacaaacatttttctccacatgcataacatcaatacaatgtctaacgtcaatatcacaccagtacggaagatcaaagaaaatggatcttttcttcatatgcaactctgacttttatccttcttttgggtcttcccaaatatagtattcatgtgttgaacccgctcatataccttctcaccagtcaatg

SEQ ID NO: 289002 - DNA, 376 bp, Glycine max
  unsure (1)..(376): unsure at all n locations
agcttctcaacctgtccaataagcaaatcttcatatccagagatgtaaaattctttgagaatatattccctttcaaaaaaccagcaatccaacaacagtgacagagagttatttcacccctatgccacccctaatctcatcacctccaataactcagatgacacatatatcacatccatcacagacacaccacaacatactccttaacctgctcagttagatcctactacaaccatagaacctgatattcctattgaagaacccttacaaaggtctacaagagttcanacactccaagatatctcactgattatcactgctacaatgtgaccaacacanataaagtcacctaccctatacaacatcatttagacta

SEQ ID NO: 289003 - DNA, 451 bp, Glycine max
tcttccggaagacaatggaattcttccggaagaatattcttccggaaacattccggatgacgttcttccggaagttgtctgtgagtacttccggaagacacaaattattcttccggaagaagattcttccggaaactttccgaaaaaattatttccggaacttttctgggagaaccttcttccggaagaataattgctgaagggcagtttcgccacttcactgtttgctgggtgccccagcaataatgctgggtgcacgtagcaactccctactttgttctgtcaattggtaatacattctctattcttttctgttctcacaacgggtcgtggacttcctctgctggctgttgtgtgtcctaagtccgtattctgttttacagcctacccttttggttcatcctattccttgggttttgttctaataaggttttctttgggttaatacaat

SEQ ID NO: 289004 - DNA, 345 bp, Glycine max
  unsure (1)..(345): unsure at all n locations
agcttttacacctttaatcaagcttagttcaactgcaaccatcagaacgaaaccctattctattacccggattatcatacacaatctcaaaggttttttgttggacgttcccaaatatggttatttgactatcatctttattgtgaataaatgccaaacaagactgtttatcatcgaactcatagagtacccctggcgggtgtaagtccactgtgacgccaggaaagacgaatgacatttcaggaatnggataatgatatccagtaagatcataacacgtgtcaaatacattgtgcgaggnggcagtgggatagttggacaaacgctgctgaaatactgaacgga

SEQ ID NO: 289005 - DNA, 342 bp, Glycine max
  unsure (1)..(342): unsure at all n locations
agcttgttgatgctcttaactaaataattgcttattatgcatgcagtcagctcttcctccgcagcagattgcttggtgtggaatggatgctgtgctgctgtactgggatgatatgcttttaatgatgagtcctgagggagagccagttcactacctttttgatgaaccaataattcttatacctgagtgtgatggagtaaggatattgtccaatactacaatggaatttctacagcgggtgcctgattccaccgtttcaatcttcacaattggaagtacatcacctgctgctttactatatgatgccttggatcattntgatagacgaagtgccaaggtaga

SEQ ID NO: 289006 - DNA, 452 bp, Glycine max
  unsure (1)..(452): unsure at all n locations
tgttcatccacctactactatcgtacaaggcacaaccactctttgttgtggtagtcattacactcaacgcttggcccctctaccactatagattgtctttatttttcataagtgtgactcttgatctagtttcaatttctccatgattaaaggcatttctttatgttattgttgtttctttcattttctttgttgataggcttcaaaaaggaacacaatgacctagtgtcttgaccaggttgatcactggtcagatttttaaaactatggttttaggttttggtttgggataaaaggagaaaatttctcctattggatcatactcaagggtcactaaagagttcacaggaaagtctttccatcacaaaacaaggctataacatgcatatnttaacctatttaatttattaagacccaatgtaaaactcatacccacatgtgctataatacta

SEQ ID NO: 289007 - DNA, 396 bp, Glycine max
  unsure (1)..(396): unsure at all n locations
agcttgtggactataccttcgaccgaacacggccgtgtttctgtctaggcccagattcaaggcgggctgcagcaccggctccgcttccctaactgtactggaggcggttgcggtggctntatcctctatggttctctggagttttaacatgacctccgagatggaagccatttgatctttcaaggccgatagatcggccttcatctgttcctgcacgccctcttcattatccatttttctggatcgagtgttataggggtgccttggtgttttcttagttatgatgaaactcctaaagaaataaacaacggtgagtatgccaccaaaacatgagtatgcaaatggatgatcggagcacttggatccaccccaagattnttagataacgtaatgagt

SEQ ID NO: 289008 - DNA, 434 bp, Glycine max
  unsure (1)..(434): unsure at all n locations
taactcatccaaacatggcaagttcaacatgctttcaacttatttcttcacaaataactatcatgaagcagaaacctagcaaaactacccatcatatctcccaaaacccaatacccacgaaaatcaagtgagaaagaagtctacccaaacctgaaatttcgaggtcccacacatagagatgcgcttcatgactccgaaaatgcctttctttcgcgatttggagcagaaatgggcaccaaaggttggagctttaatggagtttcaatggaggatgaagaagaagacaatggcaacgtgagagagagagaaaagagctttctgaaattttctttggctgagtgaggagagagaaaacagctctctggttaaaaagaanagctttttctcttttctattattntaatttaacgtatgccacatgtctccatttgagt

SEQ ID NO: 289009 - DNA, 300 bp, Glycine max
agctttgttcgaggtacttacccgttgaagatcgaagaacgatgaagaacgaatgatcaacgtcgaagaacgggtgaaatctttgcgacatttctcacggaaaacgttacggatacgtttcggaagcgcctcggcttagagtttcttcacggaaacaatttttccaagcacattcgatagagaaagaagtgcctaatgtgctgactccttccttcttgccttcctcccctatttatagcacaataggggaggtggttgcctgccagctcgcccaggcgagctcagctcgcccaggcgagc

SEQ ID NO: 289010 - DNA, 296 bp, Glycine max
tcatgatgaatcaagattgattcaaagagttttgatgatttcaaagatgatgacaaagagctcaatagtcaagagcacttcatgataaaaaagatgatgatctcaagaatcaaaaaatgagttcacgattgaatcaagaacacttcaaggttcaaatggaaatttgatttccagaatcaagaattaagtttcaagattcaagttccaagaatcaatatcaagattcaagaatcaagagaagacttaatcaagatacgtattaaatagcttcttcaaaaactgagtagcacatgaat

SEQ ID NO: 289011 - DNA, 399 bp, Glycine max
  unsure (1)..(399): unsure at all n locations
agcttcttatccaaagctcatcttggtggtgaagctccttcttccatggcttattccctaatggatggcgcctcctctcacctcttctcctttgtcttccgctgcatctccatggtggaaaatcactattaaaggacctcattgaagctcanagatccaacctccatagaaaccccacaagcaagctttcatcataaccactctatttcccctaccagagatatccaacttggtcactgcacttcccatgtacatacacaacatacatcatcacaatgacattatcaacatcaacaacatctcatctcaatgtcattatcatcatcaacatgatcccatctcaatgtcattctcaacatcaacatcatctcatctcaatgacattatcaacatcaacat

SEQ ID NO: 289012 - DNA, 375 bp, Glycine max
  unsure (1)..(375): unsure at all n locations
tgcatgattcacattctccncctttgtcaagcanattctttctgatatcatcaaaacctgcatgatttacacaattcccagtaatttatacaagtttgtatgttcaagctgtcagcaccagcgaattcaacctagaaatcaagaatagtggttatgttgcttaaggcttggatagttacaatttgtgtttgcttatgctcaatgatcttgaataacaaaattcaagagaacttaagacttattntgattcacaaatccagccacaactcagcaccacaactcaacttcatcataggaatcatgtaggaaacttagaatacaaaaaaaagagttcaacaacaagactacttctaggaatcgatttagaacatgtta

SEQ ID NO: 289013 - DNA, 410 bp, Glycine max
  unsure (1)..(410): unsure at all n locations
agcttgtaagcatgtaacccaccatcttctcatagtagaacacaagtaatgtgtctactattattgctatcattntcctttccatcattgggggcactacttgagataccagaacccttcacctttgggcatatactttgaaagattcatgctctctcttacacatgttctatagctncattctatccaaaaccatatcagaattgtactaatattgcctatcgaaggcaaccataaggtccttccaggaatggaccccggaagattccagaataatataccatgtgatggctgcccaataagactttcctacaagatatgcatcaacaattttcatcttttgcgtatgcccccattttcctacaatacatctatacgtgattcttgaggccagaatccctttgtactta

SEQ ID NO: 289014 - DNA, 458 bp, Glycine max
tcagtgtcacaagtttccgaccacgaccatggtggagttcaacacaattgtagtgtgttttctggctgatatctttaggaagctataaataggggttgttttctgtatctttgaaatcttttacctaattacgaatttaagagttttgaagcgtggataccaccatgaggatgaattatggtcatcattcctaccttgccggtatgtctatgctaatttcatatatgtttttgagttgtgctttgatcatgagcgaccagtcaccatagtccaagggttatgatgtaactatccaatggtatccctttctctgttcttaatgaaattcctcaatcttttatgttaactaattctcttctttattcttattgtttaattgcgaattagtcaatcctaagcttaattgaatgtattgtggtgatgatcttgtatgtcgcgtagacctatgtagagaatgt

SEQ ID NO: 289015 - DNA, 279 bp, Glycine max
  unsure (1)..(279): unsure at all n locations
cgcgatatgcgaggatgatattccgagtactttggatttggtacgaccatgccctcttgattccactgggaaattggcgagtggaggaacgcccccgcatttacgcaacgagcataatgtaaacctttacgagtttaaaagctctatagttgggcctaggctttagaggtnttccttttgtaaggctttgtgtcttttgtctttgaatttataatacaaagatctntcttcatctgttcctggtctctacccattctcattcatttgcatggttacttc

SEQ ID NO: 289016 - DNA, 435 bp, Glycine max
  unsure (1)..(435): unsure at all n locations
tctanactntgtacaagaatgaagctctgataccacttgttagtctagtggcctcagatatcttaagaagggggggttgaattaagatattccaaacttttctcctaattaaaaatctatcttactttttacttaagttatgaattcccttaatgacaatcttcttaaatattaattcaaatgaagcaacttgaattatgaatataaagcaataataaataaaggagattaagggaagagaaaatgcaaactcagttttatactggttcggccacacccttgtgcctacgtccagtccccaagcaacccgcttgagagttccactaacttgtaaattccttttacaagttctaaacacacaangacaacccttcctttgtgtttagagattctntacaacaagagactcacagtctcttaatcccttagagaatg

SEQ ID NO: 289017 - DNA, 366 bp, Glycine max
  unsure (1)..(366): unsure at all n locations
caagcttatcctgatcgtatgcgatagctnatcagggctaagcggaccctatagtcgccaagcgtaattccttacgaccataactaaggtcgataaagctaagcgccaatcatggcagcttaacgaaattcattgcggaaatatcagcgctaaagagagaacctctcactaagcgcatgctcctctgtatttaagatgcatcaattaagctaagctggccaaaaccaggcttagcgagagttgcagcttttctaatctgcaaaccttgctaagcggacttactcgcatgctaagccgagtatctattcaaaaaaataaaaataaaatatatttgaattgaaacgtcagctaagcgcatgttcgcta

SEQ ID NO: 289018 - DNA, 456 bp, Glycine max
  unsure (1)..(456): unsure at all n locations
tccnncgaaaagataatgttttaggggaataacacagccatattcttgtctttatgaaacacctaaattagtgttacctatgagctgccatatttgatattatcccagtttccgaagctgnttgttccatacctcctctgtgattgttcagcatgatgagaatttgcaaggcttgtctaatcatgaccacacttgaatgtaatctccattatccttctaatggcttttgacaagtctaaccgctgctgagggttgctttcagtgcaagcagcaccaatgtggaggaagtgctccatctcagcaagccaattcctagagcctgcaattttaggatcaagcacttctgattcccttccctcagagattgcagttttcacccattgcaccacatcagccctaccttttccattgctgacatactgagaaaggaacctcgctgcaatatctcaatatgac

SEQ ID NO: 289019 - DNA, 384 bp, Glycine max
agctttatactaaatattttaactaaaatgctgaatcttacaaattctagcttcatctaatcatcattaaaagttaatcagtggtgcaactagctaccccctgttaaaataattgaccatgtgtatatgttctatgtgtcctagtataccaaacaacaggaatggtgaaaatggatataagagcattcctctattgcataagagcattgactgcagtctatgacaatgactttccctttgaagctataagaatttggagcttttcaagatcaaagttgggtagtgcattgagcgcagcctgtggcaatgaatttccctttcaagaattcatgtgcaaatattgataacacataacctatgcaccctaccatttagttacaatga

SEQ ID NO: 289020 - DNA, 194 bp, Glycine max
aggacccagcaccacgaagaaccgaaaaagcaagccaaagccaacaggggcagagcagcgcaagagcacgcccaacacggaggccagacaagccccaatggaaagagcaccacacgcaagggaggaacaggagccagcgagaaaagaacggcagcgcaaaaaaacgctccgaaacaaagaagaacccaggggga

SEQ ID NO: 289021 - DNA, 390 bp, Glycine max
gttactcccatcctcgaaagtagcagagaggaggagccacaagaagacgttcatggacttcgccaaaacaacgatcacagcagagccctccatggagaaactgcaaagaaaagaaagggaacgatatccaacctgattctgaaacagaggaagagcgcgtgagagggagaagtagtaagcggagaaaaccacgcgtcagtgggaaacaggaagagttggacttctcatcgactaaatacatataagaaagacgaaacacagtctctacctaacaaaaatcaaggaagcagccaagaaacgacggcactccaaagatagaaatcagaaccataaagaaaagctggccatgtcacggaccgaactataggaatacctgcaaatggtccaacc

SEQ ID NO: 289022 - DNA, 427 bp, Glycine max
ttgcggatttggacttcgccggcagaaggatcaattcgttcttaaaagaggcaaatttaatgatggcacttgtacgaatgataaaactggtgcatatgaagagggtgaaaataaaggagaaacccatgctgcgactgtcattcctacatggccaaacttcccaccaacccaacaatgtcattactcagccaataacaaaccttctccttacccaccacccagttatccataaaggccatccctaaatcaaccacaaagcctgtctaccgcacttccaatgacgaacaccaccgttagcaaaaccaaaaacaccaaccaagaaatgaattttgcagcgagaaagcctgtataattcaccccaattacagtgacctatgctgacttgctcccatatctacttgataattcaatgggagccataacccta

SEQ ID NO: 289023 - DNA, 499 bp, Glycine max
  unsure (1)..(499): unsure at all n locations
cgagctgccattgatgcattgttgangccttggacaccnttgaggcgtctacgaccgaatgccgctcggatcctggagatcctatccagcagttctgcaagcttgttggcttttacaagctggactcaatctcgtatcgttgatgtcattgggagtgtcctgtgaactggattcctactaccacccgcataaccgtgatataaaatcacaaggaggagtcgattcctactcccgtgtcaaaccactggagaaatgcacttactatgtgatagttatcgcacggaccatcgggattgcatgctgggtgtttcttcctaccatttccttgatgggctatatgggtccctgcaactcactgttgcacttggggatagagccagtcttgccttacttgcaccgatgacacttattatatgcgatgacgcgatcttgccgagcattaccaatattactctaatctgtaaaagacattaagatccgcgaagtaataaatacattn

SEQ ID NO: 289024 - DNA, 410 bp, Glycine max
  unsure (1)..(410): unsure at all n locations
tcanatgtcaatagcaaatgactgattttgtcaaattagttatttatatctgccgcatgagaacaattaataatttccattntttttgtctctagtgatactgattacttactgtgtgtaatataaattatgtaaaattaagtctatgtaaaattacgatattattaatatttttaggacattaattacaaaattaaaaaaatatatttattatgaaaattataggaaagtataaaaaagttataaacagcataatttatgcattttaataaaaatatttatttttttaattctgtaaccaatgtccttgaaggaattgattagtatcggcttaaaatcaagttagtaaacactcatctaaacacattatcaacttttcttgatgataaaagtctattttggatgtgaat

SEQ ID NO: 289025 - DNA, 369 bp, Glycine max
tgttgcaagcttgttattggttactctaaattatcatttcattaccgtacataaagtaaacatatttaataaaaacgtgttaaataaaatcttcatatattgtaagcgtttgagacaaccagtagttgcaatatttaaaaggatattgaatcttatttgatattagtgaaataaataagctttacaatgagcttattaagttaacattcatcatacataaatgttattagaatacttaaaaattataaaaagtgtattaatcagatttataagattaatcaaacatgtgccattttcaacgcgagtgctaaaatatatgatggaaaatggatcctcttcaagtctccatgttctacctctgcaacagga

SEQ ID NO: 289026 - DNA, 422 bp, Glycine max
  unsure (1)..(422): unsure at all n locations
ntctctcttatataatggaatttgcaagacaatgactgctttttcaaggtntgaatagcattccgtggacaagtaaggataaaaatttaaatcatcanattcaacattgcttgatagaggtttgtcttgaagtttatttttaaccgcacggttctcatgcaaccccaaagtttcctccttcgatccaacatggaaagctttcggagttttggaaccatctagttcactcaaagactntttttcgcacgaaacactctgccttgattgtgtaaaatcatacaacacaaattctgtcaccatagagttgtcaaattctttgtcttctagttcagaacataaattacaggatactagcatctgtgctactattgagggatctttatcaaaatcatgggatcccaacccattgacattgctcttct

SEQ ID NO: 289027 - DNA, 338 bp, Glycine max
ggcaattcactcgtcccgggatctctaagcacctgcatgctgcacttttcaatatgatgaggagttagtattgcaacataaaaatgaacgattaaatagatatagtagaaaacctcaagtcacatgtatggtcataggagcataatattctagagagcaaactatttttggaaacaaaactaacctaaagttatttccacataaccgaaataaatggaggattgtgaaccagaaaaacatattggaaaattggttacttggtaaatccaccttatatacaagcctaattgatgctgataccactattgaccatactatttgccatgttcaatatattg

SEQ ID NO: 289028 - DNA, 399 bp, Glycine max
  unsure (1)..(399): unsure at all n locations
ccctcgaagaggatgctntaatggaggaaaagaaagagagaagtgggagcacgaaattgaaggaataaaagagggagagaagtggaactttgaagtgtgtctcataagactttcattcatcaaagttacaacaagtgttacacatgcttctatttatagactacgtagcttccttgagaagctntcttaagaaaacttccttgagaagcttctttgagaaaacttccttgagaagctagagcttagctacatacacccatctaaaaactaagctcacctccttgagaagcttccttgagaagctagagcttagctacacacacccatctaaaaactaagctcacctccttgacaaaatacatgaaaatacgaaaaaaagtccctactacatagactact

SEQ ID NO: 289029 - DNA, 403 bp, Glycine max
  unsure (1)..(403): unsure at all n locations
agcttctccttccttttcctataaataggggaaggagggaagaacaaaaatgttcaaccctcctagtatctgagattcacttaaaattagtgagaaaaattgtttccgtgaagaaaatccaagccgaggcacttccgtaacgcttctgtgacgtttccgtgggtgattttgcaaagattttcaaccgttcttcgtcgttcttcattcgttctttgtcgttcttcggtgttcaaccggtaagttcctgaaatcgaacttttcaattcattctatgtacccttagtggtcctcattggtttcgtgtgctttntatttcatttcatttactttccatacgcccttttgacgtgctttagtcatttatttaagtcattttctcgcctaataacaaataaagtaaatt

SEQ ID NO: 289030 - DNA, 383 bp, Glycine max
acatacacagccacacacccacacacacacagagagaaacacacacacacactgaaacacacacgcacacacagaaacacacacgcacacacagacacaggcacagacccacacacacacacacacagaaacacgtacagacagcgagacacgcgcacacagaaacacacacgcacacgcactgactgaacacacacacacacacacagagaaacacacacacacacacactgagcgaaacacacacacgcaggaacacacacacacgcaaactgactgaaacacacacacacacgcacacacacacaggaacacactgacggaaacacgcacacacacactgaccgaaacacaaacactcgcacacacacagaaacacacac

SEQ ID NO: 289031 - DNA, 368 bp, Glycine max
agcttttacaagctggaatcattcatcctatctctgacagccaatgggtgagtcctgttcaagtagtcccgaagaaaaccagcctaaccgtgataaaaaattacaatgaggagttgattcctactcgggtgcagaacagttggagagtctgcatcgactatatgaggctgaaccaaggtaccaactataacgcctggcaagtaaatctcactactatttccttgatggcttatctggttatatgcaaatcactattgctcatgaggataaagaaaataccacattcacctgccccttcggcactctttcctatatgatgatgcctttcagcctgtgcaatgcccttattaccttctaactgtgcatga

SEQ ID NO: 289032 - DNA, 411 bp, Glycine max
  unsure (1)..(411): unsure at all n locations
ntacttctacaattgtaagtcacttgcaattaatatctttaattatntatgtttattgggtggttgactgaacaaataaatgtgttctgtataggattcattggaagagcaagcgtcacagggttcctttgtcccccatggacgtcaggatatctggactgctgccattgggcgaccagaacaccctggtcgtgtgcgtactgttggacccagtgtgacaatcaagtaatactttggaatagctccacgaacctcctaaacttcttcctttatggctcccaaagaactagagcagttgactcaacagatcagggactagttggaggagttgatcacagannaagtgactcaacagctgatgttatccttcagtcagatgcagtcccagcttcagtcatagatgcaatcaca

SEQ ID NO: 289033 - DNA, 394 bp, Glycine max
  unsure (1)..(394): unsure at all n locations
agctttttacaacttgttgtaatcaattaccacaactctgtaatcgattaaaacaaagagttgttgcctctgaagaaattnttctaacttagaaactttttcttcacacaaaccatgatgatgcatgatgtctgatgcaatgcaaatatcaaatgtactaagatgtcacaaccaagttaacaaccaatacaaatgccactcaagggagttgggcatgtaaaagccaaaacttcttcaaaacttgttcaaacttttccttgagcttcagctntagcctttaagttgtcaccatgttgctccccttatctctaacaatagtttgtcataattaaaaccaacgatgtggatttcataatgttaacccacaaatttagagaactagagtagtagtctc

SEQ ID NO: 289034 - DNA, 389 bp, Glycine max
  unsure (1)..(389): unsure at all n locations
ttctaaagttntatggttttctaaaccttgaaaattgtgctattcatcttttcattcacttctccctttgccaaaaagaattcgccaaggactaaccacctgaattctttttgtgtctctcttctcccttttccaaaaaaacaaaggactaactgcctgaattcttttgtgtctcccttcttccttgtcaaagaattcaaaatgacacagtctgagaattcttttgattcttccctttcccatatacaaaagtgttcaaaggactaaccgcctgagaattcttntgtatccccattcacaaagtatcaaaggtttaaccgcctgagatctttgtcttaacacattgaagggtacatcctttgttgtacaaagagagggtacatctactt

SEQ ID NO: 289035 - DNA, 350 bp, Glycine max
agcttcttcatcagaccacttccagtgtgctggaactacttcacatggacttgatggggcctatgcaagttgaaagccttggaggaaagaggtatgcctatgttgctgtggatgatttctccagatttacctgggtcaactttatcagagaaaaatcagacacctttgaagtattcaaggagttgagtctaagacttctaagagaaaaagactgtgtcctcaagagaatcaggagtgaccatggcagatagtttgaaaacagcaggtttactgaattctgcacatctgaaggcatcactcatgagttctctgcagccattacaccacaacagaatggcatagttgagagg

SEQ ID NO: 289036 - DNA, 425 bp, Glycine max
  unsure (1)..(425): unsure at all n locations
tggactatatcccaccatatgataccttgtgcatgtaatctatgattcgctatctatccgtacaataatgtcgttcacacaaatatgggagctatggaaagatattcacttagtatatgacaaacaattaatccatttattttgaaacttccacggcaccaggagatgagatttgaaaatttgtgccaatgacaatgagtcacctttcaaccataattgatccggacctttgccttgtgctatttcaatagctaaaaatccaacttgcaactcagcatgaaaggcaattgaaatatccaaagagtgagagaaacaacccaaaatagcacccctagaattacgaataattcccccactagctgaaggccccagacaanctattgttgcaccatcaatgttgcacttaatccatcccatttgagtag

SEQ ID NO: 289037 - DNA, 409 bp, Glycine max
  unsure (1)..(409): unsure at all n locations
agcttgtatgattatggggtacccatcacatgtggtactaggtggcggtcgggcgatggtgcacaacaagttttccacatccgcaaatcgcgcataaacccaccattcccttgtgcccacctccaactgagctcacgtactcccacgtagcccatatcctcgtttctctcaacaccgggtccccatcaatccttccaagcttccccaacatccaggtaattcaacatccaaatcatcacaaactaacaaaccaaggcaaacagggcaaaggaagaaaactcttgccaaaactcaaaccaaaatcatagctttttctcacttaaagaccccagtaacatttctttcgttccaatttcgtaacccgtggatcgactcanaaagttactggaagctctatacataacctaca

SEQ ID NO: 289038 - DNA, 441 bp, Glycine max
tgagaacatagcttcaaaacagtaacatctccacgcttcataacatcagcacgataagcgtagaaacttggtgacaacttttcgcataaaagccaaatacttttactgtttttttttctttttgctgtttgaatctgttgaaattttttctatcaacagtattcaaaacttactcatgtctactgcaaaaaatgtttctcgcaagctgtttgctcgaaaaccccaaaagactggccgaaaatgtgttgcaagctcttaatgaaatggatcacataaccgtaccaacacaacaaattcctctatcaacgcatcattttccacagccactggacaatgtcaatattgtcatcggtcatagggaaggatgcggacttcattgacgaagaaggcaacacgacgcttgggagttccaccgcctccggctcaaccctgtggtgaaac

SEQ ID NO: 289039 - DNA, 338 bp, Glycine max
  unsure (1)..(338): unsure at all n locations
agcttatggatggaatacttacttgttggtgatgaacaaaagcgcaaaacggaatcaaaaatgcgaaaaaggatgaccctagggctgcaaattcgtcaatcccgtgggtatggcttttgaaagcggngaaaagaggtttttgaatgtaaaaacgccccccctttcgtcattnttataatttggtgcaggggtggcttcgcccagcgagcccagctcgcccaggcgagctaacctgcacttgnntgttnttgcttactcgtgttgttgatttgggaggaaattaaccatttcccctcccttctcatgaaataacatttcgcctaacttggacttactta

SEQ ID NO: 289040 - DNA, 434 bp, Glycine max
  unsure (1)..(434): unsure at all n locations
aatactaagcttctatccaggctcatcttggtggtgaagctccttcttccattgtttattccctagtggatggcacctcctctcacctcttctcctttgtcttccgctgcatctccatggtggaaaatcaccattaaaggacctcattgaagctcaaagatccagcctccatagaagccccacaagcaagcttccattaagtgataatcagagcacaagagcttcaagtaggtgctccttaaacctccattaatttttggctttaccttctcttccattgttgtttcttcattnttcctccatgtatctcctcacatgtcttgtgctaaatgttgttaacatgattctntagagtttccaccgattaaacttgctatagaagctagaattgattntctatggttcaaatttcttgttcttgttcttgaaccatg

SEQ ID NO: 289041 - DNA, 358 bp, Glycine max
agctttatgttgctcattgactccagattgctacaaagaaggacatagatctgtatggtgatctgcagaagaacatagaccacagactcttgccacaggtgcatatttctgattcatggcaagctgagttactaggttaaccaaggcatcaagtttttcctcaagctttatattctcagcagatgaagatgaatccatggccacctcatggactcctctaaagacaatagcatcatttcttgcactgaattgtgcgagttggaaccatcttctcatcaaattcttacctcagcggagtcgtatcaccaaagctccccattgaagcatcatcatactctctccatgtactaagccctat

SEQ ID NO: 289042 - DNA, 452 bp, Glycine max
  unsure (1)..(452): unsure at all n locations
ccacagcaacacanaatctaggtgtccaaatctcttcaattcaatggcttttctaggtgtgagaggtgaaatntagaatgaggtaaatttgaagcanactctcacctcacacaagtccataacatcaatctaaacttgctcaaactgaatttacaccaaaaattccaccaaatcaaaatttgactcttcaacacccaattttgccctagaaatggctcttggttcactttggtcatttgtttttctctctagctcagcctaacctttctcacatgtcctagatgacatttcaagctagtattaactcactttaacctccatttaccacaaaattcagacttagccttccaactctcagagtctcaccctgtctccactcataacatcacattctcactgtctaaccctaggttagttctacccttcatctctaacgagtttccatcagcaat

SEQ ID NO: 289043 - DNA, 390 bp, Glycine max
taggaccacgacacggcagatcgcggggtaccttactttatttctgcaaatattgggtttgtaagatgttacattggattatgatgcacacatgttcttatgtcatgttaacccagaccatgatgactatatgcagccagacattctagaggttctagtggcatttgatccccctcgacatgcagtggtaagattatttgtgtatctaatgttcgatgaattgctatctattctaaatattgtaataaatgtttcttatgactgtcacatgatgattacaaaggctatgaggcgatcgcagataggttggagtgtgtgctcaatcttatgatggtcactgcaaggacatgattacatgatatcttgcatgattgcctgatgatcgctagg

SEQ ID NO: 289044 - DNA, 403 bp, Glycine max
  unsure (1)..(403): unsure at all n locations
agctttagatcaaggtaaatcaaaatctaggtatccaaaacccatcaatntagtggatnttcaaggtttaagaagtgaaaatgagaattggataattctggggtaaactctcatttcaatcaagtctataacattgatttagacttgctcaaactggttntaaggtgaaaaccccagcccttcaaaattggcccctcaacacccaatttaccctagaaatggctcttttctttcacacttgtcattcctttttctcatttgctctacccaagctttcctacaagtcctaattgacattctaaactangatcaactcactntagactccaatntccactaaccccaaatttggcttttcanaccctcaaaatctcacactgttccactcatatcactaccattc

SEQ ID NO: 289045 - DNA, 448 bp, Glycine max
  unsure (1)..(448): unsure at all n locations
agctttgaaacactctntgctactggtaatcgattacaataaactggtaattgattaccagagagtaaaaactctttggtaaaaggttntgtgaaaaattcatgtgctactcaatgttttgaaaaacttttcagtacttatcttgattgagtcttttcttgattcttgaatcttgagtcttaaatcttgttcttgattattcttgattcttgattcttgaaaacttgaaacttgaaatttctcttgttcttgactcaatcttgaaatcattctcatgggctttgtgtttacaatgtttaattaactatatttagttttaattntgaatatgtgtgattaattggattntgtttgaattgattaatgcttgaattgcttatgttttattgatattagattctgttaaaaaaatatatctatataaaaaatgttttgacatgttaatata

SEQ ID NO: 289046 - DNA, 400 bp, Glycine max
  unsure (1)..(400): unsure at all n locations
agctttatagcagattttagtaatgacccactaacctagaattaaaataacttaatgccattaacctanggaattaaaaaaacttaatggctgagtgtaactgaaattgtggcaaccaaaagtcacccccaacagccaacaagtcagccactcattggtctcccaaaaggctgatgcctaagttgccaattgggcccttattacaacttgaactaaacctaactaaagcccttttagttgattaacccaaaacatatttttggtcagccaactttacaaggattgggccattatttagacaaactaaacactctaaaattgaaacaaagtggtgtcatttagtccttctccatttgggccatgatacaactcacaaccttggactttttctcttgaactt

SEQ ID NO: 289047 - DNA, 286 bp, Glycine max
tctatataagctgaaccattttatcaataaacacatgttgagttttattcagaaaattagaagttatcgcttttatcttaatgagagtgattctcctaaattcttgagtgattcaagaacaccctggctgtatcaaaaggactttcacaacctttggggggtggccttgctggaaaaagtgattcttttcttcctatcatctccacccttggtctttcaaccacaatttcagaaaatccacctctgccaaaattatctcgtgacctaactccatttcaacactcaa

SEQ ID NO: 289048 - DNA, 303 bp, Glycine max
agcttgtacaataatcggtgagagtgtgatcttaaactatgagtgaacgactagctttgagtaatagtctttgcatcaatctctgaattttagaatgaaatgtatgaatgaggacatgatgaaggccatgattgtgtatatacaagtcaattgaccaaaaagcttaccttgaattataattgtatcctttgcaccctttgtgagctaaattacattttcaaaattgaaccctgaacttgaatgaatatctccagataccttgtttagattctacgagagcagatagttcaaggaaaaataccc

SEQ ID NO: 289049 - DNA, 402 bp, Glycine max
  unsure (1)..(402): unsure at all n locations
ntgtgtaattgattacactgatttggtaattgatttccattgattgtttctgaataaatcaaaagatgtaactcttcaaatggtttttggctttttcaaattggttttaagtttttctaaaagtcataactcttctaaatggttctcttgaccaaacatgaagagtctataaaagcaaggctttgttttgcatttttcaatcaatcaatcaatctatctatctatccaatctttgaatctctttgaacttcttcttcttcttcattgtgccaaaaactttttccaaagttttctggttttctaaaccttgaaaacttgtcctattcattgttttcatctattcttcctttgccaaanagaattcgccaaggactaaccgcctgaatttttttgtgtctctct

SEQ ID NO: 289050 - DNA, 288 bp, Glycine max
tgacaattcctgtctcttctttaaacctccaaattccaaatacgaatctattttatcatctcataccaagcacgaagaatcactctccacttatcttgctagactatccacacgtgtggtaacatgtatcctcaccatagatccacgttctacacaagccatgtgttgcgatgtatgtccaaacacagcatgacgcatctttcccttagtccctaatttacagacactcacttttcttgattaacaaaatactctactttagtccggctttattcaacatttttctta

SEQ ID NO: 289051 - DNA, 387 bp, Glycine max
tgttgcacatagttatcaaagtgcgtgatgagtgtttcatattgagcttgagttctgttgtagcctgcattgccaatgtgatctgatttcttcccgtattgattgtgaacaacgagtaatgcagatgcatggccggcgagttcggtcaaatggagcacgtaaatgcatattggagagttctttgttgggttagaggcgtcaaggaggttaatcattggtggcacatttctagggctgtggatgcacaccatgactctgaactctgtgtctgtttgagacatttgaatatctcttcttttgtaagggatgatcccctttgatgtttagtatatagctgatatcccatgtacagttataccatcattagaatgttataatcaccattga

SEQ ID NO: 289052 - DNA, 363 bp, Glycine max
  unsure (1)..(363): unsure at all n locations
taagctttataagtatttaagatctgctggaattcgtgattcctgcgaattntattgtctctcaaattgagcaaatccttgttggactgtntctgggaatatctctgggattggtccaaagaagtcccaccattgcaaaaaccaattgcgaaaattgtaaattgtattggtcttgaaatatatcagccatgaatgcttgaagcgggtattttggtgccaaaacaccttagtccaagcatcaacataatcccaataggtataacctaccggatcaaatggaactganaatctctttcctttngtcaagtccgaaccacagtgtcttggttgaagaacttttagtatttggattgtggagtgggt

SEQ ID NO: 289053 - DNA, 434 bp, Glycine max
  unsure (1)..(434): unsure at all n locations
ntctattctaattntgaaatccatgaaggtaccctaatgtctgaagtttatgggattaagatggtcattgaccaatccctattttttgacttaacaaaattgcctagtgaaggtgtaccttttgagggtgcactgattgatgaatggaaatttgatttctctatgcatgatgtatgccaattggtttgcaccaaccaagcggatatgaccggaaggcttcttgccggttcattggcttttgaaagtcgcatcctccattatcttatagttcgcattttgcttcctagatcttcaaaccttgcctaggtttctgaagaagacctcattgtcatgtgggcctttcataaaggtctacaaattgattgggcacatcttgttagatatcgcatgcataaggcatcgcgattgaatgccccattaccttatcctcatct

SEQ ID NO: 289054 - DNA, 403 bp, Glycine max
  unsure (1)..(403): unsure at all n locations
agcttcttcctttgcacactcattttgctccaaatcgcgaaaggaagccattttcggagtcgtgaagcgcacctctacgttgtgggacttcaaatttcaagtttgggtagacttctttctcacataatttcgtgggtattgggtgtttgggagatatgatgtgtagttttactaggtttatgccttatggtagttatttgtgaaggaatttgttgaaagcatgctaaacttgtcatgtttggtatgagtcaagcttacccattctgttttaaggttttatgatgatgctttgtgatgtttgtgtgctaaaattgctgatggaaaattgatagagatgaanggtagagttaacctanggttaaaaaagtgagaatgtagtgatatgagtgggaaaatgtgatgc

SEQ ID NO: 289055 - DNA, 456 bp, Glycine max
  unsure (1)..(456): unsure at all n locations
tcaagaaaaagatggcctcagcaaattccttatttccagattggtattctatcaatagacctccaatctttaatggagagggttaccactactggaaaacccgaatgcaaatttttatcgaggcaatagatctaaatatctgggaagccattgaaatagggccttatatacccaccacagtagaaagagtttcaatagatggtagttcatcaagtgaaagcataaccatagaaaaacctagagatagatggtctgaagaggatagaaaacgagtacaatacaacctanaagccaaaaacataataacatctgccctaggaatggatgaatatttcagagtttcaaattgcaagagtgctaaggaaatgtgggacactcttcgattaacacatgaaggaactacagatgttaaaagatctaggataaatgcactaactcatgagtatgaattattta

SEQ ID NO: 289056 - DNA, 402 bp, Glycine max
  unsure (1)..(402): unsure at all n locations
agcttcctcgtggcttctttgagaagctttctcaagaggcttctttgagaagctagatccttatctatccacacccctctattaactaaattaacttccttaaaaataattacggatgaaaataacgcaacaaatattcaaacatcaaacataattactaatagtatatagatatatatatatcagggtgttacaactctcccacccttttagaaatttcgtcctcgaaatttaccttactcaaacaaggatgggtgagcttctcacatctgactntctaattcccatgtggcatcttctcctgatgcacctccccagatcaccttgaccaacagaatctctttccctcttaagtgttttggttgcctatcctcgatcctcanatgcaatgtttcatatgtc

SEQ ID NO: 289057 - DNA, 422 bp, Glycine max
  unsure (1)..(422): unsure at all n locations
caaagtaaatcaacattcaaacagcacatattactacagccaagaaaacagggcaaaggcagaatactctgcccaaaacaccaaccaaaatcacagcttttctcacttaaagaccccagtaacaattccttcgatccaattcgttaaccgttggatcgactccaaaattttactggaagtctatagtacataagcctacattntgaccgttgggatctactagcaaacatccagaactcattctgcactactctttccacagccaaccacacacaagcatttttctgcacaaagccaaaatcctgctgcacctattntgacagcaaaattctgcataagtgcagatttcgaaaatcacccttcctctcatccaatcttgcccaaatcaaatcctacaagtcccaaatcatgtatcaatcatg

SEQ ID NO: 289058 - DNA, 390 bp, Glycine max
  unsure (1)..(390): unsure at all n locations
cttgcaagctttttccaacattcattagtccaatacacactcaacaaatagtcatcatccatccataattccgatcattcatgctcaatatgatgcatgcacctgacctcaactctcatatgcaatgtggtaccatcctcaaagaaatagcctaaacgtgtccacacgacactcacacttatgaaaactaggcagtaagtgtcgaggtcacccctgtcgtgcataggcaacgtccctcccctacggggatcagcctgagtctcaagggagttccaaactgagtgacatgtcccctaatacaagtattcctcctcatgagaactacaagtacttactgacaccatttatactatttccatgtcatataaaggatgaaacatgngcaccatc

SEQ ID NO: 289059 - DNA, 454 bp, Glycine max
  unsure (1)..(454): unsure at all n locations
tcgaattaaaagaggcattaatcttgccattcgcgatgcttctgccagcgatccttatgtcgttgtcaacatgggcgatcaggtttgaatcttgcaatttctgagatcatttttttttcttctttgaaggtaaatctgatgaactggggttgttaatttgtgttgagagatggtcgcaaataaaacaaatggtttttctaatcccactatttattgaacaatttctacgagattttttgtggtataattggttttgttaatatatttcttttggaaaaatatatttacacagacccttgtcactcaagttttttgttcgcaggaaaaanaggatgtctggataaatatctttattcgatatatataaactgacataattataatcattagacaagtgaataatgtaccagtgacagtatgtatgatataaattacttgctcccatggtcattgc

SEQ ID NO: 289060 - DNA, 345 bp, Glycine max
  unsure (1)..(345): unsure at all n locations
agctttactaatggatagtaagaaccataaatacctagccccaccagtaggttacaaaatatttataaagtataaaccgtacctatttaaagcctatgaagagagagagtcacacagttttcccatcacaaggtcatgttaaaactcaacatgaaaagatacattccctaagttgatttgtgctctcttttaaactgactactaaattgagagggacttttaaattactgaactattcttcaattaacattaataaaggatccttggttnctttgtagcagggtcctcttgctgctccggttcttcaacacctgacanaagcagatttaagcaagatgtactttg

SEQ ID NO: 289061 - DNA, 452 bp, Glycine max
  unsure (1)..(452): unsure at all n locations
tcaatcggcatactccacacaaagattntgatgggattattatacagcatactccacacaaacagattgtgaagacaaaaattgngcaagtttctgcagatcgaatgttatgagctgataggaccattttatctggcttagtgagagaggtcttatacattataccacaattntaaaacaataatcacaggaaatagtaagttataatataaaaagaataattttttcagtaacatctggaaattntgttttggctagttggaattctgatggcagattgaaaacaaggctctcttccaaggtcttctgaaccttcattccaaatnttttaacctttatcattnntatttttgttgttgcaatntgnggatttctctgtcaatccaagctatccatagtctccaaacttattgattagcagtggttaacacattggttctgtttctcaagtg

SEQ ID NO: 289062 - DNA, 402 bp, Glycine max
  unsure (1)..(402): unsure at all n locations
agcttctaagcataatattgtttgacgacatcagagttcacgggtgaaggtagctcttcgccatccatgttggtaagcaccagggctcctccggagaaagccctcttcacaacaaaaggcccttcgtagttcggggcccatttccctcggtggtccttgacagcatgggacattttctttagcacaaggtctccctcatggaacttgcgcaagcgtactttcttgtcgaacgcgctcttcattctttgctggtacaagcgcccatgactcatggccgttaagcgcttaccctcaatgagggtgagctgatcgtagcgtgtttgagcccactctgattcctttaatccggattctgccaagatccttaatgacgggacttctacctcanatggtaacaccgcc

SEQ ID NO: 289063 - DNA, 390 bp, Glycine max
  unsure (1)..(390): unsure at all n locations
tataatatatcgatacgctcgaaattaaacatcgattactctcagganattcaaatagtcataacttttcacacggatgtccggttcgggcgcataatatgtcgagaagctcgaaattgaacaacggaagatcttgagaaattcaaatagtcataacttttcacacggatgtccgattcaagcttataatatatcgatacgctcgaaattaaacatcggaaactctcgcgaaattcaaatggtcataacttttcacacggatatccgattcgggctcataatatgtccagaagctcgaaattgaactacggaagttcttgagaaattcaagtggtcttaacttttcacacggatgtccgattcaggcacatcacatatcgagacgctcaa

SEQ ID NO: 289064 - DNA, 366 bp, Glycine max
agcttgtgagttacaaagtcttgaataagcaattatgtgagtatttagtattcttgaataagcaaattatgtgagtggtcactctattctaatataaataggggatcatactcttgtatttggtgtgccaaatgaaataaaatctttttcttcttccaacacagtggtatcagagcttgagttctagagtgttgagaaagaaacactttgtgagttgagagagacatactctgtgagttgagagatggcaagcaatggcttaagtatgtttcaattccctcgtcttaccaaagagaattatgataattggtgtcgtcgcatgacagccttgttaggttctcaagatgcatgggagattgtagagaa

SEQ ID NO: 289065 - DNA, 444 bp, Glycine max
  unsure (1)..(444): unsure at all n locations
cttgataccaattgagaagaacatcttcaaaatcacattactagttagttntgtaattggccttattataaacactagaccagaatcccatgctttcaatgtaggacccaagtctcatacctagcaattggatcctacaagagttgcttgattcattattgccgctattgtcactgtagaagcactttctcaccagtcatgccattacagtgtttctaaaggtagccatataatgcttcattttgctattgatacttgtttttattatattgactcatgatgtttacatttaaatgggtgttttgttcctaatttagcattattgttatgataataactatacttcccttggttgtgtctttatttccttccgtttttgcaaaaggaaatcagataagcttagttcaacatcttagatgataaatatacaagccaactactttc

SEQ ID NO: 289066 - DNA, 381 bp, Glycine max
  unsure (1)..(381): unsure at all n locations
agcttataacgcactgaaataaactgagaacaaatttttcatataaataaacaaaggcaaagttcgaataactagttacctggctcactgagcaaacgctgcgtttcctgttgaggtaggagaaaaaatagtgttcaaaacattcagaaagatcaaaattaaaaaaaaaacaattgaaaaacccagaatcgcagttcatttccaacgaagatcaaaagcaaaagggtagctgaatccccaaattgtaacaccaaaagacgcttcaatttttattttatttttataagttttccttcatgtggcaactgaatttaaacatagggcaatttgngaattcgcacgggaagaagcagaaatccataagcgggtttcgagtttctt

SEQ ID NO: 289067 - DNA, 411 bp, Glycine max
  unsure (1)..(411): unsure at all n locations
taatctaatgtattcaaataatataaaatttgtgaatattttctttggtatggtatccatgcgacaattagatgtcaactttcacggttcanagtatacgtgtcgattatatagaagtccctatgacacttatcatgatgtgatgtttagtagagatttgattaagttacaaatcctatatattatatattaatacattaattacattaagtaacataaataaattgcattaattacattaatttatggaaattaattatcattttaatgtaattacattaattaataatataaaatttgtgaataccttttgcaatgctactcttcaagggcattggatagaagactccaagtatattgagtcagagatgcaagagaaagtcctanggttctcatgaatcttggttatta

SEQ ID NO: 289068 - DNA, 368 bp, Glycine max
taagcttttgagggtatttgtgggcaaagttcgcattacgtcataatcagatcggactaacaatgtctgtgcttaatttggactcacaatttcaaacccatatcctgtgttttattgagaaaattcgagttgggccagctagtccaacccattgtgtcacctttactctagagtatgctagttttacttatgaaatgataaatatatttatgtttgatccttcatattcaaattcgttccttgggaggttcaaatatgagtgtaaacaaaacttgttgattataatacttggattagcgaagactcagtcggcatcatagtcctatatgtcaattcaccagcatgtaattatgacactctctatccta

SEQ ID NO: 289069 - DNA, 343 bp, Glycine max
  unsure (1)..(343): unsure at all n locations
tgtcatctctattaagtccctaattnttgtttgatctgtttngagtgtgagatacaattgatttctgatttctgaacggcaatntataagagaaggtatatcgcgatctttcaaaggattgcaggcacatatattgaaaactgttctcagctctgcattacttctgatggtgaaggagaagattgcaaagtccacatggattctaatcctcgtgattggaagatacctgtctgtgaattcccccaaattgaaggcagtttgaatgtgtgattattatatattctttaaaaataaaattcatcaaagaatgtgctataattgtctgtctgctatggaggataat

SEQ ID NO: 289070 - DNA, 387 bp, Glycine max
  unsure (1)..(387): unsure at all n locations
agcttgaagatagagacttctcaagctatntatcttctctctcagagaggcttactcaagcttgaggatagaaacttctcaagctatttatcttctctctcagagaggctctctacttggattgactcactctacggtgactcactcaagcttgaggataaagacttcccaagctatttatcttctctcttagagaggctttttctcactctaagaaatggattcactcttgcttggatggataggaatgaaggctcctacccttattatactactccacctccacaatgaatggtggagatacttgtatcctanggtggagactaattctctagaatgctcccacattctangagtctctacactcttctactctcttccatactt

SEQ ID NO: 289071 - DNA, 407 bp, Glycine max
  unsure (1)..(407): unsure at all n locations
taattaaaaaaattcatctaaggacttaaacttacttatatgcaaatggttcttcttttttttttacattgttttcctaaattctggttttaattaaggcatccaaatcaaatcaaatcaaattctattttttggtataattacttatctatgtggatgatataatcattgcaacaagtgtaaataatcctgtaatcaacaaagttttccggctcaaattacagcaactattgaaaacataatatactttcttggtaccttgcctattccaccaaggcatagaagaaatatactctaatctttacttgaagaaataggctntatggaacctaatatttaaattgaatgtaattaacgatggtaactagctttgtaccagacatttctcaatatatatagaagacaca

SEQ ID NO: 289072 - DNA, 413 bp, Glycine max
  unsure (1)..(413): unsure at all n locations
agcttgttcttgattnttcctaagttctgtaacaagcttagaacaataaacttggccttctcttaattgtctttgggcttggcgaccacgatcaacaaagtactttcggcacctactatatgttgacttgaccaacgctgttattggaatgctgcgacaatctttcaacaccttattgacacattctgataggttgggtgtcatgtgaccatatcgtcgtccagatgtatcgtaagccatgctccatttttcctttgaaatgcgatcaatccatcttgctatggctggactcagttgacgaaatttttctaagttttgatcaaacacatgcttgcaaggagtgtacgctgcatcnaaatttgtatcatncaaaagtgtacgtagacattcaaactcaaataaattaatgtata

SEQ ID NO: 289073 - DNA, 455 bp, Glycine max
  unsure (1)..(455): unsure at all n locations
tgtatatgtcatagagattntgttttcattgtattatttgtacttgtcggagtatgtgctagggccaccctatgccagtatggacttcgagcatacagtgactgtaacatcccaacaaaatttctagtaaaaatagttgacatttgaaaggtagttaatgttaaagcattttaagtagtggaataattattttgtgcatgtgtgatatccttcaatggataagtgctctagaattttaattctaggcttaagaagatgtgttttaggcctaaaaagccttggacaaaaatttgtcaaccatagtgaaccagtcaaagtaagagaatctcctcatcaagggaatttttttaattatatgattntttaagctaaaaataattntttacgttgataaaattattttaattatagttaagattagttcaaggaaatatcttattanttcatcaataatt

SEQ ID NO: 289074 - DNA, 370 bp, Glycine max
  unsure (1)..(370): unsure at all n locations
acgccatagcagcaaatctggcatttcactaaaaccagctccgggagtcttgagcccaaaatttgcagaaagatgcccaacaaatttcccccacccaaggtaccattagcttgaactcatctaagggatgcaggccccattaactcctctacatgcttgtccgatatgtggtntccatgacttaataagaaacttctcagccattgccttacatatttgctggagaggggggattctatgctactctttctcacagtataaaagctatcagtaccgaatctaaggagcattctgtaattcaagacagatagttaaatacatgaatgttatactggtttatcaacacaagaggagtctctattcataagtt

SEQ ID NO: 289075 - DNA, 453 bp, Glycine max
  unsure (1)..(453): unsure at all n locations
tgagttcaattatcaagctcttgctaatggtgttgcccatcttgctgagcagagaagggcagaaattgaaaaagaaaaattagagaagtcgacggctgccacagcttcttaagcttctgaatgtacattattactgctgcattttttaattctcaagttccctgttacccattctttangagaatcagagggttgcctatatttgaggcatttgtcggctttgtggtcgccagttgttggtctttgatcatgaagagtttgcagttttgaagtgctcggagctctgtgcaccgaagttgccattgtccagagagaggattgcattcgaggaactgtggagtcagcagtttctccaggtcttagttcacagcttattgtttggtgctttggggctattcctttggaggaaagtgcccattcttgccaagactgtgttgtccccttcctcccctt

SEQ ID NO: 289076 - DNA, 291 bp, Glycine max
agcttcttttttagacctcgatcggtcgtccttcctggccgacgccgactggcatttttttcgatcaatatcggtgaataatattttttttgccgaggtgggctaatgttttcctggccgaataaatcggaacatgccagtttcgggcaaaacgaaacatcggttgagctcacacgaaaaaacctaaccgacctacattgtaagttttttatgcaacaccgaaacaagaaaacttcccctgccgtaagaaaaaacattatcggccagcgagcgttttttttttaaaaaaaa

SEQ ID NO: 289077 - DNA, 456 bp, Glycine max
  unsure (1)..(456): unsure at all n locations
atactaagcttcactcgatgtccgattcaggcgcatcatatatcgagattctcgatattgaacaacggaagctctcgagaaattgaaatgatcataacttttcactcagatttacgattcagacgcataatatatcgagacgctcgaaattgaactacggaagctctcgagaaatttaaatgatgataaattctcactcggatgtccaattgaggaacatcagatatcgtgacgctcgaaattaaacaacggaacctctcacgaaattcaaatggtcataacttttcacacggagatccgattcatgcacatcacatatggagacgtccgaaattgaaccacggaagatctcgagaaattcaaatgggcataactnttcactcggatgtncgattcacgcgcatgatatatcgagacgctcaaaattgaacaacggaagctctcgataaattaaat

SEQ ID NO: 289078 - DNA, 338 bp, Glycine max
agcttcttcattcaattttgaccgtcttgatatgtgaagggactcaatcagacatccgagaaaaaaactattgtcgtttgagttggcttaaaaccttcacattcaatttcgagcgtctcgatatgttaagggactcaatcagacatccgagtaaaagttatgggcctttgaattggctcagagcttcaacattcaatatcgagcgtctcgatatggtacgggactcaatcacacatccgagaacaaagttatcgtccgttgagttggctcagagcttcaacattcaatttcgagcgtctccgtatgttaccggacctcatcagacatcccgagaaaaa

SEQ ID NO: 289079 - DNA, 432 bp, Glycine max
  unsure (1)..(432): unsure at all n locations
ntgagccaactcanacgataataactntntactcggatgtctgattgagtcccgtaacatatcgagacgctcgaaattgaatgttgaacctctgagccaattcaaacgacaataacttttttcacggatgtctgattgagtcccgtaacatattgagacgctcgaaattgaatgttgaacctctgagcaaattcaaatgacaataactttttactcggatgtctgattgagtcccgtaacatatcgagacgctcgaaattgaatgttgaagctctgagccaatacaaacgaccataactttttactcggatgtctgattgagtcccgtaacatatcgagacgctcgaaattgaatgttgaagctctgagccaatacaaacgaccataactntttactcggatgtctgattgagtcccgtaacatatcgagac

SEQ ID NO: 289080 - DNA, 351 bp, Glycine max
agcttttttgttcggtgttgccaaaaaatttacaatgtatgtcggctagggtttttcgtgcgagctcaaccgaagctgtgtttcggccgacactggcgtgttcccatgcactcggccaaggaaacattagcccacatcgaaaagaaaaaaaaaacattaatcaccgatattgatcggaaaaaatgctggttgacgtcggccaggaaagatgaccgatcgaggtctaaaaataaaagaatcaccggatgacgccgatcgagcatttcctaattgacatcatccaaatattgttcagggattggatagaaaaaaacatagctgataccagtcgttatgtagtcccgactgaca

SEQ ID NO: 289081 - DNA, 425 bp, Glycine max
tctatataagctgaaccattttatcaataaacacaagttgagttttattcagaaaattagagtttatctcttttatcttagtgagagtgattctcctaaattcttgagtgattcaagaacaccctggctgtatcaaaggactttcacaacctttgtgtgttgccctcgctggaaagagtgattctttccttcctttcatcttcacccttgttctttcaaaccacaattccagaaaatccacctctgcccagaattatctcgtggccataactcccattttacgcactcaaattaagtgattcttgagcctaaattgactttcaaaacgagacctttcacctcgttttggaatcacctcatttggagccctgtagcttcagttattgccatttctatatttctgtccagccaccacttaacctaca

SEQ ID NO: 289082 - DNA, 224 bp, Glycine max
tgctttcaagcttgtttgtggggcttctatggaggctggatctttgagcttcaatgacgtcctttaatggtgattttccaccattgagatgcagcggaagactaacgagatactgtgagaggaggcgccatccaccagggaatatgccttggaagaaggagcttcaccaccaagatgagccttggataagaagcttggagaggatgcttcaatggaggaaaata

SEQ ID NO: 289083 - DNA, 451 bp, Glycine max
  unsure (1)..(451): unsure at all n locations
cttctacaaataaagggcgagtctggggtaagattgaatgaacaaggcgaagattattctatggatgaatactctcctagaacctaagattttgaatcctagagaaaccatgaattatttgcagcctaacccctttacaagcctagatagtccttcggattcattntgtgttcatggctgtatgatatgagaagaaatgcaaaggttggaacttgtgttggctgtttatgatggaataagcctaaacacttgagcttgagtgaaacaatggctgtgaggttttggttgatgatccttccttgatttttgtcatgcttactagcttatttcagctgtgattctaatgcttatgctcctatctttgaaaagttgcatgctcgtgagaagtcattgatttaagcattccatggtattcagttcatatggttgacttcctttatgaatcagacac

SEQ ID NO: 289084 - DNA, 241 bp, Glycine max
tggacgaaaagaaagagggagagaaagagagagacgggagcacgaaattgaaggaagaaaaagggagaaaagttgaactttgaattgtgtctcacaaaactctcattcatcaaagttacaacaagtggtacacatgtttctatttatagattacgtagctttcttgagaagctttcttgagaaaacttccttgagaagctagagcttagctacacacacccctctcataactaagctcacc

SEQ ID NO: 289085 - DNA, 446 bp, Glycine max
  unsure (1)..(446): unsure at all n locations
tcaagctntagtcttcatgttgcttcccttatctctaactgttctcggntagttntaccccaatataagggagttcattagaaacactctgagatagatagatagatatatatagagagagagagagtttccttgtattatgtttttcgttagtaataacatacacaacgtgtgctactctcttcttcttctttgacaatcttcttccttattctgaacttattttctcagtcttaatcacaacaaatatcatgaatgacaaatttgaacctatttaaaaatataaaggaccaatatgaacttaattaaattcataaaagatcaatgtgaattaattnttaaaacataaacttcattntataccacattatcacttttcattccaccctctagcagacataatgactatatgatggaaagaactaanatggatcatttttaaaatt

SEQ ID NO: 289086 - DNA, 403 bp, Glycine max
agcttttctcatagatagcgatggatgtatagtttttgcaaacatgcataagaaaaatgaaacaagaaggaaagagaaagaaagacctcgaacgtcggcatgtatggtcataagaagcataaatcattcgtagagagccaacatatcttttggaaacaagagactgacgctaagagtttattttccagaataaccgagataataatggatggattcattcaaccgatgaaagaacataatttggaaatattgggtctacttgcgtaaatcccaagccttttagtatcacaatgccatatactggatgcttgagtacccacctagctgtagccatgactaattgtgcacgttgtatacaaatcgtcactgttacgcgtgcgttgagaaataatatgaattcacc

SEQ ID NO: 289087 - DNA, 439 bp, Glycine max
  unsure (1)..(439): unsure at all n locations
taattatntgctatagntttttattntgtcaaaatgtttttcatagtttgtgtttgctcaagtgcagagtgctcaagatttctctttccatcattcttgatgagtatgctttaaccaagtagttaagctcgaattagctttaaccaagtagtcgatttcctccgacgaccagctgattctccgtcgccgacaatcgcacatctcgcgaccccggctaacttcctccacaatcgacacgttatacgtgtctccccctacattgatgcacacagtgtggtgaatcgccgggcaccttggcgtgcagatgagtatcctaactcggtctaaccttcgggactcttctgtgtcatcatctacatcaatcatgtctcctattgcggccacaaattgccggaaatatttcttatcccacactacaaggggaataccccagcattga

SEQ ID NO: 289088 - DNA, 398 bp, Glycine max
  unsure (1)..(398): unsure at all n locations
agctttttctattangtgaagacatatgaatgatttatgattntatattatatctctaacatgccccctcatggaagaaaccctttgctcctttgggcttgaagtgtggataatgcagagatctacctactttgttctaaaaattcaattntttattagaagaatgactatatgtgtgcctttgggttaattgtggaacctttatatctatattttagtagttttttttgtccatactactacatttaagtatttttcacatgcaaacctttntgtcccagtgattgtaaattatgaatggtcaaaattaaatctgaaactatgcaatctagtcttctggttacagtttgaattttccgttgccttcatttcagcactacagatcacttggaatcttc

SEQ ID NO: 289089 - DNA, 435 bp, Glycine max
tgtttcagtctcaaataaaccaatgaagtaatattatggttcaatatcatggaagtaagcacattcggtccaccatgaaactttaattgatttagagcaaataactcatgataatatcacccccacacaaatgaatcacgtacgttttctacaagctccaatgccaggtcctttgctgattcaccatcaagataatacactgacccaattaaattgctaaacttatcgacaccttccaggacaagccgaacctacataccattaggattagaaaattttcagaattgcaaaatcaatataacttatagaaacacattactcacttctcgattcaatacacgcatctcagtgaaaaatttagcatcatgtgcaaaaggatcggctgcagtttcagcaacagatgttgaaactgcaagcctttgtgcagatgtaagt

SEQ ID NO: 289090 - DNA, 393 bp, Glycine max
  unsure (1)..(393): unsure at all n locations
agcttgtagctcatgagtaactccaacagcgagaccctggccggagttttgttgagctgttcgataaccttgaattcgctctactaaattatatggaggaactcactggcttcctctagcgacacctcctttttaccatcctttntctccggaagacctttcgccggaatatctttatttgaagcgtggggtgcttcaccatcttgttcctccaccacttttcctttccccttgacgttcgcgggttggactggtaggtccggaggtgcaaacacacgaccgctacgggtcacaccactcagtcccgtgatatttgttaccttagccgacaacgagctgacatcggtggcttcttcttccttctccctcggaggtgtatatctccatgggact

SEQ ID NO: 289091 - DNA, 400 bp, Glycine max
  unsure (1)..(400): unsure at all n locations
tatcgagaccgtgacacctcaccaccttaccttgtacatgttttgcgactctntcttgtctttaacatgttgtattgaataccatgggtgagtttggggaactcgtgttcactgcaaggatctttgtttgtttgtcttgcaaggatttggtttgtggaacttgtgttcgctgcaaggatttggtttgtggaagtcgtggtcactgctaggtctgtttggggtgctcacattgcagtctgtttggggtgctcagtcgtgctcgcagggtctcattntgagtaaggtgattcagattgctagttgtcctttgaatgcttaatggataggtagctaggtgtctattgtaatacgtatagcaccatggcaaatgtaacaatggtctggttnttcttttattggt

SEQ ID NO: 289092 - DNA, 387 bp, Glycine max
  unsure (1)..(387): unsure at all n locations
agctntttatccaaagctcatcttggtggaaaagctctttcttccatggcttattccctagtggatggcgcctcctctcacctcttctcctttgtcttccgctgcatctccatggtggaaaatcaccattaaaggacctcattaaagctcaaagatccagcctccatagaagccccataagcaagcttccatcaatggaatggcagatgcaagtgttaagcctttgctcttcctttccttggctngctctccaaccatcatagtcatgcctatctcattattctttaatantccaaagagntcagtgtctattatggaggtgagatcnttagactctaaaattgatgtgacctttacttgtcatgtctattgagggattcaatactt

SEQ ID NO: 289093 - DNA, 379 bp, Glycine max
tttgcataattggagagttctagagagagaaaggttcttgttccaaagagtttgagagaatttgttgtgtgaagatctgcagagaccagagctggaagaagaagccgtccagagagcttgagatgagtttgtgagtgattgtgaggtcctagaggtggaggagacatccccactacttgtatttctgcaatctttcatctttctcttctcttcattgtaaggaagcttcccagttatggaaagctaaatcctctgttggatcttccttgtaggtacttgatgtaaatatctttttatctatttaatgatgttttgtgtgttcactgtgctatcagaacttgattctaccatgcttttgccttgatcacatagatgcatg

SEQ ID NO: 289094 - DNA, 319 bp, Glycine max
  unsure (1)..(319): unsure at all n locations
tagcttattgaggagaggcgcatgaccactcaagaaaaagatttactgctgcggcaggaggaactagacaatttgttgttcaggtacttcactttctatctctctctgctgagtgttttttctctctgcagaatttctcaaatttctcaaatttctccattgcgtgttcattcatggcttttggaagatgcaataagcaataaatatttacttatctgattgagtttttttacatggttgtataacccaacccaatggcatagtgtgcaaacagatntttctttnntttttttgaaagtaaaaaaatgttacaatgtga

SEQ ID NO: 289095 - DNA, 448 bp, Glycine max
  unsure (1)..(448): unsure at all n locations
ntagttgattgcctgctatggtaggaataacaagtattctatcatcctgtgggacaattaaaaccaggagataatagggtggtattgaagcatacagtggacttgccaaaataaattattttagccactttcattataagaatcagtgtacattgttacaccagactaattgcttatctattttccagtcttccaataatctaatctaatttctaacaacgttcattgacttaaaataacctatatatgaaacaagagtaagaacagactaatacctttaatagactatgcaaaaaaagataaattcaaaacaagtatattgctcattatgtaggggagtctattttaagcaaaggacacacgttattacaatataaatgtaacaccaccttatggcacctgaacaatttctttctcattagtggatgacgaaatctaaggatattta

SEQ ID NO: 289096 - DNA, 426 bp, Glycine max
  unsure (1)..(426): unsure at all n locations
gcaatcactcgtcccggatcttagagtcacctgcagctgcagcttatacttttattnttcagactcaatggaaggacttaagaactgatctaatgcttgtgccaaccgggtaacattcatttccaacctagttgtgacttgtttattggtttaaattggttaacttttagccataaaaggtgttgtnttcaggtcattggatttgtatttaactagtatctcactgctttgatatataagtttaatcttgtgaaaaactgngcctggattatattacataaatgtgattatattaaaatgctgctcngatttttattgatatatttgatcaccttaaataaattggtaaatattgaaagagataaattaaaaatgattcgaaagttatataaagtatttggaaaaccctatccacattagttagag

SEQ ID NO: 289097 - DNA, 534 bp, Glycine max
  unsure (1)..(534): unsure at all n locations
gggatgcatgggttgaaancattggaaatgcanctcnatttggtaaaaataaccgtgggtgatnnnaanatatatattattaaaataataaaaatttttaaatttataagacagattaaggggggtttttgatattataaagtattaatacaattataactggagtactattaatcatattataggtatatatttgggtaataaataactgtgggataggtatgtatggtgagaatatgtgagataaaatagtaggttgtaaaatatatatatgtataaatttgtggttatatatttgtgggaggggtgatgagagttgtagaaataacgctnattgcgccatgacgacgatatgagtatatatgtttagtattattaaatcttttataaaatcattatgtatgaattagtggggattaatgcatattataaggatgtaatatattattaaagagtgaaaatattaggtgtagaagttggaggtatgatattattgctaagtatatttgtatatgtgatttgagatgttagagg

SEQ ID NO: 289098 - DNA, 411 bp, Glycine max
agcttattacttttatttcgagcgtctagatatattacaggactcaatcaaacatccgagtaaaatgttactggcgtttaaatttgcttaactctccagctttaaatttcgagcgtctcgatatatgacgggactatatcagacatccgagtaaaaagttattgtcatttgaatttgcttagagattcaacattcatcttcgagtgtctcgttatattacgggactcaattatacattcgagtacaaagttattggccgttgaattttctcagagcttcaacaatcaatttcgagcgtctcgatatattacgggactcaatcaggcatccgagtaaaaagttattgtcgtttgaattggctcagagcttcaacattcaatttcgagcgtctcgctatattacgggactata

SEQ ID NO: 289099 - DNA, 371 bp, Glycine max
  unsure (1)..(371): unsure at all n locations
ctaagctttgagcaaattcaaacaacaataactttntactcagatgtctgattgcttttccgaatatatcgagacgctcgaaattgaatgttgaagctctgagccaattcacacgacaataactttttactcggatgattgattgagtcccgtaatataacaagacgctcaaaattgaatgttgaagctatgagccaattcaaatgacaataactttttactcggatgtctgaatgagtcccgaaatatatcgagacgctcgaacgtgaatgtgaacctctgagccatttaaacgacaataactttttactcggatgtctgattgagtcccgtaatatatcgagacgctcgaaattgaatgttcgaagctt

SEQ ID NO: 289100 - DNA, 425 bp, Glycine max
  unsure (1)..(425): unsure at all n locations
agcttctttnctcgagatcatctcttatttaagcatttcagcctttgctttcttgtagcttaagaaaaatgccatttcttcttctttctttcttccaaatccatttctaaagttacaagtactttctccatcacccacatccaccattagccaccacaaaccatcattgttctccattgaaaacccacaccgagaggaacccttcaaccgaagcagaatttccaacttggcttgcggtttcggtagagaacgaaaaccctaatctgatctttcattttctttcgagggaactatggttctatgcttggttcttgtagtttcatcttgtctttgcatcttttctaactttgcaaccgccattgcatgtcttatgcttcctttgaaaaaccttagagaanaagactttgtaaacatgatcctttcat

SEQ ID NO: 289101 - DNA, 331 bp, Glycine max
  unsure (1)..(331): unsure at all n locations
accggtgagagtgngaccttactctgggagttgtcgacttactgttatttatgatatttgcatgaatctctgaattctagattgatatgtatagcttaaaacatgatgaaggccatgatttgtatatacaccagctcttttgaccaaatagctcaccttgaatgataactggatcttttgctccttctataagttgaatgatttttgtcatgaatcgaacccttaacatcaatgattatctcttgcaccttgctacattctaggagagcatatggttcaaggcaaatttactctaaatttgggggaggaaagtcaattagaatgaaaagaa

SEQ ID NO: 289102 - DNA, 325 bp, Glycine max
  unsure (1)..(325): unsure at all n locations
agctttactttgtggcagggcgggcttccttcacttccttgtctccaacgcgagctctgaccactgttcttccttcccgcgatgcttcttttcatgtccgcctgagtgggcttatagcctanaccatacttcccacgatttccttgggtttttatcaggctagttatgccgccattgtctttgcctaaacccatcccgggttcataaccgttccccaacataactcgggccatcattaccgccgcatcggacagacaaggttgcccaaagagggagtccacggaggaaatgctgaccacctcaaaagactggaaagcggtttcta

SEQ ID NO: 289103 - DNA, 433 bp, Glycine max
  unsure (1)..(433): unsure at all n locations
tgtgtctcaacatggtcttttcaccgaacgtgcccgatttttgtattttgttgcaaaacaaattcatgtgctagagtgtcagttttgggttgaactcccatattatttccacgaggcgcacgtaacaatgatgatttggaaacaacgcgcaaaattaatcatgcctacaactaggggggtactcaagcctccaacttatggcattatgatactaaagcttgagatttatgcaagtagacccaacgtttccaaatttgttctttattggttcaacgaatccatccattcttatcttggttattttggaaaataaactcttaacgtcagttttctggttccacaagatatgnttgctctctacgaatgatttattctttctatgaccataacacgctgaccttgagggctttctttctcttttctttttggttca

SEQ ID NO: 289104 - DNA, 421 bp, Glycine max
  unsure (1)..(421): unsure at all n locations
agcttaatgtcttttattttattttgagaaaatggagactaatgtaataggttggatttgtctacgaggcctagactaacatggaccatctttataagtaattcaaaatgaatcattaatatagattaatctaaatccacattattatggtacacctttcataatatattttttctccctcactgccatagtcttgtcaatcaacctacagcctcctacctcctatgtccgaccccatcctctaatttttattttttttataaatgcaaaacaaaaatatctgacttagaaaaacataattttttttagttgattcaagtcttcccttgttgcaatcatccaatctaagctntaaattgatttctttgttttacattgcatcacttgaataatntaattcttcgtatttgactatagaaaa

SEQ ID NO: 289105 - DNA, 448 bp, Glycine max
  unsure (1)..(448): unsure at all n locations
tcacaccaggtataaatgttatatgggcagagaacaaagatgaanatttttattatgtttgcttaaaatatgaagaggacattccttaagatagaagctgcaaaaataattatttataatcctacaactgatctgcaattcaatttacaatttagcgaccaaatcattttgactgacatatcaatatgtgcctccgcaccataatggcataatccatcgcctatcattggcttttggctgcctaagtgtgctaatgtcgaaaagaaattgtgccacggcaaagccaccaccgaagcaataggatggcagagcctatgagatatcactatgcagcttatgcaatgagttggaagaactattcctgctctacanagtatcataacaatcnnctctcataaatctagacanataatttctcacatccatatagtgtcatgcataaatgaaa

SEQ ID NO: 289106 - DNA, 428 bp, Glycine max
  unsure (1)..(428): unsure at all n locations
ttcntgtttttacagcgtaaatggctgaatacattgaagtctttgaaatgtaaataaagatattgtagtcttttgaaagcataaatgactaaagacattgaagtctttgaaatgtaaatggagacattgttgtcttttgaaagcgtaaatgactaaagacattgaagtctttggaatgtaaatgacaaaggacttgagtcctatgaaagcataacgacagtgggctttgagtcctatgaaagataaggacagaggacattgagtcccatgaaatcataanacanatgatgttgagtcctatgaaacaacccaatagttactagtaccaaagggctcaaccttatgagaaagcaagagaatgactctnttgaaaggtctctcattctaaacttaagagataggacattagatttangaactgatatatg

SEQ ID NO: 289107 - DNA, 266 bp, Glycine max
  unsure (1)..(266): unsure at all n locations
ggcttacatctggtcatgggtctggggctggtggttgccatgggcttaagctttgatttccacatcagcatctttgtcgtgccttgatttccttaagagaagaaggaaacaagaattctctcacttaactcttctttctaattactctgatgtgtgatggaggccacaaatatatagaagacgtccttacccgaatgcgaaccttctgatccaaantaaacgacaataactttttactctgatgtctgattgattccgtaatatat

SEQ ID NO: 289108 - DNA, 415 bp, Glycine max
  unsure (1)..(415): unsure at all n locations
tctttattttcaattacgagcgtctccatatattacgggactcaatcggacatccgaattaaaagttattgtcgttagatttttctcagagcttccgatttcaattacgagcgtttcgctatcctacgggacataatcggacatccgagtcaaaagttattggtcgttgaatttgctcagagcttcagttttcaattacgagcgtctcggtaaattacgagactcattcagacatccgaattaaaagttattgtcatttgactnttcatagagcttccgttttcaatttcgagcatctcgatatattacagggctccatcggacatccaagttaaaagttattcgtcgttgatttttctcagagcttccgttntcaattacgagcgtctcgaatcctactggaccaatcggacat

SEQ ID NO: 289109 - DNA, 421 bp, Glycine max
  unsure (1)..(421): unsure at all n locations
ttggagtttccaagtgccaattcgncttcttctttaanccattcttcttctggcttcaattcttcagtgggctttccttctgtgtccagcatcttgggatgttcccagcctttgatgacagctttccaagttctgctatccagtgatttgaggaaggccaccattcttgctttccaatattcatagttgcttccatcgagaattggtggtctgttcactggtccgccttctttctccatgttcatcaaacgtatctcctagatctcactctgtgatttcgagtgttggctctgataccaattgaaattctgataccaggggacagatgtcgtacaggatgtcacgacatcacgcttcagaacatgcagattatatgtgtccgtatgaacagattaaaccaagtaataacacaagagaattg

SEQ ID NO: 289110 - DNA, 400 bp, Glycine max
  unsure (1)..(400): unsure at all n locations
ttcttagtcttagaggggatggaccttttcaagttttggagaggatcaataacaatgcctataggttggacctcccagaagagaatggagtcagcaccacttttaacatttctgatttaattccttttgcaagtggagcttatattgaggaggaggaactaacaaatntgaggtcaaatcctcttcaaggggaaggggatgatgcaatcctccctaggaatggaccagtcactagaatcatgagcaagaggctccaagaagattgngctagaattgctgaagaaggccctanggttctcatgaacctcanggtagatttctgagcccatgggccaaagttgggtccaattatctttgtacatattagactangatgtcattatatttggccttggattta

SEQ ID NO: 289111 - DNA, 481 bp, Glycine max
  unsure (1)..(481): unsure at all n locations
gcaccgatggtttgaacctttgataccnctgcatnnacgngacaccatagaatacttcagcttcttatatcaggcttatcttggtggggaaagctcttcctttcttgcttaatccctaatggatggcgcctcctcttcattcttttcctttgtcttccactggattttcctgggggaaaatcaccattaaaggacccaattggagctcgaagatcccaccctcatagaaaccccaccagcacgcttacatcagaattagagggtccctcttttagaatccctaccgaagtaggattggaagaatcaaagtcgcctcacacactttgattaattaaatcttatcgaaggtagagaatggcttgcatgaaccattggccactatttcaagttgagtaaaaatgtttatacaaatgggacaccgtgtagttcacgaggggacttgtctaagacaggtccacgtttaaagatcacaaggaatgac

SEQ ID NO: 289112 - DNA, 337 bp, Glycine max
  unsure (1)..(337): unsure at all n locations
tatcttttatctagatagcacacaaaacacggtgaatttgtcacattcttttttcttactttgcaacaatctggtgtcttatgcactccctcagcatcgcaccatagtgtaaagccatatcttggttttcatagctgaaaggcaacaatngtaagtcatttgcatactcgaattagagtctataagggtaaacgtaatttaatgagaaccacaatatgaaacataagaaataacatgggcatcacgagatgtaaacaagacatacattcgacaaaactaaatntaaaaatcacaaatccagtgatcanggacatgagattgtcatgtctaattgatg

SEQ ID NO: 289113 - DNA, 451 bp, Glycine max
  unsure (1)..(451): unsure at all n locations
tgacccatgatacgctgcatcacgngacacatagaaactaagcttttggcanaagtacaattagccnaaaattataatttctgctcatccaancaatatggcaaacctggtggaatttggacctcaggttaaaagctgcagaacccaaacggcatgtggacacccacccttgatttaataatcggtaccatttattctgaaagctcttaaggatttttctatagggtaattcaacttaaacctttgagacagaagggggatagtaaattactacaacgtgctatggtccctaaatcccagatttaacacttaacccactagttacgagctaagtgatttacaatgaatataatgagtgaaccatttgcacctcaatagctgaggtcatggtcagatggaaagtaacacgaagttgacagttgtacaatttatatagctctgaacttttacn

SEQ ID NO: 289114 - DNA, 342 bp, Glycine max
  unsure (1)..(342): unsure at all n locations
tgctttatccaaatggacttaccttgaattaattcctttgatagcccttttgagccttgtttccctttccttgttttgaagctcactacaagccttaagtgaaaaaccatgatattaccatatccttaaggaattntggagctttggaattgttttgggaataagtgtggggggtttttgtttcattggacaacttgttttgttggctatgcttcatgatgtattttgggccatacttgatgtacattgtatattggttaaatgttggacatgctgaatgaaatgttgtttctcaaaggctaaagagtaaaaaaaaaaaaaatctanaaaaaaaaaaaatct

SEQ ID NO: 289115 - DNA, 428 bp, Glycine max
  unsure (1)..(428): unsure at all n locations
tgctctaaatntacattgatgtttgtatttattggaggattttgtatgccattnttgttttaagagtagcatcccttggtaaaactaactttccaaatgtttgccttcacaggaaatggccccgaggaagcttgcctcaaagaggtccaggaaagataaagcggccgaagggactagttccgctcctgagtatgacagtcaccgctttaggagcgctgtacaccagcagcgcttcgaggccatcaagggactgcgttctccgggagcgacgcgtncagctcaaggacgacgagtatactgatttccaggaggaaatagggcgtcgacggtggacatcactggttactcccatggccaagttcgatccagaaatagtccttgagttttatgccaatgcttggccaacagaggagggcgtgcgtgacatg

SEQ ID NO: 289116 - DNA, 332 bp, Glycine max
  unsure (1)..(332): unsure at all n locations
tgtttgcttgctttatctcaatggacttaccttgaattaattccttagatagcccttttgagccttggttccctttccttgttgtgaagctcactacaagccttaagtgaaaaaccatgatatcaccatatccttaaggaattttggagctctggaattgttttgggaataagtgtggcgggtttttgtttcattggacaacttgttttgttggctatgcttcatgatgtatnttgggccatacttgatgtacattgtatattggttaaatgttggacatgctgaatgaaatgttgtttctcaaaggctatagaantaataaaaaaaaaatt

SEQ ID NO: 289117 - DNA, 350 bp, Glycine max
ggtaaaccagtgtcttctattctgcttttattattgttatggttggtggaaaatttgcttgcaacccctgattggttggaaaatagcactataagatcattcacaatattgacaattttaatattttctttaacccgaatgcacgtgttgattgattcatataataaataacatgtatatacttactctcattctaattgtcaatatgcatacacatgtgtttattaatccaaaattattcacaccatcagtgattcctacaattttcttctcatttccattgccaacttgatctgaaagaaagagcatgattagtcaactactattaacaacagctttactgattgagc

SEQ ID NO: 289118 - DNA, 303 bp, Glycine max
  unsure (1)..(303): unsure at all n locations
tatcttttggagtagaaacatgggaccaactcattntatttcaaaaaagaaatcatatctagtcaaggtctgagagaccatacaagtttcctaacgatttctaattatgtgggccattaagtctatcatatgctgacaatagccgagaagcccatgaatctcttcgggggcggagtaggtgtctgccatcgccttggccttggctaacaatcggagaagttcttgactcccattcaaggtaagagcanaccgatccatccacatggttgcctcttggtgtaaagagtcgctcaccctttctct

SEQ ID NO: 289119 - DNA, 422 bp, Glycine max
  unsure (1)..(422): unsure at all n locations
agagcctttcatgtctatgctgcagagcctttttcagtgtccactcctgattatgccgagcttgcaagatgtggtcttgcaaccaccaattatgaacatggaggaatttctgcagaagggtgcctaaccaggaatccagccttcttctttgggaaggggggaagcctctggcacccangaaccttagccggaccaagggattgatgaaaatccctgaaatggcccaatacaagcttaagcgcccagtgagaagggcgaaggccctgtggagaatgataaagcccccgagtggagaaggatgaaagcccaagtggagaaggatgaatgccccaggcagagacactatcaagactattattgttgctgaagcccagattaattgagggccacagtaataagtnntaagtataattattttattg

SEQ ID NO: 289120 - DNA, 290 bp, Glycine max
  unsure (1)..(290): unsure at all n locations
caatttggggaaaattggatgagggaaaaagtggttttcgaaatctgcactttatgccgaattttgtataagtgcagaaaaatgcttgtgtatggctggttgtgaaaagggtagtacatatggggttctggacattntctagcagatcccaacggtcaaaatgtagacttatgtactagagacttccagtaaaattttcgagtcgatccaacggttaacaaattggaacgaagaanatgttactggggtatttgtatgtgaaaagttgtgattttgagttgtgttttggg

SEQ ID NO: 289121 - DNA, 359 bp, Glycine max
tccatcaatattaaagactgcttttaggacacgttatggtttctatgagtatctagtcatgccctttggtgtgactaatgctccaggtgtgtttatagaatacatgaatagagtctttcacccttaccttgatagttttgtggtagtattcataaatgatattttggtatactccaagactagagaagaacatgaagaacacttgaggattgtgttgcataccctttgggactgacaactatatgctaagctatcccgtgtgattttggttagagaaagttagtttcctagggcatgtgatatctcaagggggcataactgtagatccctctaagatagaagtcgctcttgagtgggag

SEQ ID NO: 289122 - DNA, 396 bp, Glycine max
  unsure (1)..(396): unsure at all n locations
agctttttaattgttagttagaaccatanatacctagcctcaccagtaggttacaaaatatttataaagtataaaccgtacctatttaaagcctatgaagagagagagtcacacagttttcccatcacaaggtcatgttaaaactcaacatgaaaagatacattccctaagttgatttgtgctctcttttaaactgactactaaattgagagggacttttaaattactgaactattcttcaattaacattaataaaggatccttggttcctttgtagcagggtcctcttgctgctccggttcttcaacacctgacaaaagcagatttaagcaagatgtactnttggggtttccaagtgttggacatcaatggtgtgcagtgctttctcacacggac

SEQ ID NO: 289123 - DNA, 457 bp, Glycine max
  unsure (1)..(457): unsure at all n locations
tactcagcttcaatcggcatactccacacaaagaatttgatgggattattttacagcttactccacacaaacagattttgaagacaaaaattgggcaagtttctgcagatcgaatgttatgagctgataggaccattttatctggcttagtgagagaggtcttatacattataccacaattttaaaacaataatcacaggaaatagtaagttataatataaaaagaataattttttcagtaacatctggaaattttgttttggctactggaatctgatggcagattgaaaacaaggctctcttccaaggtcttctgaaccttcattccaaaatttttaacctttatcattntattttttgttcgtgcaatttgnggatttctctgtcaatccaagctatccatagtctccaaacttattgattagcagtggttaacacattggttctggttctcaag

SEQ ID NO: 289124 - DNA, 380 bp, Glycine max
  unsure (1)..(380): unsure at all n locations
agcttctcggctcatgctgggaacgcctctagttcaacacccgtgcagcctaaggcacccacccagagggaagctccccaagttccaactccgaacgcgactcgaccggccggtaattccaacacaacaaggaacttccctccgaggccgttgccggaattcaccccgctcccaatgacgtacgaagatcttctaccatccctcatcgccaatcatttggccgtggtaactcccggaagggtcctcgaaccccctttcccgaagtggtatgaccctaatgcaacttgcaagtaccatgggggtgccccggngcattccatcgaanaatgcttggcccttaaatacaaggtccaacatctaatggatgccggatggctgac

SEQ ID NO: 289125 - DNA, 442 bp, Glycine max
tgttgacacgcggagatttacgtcaacttttgtgctcacattatttgttatactgacatttgagtcacgttgacgggcggagataccctagtggttatccgtataaacattcttttttgctgtctgtaaaacgaaaagcctgatagcatgcaaaagactaacgtcgtcttttgcgcccttcgtcaatcgcggccgacaagcccgttgacacgcagagatttacgtcattttccgcgctcacaagatctgtcatactcgcatttgatcatgctgacggacggaaatacccaagtggatatccgtataaacattcttttttcctgtctgtaagacgaaatgcctgatagcacgcagagactaacatcgtcttctgggcccttcgtgaatcgtggccgacaagccccgtgacacgcggagatttacgtcatcttccacgctcaca

SEQ ID NO: 289126 - DNA, 384 bp, Glycine max
  unsure (1)..(384): unsure at all n locations
agctttgtgttttcgattaccagngtcngnttctgaaaaatctaaagatgtaactcttcaaaaaggttntgactctttcaaatgggttttaagcttttctaaaagatataactcttctgaatggctttcttgaccagacatgaagagtctataaaagcaaggctttgttttgcattttaaaatcaattattccaagtctttctaacaaatctcttacaatcctttacaagccttgaatctctttgaacttcttcttcttctttgtaccaaaagttntctgaagttttctggttttctaaactttggaaacttatgctattcatccttttcatgctcttctccctttgccaaaaaaattcaccaacgactaatcgcctgaattct

SEQ ID NO: 289127 - DNA, 426 bp, Glycine max
  unsure (1)..(426): unsure at all n locations
tgtacaatgcacaggctcacctatcatgtgctngaaattgttattntatttaaagaatgggagcaacaaggatcaaactctagagtctagatgactcagtcaaagactcatgaaccaacttaataagcttaagctattaagtaaagatgcctgattggccttctattacatccctaacagtggtgtatttttagctgcaaaaacaaattgaaaaatgtttgtctggcatcacttttttttacacttattttgtattcctagtaaatgtctactcatatggacacacagataagggagagaagtaaagaagccttttttcaaagggtgtaaatgtgagactcataaaatggtgatggtgatggctaaggtacgcaagacatttcaggtaagttctaactttntttactagtcgaaaaaactcattac

SEQ ID NO: 289128 - DNA, 439 bp, Glycine max
  unsure (1)..(439): unsure at all n locations
agctttttaatttanattcaaatgtctaaaaagttgttacaaacagttntaacttctggtaatcgattacatactttgtgtaatcgattacaggctttgaaaatcaaattcgaaatttttaaaattgtttcagaaatcaattcagccactggtaatcgattacatcctctgctaatcgattaccagagagaaaatatcatatttttgaaatcttaaaaaacttttgtaaaatatcctttagtcaaacctgtgcaacattaattaaggaattctttctaagatcctangaactaagtacatcattcttcttgaatntttggattctggacttggatcgtgctcatcttangcatcatcaaaacttcatatcatatatgcttctacacaaggtangtgaggattatctcattagttaggccattatanattattttcctat

SEQ ID NO: 289129 - DNA, 423 bp, Glycine max
  unsure (1)..(423): unsure at all n locations
gcttcgatctgttcccatattagctggtgggcttagacaacaatctcatctatcgacgtatctctatacttgatttctagaatgaattatgagcatcaatggggcacttttaaagtctctaaataaggtcttgatcccttctcttggttcctttgaaatgcctatccaatatttatgtatcacttaaatgtatctatccttaaactgaaaaaaagaaaggcaaaaaggacaaaaagaaagaaaatgagctctttangaacccctccactcttgatactcgtcggactaaaatggttgggagaataggtccaagtggttgcaaagatgatttgtctacccatgatgatcagtcgattttatccctattctcaagaaacctccattccagacgaagtcttgtctcagtatttctagtctcctatg

SEQ ID NO: 289130 - DNA, 190 bp, Glycine max
atcactcttttactcgggtgatcactcttctttttatattcctttgtggagcctcactattctctttctcttgttctctcgtttctctcattctgatttggacatcacatgcttctctacgggatagaggtttaagaccaaacgaggaagatttgactattcgtctgtagggctcttctttgtacggttc

SEQ ID NO: 289131 - DNA, 522 bp, Glycine max
  unsure (1)..(522): unsure at all n locations
ccacaccactccccaaaaataaacaaaagacacagggnacccccnnnncgaaaggagagcctgacctcgaaacngaacanananaccaacnngaagaacaaaggagagggaacgaaactatgagatgatgcgcaccacgagcacggggggcaaacggagaatcgagaacaaaacgaacaaaaaaggaggagaaaagggaaagacggcggtcctagacgaaaccgaagtgatgggaacaaacgcaacagacctccacacaaaggaaagaaggaaccggacgcccaccaggaacgagagaggaaaacagagcaaggcctcccaagccacaactatgatgcgaccacacgcgaagcttgccaacacgggagtttccgaccatgcacccgaggggcgaacaagccaccaaaggagagagcaagacatgaacagccaacggccgaacacggaccggaacgaaaagatcacgaggaagcggatgcgccggccaacacacacaggacacgaaaccaagcacananaccn

SEQ ID NO: 289132 - DNA, 432 bp, Glycine max
  unsure (1)..(432): unsure at all n locations
atcttttttattttaattaaaacgttcaataaactgctggtaatcaattaccatccatgtgtaatcaattacacgttataaattttgaattcaaatttctagtgactgttataaacatcttcagctgctggtaatcgattaccagagaaaaaatctcaattggaaataatagaactctttggtcaaaccttntgttntttcaatttggaaacttcttcctaaagattctagagatcaacttgatcatatatcttgattntcttggattcttgtcttgaataaaacttagaagcacttgatcctttagcatcatcaagacatcaaaacatcttgcttctacatangagtcanttgacttaatccatcaactganaaatccttcaactatttctcgtccttggaaaattcatttgcangaatcaactgcatctt

SEQ ID NO: 289133 - DNA, 429 bp, Glycine max
  unsure (1)..(429): unsure at all n locations
tcactggtggatttctccaatgagcaagtccttctaatgctctggcgttcaaacaaaaacaacttttccagccacagattttggcattggttcccataattactaaggtagcagagcaaactgcccagtaaaatcctttatttgttgaagacaagcaagaatcctcaatgagcaaagagaattgaagaacagagagtgagcatttttacatttcaaaacagatttgggtacagaagatcggaatttgtgacaccatggtgcaacatgaagtaaacagaccacattttataaacaaccaaatctaaaaaactataagattaacaagaagcccatttgaaaactaacacctaacacaataagctgaagttccaacatgaagttacaccanatgcctgcttatagctacataggcaaatacatatccctcac

SEQ ID NO: 289134 - DNA, 421 bp, Glycine max
  unsure (1)..(421): unsure at all n locations
atcttttagaattcaccccaattctggtgtcctatgctaaccttctctcatatctactcgataattcaatggtagccataaccccagccatggntcctcaacctccattttttcaaagatatgactcgaacactacatgtgcttatcttggaggagttccggggcattccattgagcattgtangaccctgatacataaggtgcaaagtctaattaatgcgggctagttgaaatttgaggagaatcgcttgtgaattatgacattggcaagcgacactatacatggngcaatttgaaggttgttgttagatgtctctaatgactttangattttcaagtttatgccattattctaacagttacaatgctaataatatgataaatttgacatccttgtctctcatcctctcacagntacatc

SEQ ID NO: 289135 - DNA, 436 bp, Glycine max
  unsure (1)..(436): unsure at all n locations
gtttgtctttgacagtgaagaacaggattatttggttatcaanccattnctaagaaaacccaaagaaaataagtgttggaaaggcctgccatccgaaatgccttggctattgaaatccttgaagaaaagggttatgaagttgaaaaaatttgatggccaattaaccatctatacctgcttaagaactggagttatgtanggaagggtggtatggtttggttggctattggtctttcataaccaacccatctcctatgcaatgaatatttggatagtggttgaaacaaccagttttaaaccagatttggtgatgggtgacactgatgtactctggatagggtggcatggaaactcaacaagaatgacaatatcaaccattgaaatcttcccagtccttttagccacacccttaattntgtaataccacaaagttatn

SEQ ID NO: 289136 - DNA, 426 bp, Glycine max
  unsure (1)..(426): unsure at all n locations
tttcttctctcgtatgaaatgaanatcaatctctatgtgcttagtcctttcatgacaaactgggtttgaggcaatatgaagagcatcctgattatcacaatacaacttcattggcaactcttcacaaaacctcaattcctgcagaaactatttaatccacatgagctcacaagtaaccatagccatagatcgatattcagcttctgcactggaccgagcgacaactgtctgtttcttgtttttccaagaaataagatttcctccaatgaagacacaatagcctaatgtagaccttctatccatgggacaaccatcccaatcagcatcacaatatcccgatagttgtgtattacccttgtcttcatacaataaccctagaccaggagctttttaagatatctcagatacgcatgacagcattccaat

SEQ ID NO: 289137 - DNA, 434 bp, Glycine max
  unsure (1)..(434): unsure at all n locations
agctcgcctgggcaagcaccccctgcacaatataattaaaataaatgggggagngcaggtntttcacccaaaacttatccccctcactcaagaacgcagcacccgtgggaatgagggtctttttctgaccctatggcaccattttgggctttttgctttcattttaagggccctgatcactccatacaagtaaatacattattctttggtccctaacttttcgttgatgtatttttatgctctaaacgtacatattggtcaatttcgtgaggaatttgggaccaattcatgccttgattcattgaatnggnggggtgtangggatggccctangcctatggtgtgttctgaaatgattgggcangccacattgcccccaatcccttccttgttatacaccaaagtgcgcccaccaagtgctcagtgaaatgcct

SEQ ID NO: 289138 - DNA, 412 bp, Glycine max
  unsure (1)..(412): unsure at all n locations
aagctttcatgaaaggatgcgctaagcgccaacatcattctattttgaagtcattggaagtgtgcttagcacaggtagtggcgctaagcctgaatcactcactgtaagttgaagcttgatgtacgctaagcctcgcatctcaggctaagcgcatattgcagaaagatttttggtgttgcaaattcacttcccaagaggcttgggaaagatacatagatgttattgtgcctaggaagcttttggcagagaggaatgtggtggtctactatacagagtttgatgagttcaaggaggaactcgagacacaccactangatgaggagttgactgactttggtgacagcaacattgatgttgccattgtgaaaggaatctacgccaacctctatgaccncgaggacanatcacctaa

SEQ ID NO: 289139 - DNA, 440 bp, Glycine max
  unsure (1)..(440): unsure at all n locations
ntanaatttgaattanaacgttcagaaactgttggtaatttattaccatatatgtgtaatcgattacacagggcaaattttgaattcaaattttaatagctgttgtaaatcagttttggccactggtaatcgattacatcctctggtaatcaattactagagagtaaattcttggccaaactttttgctacttcaattggaattcccttcctatttaatataccctttctaagactctatagactgtcttctcatcctcttgaatatctttaattgctttgtcttgaataaagctttgagacgcatgtgatattntggcatcatcaaaacatcggcttgatcctttgtctacacctttatcatttangaacaacgacctgagtgggtaaacgcacagagacagattctgcaccctttatcattcangaaccacaacctga

SEQ ID NO: 289140 - DNA, 409 bp, Glycine max
  unsure (1)..(409): unsure at all n locations
tgcntttgcatcnngngagaacccacatgggatcaaatgacaaagcatatcagtctgtttatcaggaacctgatgaagatgagattgtgggtgtttccctctcacggtcacttctaagtgtagctgcttcagctttgatgaccaatataacagacttangccctcttgtcttgccctattccgagcagctgcgctatggatggtcagtgatttccaggaaaatgtgggcaaggcggaacaaggaaatgtatgttccanatttcatgaaggctttngagcatttctgcatacatgctggtggtaagtcagtcgtagatgccatagaggagagtctgaagctgcacaagaaagacggtgaagcctcaaggatggcattatacagaattggcaatacttcatcttcttctgt

SEQ ID NO: 289141 - DNA, 378 bp, Glycine max
  unsure (1)..(378): unsure at all n locations
tgtacattcatttgaatatcattttctatcctctccatcatttatctaaatatcatagatatagtaattaattgctaactttgatagccaatttggataggctgggtgaaatttgatataatgtcaatagtaaagtggaaactgcaattgggccaataatcttggggtggccaaggaaagtattcgtagacattaatttcatgcatatgacatgacagaaataaagagaatgatgaatagaatcgcttgttaaaatcgatttacatatgatcacacttatatatgctgntgctatcaatgcaaggggctgattaataaaagatcgaaatgtattatatggcttataataacaagtcccagtagatgttgcatataaac

SEQ ID NO: 289142 - DNA, 334 bp, Glycine max
agctttctctaaatcagtcaaatgttgatctataccagctaacttgactaccacatcatcaacatatactttgatgttttgcccaatggcatcatgaaaaatgagattcatagccctctaataagtggcaccaaccattttttagtctaaacgacatccataaccattcatatatcccaagagctctgagacaacagaatatcattttttgcatatctacaacagccataaaaatcttattctaaccaaaatgaccattaataaaggtaagaacaccatatttggttgttgcgtcaactaacatgctagctatgggtataacatactcatcttt

SEQ ID NO: 289143 - DNA, 472 bp, Glycine max
  unsure (1)..(472): unsure at all n locations
ggtgcccttgaccttgggccttgantncgngacctatgaaactaagcttaaccataggtagatgcacacaaaatggttttatgcatcttaaatacgccctcatgtagcagcttttaaacttgaagtgtggaccatgccaagagttgggaattcttaaaggagatggagggtttttattagtaccacataaaagatggagagttggccatggccttataccaatgtgggacaatggtctttgaacccaaccgccccttgcttcattgggaagatgttaaacacattggcctgggccattttaaatgatggaagaccattttatacttgaagaaaggacacataagtgactggtttactcaagaaggaataaatgggaggatagtgcaacagtgcaagagaaaaacagtagggggagggaggtgattcttctggatcatgagcacaaggacctgannattcattagaggagagc

SEQ ID NO: 289144 - DNA, 385 bp, Glycine max
acatagatctgtatggtgatctgcagaagaacataaaccacagactcttgcaacaagtgcatatttctgattcatggcaagctgagttactaggttaaccaaggcatcaagttttccctcaagctttttattctcagcagatgaagatgaatccatggccacctcatggactcctctaaggacaatagcatcatttcttgcactgaattgttgggagttggaaaccatcttctcaatcaaattcttagcctcagcaggggtcgtatcaccaagagctccaccattggaagcatcaatcatactcctctccatgtagctaagtccctcatagaaatactgcagaaggagttgctcagaaatctggtagtgaggacaacttgcacac

SEQ ID NO: 289145 - DNA, 439 bp, Glycine max
  unsure (1)..(439): unsure at all n locations
tcanaccacagcaacacanaatctaggtgtccaaaacccctcaattcaatggcttttctaggtttgaaaggtgaaatttagaatgaggtaaatttgaagcaaactctcacctcacacaagtccataacatcaatctaaacttgctcaaactgaatttacaccaaaaattccaccaaatcaaaatttgactcttcaacacccaattttgccctagaaatggctcttggttcactttggtcatttgtttttctctctagctagcctacctttctcacatgtcctaaatgacatttcaagctagtattaactcactttaacctccatttaccacaaaattcagacttagccttccaactctcaaagtctcaccctttntccactcataacatcacattctcactntctaaccctaggttagttctacccttcatctctaaca

SEQ ID NO: 289146 - DNA, 372 bp, Glycine max
  unsure (1)..(372): unsure at all n locations
agcttttcnttttaaattaattaagtataactaatttttaattaaatttaatcacatttaaaatccctcactcctttttaattatacatgatgtgaaaactaaactcatgttctccgagaagcttagcatctgttgtcaaagaaattgatctctcaacacaaatttttctttgtatgcttggagttggaaccctgaccacatagactctcccatgtgctgtatatgattgattagaacttacaacaactaagcctagtagtggctttcatattcaccctatcttccaaagctaaacaggcatttaattaattatatatttacgaataaatatatgaagatgaagttgtctctggttccatatataaaacacg

SEQ ID NO: 289147 - DNA, 424 bp, Glycine max
  unsure (1)..(424): unsure at all n locations
tgggaaaactaaacctcattacattatttgagagctanattccattttttccaagacttatccgagaacaccaagattttcccttgctgcaccgctcacataggacaggcctttaaactacctaacaagacgttgaagtaagttgtttcatttgcatattggaataatttcgggcaaaattaggacaaaccacaatggccaagttgtaagaagtggtaatgccttattatcaacggtggctttgatcagtcacaacgcacgaacgcactgctaattaattagatggcatatatatatctctttcgtcaatacaccaatgacccaaaaaagaagataattagcattcccaactaacctttccttatgcagctttgactactttccgatacaaacccatatgatcttgctttacaaataccactga

SEQ ID NO: 289148 - DNA, 382 bp, Glycine max
  unsure (1)..(382): unsure at all n locations
tatgactgcnattcctgctgtttccgtgagcaatggagttcttgagtgaaaggngcggcgnnnnncnnnnnnnnnnnnnnnnntnnnnncnanncnnananntacaataaanananacaaaccatctaaacaatctcctctatttatcttacaaactacctccttatcaatatttaaacataaatcccctcaaacacttaaatctataacataattccttcttacatcttaataatttttcactataacactttattaattacaattatccttatatacttaacaacttactcattttaacatcatctcttttcttctatttatccacctcatactaatcaaaaaatacccccatccaatacatcacatcttccctaactac

SEQ ID NO: 289149 - DNA, 408 bp, Glycine max
  unsure (1)..(408): unsure at all n locations
nttgaagaatcaagaatttgagggtcaacctcaagatgttgtcaaactttatgaggtatataaaaccttaaaaactacattagccaaatttgataatggaacaaataatattaacaaactattaagatattgtagaagttcctcaaaaaaatttgtaaatggaaatgatgaaaaggtatatgttcatgatgaagacaacattatctattacttttgtggaaaaactagacacatgacatccagatgcaaggatcgaccaagtaggtgcaatcaataccttcatggctaacacaaaagaacccaaaaatatttgggtacctaaggaaaatgttattcttattgcaatgtccttgaaacaggaagaaatgcctatcatggacctggaaatggntgttacaaacatgatag

SEQ ID NO: 289150 - DNA, 436 bp, Glycine max
  unsure (1)..(436): unsure at all n locations
agcttatttggtattgtatacgtaccaacatattacttgtattcatttatgtgagcacaagttttttagatgaggttcaaaacatattattatttaatttgattgaattttccttctctttattttttttaatatttaggttatttgaataatttaagtatcaatatctctccatttattatctgcatatttaaattctcttcagacagtaatctttttttttgttattcttcttttcttttcccactaataaaaaatctctcaagaccccttcgataactntgtaattgttctttaggaaattattaaaagcttttatattctataataattntagtaatgatgttatgcaagttttattacttaaactctttatagtaatattttggttgcaacaacttttaatgacctaccaagttgnttcattaatattact

SEQ ID NO: 289151 - DNA, 447 bp, Glycine max
  unsure (1)..(447): unsure at all n locations
tanagtaccatagtttcattaattctctttaggtcgctgctttggcttgtggataccataggctcccttgtgaatttaatcaaagagtcaataattttaataatgtattcttgcgtagttcaacatatacttgcagtaataaaaaatttggtaattattattatacttacttttggtaatataagttcatttcacaaacattaatatactaatataagtatttaaaaacttagcatcatcagttaaaaaactaattaattttagtgtccctttcgatctgataaaaatgaactaatttttagcatttgaaagtagtattttttattaaaaatatttattatactaaaaatataaagtgtgataaatattttttaataaaaaaatcatttttatatgattaactataaatactataaacttatattggatatataatagagaaactat

SEQ ID NO: 289152 - DNA, 432 bp, Glycine max
  unsure (1)..(432): unsure at all n locations
agcttgtctcatcgtttatgcgagacagagaccaacatgttagctatcatcgccaagtaccaagaagagttaggtctagccacggcccacgagcatagaatcgcggatgagtatgcccaagtatacgcggaanaagaggctagaggaagggtgatcgactcattgcaccaagaggcaaccatgtggatggatcggtttgctcttaccttgaacgggagtcaagaacttccccgattgttagccaaggccaaggcgatggcagacacctactccgcccccgaagagattcatgggcttctcggctattgtcagcatatgatagacttaatggcccacataattagaaatcgttaggaaacttgtatggtctctcagaccttgactagatatgacttcctttntgaaatanaatgagttggtcccatgtttcta

SEQ ID NO: 289153 - DNA, 214 bp, Glycine max
gaatgtttatacggataaccactcgggtttttccggccgtcagcgtgactcaaatgtcaatatgaccaatcttgtgagcgcggaagatgacgtaaatctccgcgtggtaaagggcttgtcggccgcgaatgaccaaggacgtaaaagacgtcgttagtctctgcgtgctatacgctgtactcttactgacaccaaaaaagaatgtttatacgga

SEQ ID NO: 289154 - DNA, 365 bp, Glycine max
  unsure (1)..(365): unsure at all n locations
ttgcttttctaaacaaagtttatacattccagtccactcaattcatacaactctcattcatttcaaacacaaccattcatttaaaaccaaaacacaccactgaatatcaaattcaaccagttcactgttcaaacaagctttttgtacaagcaatcaacactaaattaactggaatntaaatgactaaaatntaaatactgaaatttaaataactgaaacataaagcataaactaaataaactgatcaaaataaactgttcaaaatgcaagacaagaagataaagatcctgtcaatcctcctacaggtgatcctctgcatgcacattaagatccaacactggagcggttggtggatcctgtacagt

SEQ ID NO: 289155 - DNA, 389 bp, Glycine max
  unsure (1)..(389): unsure at all n locations
ctangaataaagcttccttggagtatttttaagttgttgaaatattgccaaaatctaagtaagagcctcgtgtaaaatgacattcaatttcttataatccatttcaaaccgaaattgtactttaatatttgaaatgtaataaaatgatgatagattttggtgcttttgttttaaacattattcactgaggagagaatttttttccctgcgtcatggcaaccacatttttaacttaagatgattgacccttgattggaaatgagggcatgccttgcattgctagaaaataagacatttgctattgatgagaaagtactcccttagaatgagtgtcaaccacttggtggcctaagagggaatatacctctagtgccaacatatggggaatc

SEQ ID NO: 289156 - DNA, 366 bp, Glycine max
  unsure (1)..(366): unsure at all n locations
ttctttttattttacatggattatcaatgatcttttaatatatatctgtattcccttatcaatacattatnttggagtaaaatgtcaagttttacatacttgacataacagattgtcattattctagtcagctatcaatgatctattatattaatgcagctcacaacagattcctttgtttctttaatacaagcatataattctaagacagatagtttggttaatttacgtcctgctcagtcagtggtctgggatgccatggtgccttccaaaaagaggacatgtgcaggtcgtccgaaaccctcatctgttgagaagctcaccagagacctgtgcactattcttcatgaacaacagtctttattt

SEQ ID NO: 289157 - DNA, 366 bp, Glycine max
tagcaatactaacctcacaaagaagggcaggttttttaacttcttaatttaactacaagactcttacactcatttatctttacattttagcttcttttacatttacatttatattttaactttgtttataacttttctaccatttttccttcacaacatttttaaagccttctatttagtttttttttttgcctttattttactttcaaaattcactgttagataaatttaatcaatgttcacactaaacccctctcaataactcgagattctattattgagtaaaataacttgatcaacaacgagtgataatgtttacaattacctgattttattcggctatctagttgattcatttagctaaca

SEQ ID NO: 289158 - DNA, 359 bp, Glycine max
  unsure (1)..(359): unsure at all n locations
tgcttcttatccaaagctcatcttagtggtgaagctccttcttccatggcttattccctagtggatggcgcctcctctcacctcttctcctttgtcttccgctgcatctccatggtgtaaaatcaccattaaaggacctcattgaagctcanagatccagcctccatagaagccccacaagcaagcttccatcaaaaccttttgctatttcaatttggaattcccttcctaaaatactagagatcttcttgatgttgtatcttgtattcttggattggtgtcttgaattaaacatgagaagcgcattntcataagacatcaaatcatcacgatcatatggcgtcatcaaaacatcaaat

SEQ ID NO: 289159 - DNA, 367 bp, Glycine max
  unsure (1)..(367): unsure at all n locations
gatgcagatgggtttgtatctaccttatcactcctctaatgactatggcatcatttctggcgctaaactgctgggaattggaggccatcttctcaattaaatttctggcttcaacaagaatcatgtctcccagggcttcaccactggcagcatctatcatacttctctccatattactgagtccttcataaaaatattggaaaagaagctgttctgaaatctgatggtgggggcactggccatagtttcttaaatctctcccagtactcatacaggctctctccactgagttttctaatacctgagatatccttcctgatggcttgggtcctggaagcanggaaaattttttctaagaatactctct

SEQ ID NO: 289160 - DNA, 410 bp, Glycine max
ggctatctcttatcttgagacaccatactcggggcaaagcgtgaaaggaagacgacatcggagtcagccagcgtacccctaagacgtgctgctacggacagcgaaccccggagcacacgagcgacgcgaaaagcgacgccagcagcctagcgcaaggccgcgcaacccgcgcgattaccaaccccagggaaccagggaccgcgcagagaatcgagggcgcggcggaaaccgcgaccgaaccagagcacacagcggtggacgcgagtggtcggccgacggcgcggcagcgaaacagaggcgagccgcggcgaaaaccccacgggggggatcggctctgcaggaccagacgcggaggcaaaaaacgggcagagcactcacacacaaagacagggaaagccggccagcgcgcc

SEQ ID NO: 289161 - DNA, 331 bp, Glycine max
  unsure (1)..(331): unsure at all n locations
tttctttcttaatcaatctgtctactgactagtctttctatttgccagttcacattcttggtctttctttgtctaacatacacacttgttcaaactcatgaaaaggaacacaaactccatcataatcatgccttcaattcaaaataaagtcatacacccattttcacaaaaagaataaagtgttttatatgcctgtcatcaaaatcaagtcaaacttgtccatatgcttcagaataagcaaaccaactatcctccatagactagcagtgaatataaatatgaaaaaaatactgtactanaaccataattaaaataataataaacccaaaag

SEQ ID NO: 289162 - DNA, 432 bp, Glycine max
  unsure (1)..(432): unsure at all n locations
atcttttaccttctgaaaaccgatagtaaatgaatggtttagtgcaaatatgcccaacgtggtactttgggaatcaaggctgctaataaaaaaacatatattttttatgcaagttgtaggttttttccttttccttgtcattattacaattttactttgggatatgtactattgtgttgctttcatgagatttcaacatttagcttttagattgttattctgaaatctgaaaataagttattcatgtatgctgctcttccttgatatcaagtggaaagttaactaggaaaagctcttagtcaatggctntttccagtgtttttcattgatatggatacaagtgcangtattgcattgaatttctaaaggaatgggcacgagaggatatttatatangaaaatntanaacatanagtactaacatcataatat

SEQ ID NO: 289163 - DNA, 391 bp, Glycine max
  unsure (1)..(391): unsure at all n locations
ttgagccaaaatcctgactcaccataaaccttgtcccagtgtgagaatgccaatccttaccctcggaagcaaaaaaaaaaaggagaagagaaggaaaatttccaatcaaagaggaagcataaaaaggagagaaggaaaatttccaatcaaagagaaagaaaagaagaggaaagaaaactcccaatcaaagaatgggagaagaaaaaaaaaaaaaaaaagaagttaaaaagaagaaagctcctggtcaaagaaaccagaagaatgtgcagaaaggtcttttgaccggacgatatctgaacaatacagaattgtcaccaaatgaacaaaaaaagaaggaaaggaaatcacgacctanaatggtcttctccctttaattaccaaccaaaatccc

SEQ ID NO: 289164 - DNA, 426 bp, Glycine max
  unsure (1)..(426): unsure at all n locations
agcttctacattcaatttcgagctnttcgatatattacgggactcaatcggacatccgagtaaaaagttattgtagtttgaatttgctcagggcttcggtattccatttcgagcgtctcgatatattacgggactcaatcggacatcagagtaaaaagttattgttgtttgaatttgctcagagcttcggtattccatttcgagcatctcgatatattacgggactcaatcagacatcggagtaaaaagttattgtagtttcaatttgctcagggcttcggtattccatttcgagcgtctcgatgtattacgggactcaatcagacatccgagtaaaaagttattgtcgtttgaatttgctcagagcttctacattcaatttcgagcttttcgatatatttacgggactcatcagacattcgagta

SEQ ID NO: 289165 - DNA, 427 bp, Glycine max
  unsure (1)..(427): unsure at all n locations
ttgagaaaattcaaacgacaatatctttntactcggatgtttgattgagtcccgtaatatatcgagacgctcgaaattgaataccgaagcgctgagcaaattcaaacaacaataactttttactcggatgtctgattgagtcccgtaatatatcgaaaagctcgaatgtgaatgtagaagctcagagcaaattcaaacgacaataactttttactcggatgtctgattgagtcccgtaatataccgagatgtcgaaatggaataccgaagctctgagcaaattcaaacaataataactttttactcggatgtccgattgagtcccgtaatatatcggaacgcttgaaatngaatgttgaagctctgagcaaattcaaacgacaataaacttttactcggatgtcttgatgagtcccgtaatatatcg

SEQ ID NO: 289166 - DNA, 410 bp, Glycine max
  unsure (1)..(410): unsure at all n locations
agctttttgtgagaaagcgtggaagagtcagtcttcctacttttgtttgttgaccacagagtggtacctggagatatgtcgcgagggtcangagaccttggggacgtcaggtggggtgctattgcccaaaaccaagcttgaccaatcccgacccaacccgggcatagtcagtcagtgggaacctgtgatgtacctaaacagacgagctcctggcagtcaaccaataaaagaacaaagaccacaaagcaaggaggcttgtgtggtggctggccagctatgaatcttgagtggtatctggaatttggcctctggtaatcgattaccaagggggtgtaatcgattacaaggcttnaaaatggagataggaagttaagatggcctcttgtaatcgattaccaagggtgtgtaat

SEQ ID NO: 289167 - DNA, 402 bp, Glycine max
  unsure (1)..(402): unsure at all n locations
tgaagaggatgctntaatggaggatttgaaagagagaatgtgggagcacgaaattgaaggaataaaagagggagagaagtggaactttgaagtgtatctcataagacattcattcatcaaagttacaacaagtgttacacatgcttctatttatagactaggtagcttccttgagaagctttcttgagaaaacttccttgagaagctagagcttagctgcgcacacccctctcataacttagccacctcctgagaagcttccttaagaagattcctaaagaagttagagcttagctacacatacctctctaatagctaagctcacctccttgagatgagaagctagaacttagctacacacccnctataatagctaagctcacccccatgacannaaacatg

SEQ ID NO: 289168 - DNA, 96 bp, Glycine max
aaaacggagagaagttgaactttaagttgtgtctcacaagactctcattcatcacagatacaacaagtgttacacatgcttctatttatagactag

SEQ ID NO: 289169 - DNA, 80 bp, Glycine max
tgcttgcacgcatgacgggcatgtatgatgcacgaatgcctatctcggtgtcgactatactgtggatgaatactcttcta

SEQ ID NO: 289170 - DNA, 371 bp, Glycine max
  unsure (1)..(371): unsure at all n locations
agctnnttaactatctacagttacaactctctctctctctctctatatatatatatagcaatgcaagttttaaaattggaagtcctcgttccaatcactcgcagtacacatgctaaaattgtaggatataaatgttgaatcaatataatatattttggtaaagtggcagaaaccgaaagttgaatctatcaaaatcaaaatagatgctgcagtgtcacgtcgtggttcatgaggaatatgggaaccataattagataggacaaacgtacgaagaagcaaggtgacgcaagtacccaacatagttagttggtcatctcacattcacactttacctttgtcagngccacataaagggtccgaatatgtgaata

SEQ ID NO: 289171 - DNA, 429 bp, Glycine max
actaagcttacaacattctcgtgcgttatctccctgagtaactgctgtatcaaatgatattcactcaaaaccaatccaaaccgccaaaccattaaataattttttttttataaaaaaaagcctcctctggctcaagcctcttcaaggtttccaaatactagaaactacagagaactaacaaaagaaaaggaaaatagataaatgaaaaaaaatggcaatttcttcagaaactcgaaattaaaaacaatctaagcgaattcgcttcgaatttcaaaattacaacttccctaggtgtaattaagcaagcagagaaaggaataccatgatttcacgtatggcggtgggagagacaccatcgccatccttggattggcttgaattttttatggcgaatggatttccgcgattggtggaagacttgatgcgagc

SEQ ID NO: 289172 - DNA, 393 bp, Glycine max
  unsure (1)..(393): unsure at all n locations
agcttataccattccattttcccanattttttaatccgagctgggaattctctcccgactcaagtaaaaggaccacctgcaacagaaagagcgccggcccaacgcacggctccagccgctccccggccagttaataatacagcccccgacgcgacctataaatatgcacagcacccgcccccgaaagataacttctcccctattcccatggcatactccgagttatggccttcattattggagaatcatttggtggtggccatacccgggaaggtcttccagccaccctaccccaagtggtacgacccgggtgccaagtgtgtgtaccatagtggagctcccggacacaatattgactcctgcatcccgttcaagtataaagtgcagcacctg

SEQ ID NO: 289173 - DNA, 397 bp, Glycine max
  unsure (1)..(397): unsure at all n locations
tcggtgggatcaaggagtataccacatattcaacaagattgttgaagactttaagcacacccaccctaataaccaagggctcagctgttgctaaacaaatttttttagcaaaactaacttgaaagctacgaagggtgctttagaacaaagtttgaaggaagctcctctagtggacctggacgctattaataaaaggaaatagaagaggctaggcaaacccattgctgatgaagaccaatatctaaacaactttggtcttacagaagattcagaagattatagctaagcaatagaaaagaaaaaagaccaaaaaataatcacaaaaagaagaagaagaaaatgaacttattgctanggagcacgggatgaagagaagacatgagaatgttgcgtctac

SEQ ID NO: 289174 - DNA, 455 bp, Glycine max
agttgctcatgcattgcaggcactgcagctagtaccagggatcctatcagccgacctgcctgctgcagcttttcattttcccagctcattgtgaacactgaacatgatatctggcatctgggcgtattactcggttctactagaactgctgatctggctaatgactgactgacgaatcaatggttactgtagcggtgagatggtgacaaagtctttgactctctcgagctatgagcttgcctctatgactgtctagtaacacagatctagcaagatagcaacgccaactcccgagttgctcatgctatggctctggtagtgacggcaaagcattcgcaaagcgctcattgctaatgactcccgtgagactgtgtcatatgcacaagagggatgtgtcttgatggaaaactgggatatctgttactagtgtaggaaatatcttatgagacacattg

SEQ ID NO: 289175 - DNA, 413 bp, Glycine max
  unsure (1)..(413): unsure at all n locations
tttggaatgaaaatggcgttatacttgcttggtntgacattttcatgataaggtggaaatggatatgtgtttcattttcgctcttggttaacaatcattttcctccaactcaactgctcgtggctttagtaaaactagaagtgttagttggagattgcatttgtcaaatgttgcaattttttgtttgcctttatgtttggaatttaagttcctagatactgtttgcgggaatgggacaggatcttgtggattgttcgatccctctttctccaaataaaatattgcctctttggaagtatcatttggtgtcttatttgccangcgttactaagttaagggaatttgtttctttactggcttttctaaatcaatacagctgccgagtaatgtgaataagatgtaagttgcttcat

SEQ ID NO: 289176 - DNA, 437 bp, Glycine max
  unsure (1)..(437): unsure at all n locations
agcttgtttcgaggtacttacccgttgaagatcgaagaacgatgaagaacgaatgaagaacgtcgaagaacggttganatctttgcgaaattcctcacggaaaacgttacggaaacgtttcggaagcgcctcggcttagattntcttcacggaaacatattttccaagcaaattcgaaagagagagaagtgcctaatgggctgaccccttccttcttgccttcctcccctatttatagcaaaataggggaggtggttgccgcccagctcgcccaggcgagctcagctcgcccaggcgagcagggttgcttcctccagaagcaaccgccttctggaggaatattccggagggcccaagtgggcctgggtgctatntgcacccccatttttactaagtacacccccctctagctgtttttggtgattcttttttcgtaa

SEQ ID NO: 289177 - DNA, 335 bp, Glycine max
  unsure (1)..(335): unsure at all n locations
gatgaatcaagattgattcaaagagtnttgatgatttttctagatgactgaccttttttctcaaaaggcaagagcacttcatgataaaaaagactgatgatctccagaatcaaaaaatgggttcaagaatgaattcagaacacttcaagggtccaatggaaatttgatttccagaatcaagaattaaggttccagaattcaggtcccagaatccatatctagaatccagaatccagagaagaccttatccagaatantatctgccagctcccctaactgagttgacatgaattttctcgaaccttttaccagacttttagtctctgggatcgata

SEQ ID NO: 289178 - DNA, 427 bp, Glycine max
  unsure (1)..(427): unsure at all n locations
ttctttttctgcaccaaatgcctttntctataaatagccatgcaaggggagaggttaagaggtcagaactaaagaaggagaggaggaaacacaaaaagagaaagagaagaagaaaaaaaagcaaagctgaggcgttgccaaatcgcaaccgtggatcattccctacatcatttctctcgctagccttgtaccccacgcaacagtcgattagtttttcttaagagttgaatgtaatctatgtacccttataggccctctgtgatattatgtgtgtatttatcttctcccctttatcgttggtaatttcgtctcattcgtaaggcttaattctagtcgatcactagtgtcatgaaatttgttttttagtgagactgganggaataaacaaaccaaaatgaaaaaaaatcattctaactattgatcgagt

SEQ ID NO: 289179 - DNA, 301 bp, Glycine max
cacagagtggtacctggagatatgtcgcgggggtcaagagaccttggggacgtcaggtggggtgctattgcccaaaaccaagcttgaccaatccccacccaacccgggcataatcggtcagtgagaacctgtgatgtacctaagcaggcgaactcctggcagtcaacagataaaaggaaaacaagaccacaaagcaaggaccttgtggggctggccagctgtgaattttgtgtaatatgtggattggggcctctggtaatcgattaccaaaggtgagtaatcgatacaaggcttaaaattg

SEQ ID NO: 289180 - DNA, 335 bp, Glycine max
  unsure (1)..(335): unsure at all n locations
ttcttgtatgattatggggtacccatcacatgtggtactaggtggcggtcgggcgatggtgcacaacaagttttccacatccacaatgcgcgcataaacccaccatcccctgttgcccacctccaactgagctcacgtactcccacgtagcccatatcctcgttcctctcaacaccgggtccccatcaatcctcccaagctttcccaacatccaagtaattcaacaatcaaacaacacaaactatcacagccaagaaaacagggcaaaggcagaanactctgcccaaaacaccaaccaaaatcacagcttttctcacttaaagaccccagtaaca

SEQ ID NO: 289181 - DNA, 438 bp, Glycine max
  unsure (1)..(438): unsure at all n locations
tagctagatagattgtccaagatggaagatacttttaactattttatgcatgtatccatctcaaaccaaaagaacattgatgcttctattaaaaatctagaggtttaagtgggacaattggcaaaacaaatgtctgagcatgaaagtggatccttctcagcaaccacaaaagtcaacccaagaaaacaatgtaaggcagctacaactaagaggggggcagtagttggtttgaagaacgaaagttantttcgcgagaaaagacaaatgaagagttgtaaaaatgagtgatgaaaaagaagtagtcgaaagagagaaacaaaatgaagtattagctaaagagatggagaacgaaatgagtgaagtggaggagcataaatngaagaaaacaacatctaacaaaggcaaagttgtactagatcatccaccaattcaacatct

SEQ ID NO: 289182 - DNA, 363 bp, Glycine max
  unsure (1)..(363): unsure at all n locations
ttgcttgttaactaaatgagctaagttatattntaatataattatattcatttagttcatgataaagaattaattntactcacaatatttgtgtgttacacgtacatattaaaggtggggcaggagaggagaggaaacttacaaaagaataaattaccatatgtttataaaatataattaacttatttcaagttttctataatttataacgacaatttaatcttattcggttttttaaatatagaaatgatttatataaaaacatgtatatatgataaacattaagtgtttaattaaactatntatctaagcacataaacatcaaatntaaaaaataattaacctttaaaatcaaccgattac

SEQ ID NO: 289183 - DNA, 349 bp, Glycine max
  unsure (1)..(349): unsure at all n locations
tccactccagttcccattcgagtacctaatggttttgantttcaaacgttaaaaaccagaatacacaatacccttaagctaactgacaaacaatttttggatgaaatttactaccggcagcctttcacatatgcaagtaatcaattttggtttcaatgtatgcaattgaaagatgatgctgatgttaacacaatgttaatgggtaatcatgaattttcgtttgttggtctgattgagttattatgtancctactacaccccacatggtattttaaacttacttcaagctactatgatccctacttatgatgccctgctatattacaatgggaagtggaacatgtcatgc

SEQ ID NO: 289184 - DNA, 388 bp, Glycine max
  unsure (1)..(388): unsure at all n locations
ttctttctcttgaggagggaaggatatttgcagctaatgaacaactctcttaactatttgnccttccccaaactggccaaacggacaanntaagactaaatacaatgactaatgcaaactgtccgcaagagtcattgcattcagtctcatacggaaatctaatgttcactcaccatgaacaacaattgtttatgtagcanataacagtgatcacatacaacaacatacagaaggtcatattctattacagacaaatatagacatcagcagttgtttatgtaactaatgtcatatgctgtgtctcaagggtgcttatgctcctatattgtagttgggtatatgtgtgtgagtatgtatcatgaggatgtgtgagtgttgatattaacta

SEQ ID NO: 289185 - DNA, 428 bp, Glycine max
  unsure (1)..(428): unsure at all n locations
aagaccagactatatgagggatccnacatgtgttatagttattatcttaagggctaccgcggctacgagctngcaagactaagaaaactcgtcatcaagacgacatcctgaagttgatgaataatgcctcatggaatagggaagaaaaaaaaagggagaagaacggtcctatacccgctcaactaccccaagaagaagatgaggaagaaaacccgggtgaaccaccttaacctgcatcacaacgacatgaatacgcgctaccgacccagagtctacgtcaagacgagtaagagcattggtggacaaaacgaaaccctgaccatggcctactggaacctgtaacctggaaaagcgacaagcggaacactggccaggcaatggataaatatccaaagacgacaaagcatactgggaagagacagcccccg

SEQ ID NO: 289186 - DNA, 386 bp, Glycine max
  unsure (1)..(386): unsure at all n locations
tgcttataacctccatgagagaaagcagagtgaagcttgtgagagtcgtgagtggagcgtcaagttagagttgtgagattagggaggcatgagtcgcaagagcctgagagcgagagtccgtgggggagaggaaattcaaattcttagtttttaaagagaatttgaaattctcctatttgaactaattaaaattccttatacaaataccagaattttaattgctccttaaactttntatccaaacagcttattttacgggtgagtattttaaattcttcaaaaaaatgaattaccccatttaattcccccatccaattgcagggtaaagganagttacattcttttatcaaacaaaagaaattttgaggaaggagtggagtatcata

SEQ ID NO: 289187 - DNA, 436 bp, Glycine max
tagcaaatggacctgggtattgctcagtttcattatatcttccgtaatactcatcacctctatcatatctaataatttttatatttatgtctaattgcccttttacttcattgtagtaaatttctaaggcatccattgcctaagaaatctcgggcagtaagtagacataactgtaacgtgaataatcatcaataatggtgataaagtatcattcctttccgaaagaactaacatcaaaaggtccacaaattcaatatcacaatttcaagaagctgagtgcttcttgtagctcttttctttgtatgttttgcttgttttcccttaatacaacccacataaatatttagatccgtaaaatctagataaggaagaatttcattctttattaatatttccatcctttctctagaaatgtgacctaaacgtttatgccaca

SEQ ID NO: 289188 - DNA, 302 bp, Glycine max
agcttttccaaagaagatggtgtcatccgcaaactggagaatattcactgcgaccttgttcttccccaccataaagctgtgaaataagtttcttgacactgcttccctcatcaatcctgttaacccttcagcaaccaagacaaataataaaggggccaagggatccccttgtctcaatcctctttgaggcttaaattcatcagttgggcttccatttacaaggatagatattgaggctgatgtgaggcatcctttaacccaaccaatccacctttcatgaaaccccattcttctcatcatat

SEQ ID NO: 289189 - DNA, 426 bp, Glycine max
  unsure (1)..(426): unsure at all n locations
tttgtcatcacctaanaaagccatttttaaggtctaacgtcttgaaatggtcttttccgcttttattcgttaaatgtagatttctaaaaggcctaaaatcaacatgtagctttattacctctttcaaaaataaagagatcatgaatggtccaatgccttaatgttctctctattttcaaaaagaatcgaaagattgtttaatggtccaatgccttaaatgacctttcattcaataaaaacatacttgcacaaaggataaaaaataacttaaccaacgcttagttctcaaagaactaagtaggtctgatttccttatcacaattgaggaatatgtangagcaagggaaacaccctcgtcgaccacaaaaagataaaaaatataaaagacattggaaataacataaaattgatgtcatatttgcacat

SEQ ID NO: 289190 - DNA, 378 bp, Glycine max
  unsure (1)..(378): unsure at all n locations
agggaacgcaaaagaacggcgggaagaaaaaggggaaccccccccggagtgtcatgagctgcaaccanagcggggcaaagcacggaaaaacacttcattcttacacccgagagggaagggaaacaaagagcagaagccgaaaaaagaggaaaaacagaaaacgaaaaggacggaagagggaggaaaaaggcacggaacgaaaacgaagggcggaagaagagagaaaaggaggcacacgagcaggagacggaggaagaacagaggaggcgcgggggagaggggaggcggaagcgaaaaagacgaaggaatacgagggggaagcaagaaacgcggcggggcaagagaaaggggggggaacaaggggaacaacgaagcaag

SEQ ID NO: 289191 - DNA, 354 bp, Glycine max
  unsure (1)..(354): unsure at all n locations
gatgacttgactgagacntgaaaacaccantaanaattctcacctacaatcccacttttaaattttatttttgacaggggatccgcgggggaatttccttcccctgcacaacggtccacacactagttgtgagctgccagagacggtacaaatctgattgtacagcatctctctcaggatttgtgtacacaacggggagactacgacggtttatcgaaataacccccccccccccggttttgaatttaactattctgggggaaagaatccctatggctctccccctggagtttacctgtactgatactatctatgctgatattgtaatagtggccctatgggtatatgcttgtg

SEQ ID NO: 289192 - DNA, 410 bp, Glycine max
  unsure (1)..(410): unsure at all n locations
agcttgtatgtaaactatatgccttggttaacctggtaacccaattggccatgaataaaaaatctgcacttgtcgccatactctatggtttatgctcctctgttgaccaccacacagacctttgcccttctgtgcagcaatctaaagcaattgaacagcctgaagcttatgctgcaaacatctacaatagacctcctcaacctcagcagcaaaatcagccacaacagaacaattatgacctttccagcaacagatagaatcctgngtggaggaatcatcccaaccttagatggtcgaatccttcacaacaacagcaacaacaacaacatccttattttcagaatgttgttggccctagcagaaccatacgttctccacctatccagtagcaataacaacaacagcaacag

SEQ ID NO: 289193 - DNA, 423 bp, Glycine max
  unsure (1)..(423): unsure at all n locations
ntataagcgcaggtcaagtggtcgcaatatgcgaagatgatgttccaagtacattgtatttggtacgaccatgccctcctgatttccagctgggaaattggcgagtggaggaacgcctcggcatttacgcaacgagcataatgtaaacctttacggttttaaaagctctatagttgggcctaggctttagagtttttccttttgttaaggctttgtgtcttttgtttttgaatttataatacaaggatctttcttctctgttctacgtctctacccattctcattcatttgcatgtttacttctttttctgaaacggcagatccgatgacgagtcccccgaaggtactaatacctgggacccgcctatcgacttcgagcaagaaatgagtcaaacggaagatgaaagaaacgaggatgtggga

SEQ ID NO: 289194 - DNA, 426 bp, Glycine max
  unsure (1)..(426): unsure at all n locations
agctttataattctctatagataacaatcacccttgagcaatccctaatcatgtgaagaaatgactccttaatcgctccacacctgcaacaagaaaggttagaagataaatgtcgtttaacacgaaaagaaattgtagggaggctgccatggaaggcaagtcaaaggaagaatttgacanttttaggtaaaggaggcttccaaacacaagaccagttcactagaaaagaagaatgaatggcaggctctcggattaaccactcgaaggcatatttagttgaaaagcaccctaaactagatgggttccatataattntgtcaagcatatgaataacaagtgtggtactcatcattttgagtctaatattanttggtagagttgataaacagtgtcccaattcactgccctcaatggaatgtattatgc

SEQ ID NO: 289195 - DNA, 442 bp, Glycine max
  unsure (1)..(442): unsure at all n locations
actaagctataagtataaattattttttattatagtaaaattttaatttaactaattatctgcgataataaacttataacctgttaatatattaggctctaccgatataagacttagttcacatattttcatcttcctctcatgcttttaataacaataattttgatttttataaattatattttgattcacatcaattgttttctcaattgtgtctaaacctattgcttcatgtaaagaaaagttagagttaccacaagtctgataggttatacaaatanacctgttgctttatgtaaagaaaagttagagttatatcaaagttttgataggttatacaaataacgcctattattttttcatgtatgagatatgagataagaacgagtctattaataggttatacaaactttnttcatgtataccaacgttctatgagata

SEQ ID NO: 289196 - DNA, 422 bp, Glycine max
agcttttaactcgcagagactaacgtcgtcttttgcggccttcgtcaatcgcggccgacaagcccgttgacacgcagagatttatgtcatcttccgcgcttacaagatctgtcatactgagttctgagtcacgctgacgggcggaaatacccgagtggttatccgtataaactttttgttggttgtaagacgaaaagcctggtagcacgcagagactaacgtcgtcttctgcgcccttcgtcaatcgcggccgacaagcccgtttactcgcggtgatctacgtcatcttccgtgctcacaagatctgtcatactgacttttgagtcacgctgacgggcggaaatacccgagtggttatccgtatacactttttgcattctgtaagacgaaaagcttgataacacgcagagactaacgtcgtc

SEQ ID NO: 289197 - DNA, 316 bp, Glycine max
atgcaaaagttatacggataacctctctggtattttcgcctctcagcgtgactgcaaagtcagtatgacagatcttttgagcacggaagatgacctatattaccgcgtgtaaacgggcttgtcagccgtgattgacgaatggcgcagaggaccacgttagtctctacgtgctatcaagcttttcgtcttacagaacacaaaaaggttattcgggtaaccactcgggtattttcggccatccgccgcaccccagctcacatgacagatcttgtgagcgcggaagattacgtacatcttcacgtgtccacgggcttgt

SEQ ID NO: 289198 - DNA, 280 bp, Glycine max
agcttttccctaatagagtgctttggataagaagcttagagaggaagcttcaatggaggaagagaatgagagagagagagagagagagagtccgggggggggggtgcgaattgatggaaattacggagagaagttgaactttgaagtgtgtctcacaagtttctcatccatcaaagttatgacaagtgttacacatgtttctatttatagcctagcacatgggaaacttccttgagaagcaaggaatgtagctctcttgggaagctagaggaagaaagct

SEQ ID NO: 289199 - DNA, 411 bp, Glycine max
  unsure (1)..(411): unsure at all n locations
tactcaagcttgcttgcggagcttctatggaagctggatctttgagctttttgatgttcttcaatggtgatttttcaccatagagatgcagcggaaggcaaaggagaagaggagaggggaggcaccatccactatggaataagccaaggaagaaagagcttcaccaccaaaaattgccttggataagaagcttgaagaggatgctttaatggaggaaaagaaagagagaaggggggagcacgaaattcaaggaataaaagagggagtaactggactttgaagtatgtctcacaagactctcattcatcaaaggtacaacaagtgttacacatgcttctatatatagactangtagcttccttgagaagctttcttaaaaaaacttccttgagaagcttctttgagaaaact

SEQ ID NO: 289200 - DNA, 436 bp, Glycine max
  unsure (1)..(436): unsure at all n locations
agctttgtttgttttgtgattctagagagagaaaggtccaagttccagagagttttgagagattttgctgtgtgaagatctacagagaccagagcttgaagcggaagccgttttgagagcttgagatgagtttgtgagtggttgtgagatcctagaggtgaaggagacatcctcacaacttgtaattttgcaatctttcatcttgttcttttctttgttgtaaaggaggcttcccggttatggaaagctaaaatcctctgttggatcttccttgtaagtacttgatgtaaatatcttactatctatctaatgatgttttatgtgttctttgtgctatcagcttttcattctagtatgcctttaccttgatcatatagatgcatgctntggtaggggcattcaacagtgganactgggctgattctgatgaccttga

SEQ ID NO: 289201 - DNA, 423 bp, Glycine max
  unsure (1)..(423): unsure at all n locations
gaaatttgcaaattgtttcagaaatttatttagtctctggtaatngancacatcctctggtaatcgattaccagagaggaaatagcatagttttgaaaagataattgttcttaaaatttttttgtaaaatatttcctttagccaaacctgtgcagcatcaattaaggaattctttctaagatcctatcaactaagtatatcgttcttcttgcatttctgaattcttgacttgaatcgcgctttctttggatcatcaaaacttcatatcatatatgcttctacaatctcccctttttgatgatgacaataatctaaaatcaagataaacgatacaccattgataatgcgtgctcacaacccttacacccccttaagattgaagattatgcctaagttctctcncccttttgtaacatcaaaaag

SEQ ID NO: 289202 - DNA, 425 bp, Glycine max
tttcttttttgttagagtcagaagtgctaatgacaaatacttataagtttgagaatttagtgaaacttgatacgttatcaagaaccggacgtagtctcagtgatagaaatgaactaatataaaacttcatatgtctaatatttatctttgtgtgcatcttatctgaccttgggattgaatttgattttgttttgaaaatctgctttgataacatctatttcaattgtctcgctatgtttggttgagaaaatccattatttgtctctcaaagttattttcagatggtaagttgtgtgtttgcaacaaagtttaataaaattttaaaatcacaattcaatctcttcttgcgatattgccttacatataacatgttcattatgcctttatattgtcagtatctcacatataatttactagcactatga

SEQ ID NO: 289203 - DNA, 567 bp, Glycine max
  unsure (1)..(567): unsure at all n locations
ccgccactcacacacccaccaccacatcanacctaagtactagagtaacttgtgaccaatanacnaaannnaagggcgaggtttgaaccttgagacantcgcananacgngacaccatanaanacccaagcccgctgcaccattgacagaattaaccaaaaattttacctcttttggacaccagaggcagagacaaccatctgtcaattgcacaaagtcatgactctcactccagcgctagctcttcccaatttccagctgcccttcattctggaaactaatgctaacgacactggtataggagcagtactacatcagaatggccatccaataacatttttgttcaagaaacttgcacctagagtggaaaagaaatctgacgcccccaacagatgctagcaattgttgaagctatagctaaaatcaaacactacctgctgggacacaaatttattaacaaaactgatcaaaaagcttgagaacaatgacggaacaacccctacagacaccctgacaacaacagtggtaacacaagttttgtgaaataattggcgactgacacaaggc

SEQ ID NO: 289204 - DNA, 417 bp, Glycine max
  unsure (1)..(417): unsure at all n locations
tcttaccactatttactgatgaatactgtagccaatgatgcgcatatcggatatggctgacatgcacaatattgcatttncgcgtggaaaattgtgaactaggacggtctgaggctacgagactgaatacaatactgtagttccccctttgttacacgatcttttgcgatgctggtgcgcccctaaatgtcatctgctcgaactgaacagtgccgtgaatgatgataaaccattttataacaggtatccctggctgatacaacaagtgctgaaaatcgtaatccgacacgcaatgatgggttccacacataggatacattcatttttgcggctagcgtcgcaatgactgctgtcggtaccttgctgttgttacaccaaataacgctaagcaaatatctgaccgacatcgggaaaccc

SEQ ID NO: 289205 - DNA, 554 bp, Glycine max
  unsure (1)..(554): unsure at all n locations
acgcacacacgacgcgcgcacaacgtacacgtgagacgatataaagaggtgagatactcattattantgnacaaaaanaaganaggaggaatgagncttgagacccctgaaacnccgtgacaccacannanactnaagcttgggagttgctcaaacaagttgagccttttagagctcttagctttggnacacaagtgcaacaagagatgtaactactttatgccccaaaaaattaccagtgttaaaactgattccttcatttgctcattgcaggaaggggggcctacaacattttccttgaaggactttcttaaaagtcaaagacaagaagtaaatatccacctagacgctggggaaagaacatgtgtacattgtgccgcccccgcacacaccggactggtgcatgcatgatttgatcactagtgaaaaggtgccatcgaaacttccgcacaattattgggaacagactacaagactttcgggacaactgcagtattacgaatagggtacataaaacggagaaaatcgaattctatcaaatacacaatatttcg

SEQ ID NO: 289206 - DNA, 381 bp, Glycine max
  unsure (1)..(381): unsure at all n locations
tatcttattttccgatcgcgaccctctgttcatcagtggattctggcaggagctntttaagctcagcggcactcaccttcgtatgagttcagcctaccatccacaaagtgatggtcagactgaggttatgaatagagtaattgagcagtatttgcgcgcttttgttcaccgtcggcccggaaattggcgtaaatacttaccctggattgagctctcacacaacacttcatggaattccggcacaggttccacgccctatgagattacatttggacgataaccttcttcattaccggaatacatctcgggaacttcanaatttgatgctgtggacgaatctttatacaccgagaggaagtgttcattgcattcgtagaaatt

SEQ ID NO: 289207 - DNA, 422 bp, Glycine max
tccgcttgctgaagatgtggacaaataatcactatctgtttctgatttataaacatcaagtcctggattatctatgatagtttcctctttctttgactcaccaccaccattcatctcacagatgaagaatggtgaagttccttgatcagagcttgaaaccgaagaagtaccagcttccattgtagtaaatggtgtccctagctcacggctgctagttggagtgacaactggtccttttatagaatttaaagaatccccctctcttcctctcgtttccaagcattctaatttgttcagaaagtaatggacataattcttcacaatccctcttttgtgttcaaccaaattcaagcggagtacctagtgttgggaatgcttataaccacgatgtgcactgcagtcttcctgcattgttttctcat

SEQ ID NO: 289208 - DNA, 338 bp, Glycine max
  unsure (1)..(338): unsure at all n locations
tatctttgcttttcaaagcttacagaataatgacttanaacgtagccaaatacacggcttaaaataaaagataataataatctaaatctaggaaggtggtggaaggtcgaagcaccgacgaagataactcacatcctcttcaagctgagtgatgcgggcatccattccttcaaagcgagcatcaatggcatctatgcgaccatccaacgaatcaaagcattcgccatcatgcatgacggctgaggaatcatctcgttgaggcggaggagagggagtatgttcgtcttgcggaggttgcgcgttcttcttcaaccattgcccatgcatgtccacggtag

SEQ ID NO: 289209 - DNA, 411 bp, Glycine max
  unsure (1)..(411): unsure at all n locations
tgacttgagtcatcaagagattatacaatatgttgacacatgtcnctgagtttcaacaattatcaatcatggttgaatcatctatctttcaatctatctttcaatatcttctttcatctctttaaactctttctataaaaatttctgattcatttctcctcatctttctaaaagtttttttgttcaaatactttctctttcaagaaaagttctttgatcaaaaacttgtgctattcatctttttcattctctccctctttccaacagaatgaaggactaaccgcctgaattcttttctatctgccttctccctttccaagagaattcaaaggactccgtctgagaattctattgattcttccctttcccttaaacaaaatatttcaaaggactaaccgccctcaatatctt

SEQ ID NO: 289210 - DNA, 429 bp, Glycine max
  unsure (1)..(429): unsure at all n locations
tgcttgtactttccagtgatggaatgaatccatatggcagtttaagcactcaacacagttcatggcctattttgctagtaatttaaaacttgtctccttggttgtgcatgaagcaaaaatgcatgatgttatctatgatgatatcaagcccaagacaactaggaaaggacattgatatttatctcagtcccttgattgaagacttgacaaagttgtgggacaagggggttactgtgtttgatggtatcaaaataagacatttaagttgcgtgcaatgctatttcgtaccattaatgactttccagcatacgagaatntgagtggatatagtgttaagggccatcatgcatgctctatatatgaagaagacacaagccatgtacaattgnacatggaagaaaatatatacactcggcattgcattttcta

SEQ ID NO: 289211 - DNA, 424 bp, Glycine max
  unsure (1)..(424): unsure at all n locations
tcattaagaggcttcctccagaagcttcattaagagacttctatcattctccatacatcttttcaaagatcccaacggtcagatcatggacaagtgtcttgtgaagttggagaccaaattttgaaaagatccaacgattaaagaaggctgggcagaatttttaccgaggcagcttcatgtagctttctctagaagcttcattaagaggctttctctagaagcttcctcgtggcttctttgagaagctagatcttatcttccacacccctctattaactaaattaacttccttaaaaataattacggatgagaataacgcaacaaataatctaacatcaaacataattactaataatatatagatatatatatcagggtgttacacagncaatatcggnccttctcattactcatcacccaatca

SEQ ID NO: 289212 - DNA, 380 bp, Glycine max
  unsure (1)..(380): unsure at all n locations
tgcttctaatttatatttttagaccaaaattcaattattaacatttaggccattaatgagtcaaccattatttgattagagatttttctcggaactattctaattctttctaaactntagctttaaaacttaagaggttaaccatggtaaggtatcctatggtaacatctcattntctaccatttcaatagcctaaaaacactacccaattacacaacaaaaaaataacattgtctaccacacacacatggaaaattggaatgttatagttgacataagtatctcatgatttcttcatcggtggtgtcttcaagtgcttcatcaacaatatgttgtcaaactatatcgaagttagaagttcaagtcattttatgagtgag

SEQ ID NO: 289213 - DNA, 403 bp, Glycine max
  unsure (1)..(403): unsure at all n locations
taggaaggaggattggctgtttgcttactagttgcacccatttggataggtaggaaaccgtagaatcccttgaacctaagtgagagttatgattcagtataccgaagaaggaagatcatgttgaagtcttgaaacgtatacctcttttctttaatcgtctcatgtttgagaaagagtcgaccatgtggtcaatcgtgtttccttatgcctgtttgttcatttagattgcattagtgtctcctatgatattacccaactccaaatagtatgtcattcacattntattatctttgagatgttactctcatgagaaaacttgacttatgaaatactaccattgagaaagcgaaaatcgtcaaacttagtcattaagtgcanaggagtcttaaggtcgaagtcactg

SEQ ID NO: 289214 - DNA, 381 bp, Glycine max
  unsure (1)..(381): unsure at all n locations
agctttacaacacccaagcaatacaaaatccaaacatcatgaactatcaaaaccaagaaaacagggcaaaggcagaaaactctgcccaaaaacacaaaccaataccacagctttccttactcaaataccccagtaacattctcttcgttccaattcgttaaccgttggatcgactcgaaaattttactggaggtccctagtacataaatctacattgtggccattgggatctgctagaaaacgtccagaacccaatctgtactactctntccacaaccagcaaatacacatcattntctgcacaaagccaaaattctgctgcacatttcaccagcanaattctgcataatagtgaagatttcgaaatcacacttgccctcg

SEQ ID NO: 289215 - DNA, 419 bp, Glycine max
gtatttgttggtataatttgcctgttccattaggttcttaatgtctttagaggttatttcctcattgacatcttttgtcttgaatggaattgccatgacaggtttattgttactgtctttgatgtttggtagttgatattgtgttgcgggaggtaattccgattggattaactcactatccttcacttgccaatttgttatgacatttgttgttggatcacctatgatgtcttgttccaacggtatctatatcctttctgatggcataagcatgaaaccaatcaaagaaaaggacattaattttgactctttcgacaaattcgtagaacttgtcttggatttgttttctgtttgtacccttgtaatgttggaaaaaccatctcctttggggttcattctccggagaataaaatctttcc

SEQ ID NO: 289216 - DNA, 416 bp, Glycine max
acctcggtggtaaaaggtatgagcatttgaatttctcgagagcttccattttttaatttcaaacgtctcgatatattatgcgcccgaatcggacatccgtgtgaaaaattatgaccaatagaatttctcgagagcttacgttggtcattctcgagagcctctatataggatgcgcctgaatcggacatccgagttaaaagttatgactatttgaatttctcaagagcttccgttgcccaattatgagcgtctcgatatgtgattcgcatgaatcggacatccgtgtgaaaaggtatgactatttgaatttcacaagagcttccgttgctcaattttgatcggctcgatatgtgattcgcccgaatcgaacattcgtgtgaaaaggtatgaacatttgaatttctcgagagcttccg

SEQ ID NO: 289217 - DNA, 202 bp, Glycine max
agctcgcgacgctattgacgagtgcctgtatatagatgcgcctgaagtagacatacgagtgacaagctctgaccgtttggatgattttacaagttcctatgattaagtacgagcgtgcccatctgatatacacctgagaaatacctcagtggaagaacgcctgagcatttgcacttcttgcgagctgtcgacgttcactgtt

SEQ ID NO: 289218 - DNA, 443 bp, Glycine max
  unsure (1)..(443): unsure at all n locations
agctttgttgcttatgtgcccaaaccataactttgatgatgctgcatagctgcatatcatttatagcggtttgaaacctcaaaacaagatgatccttgatgcctcaactagaggcattatgatgtccaagagttcagaggaagccatagtaatcattgactccaaagtagccagtgattatcanagtcatcatgatagagctccaactcaaagaaaaggtataacagaagtggacactcaaaatgcaattctagcacanaacanactcttgacgcaacaaatngaggccttaacaaagcagataggccaactccctcagcaatatcaccaaggtggaccacagaaaacacaacaagttcaccaagttcaacanattttgagaatgcaattttgcggaggtaaccatcagaatgaccactatntagtacctggtgacgaacaac

SEQ ID NO: 289219 - DNA, 433 bp, Glycine max
  unsure (1)..(433): unsure at all n locations
tcctcggggccatttcctgcgagaacaaacatttaaaagttatttntacaagataatgcttatcttaacgcaaaaaatgtcatgctaacctctctgattttagaacgaactgacccctcacccagaaacagctgaaacacgtatgtgtggaatatcctactatttatatcaacatagaggccatccaacacattctaattgtcatacatatatgcatttgaaaagaacatacattctcacgcccaaggcattgcgtcaaactccacttaatttatatcctaaacatttgctatttagaaactacctacatatgtttgaaatatatatcatacaaatttttattgtttcactcgcatttattcatattggcaagctatttacattatgcacacacttgcattcaaaagggaatttcgtgctatcatacattcat

SEQ ID NO: 289220 - DNA, 419 bp, Glycine max
  unsure (1)..(419): unsure at all n locations
agcttgtctacttccttcttcactacatcaagaatcactgggttgagtcttctctgtggctgtcttactggtttagccccatcctctanatttatctaatgcatacatgtggatgggctaataccaggaatgtccgccagggtccagcctatagccttcttatgcttcttgagaattgataaaaacttctcctcttgctcatcaacaagggaggcaaatataattactggaaaacgtttgctatcatccaagtaagcatattttanatttgatggcagaggcttcaattctggtgtgggcggttggataatggtagaaggagatggtntctcagcctgtacctcataaagacagtcagaggtatgtgtacttcctgaaacatggctagttctatcagactctacgacacctactctacg

SEQ ID NO: 289221 - DNA, 440 bp, Glycine max
  unsure (1)..(440): unsure at all n locations
taggctaaattaggctaaaattntgtaagctacttgagctgtttctagtcttacatgagggatctgcggacgaaactcagtttaagttagtctaaacctaagagggctatctaaatcgggtgtagccttaaatgaaggatctgcggacgaagcttggatattccgcctgacgaaggattgagggtttagtaatttaggctgcaacataaaacacaagagcatgattgattagagaaatatatttctatgcatcagcgatttgtagaaagacccaacatatctacctactgttgtcattntatttaccttgcattttatnagttttagcatacaagtttagtttagaatttgtttgaaattatcacttatacatgttctctcaacaatgcttcgattctgaacttaattcanggtaacattagttccctgtgtcaatactc

SEQ ID NO: 289222 - DNA, 442 bp, Glycine max
  unsure (1)..(442): unsure at all n locations
agctttatttattctntntttattaggntagatgaattcttaaaagaaattaattgaaacaaatgacgattaacttcaactgaaagtcaagaaaaatggtcaaaaaggaaaacttacgctatttatttgagaaaagcgttaacccgaaatttgtatggaccaaaactgctatgcccaaaatacaataaatgatagggaaaatgcattatttttatatatatataatgacattggtgcaaactaacttctttnttatgattaattnttattaaaaaatgatgtggattgaccactttattaatactcanattgaaaacattacttaaggacatgaaatgtagttcaacttcaaccaacaatatgttgcagcagggataatgcatttgtatcttaaataaccattntatatcatttcaaagctggtattcaggaagagttaatt

SEQ ID NO: 289223 - DNA, 415 bp, Glycine max
  unsure (1)..(415): unsure at all n locations
aactcaagcttgtccacaaaaataggttnttgaagtttgtaatttaaatttctcactatttataatggatcattttcaaggtccaacgccttataatgatcacctcttaaagtaaaaaagaatcacttgataagaaagaactacgtaggtctgatttcctcatcgcaattgaggaatacgtaggagcaaagggaaacacccttgtcaaccacaaaaagagaaaaatataaaaagggtataaaagatataaagacataaaaagggaacactcaatcaagtcatgtntgcacattcgatcaaaggctgccgtcccttgggacggacgtgtggggtgctaataccttccccgtgcgtaaatacaactcccgaacctttcacttaaaagttcgtagatcngcgtctttcggtttttccg

SEQ ID NO: 289224 - DNA, 402 bp, Glycine max
  unsure (1)..(402): unsure at all n locations
ttcttattgaggagaggcgcaagaccactcaagaaaaagatttactgctgcggcaggaggaactagacaatttgttgttcaggtacttcactntctatctctctctgctgagtgttttttctctctgcagaatttctcanatttctcaaatttctccattgggtgttcattcatggcttttggaagatgcaataagcaataaatatttacttatctgattgagtttttttacatggttgtataacccaacccaatggcatagtgtgcaaacagattttntctttttttttttganagtaaaaaaatgttacaatgtgaaaaatgttagctacactttttatgcacaaaaaattaanaaaatgtatcaaaatttttataataactcataagctccacttaatc

SEQ ID NO: 289225 - DNA, 520 bp, Glycine max
  unsure (1)..(520): unsure at all n locations
cacccacatanatacgccaacagcccaccgcggattaacaaacaacgacatactcacccnnnncagggggtgaatgagcatgatacnccgcaanacgngancnananaaacncaagccctagnnganggcccgcnanggnanggaaaactattaatccatcatcccgggggacaaagaagaccaggagaaaataggggggtattgaaacatacagcggacttggcaaaataaacaaattcagccactctcattataaaaaccaatggacaatggtacaccagaccaattgcctaactaatttccaaccctcccaaaaaccaatccaaactctaacaacgtcattgctttaaatacctatatagcccaagaaagaaccgacaaacctttaaagactatgcaaaaaagataattcaaacaagatattgccaatatgaggggagctattaagcaaggaccacgaatacanaaatggacaccaccatggcaccgacaattcttccataagggagacaaacaagn

SEQ ID NO: 289226 - DNA, 433 bp, Glycine max
  unsure (1)..(433): unsure at all n locations
tcatctagtagttaatttcggggacgaaattcctaanagggtgggagtattgtaacatcctggaaatttctacccggagtttacggaaacgatgtattttgaatgattatatatatatatatatatatatatatataagtatatatatatatatatatatatatatataagtattgttccgtgtatatgtatagatatgttcttgatagaaataggaatagtgggggcaagatacgcgggttagactaattaaggaagagaaatccataactgggaggttatgggttaattcttaattaattagttaaaaatcattgttgtgcgtgcgactntgaatttaactaaaccaacctctgaaccacgctcggngttntattctgagncgtttgatatatatatngcttgctttcgaanactggcccangcagacgct

SEQ ID NO: 289227 - DNA, 412 bp, Glycine max
  unsure (1)..(412): unsure at all n locations
tctcccccattttctataaatagggggagaattgaagtttataagggttcagcccccttaggcacttctctctctctctctcgaaatagatgaagaaaattagttccgtgaagaaaattcaagccgaggcgcttccgtaacatttccgtaacgtttccgtgagtaattactcgaagatcctcgaccgttcttcaagattcatcgtttgttcttcgttttcttcagtcttcaacgggtaagtacctcaaccaagctttcatttcattctatgtacccgtggtggtccacattttgtttcatgtatttttattctcgttttcatttactttttatacccccttttgacgtgcttaagccatttatttaagtcatttctcacttattctaanaataaaataaatttccaccgatc

SEQ ID NO: 289228 - DNA, 430 bp, Glycine max
  unsure (1)..(430): unsure at all n locations
ttctttataacacgcagagactaacgtcgtcttttgcggccttcgtcaatcgcggccgacaagcccgttgacacgcagagatttatgtcatcttccgcgcttacaagatctgtcatactgagttttgagtcacgctgacgggcggaaatacccgagtggttatccgtataaactttttgttgtttgtaagacgaatagcctggtagcacgcagagactaacgtcgtcttctgcgcccttcgtcaatcgcggccgacaagcccgtttacacgcggtgatttacgtcatcttccgtgctcacaagatctgtcatactgacttttgagtcacgctgacgggcggaaatacccgagtggttatccgtataaactttntgcatgtctgtagacgaaaagcttgataacacgcagagactaacgtcgtcttttgga

SEQ ID NO: 289229 - DNA, 402 bp, Glycine max
  unsure (1)..(402): unsure at all n locations
tttcgtcttacagaatgcaaaaagnttatacgtataaccatttcggtatttccgcccgtcagcgtgactcaaaagtcagtatgacagatcttttgagcacggaagatgacgtaaatcaccgcgtgtaaaccggcttgtcggccgcgaatgaccaatggcgcagaggacgacgttagtctctacgtgctatcaggcttttcgtcttacagacaacaaaaagtttatacggataaccactcgggtattttccgcgtcccgcgactcaaaagtcagtatgacagatcttgtgagcgcggaagatgacgtaaatctccacgtgtcaacgggctttgcgggcgcgattggcgaatggcgcagaaaacgacgttagtctctgcgtgctatcaggactttcgacttaca

SEQ ID NO: 289230 - DNA, 355 bp, Glycine max
tgctttcagttttatatattattgcatgaaccttttggtcgttgcaaattattttgatatagattacatgtattatatgtaggattaatttgttattttttttttcacatttaaatattaaatctaaaattctcatctgggatcaatacctcacactatagcgacaatattagttatttatcaaacaaaatattgtatttgcagatattacgcctttggcctctgtttctgaatgaaaggcaactcttacataaaaaataaaaaaaaaaaaacttgcaatatgaatattgtgcacactttatgctaattaattttggtgcctcatgagtttactattcttcaactgagctttctt

SEQ ID NO: 289231 - DNA, 363 bp, Glycine max
  unsure (1)..(363): unsure at all n locations
aagaacgcgactaacacaagataaggtgacaatatggcggtgcaatgaaaggcataagatacatgtaagtatgaaaactttcgtctattaaaatattacttcaacaaagtgccaaaaggaatataaagactttattaagagtgatcgatgcctataatgattctcatacaattggctctgaaacttattatttcgcctctcacaccatatattaggagcttcttacaacatgacaacatgataaactggtatttgattggattctcatctcaatntatctttattactttactttactctgttgggagaattcatgagtatggattaactatgaataggggaacaagaaaggcaataaagaga

SEQ ID NO: 289232 - DNA, 427 bp, Glycine max
  unsure (1)..(427): unsure at all n locations
agcttttctgaaacatcatctaacacatcctttatgggagaaataacattagactcatcaaaggaaacatgaatggatccttcaatagtcataantctcttattgtatattctatatgctttactatgcaaggaataaccaaggaagattccttcatccgacttggcatcaaactttcctaagtttcttttccattatttaatacaaaacatttgcaaccaaagacatgcatatgtgaaatgtttggttttctaccattgaataattcataaggagttttctttaagatgggtcttattaaagccctatttaagatgtagcatgcagtgttaacagcttcagcccanaagtattttgaaagtggagtatcatttaataaggttcttgctatttcttctaangatctattnttcctttcaacaacacc

SEQ ID NO: 289233 - DNA, 353 bp, Glycine max
taaccagagtgcttttcttgtcagctttcaaaaggttagatatctcactaaaactgattaaaccccatcaagaacctttacttggttttacaaaaggacaagttcatacctgcgattatgtggaacttgagaccacctttggagtagggaaattatctcaaatagtgctcgtccaatacatcattgttgatgcaaacacatcatgcaatattctcattaaacgaccttctctggatgcccttcgggcaatgtctttaccccacatctagccatgaaatttcccaactccaaacataatatcatcaccatcaaagcaaataaaaaagaagcccaggagtgttatgccaaaagcc

SEQ ID NO: 289234 - DNA, 394 bp, Glycine max
  unsure (1)..(394): unsure at all n locations
tagcttatagaatgtttgggtgacacaaggttgacaaattatggtaaagagaaaagtgaaaaaggaacaaggtttgccatcttattttgaaatggctttccaaattacttatccctattttggaataactatcctaaaatatgaaaaatatgaaaatcatattttggaataactattatagaataagtaatttagaaacctatttcagaatatatattctagaatataattttcatattctgaattagttattctggaatagggatacatttctagaatggtcattctgtgataaagagagggtaatatatgaatntttaagcatttggnggtgtagcgcaaaaaatatggtacaggaagccattgcccattatgaacataatgatgatggatc

SEQ ID NO: 289235 - DNA, 172 bp, Glycine max
tgctgctactgtcactacacttgcatttttgacttctcgaagtgcgataatcgtttgaacaaatattagatgcttactaaacgggaaaaattggaatgctgagatagaacagaattggaatgctagaaagatatatcctaaatgaatttttatcaaacaatattataactaa

SEQ ID NO: 289236 - DNA, 429 bp, Glycine max
  unsure (1)..(429): unsure at all n locations
agcttgttctctcgggttatgatttaaaatactttattttaaatgagtcaaattgagcctttnttttagagggtcaagttgggctacaacctgttttttttataattaaaaactgccttttttgctatggatgccttgctgcaatccatgcttctggcatctgccatggcactgccatacaatggcattttcgtcaaaaatntgcccagccataacaccatggccgcaatttactagcattggttgttagctgattcaattatttgaatcaattgacaattcaaaatcagcactatcttanggataatagtcctagacaaacctaattatggcatgctagactagatcacaagtcaagcaaatgttcaaacttcaagtagacanagtagacataactagtaatacatggatgtcannacagtattcctc

SEQ ID NO: 289237 - DNA, 428 bp, Glycine max
  unsure (1)..(428): unsure at all n locations
taacctanatggctcccattccttccctaaaccacattctttctgaattctttagtgtctacaccttcttggcgccaaatgaacgtcttgctcattctcgtcttccaattaaattaatgtaagaactaagaagggttcttggtatactctctctaactctaacacaacacacatgatgtattagtattagtttaaatttagtgaaaattataaaataaaataaaaattcaacaaatgttaagttgaatccacagaacttatatttttaactaataataaaagaacgtgtttaaaagagcttgttggtaatattttttcatgtgtaattaaatgtaggtaattattatacaagttcatttaagacattgtgctgtttggtttagatttaatttaatatactgtgaatatcaacttgacattttattttt

SEQ ID NO: 289238 - DNA, 440 bp, Glycine max
agcttgttagctcatgttaaaaaaatttgcattagagagtttctctttcttcgggtgtacattcctttgccataacaataactacattctctgttcaattcttgcgaactttggtgtcttttcactttaattctcgtgagtcattccgttcttattaggtatctcaatctctctatctgagtcatttcctatttggctcttgaatctctctattcatcgctgttcacttctccgtttataatttcctttatgaacatgataggagtgtatagggtccaaatttatttgtatggaaacagatagcttatgcagcacaaaaataatctatatatttgttatttaaacaaaatatcaaaattccaaccttagggaaacaaataaattaactaatcccactataatgtattaaaagcaagtaattaacttaaagggttgaagtc

SEQ ID NO: 289239 - DNA, 441 bp, Glycine max
  unsure (1)..(441): unsure at all n locations
tatcagtcaagcccatanataaatgtggcaaaatttgccatgttataaaaataaggtcgaaatgtggaattaagtctactattaatatactatttatctaaatatataaatacatagtgtttttttactttaaataggatatcaattttatatttattagattcaatcattaaaaactaatttttttaaacgggggaactttttggatataaaaatctattgttagataaaaattaattcctttaaaaaagataacgcaaatattattataaagtctatacatatatatacattagaatataccttaaaaaatttatttattntattattatctaaacaattagtatatataaatattctacaatagaagaattccaatatataaatatatagtacatagatnntaatatatgtgtgaggtaattctactttntaaatatt

SEQ ID NO: 289240 - DNA, 433 bp, Glycine max
  unsure (1)..(433): unsure at all n locations
agcttttaaagttagcattanatgtaaactaggcgaatcctaagagtgtttggatgaccacattcaaggttcccaacaaaacactcactatcctaaggaagaattgcctaaaattattacacacaaatggaattntggtaacctattggaggctcccaacacacttccattgaaaggcctttttgttacaaaacttgaaagcaatgaaggtaagtaaattgcaaattacaaaattacaaaatggtcctcaattntggtggttgttctctctttggtgattcactcaatttggagtgcttcttagtccaatagctcttaaggtggttggttcctttcttcttgactcanattcttcaaggcatggcaccaatcctccttccaattccctatatggcaacccacanacaaggaaacaaagagacaagcaataatc

SEQ ID NO: 289241 - DNA, 439 bp, Glycine max
  unsure (1)..(439): unsure at all n locations
cttgtgcattcaatatcctgatgagggtgttccatatgttcttatgactgttctaatacatttgctgcccaagtttcatggtcttgcaggtgaagatccttataagcatcttaaggagttccatattgtttgttccaccatgaaaccccctaatgtccaagaaggtcatatctttctaaaggcttttcctcattctttggagggagtggcaaaagattggctacactaccttgctcccaagtccattttcagcanggacaccttaaagggtgttcttggagaaattctttcttgcatctaggaccactaccatcagaaaagacatttcaggcattaggcaacttagtggagaaagcttatatgaatactgngtgagattcaagaaactatgtgccagttgtcctcactaccagatttctgagcagcttctccttcaata

SEQ ID NO: 289242 - DNA, 428 bp, Glycine max
  unsure (1)..(428): unsure at all n locations
agctttagntttatattttattgnatgaaccttttggtcgttgcatattattttgatatagattacatgtattatatgtaggattaatttgttattttttttttcacatttaaatattaaatttaaaattttcatctgggatcaatacctcacactatagcgacgaaattagttatttatcaaacaaaatattgtatttgcagatattaggcctttggcctctgtttctgaatgaaaggcaactcttacataaaaaatanaaaaaaaaaaacttgcaatatgaatattgtgcagactttatgcntaattaatttggtgcctcatgagtttactattcttcaactgagctttctttttgcatgtggccagatatgtgatgcanaagagacaattatgactatatgacttacggatgtcaaaaatattat

SEQ ID NO: 289243 - DNA, 447 bp, Glycine max
  unsure (1)..(447): unsure at all n locations
gcttgcaagtcatcatcttatccacaagaaaagggagagnntattatttttcttatcctaaagaacgtgactaacacaagataagttgacaatatggtgttgccatgaaagtcataggatacatgtaagtatgaaaactttcatctattaaaatattactcaaacaaagtgccaaaaggaatataaagactttattaagagtgatcgatgcctataatgattctcatacaattggctctgaaacttattatttatacttccgttcataattagtagcttcttacaacatgacaacatgataaaatggtatccgatgtattttcatctcattttatcttttattttttactttattttgttggtagaattcatgagtatgtattaactatgaatagttgaacaagaaagctaataaagagaccagatcccaaatgagataagaaaaaa

SEQ ID NO: 289244 - DNA, 424 bp, Glycine max
  unsure (1)..(424): unsure at all n locations
agctctataagttcgggtctgggagacaaatgtcaagtgttcgcgatatgcgaagatgatgttccgagtactttggatttggtacgaccatgccctcctgatttccaactgggaaattggcgagtggaagaacgccccggcatttacgcaacgagcataatgtaaacctttacggttntaaaagctctatagttgggcctaggctntagagtttttccttttgttaaggctttgtgtcttttgtttttgaatttataatacaaggatctttcttcatctgttcctatgtctctacccattctcattcatttgcatgtttacttctttntctgaaacggcagatccgatgacgagtcccccgaaggtactaatacctgggacccgcctgtcgacttcgagcaagaaatgaatcanacggaagatg

SEQ ID NO: 289245 - DNA, 428 bp, Glycine max
gtatgcccgagtcattcatccctatgagatgttgtttatgtattttcgatcagaattgccattccttggattatagggttgaaccaagctcatgcttttacaaaaaggttcatcaagtcaagttgaaatatggaagtaaccgtcttgcaaaattggggcaaaagatgaatcgagtcacatcactgcttcgtctactgccaaacatatttaggattattgatgtccttgttacttccagtttcaccttgacaaagagtcatggccatgttgaaaatctaaattgattcaaccccatatcttgcgtaaaaattcgcaatacttcaactgtacatcattcgcatgcatacatgcttttcattggttgcattgctacgtgcattctttccttgaaaaataaaataaaatgaacttaatcattggtataaaaa

SEQ ID NO: 289246 - DNA, 397 bp, Glycine max
  unsure (1)..(397): unsure at all n locations
ttcttcttatccaaggctcatcttggtggtgaagctccttcttccatggcttattccttagtggatggcgcctcctctcacctcttctcctttgtcttccgctgcatctccatggtgaaaaattaccattaaaggacctcattgaagctcaaagatctagcatccatagaagccccacaagcaagcttccatcaagtggtaatcagagcacaagggcttcaagtaggtgctccttaaacctccattaattttttgctttaccttctcttccattgttgtttcatcatttttctccatgtatctcctcacatgtcttgtgctaaatgttgttaacatgaatctttagagtttccaccgattaaacttgctataaagctagatttgatntctatggtca

SEQ ID NO: 289247 - DNA, 111 bp, Glycine max
  unsure (1)..(111): unsure at all n locations
catgaaaatgccgtaactaggaagtgatcctangtcgtttcccaacgagcagtgacaagccaaatgttcataatatacttgcagtaacagtaacagtaaccatgggggggg

SEQ ID NO: 289248 - DNA, 357 bp, Glycine max
  unsure (1)..(357): unsure at all n locations
ttcttttatatgtgaaatcaggtgcagccatttcccttagagtcctctcacggagtggaggttgggtcatgttctcaaaatgctcaaaatcaaaatgttcaaaattataatgctcaaaatcaggatgctcaaaattaccaaccacaaaatgctcagtctcaccaataatagaatgctcangatgctcaaaaggtacaaaatgatgcctaactaatctatgaaatgtgctatctatctcangatcaaagggttgtaagtcagatggattgcctccagtgtagtgtaggtttgaactacagctatcctcanatgatatccaaatgacttgaaattttgtgagcaacaccctaaaatcat

SEQ ID NO: 289249 - DNA, 438 bp, Glycine max
  unsure (1)..(438): unsure at all n locations
tcagactaaagcaacacanaatctaggtatccttaacccctcaatntaatggattttcaagggttgagaaatgaaattgagaatgaggtaaatttggagcaaactctcaactcacacaagtctataacatcaatttaaacttgctcaaactggatttacacctaaaattccaccgaatcaaaatttgactcctcaacatccaattttaccctagaaatgactctttggtcactttggtcatttgtttttcctcttgccagcccaagctttctcataagtcctaaatgacatttcaaactaggaataactcactttaacctccaaataccactaaatccagatttggccttccaactctcaaaaactcactctttttttntcactcataacaccatattctcactgtctaaccctagggtaactctacccttcattcct

SEQ ID NO: 289250 - DNA, 435 bp, Glycine max
  unsure (1)..(435): unsure at all n locations
ttcttgttagccaaatccacacactcgtcttcgttcagttgattaatagtcttctggtaaggtatgcagcctattggcccaacgtttcctatgacaaactttctagcatccatttggtaaagtctctgccattccaatcaaacatgccaagttacacatgacaaaaaataaaataaaataaaatacagtaaatntttgtttggattnttttttaataaacatttataaaagaaaaacccaaaagtaaactgaaataaacttcttgcctcatcaatcaaaatgaaataagttaatttataaaaatccttccacttaattttttcaaaaactgattntaacttataagagaagtttaactcgtgtatcttntttatcttagaataaggaaacaagaaggtaanataaaacaatnttttataaatngatataacttat

SEQ ID NO: 289251 - DNA, 429 bp, Glycine max
tcagtacatggtaaattggatggcctggcctttgtgccatatagtactagaactagaagacaacagcaggagctggaacatcaacagaggtgacagtagccaggaaatgtacagggacagaatgtacatcagccttattcttgcaaggggaaacagcagaatcagaagaatcgtgcagccttaaatgaagaaaggaatagagacaattggatccaacagcaccttgaagcaaaatttcatgagtctcctcaatttgccagacacaaatgaggatgaaactcaaagtatactgaattgtctttagcaaactgactcacactcgacaggtttttagtaatggcaggaacatggagtaaattattaagtttaaaggagacttgaaattaaagggagagatgatcgatgaagaaccagaacccttaatttgca

SEQ ID NO: 289252 - DNA, 433 bp, Glycine max
  unsure (1)..(433): unsure at all n locations
tatcttttgcaacagcattattaattntgtgagccccagtgtgattgagatcttccctcttcagataaatgtgaggtccttcaccattaggcctcttgtaatgctccgtcaacctttcagcaaaataaagaggactctcccggccaacataatcttttagaatcccagccagttctgtctgcaactcaaaatctaagaaaatttccattgtttttccttccaggaaactacatttcatggtttctgaatgtagttaacatacaaatatgagagatgtgctagtatgtangagagacaganagttattctgaatctaattgagtgaagattaacatggagttccaaattggttagttctgtatgaaactcgaaaaatanaagactaaagaaattctgaagaatgaaatgatacacattcaaacagtcacaaaat

SEQ ID NO: 289253 - DNA, 380 bp, Glycine max
tgtatgagtactgggaaagattcaagaaattatttgcaagttgtccttaccaccagatttttaagcaactccttttgcaatatttctatgagggacttaacaacatggagaggagtatgattgatgttgccagtggtggaatccttggtgatatgactcctactgaggctaagaatttgattgaaaagatggcttccaactcccaacaattcaatgcaagaaatgatgttattattcttagaggagtcccgacgtggcacggattcatcttcatctactaaaaataaaaatcttgaaggaaaacttgatgccttggtcaacctaataactcatcttgccatgaatcagaaatctacacctgttgcaagagtctgggctat

SEQ ID NO: 289254 - DNA, 360 bp, Glycine max
agctttatgagatctgaaactcaacttcctcttcctccatggaagtatgctgcgcttggaactttgtactaaataaggctgagaagaagaagcagtagaatcctccctctgtgaacacccaacatcagacttgcgatggctgtaataaacccagtcttcatcattacaatttactctcgcattggaatgaaaaaatcccccagcatttgcagaagccagtgttccataactgaatgacttcctaacactggaatcctccttccccccatctgtttcaccttcctcagaatcatcaagtgactcagaatccaaaggataattgtattcaccatcctcactcctagaagcaccttcttcact

SEQ ID NO: 289255 - DNA, 388 bp, Glycine max
tagccattgcgaattatatgcagtcgaacatatattattatgatctttatctttattctttagtataaacagaaaagatcgactttgatcagtatatgtcctatggcaatctattaaacaatttaattaattaattattcgacagaatacatatctgcaagtttcaatatatattttattcaacccaaaacttatctatatcaggaatatgagtaattatgtttcaacaccataaatatttaacaaaaaagaaattagttcgatatagctataactaaatcatagcagattatcaatcaagttacatgtagtagtgtatcctattgaaatgaaactatctttgagagtcttatgagctaagcacgttagaatttggaattagggtatc

SEQ ID NO: 289256 - DNA, 257 bp, Glycine max
  unsure (1)..(257): unsure at all n locations
agcttgtgcagagcaaatgagaanaaggagtaacaaatgtgaaagcaagagcccatttctagggtaaatgggtgttgagaggtcaaattttgaataggtggagttttcaccttaaaaccagtttgagcaagtctaaatcaatgttatagacttgatgaagatgagagtttaccccaaaattacccaatttgtgcattgctagtcacgggcagggtagtacatctcgtgttctaagcattatctagcagatcccaacg

SEQ ID NO: 289257 - DNA, 434 bp, Glycine max
  unsure (1)..(434): unsure at all n locations
tatgctgcaaacacttataatagtatctcctcaacagcaaatccaacaacaatagaataattatgacctttcaagcaatagatacaatccaggttggaggaatcatccaaatctgagatagacaagtcctccacaacaacatcagcctgtccctcctttccaaaatgctactggtccaagcaagccatatgttcctcctccaatgcaacaacaacagtagcagtcacaacaaagacaacaagcactgatgccctcctcaaccttccttagaggatttagtgaggcaaatgaccatccagaatatgcaatttcagcaagagacaagagcctccattcagagtctgacaaattagatggggcagatggctactcagttgaaccaagctcaatcccaaaattctgaccaattgccttcacanactatgcagaatccg

SEQ ID NO: 289258 - DNA, 407 bp, Glycine max
  unsure (1)..(407): unsure at all n locations
tagcttgccaaggttgagctaagctaacttaaattcgatatgaattcggctaagcttcagcctgatcgctaagagacagcttatccgtggctaagcatgacctattgtcgccaagctcaattccttaaggccataattgaggtccatgacactaagcaccagtcatggcagctaagcgagattaattgcggcaatatgagcgctaagcgagtccctctccactaagtgcatgctcctctgtacttaagatgcatcattntagctaagttggctagagccttgcttagcgagagttgcagcttttctaatctacaaacctctctaagaagacgtaccctcgtgctaagctgagtntctgttaaaaaaaaactgantttgaatntgaaacgtcagctaagctcacgggt

SEQ ID NO: 289259 - DNA, 353 bp, Glycine max
gacctataaaactcagcttagagctggagaaagcttgacgatgttgtttttcttgcccaactcccttgagtggcatttgtattggttgttatattgaatttttcatcttaatccatatcatatcttttctgcatcatgcatcatcatgagtaagtgagaagaaaaatttctaagtttgaaaagtttcttcagaaggcaaaactctttggtttaatcgattatagccttatcataatcgattacacaagttttctgagcttgcaagttatgtctcgtattggtttaatcgattacaaccttctcgtaatcgattacatagttggttttgagactgtcgcaacctacccttttgc

SEQ ID NO: 289260 - DNA, 409 bp, Glycine max
  unsure (1)..(409): unsure at all n locations
agcttttatcctatcatcaaacccaatgaatgcagggtatacctctgaaggcacttatcctgcatcctgtccaatgccacaaccaaagggtaactaattgcaaaccctagctccaatcgttgcaacattntaccagctcaaccaatcaatacacgaatagagggcaatttcacacattaacacagaanagtaaatatatatataatatatatatgtgtgtgtgtgtgtgtgtgtgtgtgtgtgtgtgtgtgtcaccaaaaaagatatggatgtgagtgattattgtgtcttggttgttaaggaaataatattatggtgatggccccacacaagcttcttttcaatttgtataagagcacttcaaagtcatagcccacttgcacttcatgcttttaggtaatcaatcata

SEQ ID NO: 289261 - DNA, 417 bp, Glycine max
  unsure (1)..(417): unsure at all n locations
gttctaaatcagaattaaatgtaaccattttatatttctttgactatgttatatattgggttagagttggatacccatctcctagaaaagaaccagggtagttgtgtgtggaaagttcattccacaagatgttgcaatcaagataagaaaaaaaaaaaaactaactgtagagttgagatattagacttacaatttggtttcttccctaatctttttttatttattttctgatttaaaaacaaactctaaactcagtataacagaacctacataataataataataataataataataataataataataataataataataataataataataataataataaaacaaaacccaaataattcccaagttttcttccctaatcccttttttttctgnatagaaaacanactaagaaac

SEQ ID NO: 289262 - DNA, 415 bp, Glycine max
  unsure (1)..(415): unsure at all n locations
agcttgtaggatgcttcaatggaggaaaagaaagagggagagaaagagagaggggggagcacgaaatttaaggaataaaatagggagagaagtggaactttgaagtatatctcacaagactctcattcatccaaagttacaacaagtgttacacatgtttctatttatagactaggtagcttccttgagaagctttcttgagaaaacttccttgagaagcttctttgagaaaacttccttgagaagttagagcttagctacacacacccctctaataactaagctcacctccttgagaagcttctttgaaaagattcctaaagaagctagagcttagctacacacacctctctaatagctaagctcacctncttgagatgagaagctagaacttagctacacaccccctataata

SEQ ID NO: 289263 - DNA, 422 bp, Glycine max
  unsure (1)..(422): unsure at all n locations
tggaggaagaaggagatgaataaagggagagggagagaagatcatgattttttgtgctctaagagagctctgaaatctgaagtttaattttcaaatgatcaaagttgaaaaaattgcacacacatgacctctatttatagcctaagtgtcacacaaaattggagggaaatttgaatttctattcaaatttcacttgaatttgtggagccaaattttggagccaaaatttcactaattatgattagtgaattttaacctggttctcccactaatccaagatgaagtccaagattctccactaagtgtgcttaggtgtcatgaggcattgtaagcatgaaggacatgcacaaagtgtgactatatgatgtggcaatggggtgtagcaagcaaattctcaccttcccctctnaaatttaattgga

SEQ ID NO: 289264 - DNA, 436 bp, Glycine max
  unsure (1)..(436): unsure at all n locations
agcttctccctcaattttctataaatagggggagaagtgaagtagaaatgggttcagcccctttggcacttctctctctttcgaatttgcttaagaaaattgtttccgtgaagaaaatccaagccgaggtgcttccgtaacccttccgagatgtttccgtaagcaaatccgtgaaggtttgcgtccgttctttaccgttcttcatccgctcttcgttcttcaacgggtaagttttcgaatccgagactttcaatttatttcttgtttttttaagctntcatctttatttcgntcattntntatttcttttcttacgtctntaacgcgcctttaccgtttatttaagccgttntctcacctaataaatgataaaatgaatttcaaccgatcatttgtgttgaatctcattaatcactnttaaacgaaatctatcgat

SEQ ID NO: 289265 - DNA, 444 bp, Glycine max
  unsure (1)..(444): unsure at all n locations
cttcgcgaggtacgtaggtcaactntgngntctttntgttttattgttcctgtgttcacgatggtagaagtatgctaagtttggaaggagtgatgtggttattgcacgatggttgaagtatgctatgtttgagtgggtgttcgtgttttatagttttttatgctaagttgctacttctggtgatttgtctctgctttttttctgtgtgcatcccatacccagcacaaggccacataaacccaatgctcaagctaccaaattgtgatttcagttatactcagatgctccacattgtcaataaactacctaagctactcttctcaccaatgatgttggtctagttctgtatggctattctgtgatgtatatttcacttttactattactttttctcactagaaagttgctgactatccacaagtttgttgactatacctgtatgct

SEQ ID NO: 289266 - DNA, 404 bp, Glycine max
  unsure (1)..(404): unsure at all n locations
ttgcttgggtttccaaccttaatcactgctttatgtaaagctagagaagtcacttctgattctaggacactggagagtctcaaccccgccattaatttggcatatgtgaagaagaactattggaatcttgatgatctaatagtgactttcagagggcctangaaggccaaggggaagaaattgaagactctcccatcttttgaggttccctctaccacatcagcaccaacttcttctaccctaggtacttctgctccatcaccaacttctttcagatttttcttttacactagagatgctacatgccatgatgcagagcctacactgagggcaggtcattattatgcagagcttccagagcttgngcctaccatctatcatgagcatggtagactntcacattc

SEQ ID NO: 289267 - DNA, 425 bp, Glycine max
  unsure (1)..(425): unsure at all n locations
nnttggagtagaaacatgggaccttcacattttatttcatattgtcgnatctagtcaagatctgagagaccatacaagtttcctagcggtttctaattatatgggccattaagtctatcatatgctgacaatagccgagaagcccatgaatttcttcggggccggagtaggtgtctgccattgccttggccttggctaataatcgaggaagttcttgactcccgttcaaggtaagagcaaacccgccatcccatggttgcctcttggtgtaaagagtcgatcacccttcctctagcctcttttttcgcgtatactanggcatactcgtccgcgaccctatgctcgtgggccgtggctagacttaactcttcttggtacttggcaatgatagctagcatgtnggtctccgtctcgcataaacgctg

SEQ ID NO: 289268 - DNA, 338 bp, Glycine max
  unsure (1)..(338): unsure at all n locations
tttctttttgtaatgagtattgttcccttcacttttgtgctttccattntataaatttgtcatattcttgataaattttgcagcttcatcatttatgcaaagcactgtcaaatctatggaatcttatggacacatcatacagtgagcgacaatctttttcccatgtaatcaatttgttgtcactctcatctgcagaagtaacagatccgggaagtcttactctagaaatagtccagcaggtaggtatctaacttaaatgatccatagaaaatatcggaaactcaaatatttaaaaagtctacaactttntacaagactgaagctgaagtaaagagact

SEQ ID NO: 289269 - DNA, 338 bp, Glycine max
  unsure (1)..(338): unsure at all n locations
gggtnttgtgctgcctatagatgcccgaatcctagttaaatgggttttaagctactgaagtgaactatgtggatatggcttcttgtgcattaaaaatagcccagtaaaattctgaagaactacttactaccttggtattgagaatgaggggttgttctgttcccagcttcctttttcctttccgtatccattatctattccctctatcccaccttgctaaaattcttaagcttaagctgctgaatttcttttgttcattatagaaagagaaggaaatatattgatttactcctgagaacaggggttgaccggatcaagaaaatgtttggaatcggatg

SEQ ID NO: 289270 - DNA, 402 bp, Glycine max
  unsure (1)..(402): unsure at all n locations
agctttatttnttaattacgagcgtctttatatattacaggactcaatcagacatccgaattgaatgttattgtcatttcacttttcatagagcttccgttttcaatttcgagcgtctcgatatattaaagggctcaatcggacattcgagtaaaaagttattgtcgtttgatttttgtaagagcttccgttttcaattccgagcgtctcgatatcctatgggacacaatcaaacatccgattcaaaagttattgtcgtttgaatgtgctcagagcttcagttttcaactacaagcgtctcgatatattacgggactcaatcagacatctgaagttaaattattgtcatttgacttttcatagagctctcgttttccatatcgagcgtcttgatatattaat

SEQ ID NO: 289271 - DNA, 430 bp, Glycine max
  unsure (1)..(430): unsure at all n locations
ntaagaanagtcaaccgacaattacttntgacttcggatgttgattgtttcctggaanacatcgagacgctccaaattgaaaatggaacctctaagaaaagtcagacgacaataacttttaactcggatgtctgatcgagccctgtattatatgaagacgctcgaaattgaaaacagaagctctaagaanagtcaaacgagaaaaacttttgactcggatgtccgattgtgtcccgtatgatatcgagacgctcgactgaaaacggaagctctgagaaaaatcaaacgacaataacttttaactcggatgtccgattgagccctgtattatatcgagaccctcgaattcgaaacggaacctctaaaaaagtcaaacgacaataacttttaactcggatgtccgattgagctctctaatatatcgagacgc

SEQ ID NO: 289272 - DNA, 332 bp, Glycine max
actcgacccggatcttaagtcacctgcggcatgcattcttataagtcaataagtatatcagccacctttacacaaaattaataataatcctaattgtcatgtcaatggcgtaataataataataatgataataacaataataataataataacaatcattactattattattattattattactattattatcaatattattattattcacagaggaatactgccgatatagttctttacaaaattaaatcattttgacaatttctcagcgaattaagtcaccaactaaaaaaaaagacctcatattcaggtaataatctactaatgctata

SEQ ID NO: 289273 - DNA, 531 bp, Glycine max
  unsure (1)..(531): unsure at all n locations
gcgcaccccgancaccaccacacatcgcgacgccatcctgcggaaaaatatcgacacacccataannncaaaagaggcgcaatgaacctgagacacgcannccgngaacnnaaaaacncaccccaannaannnaaangagnnaagggccgtataatatattaacacaggcaagngggcgcaacggggccgcacaaaaataaaggacgctccccaatacccggcaagtgaacgagccaggaaatgcgagaacaccggaacacaccctcttaattgcgggaataaagccgcagcaccacacacgaacagggcgaccacagacgtccatcagaggaagacatggccacgactcccataagaaattccacccaccccgcccgacgcaaacccaatgtggggacctttaccaaaaacaataacaacctcgaaacccacccgaaccgaaccccgccgcaacagaaacaaaaaaaacccaacgggaaaaccaacccaactgacaccaaaacaccggaccaacctaaccaaagaaaaag

SEQ ID NO: 289274 - DNA, 370 bp, Glycine max
  unsure (1)..(370): unsure at all n locations
ttcttttgtctttcgacgcatgtatgtagattaataacacgattntgttgctgttgttggtcgattgatttaatctctgttcctcaatttacaactttgatcgaatctttgttgcttcttcctaattcgagttgttgttggtactctgattcgagcagtggacattgttcgagattgtatccctagactttgttaatttagggctccaccatgtggtgttcttctatgcacttgctaattcactangaaaaaaacattataagcctaacccaccatctcactgcatacacacaacaataatgcanaccccacaacaaagttcatcaaatcaaccncaaaagaaatcaagganaaacatataacccacacg

SEQ ID NO: 289275 - DNA, 223 bp, Glycine max
tttcttggtttgtacaaataaccttctcactattcccttttcttaaagtgctttcgacctttttggaaacagcacaagttattttttttttttttttttttttgacatacaacttaattggtgtgggggctgatgcctaacccttttctttctttctaatgactttcctcccccaaaattaaaagaaaatttccttgaaccatatgctctcctagaatctaaa

SEQ ID NO: 289276 - DNA, 431 bp, Glycine max
  unsure (1)..(431): unsure at all n locations
agctttaattagaaattgaattttattacaataatataaacatggtttgcttataggcttctggttggggattacttatctattcttgaaagcttttgatttggcttgtacgtaatacatgaattaggttgtctttattttaatgttcaacctttttatcttggttcatttagttatctacaattaattagtatagttgggtaacaaactaaacaagttaccataatgtttcattctatgtactgaattggaaataattagctatttcttggttctattagtaagtttattttttatttgcaaaaatatttctaccaaccaatttttcctccgtccaaacaccatgatgaaagtttttattcacagtaattggaataatcttctataagatgacacctagtanaaagtnttataaatgataaattatgatt

SEQ ID NO: 289277 - DNA, 409 bp, Glycine max
tggctaatcccgacccaacccaggcatagtcagtcagtgataacctgtgacgtacctaagcaggcgagctcctgacagtcaaccaataaaagaacaaagtccacgaagcaaggaggcttgtgtggtggctgaccagctatttatcttaggtgttatctgaaaattaccctctggtaatcgattaccattcgtgggtaatcgattacagggtttaaaaaaatggagacaggatgttaagtagcttctggaatcattaccaattgtgtgtaatcgattacacagtatgatagggcactggtaatcgattaccagttgtgtgtaatcgattacatagtgttacctgctactagtaatcgattaccatttatgtgtaatcgattacacagtgtaactttagattccactgtgc

SEQ ID NO: 289278 - DNA, 422 bp, Glycine max
tatcttgtattgaaactaaaaataagaacaaacctacctaattggtccctatgtacacacaccatgaagatgttaagtgtacgagtgattttacaaaagaaggttgcaccactcaaagcattcatcataccaactattttagggacttggtgcctaataatacctattttgggcaccaacaaggcacaaggatttaagctcttgcgaaccaaaccctcatccaacaacttctttacttgaggaataaactcaagcccaagaggtgtggcaatactagcaaatgtctttttacaaaagagaaaatgtggaggttgtctaaaagggaaagtttctttaatggttgtctttatttgtaaatgagtttccttcttagctaacctcttggaggagacacttaccttcttacacttctcttttaccac

SEQ ID NO: 289279 - DNA, 405 bp, Glycine max
  unsure (1)..(405): unsure at all n locations
tgtaggattatggggtacccatcacatgtggtactaggtgtcggncgggcgatggtgcacaacaagttttccacatccacaatgcgcgcataaacccaccatcccctgttgcccacctccaactgagctcacgtacttccacgtagcccttatcctcgtttctctcaacaccgggtccccatcaatcctcccaagcttccacaacatccaagcaaaacaacattcaaacagcacaagctatccagccaacaaaacagggcaaaggcagaaaactctgcccaaaacaccaaccaaatcacagcatttctcacttaaagaccccagtaacaattccttcgatccaattcgttaaccggtggatcgactccaaaattttactgaaagtctatagtacataagcctaca

SEQ ID NO: 289280 - DNA, 383 bp, Glycine max
  unsure (1)..(383): unsure at all n locations
agctttctcttgagttgatctacagaacatcatgctatcatctgcaaaaaaaaaaagatgggtaatcataagtgccctanggcaaatcttcagaccattaatagagttcatctccactgctctactaatggaggccgaaagagtttcagcacacaaaatgaagtatccttaaaagttcctcattgcataccanatttttcttggatagttggatgaatatttctctttatgcattcactgttgcaaataaataaaagggaatgtaaataccaaacaaatacatatacgtgccaataatctccatgcataatgtctagaatcttttcgtccaacattnttttataagaaaagttgatgaatgacactatgcataactcattttc

SEQ ID NO: 289281 - DNA, 433 bp, Glycine max
  unsure (1)..(433): unsure at all n locations
ntagtgtgaccacactttccccgtaccattgttacactgtcatggcaagatgtattaagccatatgcaacggttaattttagaggtttcttaccctattatttggtctaattattggaggcaaatcttgttaagcacctggtgcttaaaatatctccattgcaatatctcttcctaagtggtcctatttgtacacatttttatttttatttttatttaatttaatcatctcataagaatctaactctccaccaagctcctctacaaaaataattaaataggtcccaatgttacattaataattctgcatccttacatttcatccttaaataggtcccaatatatatatatatatatatatatatatcatgggtacatgaaattgttaatgaaaattatctctcctaaagagtacttttaattntaaaaaaata

SEQ ID NO: 289282 - DNA, 413 bp, Glycine max
agcttattgtaacaaaaaggaagatatttttcttatctttccaaggactactcacacgttcaatttgaagttatttagtgtcctctaagcactgcacaaggcaaataggtcaagtaagcacaaaatatgaaatttagctataattctcaattaatctcaatcatatttgcctaagaccaaaactgaattaaggtgagtaaataagagtcaaggagatagcaatgagctaagaagaatataaaaatattcaacaacaaatgctcaatcaaagtctatctcctatcatcagggcacccaccaagatcggaaactgtgtaccctacaacctccaagttgtcaactctcatatacacaagcatagactccttagtcttctacaagtacctcatcaccttcttagcaactatccatcg

SEQ ID NO: 289283 - DNA, 391 bp, Glycine max
  unsure (1)..(391): unsure at all n locations
agcttttgttttcaacgacataattgactcaactcaatatttcctctcaatcatcttcaacaattgatggagctgaaataaaatcaatccataagaaaagttaacaaaatgaatgaatttcaataagattaagataattaataaccaaccaacatcataacaataagaaaatggaataaccccaccagcaatcaagctttttggtgtcaaggtgaacaacaaaaaagcaacaaaaaaaaaaggtgtggctaggggaaggaaatcattaattaagcattgatatatagagagaaaattaccatgcaaaanagacaaaaaggcgcaagaaaagaattctccttcttgtaggtgcatangaaggaaatgcaatgttggttgagaagggagtgat

SEQ ID NO: 289284 - DNA, 408 bp, Glycine max
agcttattttttgccacctgttattatttctattcaaacactatgattgaacactgattaagacactgacatatgttagatatgattgatatgacatgactgtacgacattaaaattaaacacaatacttaatgacatgcgatattactataaaaacatgtatgttaaattataattcctgtgggtgggataaatatatgcgtacgcttaaatgtcacgagtggcaaccagccctaccactattaatagatagacatataaagtgatgtgactagttgtgtataggaacatgaagttatctccatatcaagtatcacttacttagcacctgacagatatatatattgtttgcatacgctcgaatgacgtacgtgaaagagtaacattcacttatatctgaacactact

SEQ ID NO: 289285 - DNA, 413 bp, Glycine max
agcttcttgtttctcaattgctccaggttgctgcatggaagggcaaaggtctgtatggtggtcagcagaggagcacaaaccacaaacccttgcgacaggtacagatttctgattcaaggccagctgggttaccaagttgaccaacgcatccagtttgccttcaagcttcttagtttcagatgatgcagatgggtttgtagctacctcatgcactcctctaatgactatggcatcatttctggcactaaactgctgggagttggaggccatcttctcaattaaatttttggcttcagcaggagtcatgtctccaagggctccaccactggcagcatctatcatacttctctccatattactgagtccttcataaaaatattggagaagaagctgttctgaaatctgatggtggg

SEQ ID NO: 289286 - DNA, 414 bp, Glycine max
agcttcaaattacagtgagtgattcaagcttagcgtcactatctgcgctaagcgtacttccaatgatttcaaaacaaaacgatgttggcgcttagcgcatcctttcccgctaagctcagcttgaaagctcaacttacaaaatgaatttgggacttagcgtagaatgacgcgcttagtgcaactataataaattttcatagagaggaagtggcgcttagtgcatcatccacgctaagcccactgcttaaggtgcaacttacagtgaagatgttgggcttagcgcaatgatgtgcgcttagctgaaccattcacccaatcaatcaggggtctttgcgcttagcatgagcaagctcagcttatcgcgtgaagagatggtgcttagcataaggcttgcgcttagcggataagcaatct

SEQ ID NO: 289287 - DNA, 405 bp, Glycine max
  unsure (1)..(405): unsure at all n locations
agtcttcttccccattttcctataaatagggggagaggtgaagggaaaaaatgttcagccctcctggtaattcaagatcacttgaaattagtgaaaaaaattggttccgtgaagataatccaagccaaggcgcttccgtaacgtttctgcgggtgatttcgcgaagattttcaaccgttcttcgacgttcttcgttcgttcttcgtcgttcttcggtcttcaaccggtaagttcctgaaatcgaacttttcaattcattntatgcacccttggtggtcctcatttgtttcgtgtacttttattctcgtttcatttacttttcgtacccncttttgacgtgttttagtcatttgcttaagtcattntctcgcctaatcaanaaataaaatacattttcaccgatca

SEQ ID NO: 289288 - DNA, 407 bp, Glycine max
  unsure (1)..(407): unsure at all n locations
agcttgttattaaagtggactcgttcaagcaaggcaatggaatttgagagttgttattggcctcaactaatttattattggttcctatcattctataaatgcataaattataacatgttttcggtacattttattgaagttaatttaaatgaagagtaagttttttaaatttaatatctagagtaaactacacatatcatttctgaagtttgactttattatatctaatatctctccatttttgaactttacaaaaaaaatcctttaattttttagatttggttactcctcttagacgtaaaaaaagaatgttacaccaactcttctttaattangagtgtgtaaagcaacgtaaaataatgaagaaatatcgggtaatacaagataaatgagcagaaaatgagata

SEQ ID NO: 289289 - DNA, 407 bp, Glycine max
agtctttttcatactcgtgagtcgataggtgcgcactctacaacacgatgcgaccttatcccacctccttgcatataagtacattattcaacattggactgactatctaaagatggatgttaatgctctctctgacctgcatgaatactcccttgctcgagcctattggattctcactatacctaatattcatttgttgagagacctacatcgcaccgtaccactcatctcgatcatatgactgtgtcgcgagcagtcgaaaataaccatctatctcatccacactacaaagcctctactggagagatattttgcaaaagccatatctggattgtgaagactagttccttagtacaattatcgataaaatctattcgttcatcacccttgggatgacacataagtat

SEQ ID NO: 289290 - DNA, 406 bp, Glycine max
agcttttattatgcatgtcatattcttaatagggctccttataaaattttgaaaaaaacctttatgagttatggagaaaaagagaaccaaatatgaaatatcttaaagtgtgggagtgtcttgcaaaggttaacatccctattaataagaaaagaaaaattggaccaaccgttgattgtgtttttgttggatattttttgcatagtactacttatagattcttggttgttaattctaaagtgttcaaaatttctaataatactattatggaatctagagatgacactttctttgaaaatgtttttcctttggaaaaaaaaaattgtctaaacccgtttgtgatacttcttattctgatttgtcatcttgtagtaattctaataaggatgttgtttttgaacctata

SEQ ID NO: 289291 - DNA, 408 bp, Glycine max
agcttgagctcactgttgcagccccacaaagctccacagaatttgtctcggccatgttcttccttgcgagccctcttggtttcttgttcaagggctcttgcagtagccgcactttcttctcgtaactcggcacactctttccggacgactatagcgaccaacttgaatttttctttggcaagtcttgcttttcctagtttggtttttagagctcggacttcttcaccctcttccggagcttcgaagttctcctcattgataattttcaacttggagagccaatctaaccctcatgtacgaactttcagccattcatgataaccaccgatgatgccattacggatgcccctaagttctttatctatacttaacgggcctttccacgccttatggactctttgtataatc

SEQ ID NO: 289292 - DNA, 399 bp, Glycine max
  unsure (1)..(399): unsure at all n locations
agcttttctccaagtgcaggatttatgggatctcatggcaaaaaatgatatgaaaatgccaccagatacaccggacacgatggaggcccgacgaaaatggaaggtaaaatatgggaagatgttgtttgttctgagaatgacggtcaacaaggaattaattgatcacattagagatcttgacacaccaaaggatgtatgggagacactagaaaaactcttctccaagaaaaatgttgctcgattgcagttgttggaaaatgaacttgcatccacagtgcaaggaaatcttacaattgctgaatacttcttaaagattaataatctttgtgcagatctgagtgagaaaatcagtgaggcaatgtgaaggagatacatcattangggtttgaaaaaggagta

SEQ ID NO: 289293 - DNA, 411 bp, Glycine max
ttcttgcaagcttaaacattcaatttcgaggctctcgatatattacgggacttaatcaagcatccaagaaaaaatttattgtcgtttgaatttgctcagagattcaacattcaatttcgagcgtctcgatatattacgggactcaatcagacatccgagtaaaaagttattgtcgtttgaattggctccgagcttcaacattcaatttcgagcgtctcgatatgttacgagactcaatcagacatccgagtaaaaagctattgtcgtttgaatttgctcagagattcaacattgaattgcgagggtctcgatatcttacgggactcaatcagacatccgagtgaatagttattgtcgtttgaattggctcagagcttcaacattcaatttcgagggtctcgatatattacg

SEQ ID NO: 289294 - DNA, 412 bp, Glycine max
  unsure (1)..(412): unsure at all n locations
agcttggtctgatgtacttacccgttgaagactgaagaaaacgaagaacgaacgatgaatcttgaagaatggtcgataatcttcgcgtaattactcacggaaacgttacggaagcgcctcggcttggattttcttcacggaactaattttcctcagccatttcgagagagagagaagtgcctaaggggccgaacccctttcttcttcacttctccccctatttatagcaaaataggggagaagcttgccgcccagctcgcccaggcgagcaaggttgcttcctccagaagcaacagccttctggaggaatcttctggagggcccaagtgggcctggttgctatttgcacccncctatttactaagtgcaccccctttctattnttttgtaattctttntctgtaacgttacg

SEQ ID NO: 289295 - DNA, 409 bp, Glycine max
  unsure (1)..(409): unsure at all n locations
agcttatgcttatcctatatgattggagcattctcgcaaaatagagtgaccctgactggtctttctatgattttatctagtgagagtgacttgacttaccagtgtgtggtttgtcttatcatgtacttctgggcgcccgacgaggtttttcattgacatggtacctcattacatataggattgagtcttagtatatttgttgcataacacctgtgtattgatcgatattgattggttgattgatattgtgttttgatccttaagtacgtaaatggtgtgaaaatgtgtgagacgtgtagtgttgagatgtgatgttacgtgataagtggtggaatgacgtgagctatgttgaagtaagttgtatttcatgatatgtatattatgttgntttgtttctctctattagtta

SEQ ID NO: 289296 - DNA, 410 bp, Glycine max
agcttgtatttttgagctcgatcggtcatctatcctggccgacgccgactgtcatttatttcgatcaatatcggtgaataatatttttttgccgaggtgggctaatgttttcctggccgaataaatgggaacacgccagtttcggccgaaacaaaacatcggttgagctcgcacgaaaaaacctagccgacctacattgtaagttttttatgcaacaccgacaaaaacaaaacttcccctgccataagaaaaaacattatcggccagcgagcgtttttttaaaaaaaaaattgggcaatgtcggctgaaaaatatcagtcggggccatttcacgaccgatgtcggctattgagttttctattcaatccctgaatgaaatttgcatgatgtcgattaggaaatgtttgatc

SEQ ID NO: 289297 - DNA, 412 bp, Glycine max
agcttttgcttgtgcaagctctacgtaaaggaggggaagttgttgcggtcacaggagacggcaccaatgatgctcctgccctacatgaggtctgtcctattctttggatgcatccttttgactgttgagaaataaattagctacaaaactttttatctcctgaaatcttgcttatgaatgaacagaatatatatttcactacgaacacatttgaacagtatatcatgaagcttccatatttgattcgaatgactttcataaacttttctcattaaaattgttctggcagacatgaagttccgtgtaatttgctctttagctcgtaggaagttgttccaatgtgttcagtagacatggttctagttgaagttgaatgctaaagcctgcatattcgaatgtcaagtttcatgtc

SEQ ID NO: 289298 - DNA, 395 bp, Glycine max
  unsure (1)..(395): unsure at all n locations
agcttgttgctattaggattattagctctcacagggcagattttctacatttcagccatacatccagttctgctggatataaaacctgctccttcaaccaacgacaatcaattacatgtgaaaagttaattcttcttaattcttatatacatggcctttatggtgttgaagaattagtatttactatctacttttctttgctatatatgttagtcctgttaacagaatatcgttaagctcgtacaaggacttttgaacgaaccagaggatgcngatgcatataaagaagggactctctatacaggtactctagatggatggattaatagattgcgcaggaatcatggaaaccggcagaattggatgcacatngatagtcatactttgctaggaat

SEQ ID NO: 289299 - DNA, 410 bp, Glycine max
agtttattactcttggcaattcctttaaaactaatcacttataaagatatgacttttgaaagaatcttcagaaacaagtcacttgaagaaatgtgacttttggaaatgaatttttcgaaaacagtcactggtaatcgattaccagaaaggtgtaatcgattacacatcaacagatgtgactcttcattttgaattttgaaaatcttaatgttttaaaaccactggtaatcgattactataatctggtaatcgattaccagagagtaaaactctgtggtaatgattttgtgaaaacttcttgtgctactcaatgttttgaaaaactttttaatacttatcttgattgaggcttctcttgattcttgaatcttgagtcttgaatcttgatctttgaaacttgattcttgaat

SEQ ID NO: 289300 - DNA, 410 bp, Glycine max
  unsure (1)..(410): unsure at all n locations
tgtttattggacttgtactctaacttctttaatttccacatcttgtggaactgtactcccattgatttcaccattttcaatgaatcttgcatttccagctttgaaaattctcatactatgattaggacaataaaacatataccccttttgacttttctggataaccaatgaaatatccactgattgttcatgcatccaattttctttcttgtggattataaatccttatttctgcttggcaaccctaaacatgcaagtgccttatactaggtgtctttggaactgccttactaggaaccctattcaacaaatacatggtattnttcaaggcatacatccacaaagatacaggtaaatttgaattacttaacatactcctaaccatatccattaaaattctattacgcctt

SEQ ID NO: 289301 - DNA, 394 bp, Glycine max
agtttcttacaaagcatacggctttctggatgtagatgatgatatctatacagatggatcttatatatctatatatctatagatagatatatacatatagatatatagatatagatcatacaatgaagtaccgcacgagtgggtatatacgaatccaaatctgccgaatcactcatgttatgatcttctacatcctaggtcttcccgtgccttcatctggcttatgttcttcatgtagcattcagactgaatgactctatgatatgacgtcgctacttccacatggtacgggtaacgtacgagacatctctatttttcccggggggaatccttagagtgaccacagcttagctttcaattcgcctctgaccatcaaatgaaatgtgaataaccc

SEQ ID NO: 289302 - DNA, 411 bp, Glycine max
agcttttcatcatgggctaagtttgaaattgggagggctgctgtctattggaaaaccatgaatggcctccctcctacttcagtaagtataaaagtattgagttaactcattgcttgttattcaatcaattatctttcagtaaaaaaatttacaaattttggcagggagaaaagctaaaacttttctataatccagctgcaactcaacttgtccctaatgaagaatttggaattgcttttaatggtaatttttgcaatgttacttggttgcccaaaaatgtcatttgccattgcatttgtaaggaaaaatatttggattcattataaacagacataaactgcaccaagaacaagcgatataaattacacatcgtaattcagaattagcatgtatgtttggagtcaatggaaa

SEQ ID NO: 289303 - DNA, 397 bp, Glycine max
agcttctctaaatattatgcgcctgaatcggacttccgggtgaaaagttatgaccattggaatttctcgagagcttccgatgttcaatttcgagcatctggatatattatgcacctgaatcggacttccgtgagataagttatgaccatttgaatttctcgagagcttgcgatgctcattatcgagcttctcgatatataatgcgcctgaatcggacattcgtgtgaaaagctatgaccattggaatttctcgagagcttccgatgttcaatttcgagcatctgaatatattatgtgcctgaatcggacatccgtgtgacatgctatgaccatttgaatttctcgagaccacacgttggtcaatttcgagagtctcgatatattatgcgcctgaatc

SEQ ID NO: 289304 - DNA, 383 bp, Glycine max
  unsure (1)..(383): unsure at all n locations
tttcatgcaagctttgcttttacatatcattcatggatattttgattctcgctagccaaattgagctgttcaacaccagttaccgtgcatatcattcaatgttttggtcaaagatgtgaaaaatacccaagggcctgngcaaaaaggtcatttcaggcatttttctgggtcctggctcgcctaggcccccaaatagcttaagggcaaagtaaccaactcacttgggtgagaaaggttactttggagtgaagcatcagctcaattgggtgagttgcaagaccaacaagtgctctcatttcttataaataggcatgatggaggctgaggaaggggttggaccttcattgttaagagaaattggagagaaattaatgagaagaaga

SEQ ID NO: 289305 - DNA, 403 bp, Glycine max
agcttggtatgattgatggggacccggtgttgagagaaacgaggatatgggctacgtgggagtacgtgagctcagttggaggtgggcaacaggggatggtgggtttatgcgcgcattgtggatgtggaaaacttgttgtgcaccatcgcccgaccgccacctagtaccacatgtgatgggtaccccataatcctacaagcttgagatgaggaagtgttgaagggtgaaacttcctgcttttattgttgaccacagagtggtacctggagatatgtcgcggcggtcaggagaccttggggacgtcaggtggggtgctattgcccaaaaccaagcttgaccaatcccgacccaacccgggcatagtcggtcagtgagaacctgtgatgtacctaagcaggcgagc

SEQ ID NO: 289306 - DNA, 414 bp, Glycine max
  unsure (1)..(414): unsure at all n locations
agcttgtttattcaaatttcaagatacaagtgaactccccaagaagtgacatggcccacttgtggttttccaatctagcttacattctgcaaagttagaatatgaaaatccaattaaactcaaggaggtacctttggggtaccttaaaccaacattggttgtgcccttaaggtacttaataatccttttgacaacatttaaatggtattccttgggattttatttatatctttcacatatgcacacacttagcatgatgtcaagttggcttgtagtcaaatataggagataaccaatcatacctctatactttgactcatctaccgatttacctttttcatccaagtcaagataaatggatgttgccattggtattgtttcttccttacactnttccatattgaaattcttaat

SEQ ID NO: 289307 - DNA, 413 bp, Glycine max
  unsure (1)..(413): unsure at all n locations
agctnttangattttcaaacgacaataactttttactcggatgtctgattaagtcccgtaatatatcgagacgctctaaattgaatgttgaagctctgaccaaattcaaacgacgataaatttttactcggatgtctgattgagtcctgtaatatatcgagactctcgaaattaaatgttgaagctctaagcaaattcaaacgacaataactttttactcggatgtctgattgagtcccgtaatacatcgagacgctcgaaatttattgttgaagctctcagcaaattcaaacgacaataacattntactcgtatgtctgattgagtcccgtaatacatcgagacgctcaaaattgaatgttgatgctctcagcaaattcaaacgacaatagacttttactcagatgtctgat

SEQ ID NO: 289308 - DNA, 413 bp, Glycine max
agcttgcatgatttacatctccccctttctcaagaaaattcttctttatatcatcaaattcttcatgatttacaagaaggtccacctgcatgaaattttttgttaggaagctttctcttttgtgcgactatgtcatcctctttctcaggtgtagaagcaagcttgacaggttcaggtgcaggtgctgctactagtggaggcacttgaatctggttgtcagacttcaaggtgatggcactcacattttttggattctgcatagtttgtgaaggcaatttgtcagaattttgggactgagcttgattcaactgagtagccatctgccccatctgatttgtcagactctaaatggaggctcttgtctcttgctgaaattgcatattctggatggtcatttgcctcactaactcttc

SEQ ID NO: 289309 - DNA, 412 bp, Glycine max
agcttatttcatgtttctatgttcaaatcaaattagtgttttgaaagttgttttttatcaagtgcatgcaaaaacttctaaattcatttggtatttgggaaagccattcattgattttcattctcaatgttgccaaaaatcactttgttgtgttttgatccaattcaaaagcaagtttcaaaatcactggttgctgattctttccaaaacatgttatgtccaagaaaaattttctgtttaagtcccaaaaagagttatatatattctacaactacgctaacagaacaaaattatttagtggtgtgtactaccaaaaagagggtgtcagaccctaatttcatccggggaatgtttttatcgttcgacacaacccgatcaatcatatgcaagaaccttgctcgagtgaatgagt

SEQ ID NO: 289310 - DNA, 407 bp, Glycine max
tgtttgtatgctaccgggctcatcctctcaacaattttaaagggtccatagaaacgcctcgaaagctttgactggcctgttccggccaccgtggtttgccgatatggtctcagcttgactagaacccacttatttacctgaaactcatggtccctgcgatgtccatccgcgatttccttcatgcgagcctgcgctttctgcaatttccggcgaaggaggttaaacatgtcttccctctgactgagcaaatcgtccactgttgctacagtggaggtgcctgttaagtattggggcaaacttggaggtttgcggccaaatgtaacctcgaagggtgttagcctcgtggctgagtggacagacgtgttatacgaccactctgcccacaacaggaagcgcccccacgaact

SEQ ID NO: 289311 - DNA, 403 bp, Glycine max
tgtttctagtcgtccatagacctcctcataggtacggtccagcgaacgttgcatctgtgcattcatcgcatccagtaacagacgttgaacgccgtcctactgatgatactcgtcaccaccgccacctgctccagccataattcaacaggaaaaaaaatgtgcaataagaattattaaggtttcaggacctcacaacactctactcacgtgttgaactcttagatggtagtacacttgcgcttaatgctctcagataggcttttgtgtaatgtattccctcttgccttttaccactcgtgtctcctcttaagtgcctggatggaccaaattagacacacaacgtaatataaaataaaaggaaagacaatataatgatcacaaacagacttgattcgggatgaca

SEQ ID NO: 289312 - DNA, 411 bp, Glycine max
tgtttgttggtcaactacatgccttggttaacctggtaacccagctggccttgaatcagaaatctgtacttgttgcaagaatctgtggtttatgctcctctgccgaccaccatacagacctttgcccttctgtgcagcaatctggagcaattgaacagcctgaagcttatgctacaaacatctacaatagacctcctcaacctcaacagcaaaatcaaccacagcagaacaattatgacctctcctgcaacagatacaaccccgaatggaggaatcaccctaatctcagatggtctagccctcagccacaacaacagcaacctgctccttccttccagaatgctgctggtcgaaatagaccatacgttcctccaccagtgcaacaacaacagctaccacagcatcaacaga

SEQ ID NO: 289313 - DNA, 411 bp, Glycine max
agcttgtatgtaaactagatgccttggttaacctggtaacctaactggccatgaatcaaaaatcaacacctgtcgccagactctgtggattatgctcctctgccgaccaccacacagacctttgcccttgtgtgcagcaatctgaagcaattgaacagcctgaagcttatgctgcaaacatctacaatagacctcctccacctcagtagcaaaatcagccacaacagaacaattatgacctctctagcaacaggtacaatcccgagtggaggaatcatcccaaccttagatggtttaatccttcacaacagccgcagcagatacaacagccttattttcagaatgctgctggcccaagcagaccatacattactccaccaatgcaacaacatctacagccccagaaacaga

SEQ ID NO: 289314 - DNA, 408 bp, Glycine max
tgtttattgagtttagacaataatgcatgattagtgcccaaacttgatgatattttttgtgcatactttctttgatcgacagtttttatgtatatactttctttttttgacagttattttgtatgtgcttagaacttataatttaggattatcctccatgagctaaaatggataattatcagaatataatggtgacgtgtgggaatgtgagatcatgatgcgttactttgcttttctgtgtttaattcttaatttgctagatgagaaacaatttcaaatgaaatgttcttcgcttttgacaaagaaaaacagaaggatttttttaataaactatttattaccgtgtgtttccttcggcagctaaacattcgcaagccgcaacagattatctagtctcaagctaagact

SEQ ID NO: 289315 - DNA, 403 bp, Glycine max
  unsure (1)..(403): unsure at all n locations
tttgcttgcaagctntgagcaaattcaaacaacaataactttttactcggatgtctgattgagtcccgtaatatatcgagacgctcgaaattgaatgttgaacctctgagccaattcaaacgacaacaactttttactcggatgtctgattgagtcccgcaatatatcgagacgctcggaattgaatgttgaagctttgagcaaattcaaacgacaataactttttactcggatgtctgattgagtcccgtaatatatcgagacgctcaaaattgaatgttgaagctctgatccaattcaaacgacaataactttttactcggataattgattgagtcccgtaatataactagacgctcgaaattgaatgttgaagctctaagccaattcaaacgacaataac

SEQ ID NO: 289316 - DNA, 403 bp, Glycine max
  unsure (1)..(403): unsure at all n locations
agcttgctcatctaagtaacttttatccaaaataattttcatatttgcaataattgagcatgcacgatagtacgcaaacggaaaggattgggttatatatcgtatgtatgtgacataaagaagaaaaatgaaaacgataataacgatatagattttttattctatttttatttgaataaagtaaaagtaatgccgacttttcaaatatatattcaggatctaagtaggcgaaattaaacacgaaaattatacattgaattgaataaaaatctaaaatcatactcgttcaattcaccatgatttgatgcanatgtatgttntctttctacctctctctttgcctgaatatgaaatcgatcactccaagctntnntctcctcactttntatcattatgaatggat

SEQ ID NO: 289317 - DNA, 416 bp, Glycine max
agcttcttcgtgtgctgaagtatactacagagagaaggatccaagttccaaagaagtttgagagataatgttgtgcatagacctgcagagaccacaactcggagaggaagccgtcctgagagcttgatatgagttcgtgagtgaatgtgacgacctagacgtggacgatacatccccgctacttttatttcttcaatccttcatctttctcttctctttgttgtaaaggaagcttcctagttatggagagctaaatcctttgttggttcttccttgtaggtacttgatgtaaatatttgcatatctatttaatgatgttttgtgtgttcactgtgctatcagaacttcattctaccatgcttttgccttgatcacatagatgcatgcgtttttagggtcattcaactttggaaact

SEQ ID NO: 289318 - DNA, 412 bp, Glycine max
  unsure (1)..(412): unsure at all n locations
agcttttcttacttgcggattgctttacgttggttgttatatgcaataatcaaatgtaataaataaaataattttctctttcaatgtacgattcatatggtagttaattttgtagttttgtacttcctagtttatcaagggattttcatgcataattcatattggcattgaattataatgttattttgtgtgttctgttggagatccaaaaggttccttaagattcgttctagctcattgtcatgaactatagttgcagttggttgattttcaaaattggtagccaagttgttatctttgttcttttaaattccctcgaagcacaccatcttgattccaaaaggaaacatacatgtaaaaacttgcactttnttcttaatatattgtcaaaactcacaattaacagatctac

SEQ ID NO: 289319 - DNA, 417 bp, Glycine max
agcttgcttcttaagagagagagagagagagagagagagagagatcagcaaaaatggatcaacggacaaacatgaaataggaatgatgcaatatgaaaagtgagggatgcacttttgaaaacaattatcaagggcaaagccgcataggatcggcagaaagggagaaggaaaatgataaaacttgaaatttattgaaattgaaagaagtgcttacaaagttgtcctaagtagagcacctctcttctcagactcctgaaaatggctaaatgaaagggtgcctcacaacatggtcgaggactccttttatagccaaaaacattactgtttgctacagtaccggtaacttgaccgaaactattataataattactacaataccggtgaaataaccggaataatcatgaaacggttatgtaa

SEQ ID NO: 289320 - DNA, 407 bp, Glycine max
  unsure (1)..(407): unsure at all n locations
agcttggtggttatacaaacactgaggcttangatttgttttcccccgttcagatcaacccggtgtttcaaaataaagctcttttatcaagttacgcacacattcgagtccattcagggcttcgggaaaaatcttcattgcattcacccttcaggtgcacacacattttttttctttcaaaaatctttttatgttccgacccgtgaattttccgaagaaaaaaaaagcggttattttctttcaaaagcatgttcgctnttagtttttttttagcttttcctttcaagcaaatttcttttgtgttagaaaaggtttgtaacccgggcaaagtcggtaaccgagattacactttatcaaaaggaaataaaggcatacgaatgcaaatacacaagactccctattttttt

SEQ ID NO: 289321 - DNA, 409 bp, Glycine max
agctttaaattaaacgtcctttctcaccttgattactccgaagctgttgtgctccctccttggcaagtttgctcatgaagattgtgacccaagtgcaagtagcactgtaggttcggaaagcaatcactggaatcctaaactcttgtgcaactcccatgacaatcgttgacatgagtccatcaactatgatgcaagatggttgctgccactgatcaccatttttctcgagaagtcttgagaacaattctcggaactctttggcaactaaggatctggcgctaggagtgataagcattggaaggtagtttattacggcaccttttctaggattgtcagagggtatgccatcagtgatggatgcaaagaggaaatcgggaaattgagtgtggaatgagggtaaatctgtgaa

SEQ ID NO: 289322 - DNA, 397 bp, Glycine max
  unsure (1)..(397): unsure at all n locations
ttgtttattgnttccttatttccttgatgcatctattacatatgccaaaactaacacagaggagttcattaataggtgccacacattgatgcaaaggttgctacaactcatgttttagctgcccttgttactcttggatctgaccaaaacctgaccgtaaagtatggccagcatagatgcatttggtgctgtgactcaacacttcaaaaatgagatggtatctatcaccaatatttctcccggttttctgattaaatgttgatgctaatgcagatccccatgtcaaattgcttgatcaaataaaatatcttccagattgttgacaagatacgtgttgaaatggatgcctttcttgaaaatggttcccatgaagctactatagctgttattcgtgcgt

SEQ ID NO: 289323 - DNA, 414 bp, Glycine max
  unsure (1)..(414): unsure at all n locations
agcttgtatgattatggggtacccatcacatgtggtactaggtggcggtcgggcgatggtgcacaacaagttttccacatccacaaatcgcgcataaacccaccatcccctgttgcccacctccaactgagctcacgtactcccacgtagcccatatcctcgtttctctcaacaccgggtccccataaatcctcccaagctttcccaacatccaagtaatacaacattcaaacagcacaaattatcacagccaagcaaaacagggcaaaggtagaaaactctgccaaaacaccaaccaaaatcacagcttttctcacttaaagaccccagtaacaattcctttgttccaattcgttaaccgttggatcgactccaaaattntactggaagtctctcgtacttaagcctacattg

SEQ ID NO: 289324 - DNA, 403 bp, Glycine max
  unsure (1)..(403): unsure at all n locations
agctnttgttaacgtaatgtctcctacatattcaggtgaaaatgagaagttctttatgtattaacaagtttatgcatatatccgaaaaattcaaagttgctccaaaattaaattgacgctcatcgataatgtaactagtaaggccaaaggtggaaacatatcccaaaataatataacagtatacgtcaatatttcatgatatttagtgtcaatggttgcaacttgcaagaaaagaatacaccaaagttacaagaatgtcaacaaattntaaaactagttatcgtattccttgcaatcatggcaaaagtccttgataacccctctgtggcaactattttagtaagtatagaacaagtaacaaagtaattaatattaggaaaataaaatatgcaagaaaaaaaga

SEQ ID NO: 289325 - DNA, 410 bp, Glycine max
agcttatgcttctaaaaagctataggtaatgtaatgtaagaagcaagtgtatgatgaattacttcatgtttctaattctccttattagtgattatctaattaacaatttcatgaaattaacagcttcctgaatacattggcattttcaaagatcatgaagaaatatgataaggtgaaaattcaattacccttcacttcattttactcatttaaactttattatctgtactatcacttgacatagtaacttcataattcagatcacgtcaagagatgcagctgaagcttatatgagaatggtggacaactcccaccttggaagttctgatgaggtgagagtgctaataagaaagtctcccattgagattcattattcttttacatgtaacttctatacaccgttagtttaa

SEQ ID NO: 289326 - DNA, 411 bp, Glycine max
  unsure (1)..(411): unsure at all n locations
agcttgatataacatagtcaaggctgtttccactatatgtccgtgcttcctttctaccagaccattttggtggtgtgtatgagggcatatgagtctatgaataataccaagctctgcaagatacttagtaaaaggtctgtattcccctccccaatcagactagacagctttaataggcaaattaaattgagttttcaccatagtttgaaactgtgtaaagataggtagtgtctctgatttatttttcaacaagtacaaccaagtgaaacaagtgtgagcatcaacagaagttacatagtatttataaacagtgtaaatgagttcaaaaggagttgaatacacagtaagagagggagaggagggaagttatgagattcgccaatgcaacaatgggaacaanagtcagaactt

SEQ ID NO: 289327 - DNA, 268 bp, Glycine max
agcttattaaagtccttactgatccacattgggtatgtatgactgcattgaatgagatgacgtgcaaagttaggaattctaatttcagttgttgcaattgatgcactcataatcaagacactcgagtgcttgagagaaacattattcttgtgatgaatgaagcgagcgtgatccccattgatgtatgtcatactcgctaatctattgtatattatattgcatctgtgcatacttttatcgtgaaacggaaccaggcgcgagcttgtga

SEQ ID NO: 289328 - DNA, 405 bp, Glycine max
agcttgtgaaatcaatggaatccaagattctgtttgacacaagtcgtttaattttgttcttagaaatgtgacctaagcgcttatgtcatttccaacaatattttaattaaaagacaacctaaacacattgtttccagatgaacacaaataacccaatttgtccaaataagaaaccaaaaccaaatttcgtctaaatgacggtacaacaaaagtgtctttcaaatccaaataaaaactagtacataataatctaaaatgccatatagcttccacctccacctatttaccatctccaacatatatccatctttcagaattaattggcttccggtagcttaggcaacactgcattgaaacactgatgttagtagtggcaccagactctaaccaccaagtgtttctaag

SEQ ID NO: 289329 - DNA, 411 bp, Glycine max
agcttgctacatatcacctatgttcaccactagggttccttcagatgggtttatatctatccactctcccttatttgatctgacttgaagccctcctatctcatgttgatataagatagtaatacaactcatatcaatgtgcatcccaagcccctcaacttgatcttctataacttctggagctgagtaatcgtttacccaacatatccaaccatgaacactccttcatacttgattcacttcttgtttgttcttttggttactttcatccgatagtcttcatgatgcaaaccatttacctttcaaaattttacctatacctcaatttttgctactgcacatggtaattggtaagcctaacaagtacatggaaaaaaggagatagaccccactggtttgcaagtaaactaa

SEQ ID NO: 289330 - DNA, 409 bp, Glycine max
  unsure (1)..(409): unsure at all n locations
agcttgtaattgaacaatggaagatcttgagaaattcaatcggtcttaacttttcactcggaagtccgattcaggcgcataatatattgagacgctctcgtgaaattcaaatggtcataacttttcactcagaggtccgattcaggcgcataatatatcgagatgcacataattgaacaacggaagctctcgagaaattcatatggtcataccttttaactcggagttctgatttaggcgcataatacattgagacgctcgaaattgaacaatggaagctctcgagattttcaaatggtcataacttttaactcggaggtccgaatcaggcgcataatatatcgagacgctcaaaattgaactacggaagctctcgagaaattcaaatggtcataactnttaactcgga

SEQ ID NO: 289331 - DNA, 389 bp, Glycine max
agcttgatccttgaatcttgattcttgaattcatccttcttcttgaatcttgaagtgttcttcaacttttcctcttgagacttgaattgatcttgattccatcttgaactcatcctttgattgacctttgagtttttgtcatcacctttgtcatcatcttttgttatcatctttgctatcatcaaaacatctttgaatcattcttgattcaccatgaagctttgcttctacacacgcaagttcaacgaaggggatcttgtcttaaagaaggtataccacgcccagatggaccatatgggaaaatgggctccaaactacgaatggccttttgtcgtgaataaggcctttatcaggcggagcattggtgcttgccagcatggacaatgaac

SEQ ID NO: 289332 - DNA, 415 bp, Glycine max
agctttacatattgaagaagctattcttgaacttggtatgggggcgagtctctaacaatttcttttggaaatatattcctagactctaacactctgaatccgataattagttttaaggggaattttttagaataaaacactaaaaatagaaaaggggtactcttagtaaatgaggggatgtatttagcaattgccatattctagtgatttcacatcctcattgctatcattattctttttttccaacttttttttatatagaactcttttcccactttactttcttgcgctccggatgttcatgcaatagagagaaattttcttaattcagttttgacaagatgtggtctattaattttcagatatccatatcgtctatggaaagatctgtttttaaagcgagtttaattgtatt

SEQ ID NO: 289333 - DNA, 410 bp, Glycine max
agcttatatcctttggatccaactttgtttaaggcttccttgacccaagaatcaaactattagttctatcttattctcatctttgtataaaatcccatgggacaagggtttgaaggtcttctggctctaactctaacaaccgaccaggttgttggcacacaacattgatgttgtcttgtgttattgcataccacacatgtcgggctacacactgtgtgcaaaattgggggtcacatggacccatttcaatccaatcaagttgtaagtcaaaacatatcacacaaacacattgaccttcagtatcatcttcatcactatcatcaatatcctctattgcataaaaccgacctttagtaatggcatcattctcaattgcatctccatgtctagattgaccgtcagagatcctt

SEQ ID NO: 289334 - DNA, 311 bp, Glycine max
tgtttatttaacaaaattgcctcaatcatttccaaatattcatgtgaattaggaagcatcaacaagaatcaagccaaggctattgtgcaagcaatcaatggggcaaaacacaccaaatgattatgatgatggatggctcaaattctcacaaaggtaaactcatcactttcaaattgagctttcaaaactatcatgacatgtagaggagaatcaaggatttcaagtcacaaaatgtcaagaacttttattttcaaaacaattacctgttagccaagtggcctcagatatcttaagaaggggggggggggggg

SEQ ID NO: 289335 - DNA, 408 bp, Glycine max
tgttatatcaacaactgttttaagatattgtaaattctatgcactttgtttaaactacaaaatcattgcttcaaaagttaagagatgatgggtgggagccattaaagatgtcaaaaatttttgtgttagtaatgttattgatattcttgattttaatactcaatatttaagaactcgaggtaagccccgtcataagaatgttgacacttttgtgactatggagaaccgttttagatatgacatatttacaactgccattgactttcaattacaagagctgaataataggctttgtgacctaacaatggaattaattatttttagctcagctttgagtcttaaggatgtttctaaatccttcaaagttgattatatatgaaatttagttgcataatattatcaaaggat

SEQ ID NO: 289336 - DNA, 415 bp, Glycine max
agcttgaggagtttgcttcaaagtctgcatcaacatagtaaactacttctcaaggatgggaagaaataataaacgctttcctacataaattcataataaagctaacattgtaaggaaactaaaaactccaacatttgatggcataaggctagcaaggagctatttaattactcacctgaacacttatatgatcacttttcagttaataattatgcatggaatgcatgaaatcataggccattatttccctccgttgctacaacttgcttctaataatggacaatccctgatggtcaatactaaaagagaagaaaccaatccctctttatgtaaggatataagttggtgagaacttgacatctcatggttttcaagagatctaagatgttgaagccaccttccatccaagcatttt

SEQ ID NO: 289337 - DNA, 411 bp, Glycine max
acccgggatgctctcaggcacctgaagctgctgcttttcggaccatagtataagactggtaacctcctctatcacgtacacaagatggctttaagcatatatacgtgcatgaaaaggaagtatccaaatctgtgagggacgagtactccactacaacatcagcctatcaatccttattatattgttgaaggtcctaacgagacgtatgcttattctcctatacaacgacaactgcatcaactacaacaacaactgtctcaacggggacatcacgcaattgccgctcctcctcatccttgcttacaagagttaatgacgcatccgaccatccataatatgctcttatagcctgagaccagagcctctattcccattctgacggatctaatgtggcagatgactacttatttg

SEQ ID NO: 289338 - DNA, 79 bp, Glycine max
tagtcttttatatatcgtttcgctgaatactgaacatatgttaacgctcgacatattcaaaggatccttactattcaca

SEQ ID NO: 289339 - DNA, 391 bp, Glycine max
ttgttgcaagcttgttctagaagcaactaagtttttacattgtataactcaaaatttcctattacgaaaaaaaataaatctcccttatacttggatgtctttcgtatatattttttcacattacaaatactatctggtacaaaaaaaatttaaacagctacaaatgtacaaactttgttcacttttattttattttttagttaagctaaagtgtatgataaaaccaattgtttaattaatcggtgaatatggaataacttaacatttaataattatgagtgtgtgtgtgtgtttaaataattattacatttcatatctcaatttatttcaaaaaaattacagtaaacccttatgtcctccttaaataataataataatgataataataatt

SEQ ID NO: 289340 - DNA, 398 bp, Glycine max
  unsure (1)..(398): unsure at all n locations
agctnttagctcaaatttctggctaacttatcttttattccactaacgacagagaaaggatttaaatgcttaattaatgtagttttaaaaggatgttgatctctccattgcgtangcaagagcaagacaacgcttaccaaacaaaaaccgctcttaatttttaaaacatataataaaatgttcccttattataataatcaaattgacttcaattagcataaaaataatagcctttagtgggacaatccatagtaacctaggaaactcagtacaaatacacattaaaaatacaaaagcccaaggatataatatgcttcaaatatttgttttccacactcaaattgccatatcacgggtgaataagtgaattcaaaccaagatctaaacaaanagctatc

SEQ ID NO: 289341 - DNA, 414 bp, Glycine max
  unsure (1)..(414): unsure at all n locations
agcttcttatccaaggctcatcttggtggtgaagctccttcttccatggcttattccctagtggatggcacctcctctcacctcttctcatttgtcttccgctgcatctccatggtggaaaatcaccattaaaggacctcattgaagctcaaagatccagcctccatagaagccccacaagcaagcttccatcacaagataccttggacacgcatgtatatggcaaaatagctcacaaaatatacgtatgtttaggtagcaaaatacctcaaaaaaaaagagagagagcaaaaagagagcgagcaagaaaagaataagaaaaaaataataataaaaagttgtctagctaaaaaacaacatgcttgtgaaaagagataatttccaacttttctttgaaagattntactgatctta

SEQ ID NO: 289342 - DNA, 392 bp, Glycine max
agcttgttattgaacaatggaagatcttgagaaatgcaatcggtcttaacttttcactcggaagtgcgattcaggcgcataatatatcgagacgctctcgtgaaattcagatggtcataactgttaactcagaggcccgatctatgcgcatagtatactcagatgcacatcatggaacaacggaagctctcgagagacttatatggacgtgacctttaactcggagttctgattcaggcacataacacattgtgacgctggagatggaacaatgaatgctgtcgagactttcaaatggacataactgtggacgtggaggcatgactcgggcgatgagatatagagacgctcataatgaactacggaagctctctagaaaatgaatggcacta

SEQ ID NO: 289343 - DNA, 412 bp, Glycine max
agcttgattgaacagtgcatttatattatccagtggttgatacttcattttggaattcagtgtttgtaattggtttgaattgatcaattgcgtgatttgagtgaattggaatgtgtagatcatgtgccatgaatgagcatgcagtcattagaagagaaagaacattgaattaggatcatgactaaaaatgttagttggtttgtcaagttgattgtgaaggaacgcattagccgcaacccggtgaaagtgtgatctttaattgtgagagaatgactaacattgagtaatgattcttgcatgaatatctgagtatggaatgaatgtgtgaaattgaagatgatgaaggccatgtttggattgaagatagccacttatctaaaaagcttaccttgtgcatgattgatttatccct

SEQ ID NO: 289344 - DNA, 415 bp, Glycine max
  unsure (1)..(415): unsure at all n locations
agcttttttacatgcatgcatcattcccagtgaaaattaagtcatcaacatacaaactcacaattaaaattcttttacctcctcctgttttgacaaagagagtgtgctcatgatcgcatcgttcaaatccctccttcacaaaataggcttcaattttgctataccaagcacgtggtgcttgctttaacccatataaagctttcttaagcttgtagaccttctcttcttcaccctttcgaacataacccggtggttgttccacatacacgtcctctgtcaattctccgtgaagaaatgcgcttttgacatctagttgatacacattccatcccttttgtgctgctagagctaaaaccatccggattgtgtcccaccttgctaccggngcaaacacttcgttgtagtcaatcccttg

SEQ ID NO: 289345 - DNA, 409 bp, Glycine max
agcttcttatccaaggctcatcttggtggtgaagctccttcttccatggcttattccctagtggatggcacctcctctcacctcttctcctttgtcttccgttgcatctccatggtggaaaatcaccattaaaggacctcattgaagctcaaagatccagccttcatagaagccccacaagcaagcttccatcaagtggtaatcagagcacaagagcttcaagtaggtgctccttaaacctccattaatttttttgctttaccttctcttccattgttgtttcttcatttttctccatgtatctcctcacatgtcttgtgctaaatgttgttaacatgattctttagattttccaccgattaaacttgctatagaagctagatttgattttctatggttcaaatttctt

SEQ ID NO: 289346 - DNA, 402 bp, Glycine max
ctgcagcttattgttgcccgagtcattcatccctatgagatgttgttgaagtattggcgatcagaattgccattcgttggattatagggttgaaccaagctcatgcttttacaaaaaggttcatcaagtcaagttgaaatatggaagtaaccgtcttgcaaaattggggcaaaagatgaatcgagtcacatcactgcttcgtctactgccaaacatatttaggattattgatgtccttgttacttccagtttcaccttgacaaagatgtcatggaccatgttgaaaatctaaattgattcaaccccatatcttgcgtaaaaattcgcaatacttcaactgtacatcattcgcatacatccatgcttttcattggttgcattgctcattgcattctttccttg

SEQ ID NO: 289347 - DNA, 411 bp, Glycine max
  unsure (1)..(411): unsure at all n locations
agctttatactttgtttttagaaggtaatatatactgtcttgatgtcctatatttttataatagcctgtatcaagtcagagttggtgcttcatatctcatggcattgaaacttgccacctgtcattttaagagaatcttgctcaatgtaatattgtaatctcaatctgcaaattgcaaaataggctgcctgcatgccaatgatacttgattgagtaatgattgatgaacatctggtaactctaaacacctcattaacacctattatctttctctccccatcacatcatatcaattaccatagctatatttctttctcttctcttttatttctcctcctaggtgtcatctagagtggacatgtccactaacaatntttggatttaatttcctattntcttctttgttcttca

SEQ ID NO: 289348 - DNA, 407 bp, Glycine max
agtttgtgtcacaattcactgtgacagtcaaagtgtcattcacttatcaaatcaccaaatgtaccatgagaggacaaagcacatagatgtgaaactacacttcatcagagatgtgattgaatctgagaaggtgaaggtggagaaagtttcaacagaagaaaatccggctgatatgttcacaaagtccctctctagtgtcaagttcaagcactgcctggacttgatcaatttcgaagatgcctaaagcagtttggtagaagtgcagccctaaatcacaaggaagacacttgctgatttggagtcaaggtggagatttgtggtgtgtgactcaaaatcacaatttgcacaagtgagaaggctttaaagtggtgttgtcataaatgttatcaagtattataactgaattg

SEQ ID NO: 289349 - DNA, 412 bp, Glycine max
ctgcagtctgtttcggaaacagcacaaacggaacacccatgaaggaaggagcgctttgaggaaggaagaagaaaaacaatagcggcagactatgcagaggaaggagggttttttaaattttaagtgaaaaacatttttaccattccacttaaattactggatgtactagcaataatagtgggtgcacattccacttaaattactggatgtactaacaataatagtgggtgcacctagagcacccgaataacttatatttttcgcatcctttggatcaagttctgaaagtgaaatatggatggatgcagagatgtgtctatcgtgataatatcaattcatttgaaaaatatacacgtgtatggtgtgtttctagaatgtcattacccaaaactcattatgtattgatgaaatg

SEQ ID NO: 289350 - DNA, 414 bp, Glycine max
agcttgtacaacatccatgcaaaacaacattcaaacagcacaagctatcacagccaagcaaagacagagcaaaggcggaaaactttgccaaaacaccaaccaaatcacaacttttctcacttaaagaccccagtaacaattccttcgatccaattcgttaaccgttggatcgactccaaaattttactggaagtctatagtacatgaacctacattgtgaccgttgggatctactagcaaacatccagaactcattctgtactactctttccacagccaaccacacacaagcatttttctgcacaaagccaaaatcctgctgcacctattttgacagcaaaattctgcataagtgcagatttcgaaaatcacacttcccttcatccaatcttgcccaaatcaaatgctacaagt

SEQ ID NO: 289351 - DNA, 401 bp, Glycine max
agcttattcgtaacaaaaaggaagatatttttcttatctttccaaggactactcacacgttcaatttgaagttatttagtgtcctctaagcactgcacaaggcaaataggtcaagtaagcacaaaatatgaaatttagctataattctcaattaatctcaatcatatttgcctaagaccaaaactgaattaaggtgagtaaataagagtcaaggagatagcaatgagctaagaagaatataaaaatattcaacaacaaatgctcaatcaaagtctatctcctatcatcagggcacccaccaagatcggaaactgtgtaccctacaacctccaagttgtcaactctcatatacacaagcatagactccttagtcttctacaagtacctcatcaccttcttag

SEQ ID NO: 289352 - DNA, 402 bp, Glycine max
  unsure (1)..(402): unsure at all n locations
agcttccttgagacacttccttgagaagcttacatgagaagattcctagagaagctagagcttagctacacacacctctctaatagctaagtgcacctccttaagatgagaagctagagcttagctacacaccccctataatagctaagctcaccccatgacaaaatacatgaaaatacaaaaaaagtccctactacaaagactactcaaaatgccctgaaatacaaggctaaaaccctatactactagaatggccaaaatacaaggcccaaaagaaggaaaaacatattcaaatatttacaaagaanagtggatccaaccttggcccatgggctcagaaatctaccctgaggatcatgagaaccctagggtcttctttagtagctctagcccaatcctctt

SEQ ID NO: 289353 - DNA, 416 bp, Glycine max
agcttatttatagtgatatatatggtggtgcacatggctgtttgtgtttcaaggaaattaaattgtacactaattctatactctacttttaaaatttccacaatttagtattcaacttttaaaatttcatgcattattccttattaattttaattaagtaattttttgcattgaaaataatataagaaaaaccaaaatacaaaataattaataaaaactgattacatgagaagtgaaggtaagttgtatttgaaaacattgtttttataattattttttggttttatttttgaatcttaaaagaatatggtgaacaacatagaggaggggtggaaggaaaaataaataatttggtgagattgcgcactaaagattaatacaaagactataaaatataatacatgataaatcacttg

SEQ ID NO: 289354 - DNA, 415 bp, Glycine max
agctttatgctgcacaattgctccaggttgctgcatggaagggcaaaggtctgtatggtggtcagcaaaggagcacacaaaccacaaactcttgcgacaggaacagatttctgattcaaggccagctgggttactaagttaaccaatgcatccagtttgccttcaagcttcttagtttcagatgatgcagatgggcttgtagctacctcatgcactcctctaatgactatggcatcatttctggcgctaaactgttgggagttggaagccatcttctcaattaaatttctggcttcagcaggagtcatgtctccaagggctccaccactggcagcatctatcatacttctctccatattgctgagtccttcataaaaatattggagaagaagctgctctgaaatctgatggtggg

SEQ ID NO: 289355 - DNA, 414 bp, Glycine max
  unsure (1)..(414): unsure at all n locations
agcttgtatgattatggggtatccaccacatgtggtactaggtggcggtcgggcgatggtgcaaaacgattcttcacatccacaaatcacgtataacccaccatcccctgttgcccacctccaactgagctcacgtactcccacgtagcccttatcctcattcctctcaacgtcgggtccctatcaatcctcccaagcttccacaacatccaggtaattccacctccaatcatcatggactaacaaaaccaagcaaaacagggcaaaggcagaaaactctgcccaaaatacaactcataatcatagtagcttttcacatacaaataccccagtaacatttccttcgttccaattcgttaaccgttggatcgactcgaaaattntactggaagtttctagtacataagtctacat

SEQ ID NO: 289356 - DNA, 404 bp, Glycine max
agcttgttattggacaacggaagctctcgagaaattcaaatggtcataacttatcacactgaggtccgattctggcggatagtatatcgagaagctcggaattgaacaacgaaagctctcgagaaattcaaatggtcataacttttcaaacggaagtccgattcaggtgcataatatatcgagaagctttaaattgaacaacggaagctcttgagaaattcaaatggtcgtaacttatcacacgggagtccgattcaggcgcataatatatcgagaagcttggaattgaacaacggcagctcttgagaaattcaaatggtcataacttatcacacggaagtctgattcatgcgcataatatatcgagacgctcgaaattgaacaacggaagctctcgagaaatt

SEQ ID NO: 289357 - DNA, 409 bp, Glycine max
gttagatgaaaattagtatttaatgcaagtaaggttagaaattaagtgtgaataattaaggttgataaatcgtgatctagatttcatagaattagaaaaagggtaattaaataataaaagtttaaagtggagggcatttcgtaaatgattatacaacttgtcttaaaatagaattttagtttatttatttggtgactaattaaagtgtttgattatatgatatagaattgtgtgtgtgtgtgtgtgtgtgtgtgtgcgtgtgcgtgtgcgtgtgcgtgtgcgtgtgtgtgtgtgtgttatttttctattcttcttagctcaatttacatctctttgatccttactttctcactttacttagttgtgatcttaggcaaatcattgagtttgattaataattgcggtttat

SEQ ID NO: 289358 - DNA, 408 bp, Glycine max
agttgtttcttgagtcatcaagagattataaatatgtgaccatggcatgagttttaatcgttcatcaatcatcaatcaataatcaatgatctatcatctatcatctatcatctatcatctatctttcaatctatctttctatatcttcttttatctctttcaacagatctttctgaattatttctcttcatctttctaaaagtttttgttcaacactttctcttccaagaaaagttctttgttcaaaaacttgcgctattcatctttttcatcctcttcttcctttgccaaaagaacaaaggactaaccgcctgaagtcttttgtgtctctctccctttgccaaaagaacgaaggactaactgcctgaattcttttatgtctctcttctcccttacaaaagattcaaa

SEQ ID NO: 289359 - DNA, 412 bp, Glycine max
agctttcaacaaaagttttcacaaataatcatcacacagcagaaacctagcaagactacccataatatctcccaaaaccccatacccacgaaaatcaagagggaaagaagtccacccaaacctgaattttcgaagtcccactcgtagccacgcacttcacgaccccgaaaatgccctcctttcgcgatttggagcagaaatgagtaccaaaggttggagctttgttggggtttcaatggagaatgagggaggagaaaatggcaacgtgagagagagagagagctgtctgaaaaagtgtgggggctgagtgatgagagagaaaagctttttggttttaaataaaaggttttcctcttttttttttctattattttattcaagctctgccacatgtccctatttgattggagca

SEQ ID NO: 289360 - DNA, 399 bp, Glycine max
  unsure (1)..(399): unsure at all n locations
agtctttttataacttcctgcaccacatgtaccttcaccttctacttccaccttgatgttcttggtcttgctagtacagcatgaggctgcaaattccgttgaagcacataccaatctatgattgtgcagctgagtgatggcagtttgtctgtcataggtaacacaatttttaataattaatatatttttatgtcttctatatccttttgatgctttaaatttggaaaattactcttggccccctaaatttaaagtgattaatttagttctattaatttgaaaatgacccatttttttgtactttatagggtttgttgggataaacttctcaaaagaagtacttataagagaaaaaaaaacaactaaaaatgaaataagttnttccattagttaaaatag

SEQ ID NO: 289361 - DNA, 405 bp, Glycine max
tgtctttttgtgggtcttgttcttcacataaataattaaatatcactgcctaccttcttagtttctttcctgattgattgctggcattagcataaactatttttgcttcatgtggttccaataaatcgttagaactgctgtttatctgaagtaatgcattactaccatttttttctcactaatgcatatattgttcacttagattcataatacacaggttctggtgccaagatgagtcgcgattttaattgcattcaaaaacttttttgtcagtgtcttgttagctatcattgtacagctcaatcttcgccattttattcatgattcttagatctttggtgaatatcacattctcaatggaggtgttcgacttttacgttggattgttggggatgggtcgcacac

SEQ ID NO: 289362 - DNA, 395 bp, Glycine max
  unsure (1)..(395): unsure at all n locations
agcttctcaaggaagctacctagtctataaatagaagcatgtgtaacacttgttgtaactttgatgaatgagagtcttgtgagacatacttcaaagttccacttctctaccacttttattccttcaatttcgtgctcccccctctctccttctctccctctttcttttcctccattgaagcatcctctccaaacttcttatccaaggctcatcttggtggtgaagctccttcttccatggcttatttcctagtggatggcgcctcctctcacctcttctcctttgtcttccgctgcatctccatggtggaaaatcaccattaaaggacctcattgaagctcanagatccagcctccatagaagccccacaagcaagcttccatcataacttttac

SEQ ID NO: 289363 - DNA, 402 bp, Glycine max
agcttgttaagatcccaatccatcccattccagacatctttaacctttaggatagaatcatagatatgcaccaaaggaactttgccacaaagaggctccttagaagctagtttcaccatcccccaccttaaaaggcgaaaccacaccttagatccctcaaaatctcaacccgaaacttagttagggagtgcattaagtcccaaaccagttttccatgaagagcagtattttgagaacgagccagcctaacacccaggccgtggctactcctccttttggtaatagtcttccagttaacaaggtggagacccctactcgtattcctcttccaaataaatattatcacagttttatgcaattcatcacaaacaaacatattgagggtaccagttcacctgcatg

SEQ ID NO: 289364 - DNA, 397 bp, Glycine max
ttgcttgcaagctttttaacagattttagtaatgacccactaacctagaattaaaataacttaatgccattaacctatggaattaaaaaaacttaatggctgagtgtaactgaaattgtggcaaccaaaagtcacccccaacagccaacaagtcagccaccatttggtctcccaaaaggctgatgcctatgttgccaattgggcccttattacaacttgaactaaacctaactaaagcccttttagttgattaacccaaaacatatttttggtcagccaactttacaaggattgggcaattatttagacaaactaaacactctaaaattgaaactaagtggtgtcatttagtcctcctccatttgggccatgatacaactcacaaccttggattttc

SEQ ID NO: 289365 - DNA, 415 bp, Glycine max
  unsure (1)..(415): unsure at all n locations
agctttctagcttttcattggtgtattttgatctccttttggtgctctaaattgtgggagtgtgctcaaatatatggggcaattttgatttgttttcttgcttgattaggttgaattaggggttggtatgagatggccctaggcctataatgcattttgaaacaataggacatgccacattgtccccgttctcttgctattgatgcctaaacgcgcgcccaccaagtgttcggtgaaatgcctcaatggcattagcgtgtgacttttgtaaggagacaacccatggggtattttggtttgtgcatattttctatttttttggaatatgtattcattcccgaaaaaggctagagtaattgccccacatatatcctagtcctagaaactgaaattntatgcaaaaagagcacaaaag

SEQ ID NO: 289366 - DNA, 410 bp, Glycine max
agcttgtagattggctagacatgatacatgtcagggttttggtttggttcaaggataaaagggacgccccacattatttccatgacacaaatgcaaaaatgatgatttggaaactttatgcaaaactggtcatgcatgcacctatgtggacactcaagtgtcaaatttttatggtcatgtgatgctagggctcaggattcatttcctccattttagtcaacccaatgtttccaaaatatgttcttttatcaatttgtgcattcatccgagtccattttgggcgtccggtgaaatcttcacagcattcacccttcaggtgtatacacattttttttcaaaaactagctatgatcagcgaattttcttttcaaagaagagttggaagtcatctcttttcaaaagcatgttgg

SEQ ID NO: 289367 - DNA, 154 bp, Glycine max
tcgatcagcccctagcacatttctgatgatcgacatttacaggatagttcctgtcatcaatccactatcatccttatactggcactcaacgcggcgtatatggctccaaatctgccgatgaactatcccacccctgcatttatccttgatgtgg

SEQ ID NO: 289368 - DNA, 410 bp, Glycine max
agcttaagcttgttgagattattatattattacatattttctttaaaaatacttaaatgtattattaattaaacacaataaattataacattattaattatttgaaagtattaaaaaatggaaagaaaaaaaaaacaggatcaaaattcgggtttgtattcttaacctgattttgacaaaaaaaaaaaaaacaagggaggggactgagattcagtgtgtctgtaacaaattctcaccctgaataacaaaaatgtctaattaggtaaataaaataaaaatctcgaagacctttcttgaatagttagagagcctaatgaaaacacaaaaattactttttaataaagtgtgaattttagaaaataaggtcaccggtattttggaacttcttagatccaaagaccaataaattc

SEQ ID NO: 289369 - DNA, 400 bp, Glycine max
agcttctacttatgtggcagggcgggcttccttcactttcttgtctccaacgcgagctttgaccactgttcttccttcccgcgatgcttcttttcatgtccgcctgagtgggcttatagcctaaaccatacttcccacgatttccttgggtatttatcaggctagttatgccgccgttgtctttgcctaaacccatcccgggttcataaccgttccccaacataactcgggccatcattactgctgcatcggatagacaaggttgcccagagagggagtccacggaggaaatgctgaccacctcaaaagactggaaagcggtttctaacgattcttctgtggcttccacataaggcatagaggatgggcagcttaccaagatgtcttcctcgcctgacac

SEQ ID NO: 289370 - DNA, 413 bp, Glycine max
agcttgtattgattcagtctaactagggatcaaggtttgtagaagtaagcttcatgatgatgaatcaagattgattcaaggagttttgatgataacaaagatgatgacaaaaagcccaagataatgagttcaagattgagtcaagaacacttcaagaatcaagagaaatttgatttcaagattcaagaatcaagtttcaagaatcaagaatcaagaataatcaagttgaagattcaagaatcatgaaaagactcaatcaagataagtactaaattttttttcaaaacattgagtagcacatgaatttttcacaaaaccttttaccaaagagtttttactctctggtaatcgattaccagcttattgtaatcgattaccagtagcaaaaattgttttcaaaaagctttcaactg

SEQ ID NO: 289371 - DNA, 413 bp, Glycine max
agcttgtatgtcttggatcttcttcacaaatggagtaatttgcttcttgaagatcaatagcagcgtaatggagatggaagaaagatgattggagacgccacttcaaggagaagatgtgtcaagaaaaaactcaccaccataggaagtcatggataagagcttgaaggtaggagaagatgaatggaggaagagggagagaaggagcacgaaattttgtgcctcaaatgagatttcaactttgaagtgtgattctcaaattatcaaagttgaaaaaatgcacatacatgacctctatttatagcctaagtgtcacataaaattggagggaaatttgaatttctattcaaatttcacttgaatttgaaattcatgaatttgtggagccaaagtttggagccaaaatttcactaatt

SEQ ID NO: 289372 - DNA, 414 bp, Glycine max
  unsure (1)..(414): unsure at all n locations
agcttgtatgattatggggtacccgtcatatgtggtactaggtagcgattgggcgatggtgaaagtcaactctccacatccacaaatcacacataaatccaccatccccagttgcccaccttcaactgagctcacgtactcccacgtagcccttatcctcgttcctctcaacaccgggtccccatcaattcctccaagcttccacaacatccaaacatcatgaactatccaaaaccaagaaaacatggcagaggcataaaactctacccaaaacacattcaaataccacagttttcttcactcatataccccagtaacatgctcttcgttntgattcgctaaccgttggattgaatctaaaattntactggaggtccctagtacataagtctacattntgaccattgggatctg

SEQ ID NO: 289373 - DNA, 412 bp, Glycine max
  unsure (1)..(412): unsure at all n locations
agcttattagaacaaaattgcctcaatcatttccaaatatgcatgtgaattatgaagcatcaacaagaatcaagccaaggctattgtgcaagcaatcaatggggcaaaacacaccaaatgattatgatgatgtatggctcaaattctcacaaaggtaaactcatcactttcaaatcgagctttcaaaactatcatgacatgtagaggagaatcaaagatttcaagtcacaaaatgtcaaaaacttttattttcaaaacaattacccatttcttgaacatgtcctataattcaaagaaaaacttgcaaagtcgtacatgcgcacagaattgacccanaatattaaactaaaaatccgacatgtttgcggaacttcaccggaaggttgcatgccacgatacaatggtccccgaa

SEQ ID NO: 289374 - DNA, 370 bp, Glycine max
agcttttcgcaagacttacggaaagatcttagagttgaccatagcagaggtgtccatagaagccattgcagcacttacccaatactacgaccagcccttgagatgcttcacattcggggacttccaattagtaccaaccattgaagaatttgaggaaattctaggatgtcctctcgggggaaggaaaccatatctttcctccgggtgtctcccctctttgagcagaattgcaactgtggtcaaggattcagccagaggtttggaccgcataaaacagactcggaacggcatagcgggcctgccacagaagtacctataagacaaggcgaggggtatggccaatcaaggagactgggtcccgtttatggat

SEQ ID NO: 289375 - DNA, 399 bp, Glycine max
  unsure (1)..(399): unsure at all n locations
agcttgctacttgaggagggaggannnntnngcttcttgaatatcaatancaacgtcatggatatggaagaaagatgattggagacgccacttcaaggagaagatgtgtcaagaaataactcaccaccataggaagtcgtggatatgagcttgaaggtaggagaagatgattggaggaagatggagagaaggagcacgatattttgtgcctcaaatgagatttcaaccttgaatggtgattctcaaattatcaaagttgataaaatgcacatacatgacctctatttatagcctaagtgtcacatacaattggagggaaatttgaatttctattcaaatttcacttgaatttganatgcatgaatttgtggagccacagtatggagccagaatctcact

SEQ ID NO: 289376 - DNA, 355 bp, Glycine max
agcttatctgataatatctgtgagttctacactctaacctatcaatatcttctatgtatgttaactttttttctgctatcataagtaattgatgcatttcatgtgtgaatgctaacaaactgttctgccagaacctgcgaaatgtttgtcttggcattctaaacggctgtgaagtaaggttggatgaactgaatctagatggaggtaggaattttgttgtgttgttaccatctcttttcttctagttcccataccactcgcattacaattcctaacttcatcagcagttttcatcagaatgatgtgtacactctgcactatgtaaatcttggtatttattggttatgcagacata

SEQ ID NO: 289377 - DNA, 396 bp, Glycine max
agcttgttattgaacaacggaagctcttgagaaattcaaatggtcataacttgtcacacggaagtccgattcaggtgcataatatatggagacgctcgaaattggacaacgaaagctctcgagaaattcaaatggtcataacttttcaaatggatgtccgattaaggcgtatattatatcgagaagcttgaaattgaacaaaggaagctctcgagaaattcaaatggtcataacttatcacacggatgttcaattcatgcgcataatatatcgagaagcttgaaattgaacaacggaagctctcgagaaattcaaatggtcataacttttcacacggaacaccgattcaagcgcataatatatcgagactctcggaattgaacaacgaaagctctc

SEQ ID NO: 289378 - DNA, 398 bp, Glycine max
agcttctctttgtcaaccttcttagccgagtggattgtctagtcttcctagacgtaccattgaaaggaatatcataatgtgtaggtgagggtggggatgtcgtcatgagtatacacaattgaaacaaatacaattagcagcacatgtcagttatataaacatatatgtcaacatgataaaaaatgtatgacaacatcacttttaacatctcagatatacaacataaatgtcagtcaaacaaacaaataaaatgtacattaagttgaatgaaattcaaatacataaatgtattacaattatgcaataggtcatatacattatcaataaaaacataagcagttacatttgattattctcccataaaccttcataatgatcatttctagttgcatgtacaa

SEQ ID NO: 289379 - DNA, 395 bp, Glycine max
agctttattgtgttcttttgttaaggctatgcgtcttttgctcctggatctataatataaagatctttctctcatctgttcctgcgtctctacccattctcatccatctgcatgtttatctctttatgtttaaaacgccagatccgacgacgagtcccttgaaggtactaatacctgagacccgcccatcgacttcgaacaagaaacgtctcagacataatatgaagaggacgaggatgtgagactttcctcggagtcggaaaggatagtcgcccaggaggaccataaaatggggcatcatcaacaagagacagaactagtatacttgggaactagcagtgtataaagggaagtatagatatgcacgagtatgaccacacccatccgcgaataat

SEQ ID NO: 289380 - DNA, 395 bp, Glycine max
agcttgtagaatagttaaacgacaacaacttttgactcggatatccgattgtgtctcgtaagatatcgagacgctcgtaattgaaaacggaagctctgagaaaaatcatacgacaataacttttaactcggatgtctgatcgaaccctgtaatatatcaagacgctcgaaactgaaaagggaagctctaagaaaagtcaaacgacaataactttttactcggatgtcttattgagccctgtaatatatcgagacgctctaaattgaaaacgaaagctctatgataagtcatacgacaataactgttaactcggatgttcgatagagccctttaatatatcgagacgctcgaaattgaaaactggagctctaagaaaagtcaaacgacgataactt

SEQ ID NO: 289381 - DNA, 478 bp, Glycine max
  unsure (1)..(478): unsure at all n locations
agacgtggggtgatgacatcaatcatacaggcaatacanctnnnnccccgggatccgttgatcctctacagtcggcctgcaagcatgtcttcttgtgcgcatanntggggtggggtcgaggaggcaggccctacatttttggttccaaaacagggaaagctccgatatattttcaacgcagtttaacttacctagaatatttacctgtacaaacatagtgtatttgtcactcacatcacacacctctgcttggatacatctacgtacaagcatatctaaagctttttggtgcccaaatatcgccatggtgcacatcttggtattctaaacacctatacaaacttcatgatgaatatcgtctatctactctataaagagctcctctacatgctcattaaagactcttgctacctaaagccgcatgcagggccaagtatttttaccttcgctgactaaaatagaatttataggcatatct

SEQ ID NO: 289382 - DNA, 386 bp, Glycine max
  unsure (1)..(386): unsure at all n locations
agtctttttagtcataacctctgcagttgaagaattgggcttcgagtttggacttttgttttgtgtaattagtttagttagttaattagttaggtagttagttagttactagcactctatatattagtgttagatagttagttaaggactagaacttcattgngagaaacacttctctagaacttcattntgtacaaaacttgttgtgcaagctctctttctctttctttntctctcaattgttcttcattcttcttcatcttttcacttctgttccaccatttccttacacaaatttcatggtttctccattggtgatgattatggagggctaaacaattaaccaatccaaggatccactccaagcaaagctgaatttgagccct

SEQ ID NO: 289383 - DNA, 388 bp, Glycine max
agctttgatggtgcgtagcccaccatcttttcatagtagagtatcgataatgtgtctaccatcacgatcatcgtctccctttccatcattgggggtaccacctgagccgccagatccctccaccttttgggcgtgttctttgaaagatccgtccccctttttgcaaatgttctgtaattgcatcctatccggaaccatatcaaaattgtactgatactgcctaacaaaggcaaccattaagtccttccaagaatggactcgggaagattccaagttagtgtaccaggtaacagctaccccagtaagactttcttggaaggaatgtattagcaattcctcatcttttgcgtattccctcatcttctgacaatacatatatagatggttc

SEQ ID NO: 289384 - DNA, 396 bp, Glycine max
agtttttgtgatatatttcaccagagacgcagctccccaaacacctcagtacccctcagtagttagacttgttccattcccctacaaaaacaaccacccagttccttggaggtatgcgcctccaagcgaaaggaaggaagaagccaccgacatcagctcgttgtcaaccaaggtaaccaatatcacggggctgagtggcgtaacctgcagtggtcacatgttcgcaccccccgacctgccaacaccacccgcaaacgttaaagggaaggcgaaggtagcggaagaacaaagtgacaaagtgatccctactctggacgagcatattccagtaaaaagtctttcggcgaaatgggatggctatggaaagaaagaagtatcgctagaggaggcaggtga

SEQ ID NO: 289385 - DNA, 304 bp, Glycine max
gcttgttgtagatccattgaccatagcccttgcgaatgcaacactagatagatgtggctaatcgaggcatcctgcctgtcatatgctcgcgctagaacacactgatgtgctttttctctgaagcaatatgttgctaagtgtcagaacgaagaccgtttgaatgaattcgcgtacgatgcgaaatctattaatgtgcccatacttgatgaattctgcacctgctttcttagacatcattacgctatatgtggagtaactgggctgagcgtgtgattgatgaggtaccagtaatcgccagcggatg

SEQ ID NO: 289386 - DNA, 389 bp, Glycine max
agcttatgaaggttgcttaatatctccaacagaattactgcaattaatccctaatatttataattagctgacagtctgatcatgctgatatatatcaataagttaaatttgatagtgatactgttgtatatattaaactacattgagatttggcaaaagcaaaaagctattaaacaatgtcttgtgttgcattctcattcaagaaacaggtttcaacttctgtacaaaacagaaaatccttacaataaaagaaaacagcttctgttcaaatttgcctcatcttatctgtctgtgtctccattagcatgatttacaggtcattcaaatgacaggcgacagttaggaactcatccttcttacatggtattgtgagaccacccattgcgtgc

SEQ ID NO: 289387 - DNA, 390 bp, Glycine max
ttgcttctggtaaagctcatatatgttcttaaacaatttgccaaagggatcatctctagcaatgatattcgacctatgaccagctttaacctgtttctttgtcttttctatgaatcctatattgttaatgaaaataataattaacctaatgtttgagttggagtttttaacactacaacattgtattaataatgttaaagaaaaataagtacttcatgggatacaagtttcacaagatgtgtcgaccatgcaatgaatgtgtcaagggcttgcctgacatactaaatctttgacgtcaaaaaagggacttaagtgtcaccattgtaaacttttgcaatactcaccttcaccacatcatcaccataaggcacgttgtgtatggtggatacc

SEQ ID NO: 289388 - DNA, 398 bp, Glycine max
  unsure (1)..(398): unsure at all n locations
agcttgtatgtgtactgngaaagattcaagaaattgtgtgcaagctgccctcaccaccagatttctgagcaacttcttcttcaatatttctatgagggacttagcaacatggagaggagtatgattgatgctgctagtggcggagctcttggtgatatgacccctgctgaggctaggaatttgattgagaagatggcttccaactcccaacaattcagtgcaagaaatgatgctattattcttagaggagtccatgaggtggccatggattcatcttcatctactgaaaataaaaagcttgaaggaaaacttgatgccttggtcaacctagtaactcagcttgccatgaattagaaatctacacctgttgcatgagtctgtggtctatgtccttcttt

SEQ ID NO: 289389 - DNA, 394 bp, Glycine max
agcttgttttttaattatttgtatgggttggatgttgaattctggttgttcctggtgcggagatgatggtacagcgggtgaaccagaagcggaagtttcttttggtgaggaagccatggaaaaacagagcgtttggaatgatttcataaatctcagaaaactattgggaaatgctggagaaaacacgaatgcctagcagatataaatttgaatgaagaatgtagaggggcgtgtgaagcaacggtcgaatttgctttgtggtgaacgtgctattaatgttaagtgattcgtttgggcacgttcagattgcagtagctgctataattcctctagcaaacaaatgcccagcttgcccctcagtttttcaaactgatttgcatccaaagcctttgtg

SEQ ID NO: 289390 - DNA, 394 bp, Glycine max
  unsure (1)..(394): unsure at all n locations
agcttgttttgtgttatgactccattgatgctgattatgaagttttttgagattgtctgttgggtagaggtcatgataaggactttcatgaactcaactttcttgagtaatagagaatctttgtcaatgtctatgacctttccaaagttagaaattatacttgagaggcactttgtgttccatgtagagaaaatgatattgtagcatctaatccacgtcaatctattacttgtgtgagttgattcttcccatttttgcactgatttaaagattgaaatgaagtttctttttcatgttctatgcatagactgagaacctattcctcatacaagccagatacgagtaccanatctccagcattatatctcataaaaacctcttggtttccttccat

SEQ ID NO: 289391 - DNA, 396 bp, Glycine max
agcttgcttgtggagcttctatggaagctggatctttgagcttcaatgaggtccttcaatggtgatttttcaccatagagatgcagcggaaggcaaaggagaagaggagaggggaggcaccatccactatggaataagccaaggaagaaggagcttcaccaccaagaattgccttggataagaagcttgaagaggatgctttaatggaggaaaagaaagagagaaggggggagcacgaaattcaaggaataaaagagggagagaagtggaactttgaagtatgtctcacaagactctcattcatcaaagttacaacaagtgttacacatgcttctatttatagactaggtagcttccttgagaagctttcttaagataactttcttgagaagcttc

SEQ ID NO: 289392 - DNA, 497 bp, Glycine max
  unsure (1)..(497): unsure at all n locations
catactcttcntctttatacggtcaaagagttatctatagtctttacntnnnnccagagggggctgtgcgtcgtactacaccgtnnatcntgncccgcgatactctaagagattttcctgcagcaggctctttttgatctattgcgtnagcataagcacaggataacctgtgagcgtcggattgaatatcaacaccatcggcgtaggaatgtgatccatacacaaaaccaccccgagagtaagccttcttcatggggcacggcaagcaagaacagaaagacgcccaaacatcgaaatcccgtcctagggtgagaagggggacagagtacgatctcggaccaaaccatgcatgccaaacgacaacatgttcaggaaaacaatagttaaacgatatcgatagggtgccctaggtgcaccataagctaataaaaccgaaaggtcgactaacgtcagcaaaagcaagatacacggcaattctgggtacacattaacgagag

SEQ ID NO: 289393 - DNA, 389 bp, Glycine max
agcttttatgtcaggctaagcaccactatgcttctgtagttttcctttgaataaggataagcgtagctgctgctctaagcccttgttgtgtgttgaggaggttgagctaagcgccatgcaacgctaagctcaactctctcattgtattttaagttactgcagctaagctaagtgcgccctgtgcgctaatcctgagtgtcattctgataacgttgagctaagcgcgccatgctacactaagctccaactctcttctattttgaaaattgtggacctatgctaagctcagcttgctgcgctgagcttaatctacataaaaaatactctgtgtattcaggctaagtgcgaggctactgcgcttagtcgctaagttaaactttataatgcgc

SEQ ID NO: 289394 - DNA, 293 bp, Glycine max
tgttctttattatgtctgacatattcatagtcgggcgccttattacttttggagacgggactatgacaccgatggagaaccagagaaccaaagctgctatatggaacagagcgagtgagtctcggaaggttgaaatacctactattgtgttaagaacaactttgacagacgggattgcattcaagggcatagtatgacattggcttctctacgtatatggcgtgcgtgctataggataacagtctgggagaacaatcagaattgaaatgatcctacgcgcatggcatttctgt

SEQ ID NO: 289395 - DNA, 390 bp, Glycine max
  unsure (1)..(390): unsure at all n locations
agtttttataagatgtgctcgtttgtataaacaacatctatatattggtagtagttcatgctcacataaccacaaactgcaataatgtgtgaacatggatagtgaagcgcagaataccttccgcattgacaatgatgaccattcaagttaactgcccacttttgtccgccacgttgcgttatanggttgaagctttcctctacttcaaaccttgtgaagtggatatcatacacgcgaacgatgtgcgtacaagcttgttcttgatttttccttagttctttaacaagctttgaacaatatacatgtccttcatttaactatctttgggcttggcggccacgctcaacaaagtactttcgacacctactgtacgttgatttgaccaatgct

SEQ ID NO: 289396 - DNA, 391 bp, Glycine max
  unsure (1)..(391): unsure at all n locations
agctntgggactaaaaaactatataacagcaccaaggttctagtttagagggctcttcgatctattcgttattagacatagtctctctctctctctctctcttcttctctctcctattttcgtttttagatttacgcttttcttacacacttttttgttttgcaattccagttttgacttttcattttagcagtacaatctcgctcttcaatctataatttccttctctattgattaatggaaggctagattttctggtgttgttccttttgaggacgaagcccaactctctttgaggtttcgcttgcaatgtggtttcctggcagttttcccttcaccagttatcccaatttcgtgaatattaatcagtgcacgcttcgcgttcgattaa

SEQ ID NO: 289397 - DNA, 588 bp, Glycine max
  unsure (1)..(588): unsure at all n locations
ctacgtttctagccaccncaacatcatctgcgtcttctgcacgcaactatggcgatacactatctatcatanacannccncaagaggagnctttgatggcactccttactacacggcgaggtcnagtgctgctccgcccgccgccgatctctctattagactaccatggacgctaggcatttcttttattctgggacgtctcgcgtgaggcagcgctcagctatatcacgacgctacataacccgaaaggagaacagctcctcgcctcccgctaacctgcaagaacctttagacggcggttctcgcgaggaggaacaccgcactcgtatggcgcacgcctcgcactgagaacaacagaacgctctccagctagagtccaccgcacaacaaactgattacgtcggagggacgaggaacaagatataatagatcccgaccccacgacatcgtatagcgaagccctccactactgctcactaaaattactgtcactcaaagggcagaccatccccaccaattgaagggaggccacaattggtatcgaccactacgcaagagaatccacccttaccttactatgtatcgagg

SEQ ID NO: 289398 - DNA, 392 bp, Glycine max
tagcttttcatctatagatatttattgttggatgccaaactactagaagatactgttctatgacattgaatgatggatattgtatttaggcaacaatatgtaacatagctattgtatttaggtaatagtatatgtccaactattgtatttagcttaacattgaatgatggatattgcatttagtaaatattgtatgactattgtttctttcttcttagtattgtaatctttcttagaagataaacagatagtgtttctaaaaacaattgtttgataaatcattctcacgcgttatgaacatacttgggtagatatagtgctctgttttattcttttcagaacctagtagctctcacaactaacataaaacttcttcgactagcaaatagtgg

SEQ ID NO: 289399 - DNA, 387 bp, Glycine max
agcttatcaccacaagttatttctgctaagcatgtcttaaatagtaaagcattgtaacaaatcttgattttacacacacacacaaacatatagtggaaatacaagaaattataaactttaatatagaagtactagacattgccaatctgaagtgagggagaagaaaataagtactgttgaagatacacaagtacatactatcttgcactgaaaactggttctgtgtcaggtgatggttgtgtccttcgagtgtatttgagtagcaacccttctgaagaaagacctggtaccttcagatctctgaaacatctcataaggggttaattcaaatgtaaaaaagatgatacgtttgaaggtaaaaataattatgagatgttcacctgatat

SEQ ID NO: 289400 - DNA, 396 bp, Glycine max
agcttgttgttttcttcaactcatgcattctactagattttggcatagcaataaccaatttatttgaaatttgatattcatgaacattgtatttctcacaagtcaatggttagattgatgaagatcacataaaatatgttactcaattgtcaaagtgtataaattatttataatgtcgctcatgttttactaacatgggcattagtttggaattaattagttgctatgaaataaaaaattgggacttcatggccataagtttcacctagtagtgttcagtaataatgtaatgttttaatttaacttctatcaatggataatctacagtttaggttgtcctcaattaataaatttattggttccttctctggttgattctgctaaaaaataagaata

SEQ ID NO: 289401 - DNA, 397 bp, Glycine max
agcttgttacataaataattatgtcactgtccaatctttcaagcatgcgtcatataatctaaacagacagtatttcattgctaaactcatgaaaaatgaattagaaaggtcacttacagagctaatactgggttgtctttttgcagcagagatttctggagaattcaaaagcagaggatttgtagcagagtatggttcagtcatagcaaacattagattatacaggtaagaatctcaattctcaatcttgaactaaacaagtaaaatagcacattgtgcacacattaacatagaaaggccctgtgttatgaaccataaaaggcagcatcggtctttatgaataagctttccaaatttaaggataacaaaactgcaacttcttcaatgtatgtgcgtc

SEQ ID NO: 289402 - DNA, 391 bp, Glycine max
agcttgctctcttaacaaacttgtttggaacagcaaggggatggcccaacaatagtcccgtttaactttgctcgtggagaagaaaacacacaacgctttcctcgatatcttgatgattgggaaacattcatgaagttactattcagtgtcgctaaggcgggcctgcttgatgaatatgacttgctcccaatgagtgaacgacctttgggagcagcctcctgccatccttcatctgagctgtcatgctgtgccaggttattactttcattgagccttgtttgagctaagagagtggactcaactattatcaatcccgtggactatgagttgagctccagatctattttctgtatcactagtaggctctgttatttaataaccgtgacacatg

SEQ ID NO: 289403 - DNA, 393 bp, Glycine max
agcttgatctataggtaagagacaatcattagggacccattctcttccaccgattcaccttcattccttatcccttcaccttttacatccttttgtacatttgagcccttcgtgaccatgaagggctaaacaacccattgttggagagctttccaccaaactctcttgatgtaaagactcttactatccatttaacattattgctagtttcattgttccttcctgtgtttatttccatgtacttggtttgatcatccatttaaatgctatgttaaggtttaagcattgggaaatgtagttaaccttagaacttggaagagcatctaaaatgcttcattgctagggataatatgacgtagcttatgtgaattatacgtctctattaatcatgca

SEQ ID NO: 289404 - DNA, 308 bp, Glycine max
agcttgtttttatggatagttggtatgagattaagatgttttggctttttacatgcctaacttcttttgagtggcatttgtattggttgctaacttgattgttgcgtctttagtacatttcatattggtttttcatgtgcatcgtcatagtgtgtgtgaaggaaatctcctaagttaggaattttttttatgaggcaaaaactctctattttaatcgattacagagtaatcgtaattgattacgacaagctctgaagcttgaagatgtaaagtctcgtatccgatttatgaatgtatgaatacatgaa

SEQ ID NO: 289405 - DNA, 382 bp, Glycine max
agcttttacccatgacttcctatggtggtgagcttgttcttgactcatcttctccttgaagtggcgtctccaatcacctttcctccttctccattccgctaccattgatcttcaagaagcaaaggactccattgatgaggaagatccaaggcctacaagctctacattgagctacatcatgtggtattagagcatcttcatctaagcgatgttcttttgcttcctctatctttttgttcggtcaattgactttaattccttgttcttcatcatcttctccatgtatctgctccattgtcttatggtttggctatttttagagtagattcaacaaaataaaccgattaaatcttagataagcactcgttcttgcatttctatg

SEQ ID NO: 289406 - DNA, 384 bp, Glycine max
agcttgttctcttatgtgcttgtactcagaattaataaaaaaacacagtgacttactaacacacctaatattacaggactagaaacaaattagactaatacaaatgctaaaatttcaagtttagataccagactcaatgatgctaagtaaatacagaaaatgattacaacataagatgtgttaaaatagtaaaatactactaatgacaaaataataataatagacggggaaagaaaaaccatatacgtaaaagacagaggttaaggtggggctgagctgaaagaagaaaaagcatggaactgaccagagtttagggttcacaattcagcattagttagcatactatctactaacaataagtatcatcatcatcatattaaactg

SEQ ID NO: 289407 - DNA, 380 bp, Glycine max
agcttgtggactataccttcgaccaaacactgccgtgtttctgtctcgacccagatttaatgcgggctgtagcaccggctccgctttcctaactgtactggaggtggttgtcgtggctttatcctctatagttttctggagttttagcatgacctccgagatggaagccatttgatcttttaaagccgatagatcggccttcatctgttcctgcacgccctcttcattatccatttttctggatcgagtgttataggggtgcctatgtgctttcttagttatgatgaaattcctaaagaaataaacaacggtgagtatgccaccaaaacatgaatatgcaaatgaatgatcggagcacttggatccacccccaggttttt

SEQ ID NO: 289408 - DNA, 396 bp, Glycine max
agctttattatcacagcaacacagaatctaggtgtccaacacccctcaattcaatgggttttctaggtttgaaaagtgaaatcgagaatgaggtaaatttgaagcatactctcacctcacaccagtccataacatcaatctaaacttgctcaaactggatttacgcttaaaatctcaccgaatcaaaatttgactcttccacacccaaatttgccctataaatggctctttgttcactttggtcatttgtttttctctctagcacagcctaatctttctcataagtcctaaatgacatttcaagctaagattaactcactctaacctccatttaccacagaatccagaattaaccttccaactctcaaagcctcactctttttccactcataacat

SEQ ID NO: 289409 - DNA, 280 bp, Glycine max
gcttgagtcgaaaaccgcaggcgtgaccttggctcattacctgtcatgggattttttaaggctccgctcggcttacatgaaagtctggctaggcccacgatcctatttgaaagcttgcttaaagacgtctctgataaatcaattattttaaatcctaatgaaatacttactaaaaaaagaaacttatgaaatcccttattagtaatgcacaaattctaaaataattgataaacaaaatgattatgaattctactcgtaaagcacacagtatattaaaaaa

SEQ ID NO: 289410 - DNA, 395 bp, Glycine max
  unsure (1)..(395): unsure at all n locations
tagctttatgttagcgaatgaaaggaaacatgaataaaccatacatgctcaaataacatatgaagataaacaggtacacctatatggtcacccaatataaataaataagtgtcatgtgccataaagagtagcaaaatataatgtgtcctaatgaaactagggagtaacatatatagtcccaactaaagtaaagtagtaatgactaattaagtacaaaaggtctgagcctaagtctacccatcccaaaatactcgtaagggcaaaaacctaagacttagagtagtcacctctacctaagtccaaagtcaggtgactgcaactcagaagggataacaacctctggcataggcacaacaaagcggtaatacgacagtgtangctaggtctaccaaatg

SEQ ID NO: 289411 - DNA, 390 bp, Glycine max
atctttatcggatgacgccgatcgaacatttcctaaccgacgtcatgcaaatttcgttcagggattgaattgagaactcgttaggcgacatctgtcgtgaagtagcgaccgatatttttcagccgacattgcacaattctttttagaaaagctcgctggtcgataatggtctttttacggcagagtaagttttcttgttttggtgttgcataaaaaagttacaatgtacttcggctaggtttttcgtgcgagttcaaccgacattttgtttcggccaggaaaacattagcccacctctgcaaaaaaaatatttgctaaccgtcttcatgcatatttcattcaacgattgaatagaaaactcaatagccgacaacggtcgtgaaatagtcc

SEQ ID NO: 289412 - DNA, 395 bp, Glycine max
  unsure (1)..(395): unsure at all n locations
agcttcttattcattgctcatcttagtggtgaagctcattcttccatggcttattccctagtggatggcgcctcctctcacctcttctcctttgtcttccgctgcatctccatggtggaaaatcaccattaaaggacctcattgaagctcaaagatctagcctccatagaagccccacaagcaagtttctatcaagtggtaatcagagcacaagagcttcaagtaagtgctccttaaacctccattaattttttttctttaccctctcttccattgttgnttcttcatttttctccatgtatctcctcacatgtcttgttctaaatgttgttaacatgattctttagagtttccaccgattaaacttgctatagaaactagattngattttctat

SEQ ID NO: 289413 - DNA, 398 bp, Glycine max
agcttctccggatgacgccgatcgaacatttcctaaccgacgtcatgcaaatttcgttcagggattgaattgagaactcgttaagcgacatctgtcgtgaagtagcgaccgatatttttcagccgacattgcacaattctttttagaaaagctcgctggtcgataatggtctttttacggcagagtaagttttcttgttttggtgttgcataaaaaagttacaatgtacttcggctaggtttttcgtgcgagttcaaccgacattttgtttcggccaggaaaacattagcccacctctgcaaaaaaaatatttgctaaccgtcttcatgcatatttcattcaacgattgaatagaaaactcaatagccgacaacggtcgtgaaatagtcccgactgat

SEQ ID NO: 289414 - DNA, 390 bp, Glycine max
agcttgttatctatcacattatatagcggatacgtactgctaaaagcctgcatatatggttttttaatgcattccaacttgcattgcaaccatttgagggaccctttcatcaaagatatgaaattattgacactcaaggggtcggcatctcccactccatgtaccttgatttaacttaaaactcaaggatcaccacaattttattgtagcagctgaaatccatagcatgattttttttcttagtgatgctgcaaccctttactatatgaacccatataatataagtatcatttttttttcagtaacagtgacttgtatgtcattatgattgagtggctataatatatgggaaatcatctaaatgaacttgaggcacgaaatgatgaacat

SEQ ID NO: 289415 - DNA, 392 bp, Glycine max
agcttcttctcaatggacttaccttgaattaattcctttgatagcccttttgagccttgtttccctttccttgttttgaagctcactacaagccttaagtgaaaaaccatgatattaccatatccttaaggaattttggatctttggaattgttttgggaataagtgtggtgggtttttgtttcattggacaacttgttttgttggctatgcttcatgatgtattttgggccatacttgatgtacattgtatattggttaaatgttggacatgctgaatgaaatgttgtttctcaaaggccaaagagtaaaaaaaaaaaaatatcgaaaaaagaaaaagaaaagcaataaagttgagtgaataagatcttaaatggcacaagaatgatgaaa

SEQ ID NO: 289416 - DNA, 375 bp, Glycine max
agcttctctcggattattccgatcgaacatttcctaaccgacgtcatgcacatttcgttcagggatcgaattgaaaactcgttacgcgacatctgtcgtgaagtagcgaccgatatttttcagccgacattgtacaattctttgtagaaaagctcgctggtcgataatggtctttttacggccgagtaagttgtcttgttttggtgttgcataaaaaagttacaatgtacttcggttaggtttttcgtgcgagttcaaccgacattttgtttcggccaggaaaacattatcccacctctgcaaaaaaaatattagctaaccgtcttcatgcatatgtcatttaacgatcgtatagataactcagtagccgactac

SEQ ID NO: 289417 - DNA, 362 bp, Glycine max
atcttatttattctgctttagggctttatgatgatgcttgcgatgtttgtgtgctgaaattgctgatggaaaactgatatagatgaatggtagagctaacctaaggctaacaagtgagaatgtagtgatatgagtggaaaaatgtgacgctctgagggtttgaaaggctatatctggatttagtggtaattggagattaaagtgagttaatcctagtctgaaatgtcctttaagacttatgggaaagcttgcgctgagcatatgatgaaaatgagtgaccaatgtgaaagcaagagccatttctaagtgtaattgcgtgttgatgggtcaaatattgattcagtggagttttagtcgtataa

SEQ ID NO: 289418 - DNA, 517 bp, Glycine max
  unsure (1)..(517): unsure at all n locations
cgcacgtcnnnttaagatgtgttcaatccacgcgccgagagctagctccgcgcggatcgctctctatgacagtcctagcactgcactgcatagcatttcttgtgttgtattccattcaatacatatagctagctcggcggcatgcccattacgctcacgaatagtatcgccaacccggcttgagacacacagtcatgttagaggaaccgatcttgtcttgagatgagacatggctcacttctactttcttatcaacgagccgtatcccgtccgcttactggacggttgtacgggccagcaagccatattgttttgctgctgtacaacaacgacaccatgtacttcggctacgtcagtcgcgccagagacaacagagcttttgatgctgcctcataaactttcgtacaacagttgagagaagaatatgaccataactcgatatgctgtgtattacacgagacagaatgcttatatacacagacttgcctataacaggcgggagatgactacgaatggg

SEQ ID NO: 289419 - DNA, 395 bp, Glycine max
ctgcagtttttatgaggaagtgttgaagggtgaaactttctgcttttattgttgaccacagagtggtacctggagatatgtcgcgggggtcaggagaccttggggacgtcaggtggggtgctattgcccaaaaccaagcttgaccaatcccgacccaacccgggcatagtcggtcagtgagaacctgtgatgtacctaagcaggcgagctccttgcagtcaaccgataaaaggataacatagaccacatagcaaggaggcttgtggtggctgaccagctgtgaatttgtgtgatatgtggagtatagtctctggtaatcgattaccaagggtgggtaatagattacaaggcttataaatgaagacaggaggctaagatggtctctggtaatcgat

SEQ ID NO: 289420 - DNA, 370 bp, Glycine max
tgcttattgtttatggaaaaagtatagacatccaattgcctcgaccaatttataagatttgcggagaacatgcaaaatatttcacgtctgacgctcatatgcgtatccgctttacaagataatggttgggttgaaattagtaaagattatgtaaacgaaacgcgacagcatgtgaaggatcatatataattaagtcaattatattcaatttattcatatatgagaagatgagtgatatcttcgaattagatcgataagcgtattgtggcagtatctaattcccgctttttctgatgaagacatgtaatataaggatgcttttagtttattagatgagacgaatgaatttgctgtgacgcaaattcaatct

SEQ ID NO: 289421 - DNA, 540 bp, Glycine max
  unsure (1)..(540): unsure at all n locations
ctcacacgtcccctaccatctctgcacacttacagccacatgcatacggtattgcgaacncnaaggggggtggtgtgactcttcaccacgngaaangagatcgcggccgccgaggactcanagtagaccatgcacgcatgcatttttgtgtctgcgacaagaatacttctgcgagggcagccgctgacgaccaccgacggaggataagagctcctcatagaagaactcgggactcactacgtaccaagtcgcacgaacgggcgagaatgctgcgcgccgggtgtcagcgacgaccgagagaccgctgacgcaagaaagagaccgatcgcaagacaacactatatctttcgactaaggtacgaccggctccatcgcaacttctatagaaccgcggcggtcaccgacattcgtgatgtgtgcgctgataaccgcccggccacggacactaatggaacctgaccctgtgggtgtataacacccacacaaaatgcgcaaccgcacacccacatcttccacagcgtcgcatgcacacagtccacg

SEQ ID NO: 289422 - DNA, 384 bp, Glycine max
tttcttgtattgattcagtctaagtggggattgaggtttagtaatttaggctacaacatagaacacaaaagcatgattaattagagaaacatctttatatacatcaactggtttgttagaaagacccaacatctttacctactgttgtcaatcttacttacttgcatttttactgtttttagcctagacttagttttattttgttctaaatcatcaaattatcaatgtttctttcaacaatgccttatttctgaatttaaccatgtctaagactagttccctgagttcgatactcagattcatccgttttaattttaaatacttgacgatccggtgtgctttctgataaaccggatttcccttgaacatatttgtataaagaaa

SEQ ID NO: 289423 - DNA, 390 bp, Glycine max
tagctttatatggtaaatagaaagcatgaaatcagaaaggtaaatttttggctgtaacttatgaattatttttagtatttactttatacctgaatgaattccaaattgtcatataattttttttaggattcattttttcaatttattggaaacatctcacatgtgtttgacagggatcaaagaacttttaaaatctttacttgattttgttctagacggatttgttgattgcttcttatgtgtttgatcaaatgccaaaaagaactttgaaatttccctttgcaagctttaccgattgatttctttggtctatttttaatttactgactaaaaaaatataaatttagtgggtcagtagtactaactgaacatgcaatgaaacatgcacac

SEQ ID NO: 289424 - DNA, 398 bp, Glycine max
  unsure (1)..(398): unsure at all n locations
agctttctttctggaactatcaaacaaccataaaaaacctacagaatcatggatgaatctttcatatttaagtaacaatattaggaaatatacaatatatataaacaactagatttaagggtaatttagaagaaaactattacaatcaaaggataataagtgctaacaatttaatcccaaaaataacttaaatttggcacttatcaactccccccaacctagaatccttcttgtcctcaagcaaagtaaataaaaatagtataagtatgcttctaaaattatgaacatgctttgaaaagaatcaatccccaaactgattangacgacatttttcanaatggaacaatgagaaatgaaagcacaaagatggaattcacataaccaaaaaatgagattaa

SEQ ID NO: 289425 - DNA, 395 bp, Glycine max
agcttcttggtgccctcccgtttttattttctctccatctctcttttttcacactgtagcagacatgttcatatgtctgttgggtttgaaatgacagcactgtccatcattgagctctgatataatcatgaaataccaaggaataactacccttcattttcatgtgttcgtcaattacctgatggatggtagtatagtcatgaccttatgtggtacacgtatgactaccaaaaatactgagaaatagagatagagatatctcaagatatgtatggcattgctttgcaccacttgtcatatccttatatcatatatatacctttggcctaagcataaattcagcttgcttttgtatgtacgttaaaggaacctgagagagtaacacttatatatat

SEQ ID NO: 289426 - DNA, 394 bp, Glycine max
agcttgatattcattaatagaattatatttgactatatttcaagtacacatttaacattgttttctctaaaataaaacttaatgggcttctagagcagaagagagtttttcaacttcaaccaaataaataaacttcatagcattgatctttgtttgcggtaactctaattacaaaacatacacatatataattaattttcaattaagagaaatcaaattacctcttcaaacaatgtgacatataagatgtaacacaccacataaaataatcatgaaaggaagagatatatttatttccaaccacacatatcaaatattcatttaatgaatgtgaaattacaaaactacccctaatacagatactagtctatagtgcgctaatatacaagggctg

SEQ ID NO: 289427 - DNA, 392 bp, Glycine max
agctttcttttgccatttcctgcgaaggcaaacatttggaaagttagttttaccaagaaatgctactcttaaaacaaaaatggcatacaacctcctccaataaacacaaacatcaatgtaaatttagagcaaactcatgcacatacttctttacgaacattcactcgcacaagatattcttctaactaagaaaaatgcacaatcaaggcaccttcgttacctagattatttatatgtacttccaaggtgtatttgctatctacatcacatgcacttcctttgctaaatttacatacatgcatactcaaagcattttggctaccaaaatttgcacacgtgcacattctggtatttccaatacctatacatatacaaactgtgtgatgaatctt

SEQ ID NO: 289428 - DNA, 566 bp, Glycine max
  unsure (1)..(566): unsure at all n locations
caccaaccacnacctcctaccatagacgaaccgacacaatcacatagtgnntccggcctnnananttanannctaagaggagnntttgatgacgtcgataacgacacggcgaatncaaactcggaaccccgcgagcctccacagtacgcccgctggcatgccagctagtttggttaaagagcaacgaacgtcacgcgcgcatgcaacaaaagcgagacgcggctataccagacaacccgccaaacaaaggccaggttacagagaaactcggccagtgcaatattcaatgcaagcgatatgtgaacaaagagaaagatacacaaacgctagaagaaacggaaaaagaagccacaaaaacaccgggcccaggggaaacgaaacactcccctgcgttaccagacataacgagcacacagaagcgcacacggccagagaaaaacaaaagcgcgggacagagcatcgacacgcgatgcgacccagaagcagcgaaaaatcaagacacaccgagcgagatacacactaatccagagcgtgccacgaggacaacacgtagcgagataacaccg

SEQ ID NO: 289429 - DNA, 388 bp, Glycine max
tgcctgcatgcatgctagttttctctatctgccagaccacctttgacaacctacagactcgtggatgagacttttctattttcataacggtattaagagatctactgtatctatgatcatcgtggtatattggcctttgataagatatctattacctacttaagatccagttgctggcatttagcccctgaagtaactcagatttggcactaatcaactgtccccaacctagaattcttgttgtcctcgagcttagagcattaaatactttcagtgtgcctctgaaactatgaacatgcattgtaccgaatcactcctcctactgattatgacgacattgttgaaatggacacagtgataaatgatgtctcatagatggaatgcacat

SEQ ID NO: 289430 - DNA, 392 bp, Glycine max
agcttgtgtttgaggtacttacccgttgaagatcgaagaacgatgaagaacgaatgaagaacgtcgaagaacggtcgaaaccttcgcaaaattcctcacggaaacgttacggaagcaacagccttctggaggaatcttctggagggcccaagtgggcctgattgctatttgcacccccatttttactaagtacaccccctgccttattttggtgattcttttttcgtaaagttacggaaacttacgaattttgtaaccatacttgttttctttccgtaatgttacggaaccttgtggattacataatcatcccctttttgacttacggaatgttacggaacctcactaattgtgcaacgatgcctccatttgatttccggtgtgacacggaa

SEQ ID NO: 289431 - DNA, 374 bp, Glycine max
tgctttgtggggtgattcagaccttgcttgggagtgcctgcctgctatgaatgctgctgggggtctgctatgcgtttggaataattgtaattttcaggttgatcttagagtgtctgaaaagggtttcattatgctgggaggggtttggattcccgacatgcaaaggatagtcgtggtcaatatgtatgctccctgtgatattgtgggtaaaaggcaactatggcaggatttgatcagtatgaagttgcaatcccaagacccgtgctggtgtctagatggggattttaattgcatcacgcacccctctgatagaatggggagctatcgtggaaattcaccgctttctattatatctgaatttaatgactggctcg

SEQ ID NO: 289432 - DNA, 340 bp, Glycine max
tgcttttttctacacggacttacctagaatcaattgcttggacagcaccatttagcctctgttccctttactgcgcccgatactcactacgcgccttaattgactaaacaagatacctgcacatcctaagggaattcgggacgctcatgacacgcattggcattgatagtggtgcggacttgcttactccatggaatatgtggtaccgatgactgtacttgatcacgtattgggagctctacatgatatacaaactttatgacgaatattgactatctactcgatagacaggtacattctctgctgttatcaagtcattgctacctatcgccgcatgcaa

SEQ ID NO: 289433 - DNA, 517 bp, Glycine max
  unsure (1)..(517): unsure at all n locations
catattcctcttccgccaccagctaatactcacacttataaatcagtataacaaaatcnnnncagagggggttgtgcgcacgtcaaccgggagaaatttcgctccccggaaccctatgagtccgccgcgagcctcctactttttggtaagatgtagatcgtcgaccgaacattaataaatacacacgccccgcagcgggagattcactacaaccacaagccagtggctacgaagggctgcatcaattagagagaaccccgcttaatccacgtgcaaagccagcaaaacagtgttccgcaaagcgatgaaaaaataaggtccaggtgcctattagcagtaagataaccactaagagcgcaaaggcgtaaaacagatactccctaccgaagcaagaaaaaagaaaaacacttatcacagtctgtctcggtccctaatgcctgcgactaagagaacagaaacgcgagcccgccgcctaaaactagagcctaccagcaccgcaccagaaaccacacgaccg

SEQ ID NO: 289434 - DNA, 344 bp, Glycine max
ttttcttgttatgaggaagtgttgaagggtgaaacttcctgcttttattgttgaccacagagtggtacctggagatatgtcgcgggggtcatgagaccttggggacgtcaggtggggtgctattgcccaaaaccaagcttgaccaatcccgacccaacccgggcatagtcggtcagtgagaacctgtgatgtacctaagcaggcgagctccttgcagtcaacagataataggaaaacatgaccacaaagcaaggaggcttgtggtggctggccagctgtgaaacttgattgatatgtgagatatggtctctggtaatcgattaccaaaggtgggtaatcgatta

SEQ ID NO: 289435 - DNA, 390 bp, Glycine max
atcttatgcgcatatttccttacgaacgttcgcttgcacaagacattctttcaactaagaaaaaaaatgcacccatatacaatcaaggcagcttcattacctagattatttacatgtacttccaaggtgtatttgttacttacatcacacacatctccttggctaaatttacatacatgcatactcaaagcattttggggtaccaaaaattgcacatgtgcacatcttggtatttctaatacctatacaaacttcatgatgaatattgactatctacacaataaagtgctacatttcatgctcttttcaagtttttgctacctaaagccgcatgcaaattcaagtatattttcctttgctgactaaaattgtattaaaaggtatatattc

SEQ ID NO: 289436 - DNA, 396 bp, Glycine max
  unsure (1)..(396): unsure at all n locations
agctntttcttctgattcagacaaggtcaaaggtagcttggctatccgacttttgagaaatctaattgcatttcccatgctgattgacagaggtcgacactcaataagaaatgatacataactaccaatttttgctgtcaagtctctcacaagagtcttctcaggtggaaccttgtagtctttgatggcctcttgaaatgcttgaagcattgcaatgcaacgagcattgccaccagatatatctccagttagatactgcaagcccacctgaaacaccataaaacaagatcattaagatttgggaaaaaatatttcaaaaggtctaggtcacaaaacatattgacctgacccaggtcctaatcactgatattcattaaaacaccataaattttaatt

SEQ ID NO: 289437 - DNA, 399 bp, Glycine max
agcttttattttatgtcttcacaaataatcatcacacagcagaaacctagcaagactacccatcatatctccccaaaccccatacccacgaaaattaaaggagaaagaagtccacccaaacctgaattttcgaagtcccactcgtagccacgcacttcacggccccgaaaatgccctcctttcgcgatttggggcagaaatgatggccaaaggttgaagctttgcttggagcttcaatggagaatgaagaaggagaaaatggcaacgtgagggagagagagagctgtctgaaaagtgtgggggctgagtgaagagagagaatagctttttttggttttaaataaaagggtattctctttttctattattatatttgagcaatgccacatgtctccattt

SEQ ID NO: 289438 - DNA, 385 bp, Glycine max
agcttgtaatctattacacacatactgtaatagattaccataagacattatcagaaaatatcctcaattgtcacatcttttcatttggatcttgaatggctatcaaaggcctatatatatgtgacttgagacacgaatttgctaagagtttttcacaacaaaaaggtcttatcctcttaaaaagacaaatcgttttatcctcttacaaattccttggccacaacacttgtgattcaataaggaattatctgagtgctcaaattgatcaatctatctttttcacgagagatatcgtcttatcttcttctctattctgaaaagggattaagagaccgacggtttcttgttgtgaaataattctaaccacaatagaagaattgtcctt

SEQ ID NO: 289439 - DNA, 395 bp, Glycine max
agcttgttcttaactgggaaggtccctttagggtcacaaccaaccttgacaatggagcataccgactacaagagctagatggcaaagcaatcccacgaacgtggaatgccacccacctgaagttctacttcagttgacctacactctaaacctaatgttgtactcttttccctatgcaagttttttgtccccaaaatacaaaatccagggttttggcttggagggtttttaatgaggcacatttgggcaacgaagggaatttgtactcagttacatacattgaataaaaatctacatcccttccttttcgcatttctcttatcaagacaagagcatccatagttgtacctccaaggctcttaaaacccaaggtccatccttggtgagcccttttt

SEQ ID NO: 289440 - DNA, 391 bp, Glycine max
agcttcttatccaaagcacattcttggtggcgaagctccttcttccatggtttattccctagaggatggtgcctcccctctcctcttctcctttgccttccactgcatctccatggtggaaaatcaccattgaaggacctcattgaagcttaaagatccagcctccatagaagctccacaagcaaacttccatcaagtggtaatcagaggaaaaagcacaacctatccttaaacctccattaatctttgctttcccttctcttccattattgtgtcttcatttttctttgttgcaacctacccttttgcaagcgagcgaggcgaggctcacgcgtgcgtcttccaaatgaggaaaatgcacggagtccccaccaacgtctatttgtggaaa

SEQ ID NO: 289441 - DNA, 387 bp, Glycine max
atcttttccagatagaatgtcaaagatggacgatactttaacacaatttatgcaagtatccagcacaaaccagaagaagactgatgcatctattaaaaatctagaagttcaagtatgacaactggcaaaataactatccgaacaaggaagtggatctttctcagcaaccacacaggtcaacttaaaggaacattgtaatttaattacaacaaggttggggactatggttggtttgaaggataatgatgaaaaaagaataaaaaaagagttgaaaaagaaaacgagaaaaatgatgaagtgatgactagtgaaaaagtggaagacaaagtggtaagtgaagaagagaagaagatatcaaatgaacaaaccagtaataaaggtaaagct

SEQ ID NO: 289442 - DNA, 370 bp, Glycine max
agcttgttcttatacaaacgaccataactttttactcggatgtttgattgaggctcgtaatatatcgagacgctcgaaattgaatgttgaagctctgaaccaatataaacgacaatgaccttttactcggatgtatgattgagtcccgtaacatatcgagacactcgaaattgaatgttgaacctctgagcatattcatacgacaataaattcttactcatatgtctgattgagtcccgtaacttatcgagacgctcgatattgaacgttgaagctctgagccaatacaaacgaccataactttttactcggatgcctgattgatgctcgtaatatatcgagacgctcgaaattgaatgttgaacctctg

SEQ ID NO: 289443 - DNA, 392 bp, Glycine max
ttgttttctgtatgctagctatcatgatttcatttgtattcctcataatgtattctttgatatccttaataaaatgacatgaatttgtttccttataaaaatatctatagcgccatgtaactaatatgaaagtcacaagaggtgaagaatagtaaagagaaggttaaaaagtggttgttgaaactgaggtttttcatttacttttctaatggccaaagatgcgatgtaaaagttgtgattgttcgctttcgatccaacctcctgtttgcaccataatttgtgaacataatgataacaatgcccaaccaaaagaatcagtgcgtgcgtgagctggagaaacaattgaaacaacttatcccacaccaaaccaaacgtgtttgccatttgatcac

SEQ ID NO: 289444 - DNA, 329 bp, Glycine max
tgcttttccttttggtcctcctcataggtgcggcacgagaaatcatgctctattcatcatctcccactccaagtaggcctccggatcattccttcctttaaatggaggaaccgtgagttgaataccatcaatcctgctattgactaagaacaccgtcattccctcttctccttctttcttcttcattacgacctctattctccatttgatccaacctctcatggagcgcatcatgtagatgaggcattaacctctacacatgtagcatcaaagctcgcatgtggaattgcgatagccccactccatcattaggattattacctgacatc

SEQ ID NO: 289445 - DNA, 540 bp, Glycine max
  unsure (1)..(540): unsure at all n locations
tcgacaaatccctcccccctaccaccactntagntcattcgagcatttccacaaaccttccccacnaagaggaggtttgatgctgtatacatccnagcgacnannacnagnccgccncgaggcaccaagaaagaccagcagcaagccagccatttagacccatagacacacaaacangcacgccgacatggattagcaagtggacggagctatccaatgcagactgacaccaaaaagaaccacacccaccatcaaacccacgaaaaagactaccgaaaggcaagcacaggaaccccaatgacctatggtgacagaaaggggaaaagagggcaacccaaataaatgcgcggccaccacgaggaggagaaccccaacaacagccagcaaaaagaacaacgcatagggaagatcacgccccggtcgtggtccgaaacaaaaaagacacagaatgaacaccctctgcggaagcgaccacgaaataacaaggcccacacaagggtgcgagaaggtgagactgcccgccaactatcaaaagaagcg

SEQ ID NO: 289446 - DNA, 389 bp, Glycine max
tagcttgttcacctttttcctcacatcttccttcattgatgggttgagccttctttggggctgtctgactggtctgtaatcttcttccatcattatcttgtgcatacagtaagcgtggctgattcttttgagatctgatatgtgccacctaattgcctccctgtatctcttaaggacctttaccaacctgttttctttttctgctgtgagctcactgctgatcaccacaggcttggtcttgttcttctccaagaacacatacttcaggtggttgggtaggatcttcagctttaccttggtcttctctgatggactcccgcttttcaattcttcgaaactggtccccattacagtaatattgtcttcacaatctaagtcttccaagaaag

SEQ ID NO: 289447 - DNA, 374 bp, Glycine max
  unsure (1)..(374): unsure at all n locations
tttntttttatcccatctacgcatggaagacctttcatcatattcttttcatgtaccaacttcaaagcttgagtgtggaagtgaccaaatcttcgatgccataaccatgaatcatcaattgttgctctcatggaaacgctagtactagtagtatacttgaagcttattggaaaaatactatttactttcaacattttaactttgacaatctctgtgcttttgctagttgtatcaaatactgcacgtatctcctttgaatgaacagattagtctttctccatcatttgtttaatgcctaagagattgtctttaagatctggaactaaccatacatctctgatgaatcttgtacctttctttgtctacagcatgat

SEQ ID NO: 289448 - DNA, 397 bp, Glycine max
agcttcttattgtatttgtaccatagtagtttgtaacttcttcaatttgcttgcatgtcagttccacactgaattcattctcacccatatgggtacatagtctacaatttatccctacttgcatcattaaatactatttaacgttatggttaaatttaatttgccctatgtggtttggggagtatcactttggcaccacgtggtttaaactttgtcactttgctcccctcatattttcattaacatatttgttatctccttgtgtcttttttggctgtcaactatgaaaagcttattcatgctataatccattaaaccagcaggtttacatatccgacatgtctgtctgttcctaacttttgacaaggagaacatatttctaggaaaataaacaaag

SEQ ID NO: 289449 - DNA, 385 bp, Glycine max
agcttgtgctcactgttgctaccccacaaagctccacggaatttgtctcggccatgctcttccttgcgagccctcttggtttcttgttcaagggctcttgcggtagctgcattttcttctcgtaactcggcacactctttctggacgtctgtagcgactaacttgaatttttctttggcaagtcttgcttttcctagttctgtttttagagctcggacttcttcatcctcttccggagcttcgaagttcccctcattgataactttcaatttggagagccaatctaacccccgtgtacgaactttcaaccattcatgataaccaccgatgatgccattacggatgcccctaagttctttatctttccttaacgggctttcccacg

SEQ ID NO: 289450 - DNA, 396 bp, Glycine max
agcttgtccctgtcttgaaagcttgtttacatgtcctattctatataagggcatataaacaaaccaataggtctaactaggccaatgggtcttgttcatcacctaaattatttgatgttttctaaagactaataatattaaagaaaaaaaagaaaataattcaaatttactttttcccctataaatgtataattattaatagtcaaatccaagcacaaaatgtgcaaaggattgttgcataaaacttaattacaagtagtaccacaccaacacctataaatataaaacgaaatattggtgaaaaagataagaactagcagcaaatacttacccccacacattatagtcagtaaaaacataatgtttttatctcttaaagcacctgccgcaacctac

SEQ ID NO: 289451 - DNA, 390 bp, Glycine max
  unsure (1)..(390): unsure at all n locations
agcttaatgtatgtttctatgttcaaatcaaattagtgttttgaaagttgttttttatcaagtccatgcaaaaacttctaaattcatttggtatttgggaaagccattcattgtttttcattctcaatgtttccaaaaatcactttgttgtgtttcgatccaattcaaaagcaagtttcaaaatcactggttgctgattctttccaaaacatgttatgtccaagaaaaattttctgtttaagtcccaaaaagagttatatatattctacaactacgctaacagaacaaaattatttagtggtgtgtactaccaaaaagagggtgtcagaccctaatttcatccggngaatgtttttatcgttcgacacaacccgatcaatcatatgcaag

SEQ ID NO: 289452 - DNA, 390 bp, Glycine max
agcttttatacaaatttctattttaaaatgcaaaatgtcatgatttacgattacaattcttttatctaatatattttaccttttaaaaatttaacttaaatttaacaatacccgtataaagactagtgaatggaaaagacaagtacaagaataactttgtattgttggattcactcaactcttcagtaaaaattaactttcgaataccaatgtttgaaaacccaaaatcagatcgctcattaaacaacttgattatttcaatatgcaacatgattaatctaagacaaaaaataatcctaatttacaaatttagtatggaatcaaccaagaaaaggctatgcacacaatttgtcaagcagagttttcgctcaaggacatagttcatcaatt

SEQ ID NO: 289453 - DNA, 387 bp, Glycine max
  unsure (1)..(387): unsure at all n locations
tgctangttattttcatacgctatgagtcttaacttattcagctcattcaattgttgctacctgaagctacctacaatcctaagatcagagttcataaactatatagcccacatggctgcgtgaacaagtccaacaagcagatggaaattctttccataaactatactaaagggagacatcatagcgggagccctacagggttttatgtatgcccatattgtgtcatccaatttcaatgaccaaatctttctatatgctctcacagttttttgtaaaaccttctatagatacctattatatacctcaacttaaccaattgcttgatggtgatacaaagtaataaccttatgggtaacaccatatttagccacatggctatcagacaa

SEQ ID NO: 289454 - DNA, 281 bp, Glycine max
tgcttgttgtctatgtgctcaccaacactagatgagaatccctatcgcagcagcatggctaccatctcgattacaccaccgtgtaggaccgccgtcaccgcatccgtatgatgcgcctaaacatccatgtgaactatcaaggccggaggcacccgaatatacaatctcttagatataagggaaagcgtcgctcatgaattgacctcatccctgagatgtaaccttattcactagaatcgccgtatgactattaatgttttctttttagtctgtcgtggtga

SEQ ID NO: 289455 - DNA, 391 bp, Glycine max
agcttccatgtccaagtttcttatgccagacccaatgatcttgtttgacataaagtaagcaagattttgatttgataactctcttagtctaatcttataaagatttccttttctcttagcagaataaagtaaagacacatttttgttctggatgatacattcatccttgttaaagaaaacatcatatccattgtcacataattgagttatgctcagtagattgtgtttgagccatttaaaaaataagaaattatcaataggaggatatggatgtatacctatcttacccactcttgttatttgcccttttttattccctatgaaagtgatggttccaccatgataaggagtcatacattggaacatgcacctttctcctgtcacgtgccat

SEQ ID NO: 289456 - DNA, 536 bp, Glycine max
  unsure (1)..(536): unsure at all n locations
cccactcaccccntcgccgattcgcgcgcgacactcaanatcattgacgcttcaataacantnnnaanncagagggnntttgtgctgagtccctcggaanccccanncaanntcaccccgacgcgccaaacatacagctgcacgcagcccgctgtccgttttcacacccaaccacagagacggcgagaacagacgtcaatcaccacgaccaaagcaaccacaccacgaagagtcctgcgaaccgacagaagaacgcacccagaaaacggcgaggcacggcagaaaaaaaaagtgaccagccagaggacgccagacaaacaacacaaaaagccggcaccgagccgcacacccaaaggggtgccatccaacaaggcccggagaagagcccacagggggaagcaagcgacgatacaagcagacgaagacgagatgaggacggggcaggaccagacacaagaacaacccacgcacgtcaaacgacccagggacagccccgccagctcagaacagactgcacaacgagaaccgccacgccg

SEQ ID NO: 289457 - DNA, 377 bp, Glycine max
tagcttttgtgctaaaaaaaactatataacagcatcaaggttctagttttggcctctcttctctctcccctatttttcgttttttagttataagctttttcttctctttctcctttatttttcgtttatgcaattccagtttgactattcattttagcaataaaaattcgttctctaatgattaatggaaagctaagtccccaacgctgctttctcttgaggatcaagcacagttctctttgagggtctattattattgttaaattctgatcaagttttccttcttcgtatatactctcgatttgttgctattaattcatgcatgcttagtgcttgattaattttctctgcacttaatttacgctcatgcttaatga

SEQ ID NO: 289458 - DNA, 367 bp, Glycine max
tatcttgtatccggtgcttgatgtcagggtgatgtttcctatcccaacagtcttgctcctatcttgatttcccatttgcatcgtaccaaagtcaccgctttggtaggatgagaagaaacttccatgtggagtaacatggaaggaggcaccggaatcgacaatccaagagctatcatcacaagcaatgtttatgatattaccttcaccaacgagatataacaaatcttcttttgaaactacggcagtagtattcttcttttctttcttctttgttgggctgacttggtctggcttaacgttaccgattgtgtgatctctcttgaaggattgacattctatcttcctgtggcccatccttccacagtag

SEQ ID NO: 289459 - DNA, 384 bp, Glycine max
tagcttgtctttacaactctaaatgagcgatcacttcatatcctttcatgccttgacaagaataccattattgtttttcttccttaatgatgaggacatgaccaacagcaatggcaaggatccaattgaatgacttggaggacctatgacaagggctagatcaaggaaagcaaacgaagctcttcaacaagtgttgtccatactatttgaatacaaccccaagtttcaaggagaaaagtccaacgttgtgagttgtatcatgacccacatggacgatgactaaatggcgccacttcctctcaattatagagtgttcagtttgtctaaataatggcccaatccatgtgaagtcggctgaccaaagatatgtcttgggttaatcaa

SEQ ID NO: 289460 - DNA, 371 bp, Glycine max
agcttattcttgttctatatgatcggagcgttgtcgcgaaagacagaggccctgactgtgctttctatgagagcatctaccgcgagtgactgggcttaccactgagtggtgatgtcttatcctgtacttctgggcgcccgacgaggcttttcattgacctggtacctcattacatataggatggaatcatagaatattggctgcataacgcccgcgtatagagacatattgatcgcttgagtgactttgtggctggaaccttaaagacatctacggtgtgaaaatgctggatacgtcgtgggtcaagactgcatggctcgcgcactggcgggaatgacatagctatgtcctggtactgagtacttcatgat

SEQ ID NO: 289461 - DNA, 398 bp, Glycine max
agcttcattctttcctcttagtaatgccttattcatcatatctacaccattaaaggatttcaccttcaaagggccacaaacatttgaatgcaccaattcaagcaactcaaattttctggagggagaatgcttcttgaaggatactctggtttgcttaccaaccatgcaacatgaacatttctccaaatttgcattcttcaatcctagaaacatatccttcttggctaaacaattcagccctttctcactaatatgactaagccttcagtgccacaaaaatgcctccatatccataacattcacattgtctctagcaaccaaagcttttgcccaatacaactttgaaagtttctcccccttggccacaattatgttacccttagtgagtttccactttc

SEQ ID NO: 289462 - DNA, 392 bp, Glycine max
  unsure (1)..(392): unsure at all n locations
agcttgccattctgttcacgcaggcgagcagggatgcttcctccataagcaacagccttctggaggaatcttctggagggcccaagtgggcctggttgctatttgcacccccatttttactaagtacaccccccttttctatttttttgtaactctttatctgtaacgttacaaaactttacgaactttgtaacgatacttattttttcttctgcaaggatacgaacccttacgacttatgtatgtactcttttttagctttcaaagaagttacagaaacttacggattgcgcataaacacctctttttgacttccgtcacattacggaagttcacggatcgcacaagcctgcttccttttgatntctgagacatcatcgaacttcatttat

SEQ ID NO: 289463 - DNA, 396 bp, Glycine max
  unsure (1)..(396): unsure at all n locations
ccataaaccacaacgcaagcttaacggataacgantagatactctaccnncagcaggtgtgatcgtgaaaccaacgaccgcccgcgaccccaagcgacgcagagcagctcaatacaggaggaacagctgacggacgactggcaaacgacaccagacaaagcaaaaacggggacacaagcaacgaccgcaaaacgagaggagcaacgtaccaagaacgggagaacggaagaccgctacgcacaaaaaaaactataagaggaagggcctaaagaaaccacacaacccatgggaagagactaccgaaaagcggcaacccacgagagcactaccaacaccacaacaagacgggtcgcgccacagaataaccaatacgcggaaaagaggtaaaacagccgg

SEQ ID NO: 289464 - DNA, 386 bp, Glycine max
tcttcttatgcttgatccatcatacaattgataactatatcagctatttaaagcctacacaaatgctgagttgcaatcaagttgtaattgcaagttgagagacagactaagtaacaacgagttagtgatatacaaatgctaatatatcaattatggtcaattaattgtctttagtcctttaaaagtgaaaatactataatatagtagatgtatcttgacactcttcgaatccctcgcatatataaaagaaaaaaaatagtagatgtatcctagtttggtttctgtttgacacccacattgaggaaatataagattagtgagtcaataaagcttatatgtatccatatgtaatattttgttgtgtgggcccttaaatttatacaaat

SEQ ID NO: 289465 - DNA, 395 bp, Glycine max
agcttgttgttgatgcttaacttgagaagtgagagaattaagaccacccatttctttttcaaacccacctctgtcaagttgttgtcttgtctacaggatcaatttcagttagatcagccaaaacataattccagcacaggatcatacatgaaaattcacaagaagtgcacataatgataaaaaaaatggcaaagaacaacaacgttggtttgctttcatttacatggtctcaatacaattttatttaagctggtcaattttccaattccgccatcaaagaaagaaacgaaacccgctggtgaaaaacgggtgtgggggtggtggacgggtaaactatgctaaagtttttcacctagttacattcacattctgcagtatcaacttctgcaatatca

SEQ ID NO: 289466 - DNA, 357 bp, Glycine max
agcttttagctaattcaaacgacaataatgttttgctcggatgtctgattgagacccgtaatacatcgagacgctcgatattgaatgttgaagctctcagcaaattcaaacgacaataactttttactcggatgtctgattgagtcccagaatacatcgagacgctcgaaactgaatgttgaagctctcagcctattcagacgacaataacttttttactcatatgactgatcgagtcccgcaatatatcgagatgatcgaaagtgaattctgaatctctaagctaattctaactacaataactttctgctcggatgtctgattgagttccgtaatctactgagacgctcaatattg

SEQ ID NO: 289467 - DNA, 393 bp, Glycine max
agcttttctgtgcaaggaatatccaaggaaaattccatcatctgacttagcatcaaattttcctaagttttcattaccattgtttaatacaaagcatttgcaaccaaaaacatgaagatgtgaaatattgggttttctaccattaaacagttcatatggagttttctttaaaatgggtcttattaaagacctattcatgatataacatgcagtattaacggcttcagcccaaaaatattgtggaacaggagtatcattgaataaaggtctagcaatctcttccaaagatctattattcctttcaacaactccattttgttgaggggttctaggtgcagaagaattatgttcaatgccatgcttttcacaaaatagatcaaattctttattttc

SEQ ID NO: 289468 - DNA, 379 bp, Glycine max
agcttcatattatctgtgagtgattcacgcttaacgtcactatctgcgctaagcgtacttccaatgatttcaaaacaaaacgatgttggcgcttagcgcatcctttcccgctaagctcagcttgaaagctcaactgacaaaatgaatttgggacttaccgtacaatgacgcgcttagtgcaactataataaattctcatagagaggaagtggcgcttagtgcatcatccacgctaagcccactgcttaaggtgcaactcacagtgaagatgatgggcttagcgcactgatgtgcgcttagctgaaccattcacccaatcaatcatgggtctctgcgcttagcatgagcaagctcagcttagcgcgtgaagagatggtgc

SEQ ID NO: 289469 - DNA, 318 bp, Glycine max
tggaagctggatctttgagctttcaagaggcccatcaatggtgaatctccaccacggagatgcatcggaagacaaaggagaagaagtgagaggaggcgccatccactacggaataacccatggaataaggatctttaccacccacatgatcattggataagaagcttggagaggatgcctcattggaggaaaataaagagggagagaaatgagagagggggggagcactaaacttgaaggaaaaaaaaagtgttaaagctgaactttgagaggtggctcacaagactctcattcatctaagctacacaagtgttacac

SEQ ID NO: 289470 - DNA, 390 bp, Glycine max
tatttgtgctcaatgaaagcaccaatgatacctagctttcgagggctagggaacctccgcgatacccgtgacctttggaagctcgaaggaactcgcaaagagagagaaaacgcgagttcagagagagaaactagaagaagaaaaggactcgagaggaaggaagagaagcttctggatttttctatattccttcaaggtttgttacaacttatttatatgcgcgagggtccacaactaaccgcaagtggttagctactgctgctagccctaactaactaaacaacatctaactacccttcccgccaacgaatcacaagaacagcttttacccaggccctcttatcctaactggtagatatcccagtgcttaggtagttgcttcgttcgtct

SEQ ID NO: 289471 - DNA, 363 bp, Glycine max
atcttatgcgcatatttccttacgaacgtgcgcttgcacaagacattctttcaactaaaaaaaaaaatgcacccatatacaatcaaggcagcttcattacctagattatttacatgtacttccaaggtgtatttgttacttacataacacacatctacttggctaaatttacatacatgcatactcaaagcattttggggtaccaaaaattgcacatgtgcacatcttggcatatctaatacctatacaaacttcatgatgaatattgactatctacacaataaagtgctacatttcatgctcttttcaagcttttgctacctaaagccgtatgcaaattcaagtatattttactttggtgac

SEQ ID NO: 289472 - DNA, 80 bp, Glycine max
agagagagagagagaaaatccgggggggggggtgccaatttattgaaattagggaaaaaaattgaacttttaagtgtgtc

SEQ ID NO: 289473 - DNA, 470 bp, Glycine max
  unsure (1)..(470): unsure at all n locations
cgcttgtggagcttctatggaagctggatctttgagcttcaatgaggtcctttattggtgatttttcaccatagagatgcagcggaaggcaaaggagaagaggagaggggaggcaccatccactatggaataagccaaggaagaaggagcttcaccaccaagaattgccttggataagaagcttgaagaggatgctttaatggaggaaaagaaagagagaaggggggagcacgatattcaaggaataaaagagggagagaagtggaactttgaagtatgtctcacaagactctcattcatcanagttacaacaagtgttacacatgcttctatntatagactaggtagcttccttgagaagctntcttaagaaaacttccttgagaagcttctttgagaaaacttccttgagaagctagagcttatctacacacacccctctcataactaagctcaccttcttgagaagc

SEQ ID NO: 289474 - DNA, 363 bp, Glycine max
agcttctacattggttgaaaaccggtatctacgacgggccccacaccgtctttggtccaaatgtcgttgtatgtcgaccacaacaacatcggtcatcctaggacccgtctttggtatgcaagaatacaacgtcagtggctataaaagaatagacgttttaaaaaaggattcaacgacgcacatattagacaacccgtcgtttgtttggtccatttcaacgtcgggttcgcaagactcatcgttgttggtgtccatatcaacgtcgggtaccaataacacccgtatttgttttgtttctgtcacatcggtggcggctcacaccgacgttgtttggagtatgtaacgtcagggtgtgacaccgtc

SEQ ID NO: 289475 - DNA, 473 bp, Glycine max
  unsure (1)..(473): unsure at all n locations
cttgtaggattccggggtacccatcacatgtggtactaagtggcggtcgggcgatggtgcacaacaagttctacacatccacggtgcgcgcataaacccaccatcccctgttgcccacctccaactgagctcacgtactcccacgtagcccatatcctcgtttctctcaacaccgggtccccatcaatcctctcaagcttccacaacatccaagcaaaacaacattcaaacagcacaagctatcacagccaagcaaaagcagagcaaaggcagataactctgctcaaacaccaaccaaaatcacagcttttctcacttaaagaccacagtaacaatttcttcgatccaattcgttaaccgttggatcgactccaaaattttactggaagtctatagtgcataagcctacattgtgaccgttgngatctactagcaaacatcaagaactcattctgtactactctttccacagc

SEQ ID NO: 289476 - DNA, 406 bp, Glycine max
agcttgggtataagctttttttgtaaaagccaagagtgattgtgaataatacttgtaactctgttaaagttagtggaactttttagatttggatagcccaatgtgattcatctagacaatcttatataccgatggttttgatgattacacagatataaattgctgatggactaatgatttacgcttaaggaaatagggcatatttgatataagcttgattggaatatacttatatgcttatgtgttaccagttatcatgcaaggtaattggaacttatttgtataaccactatattctgtgtccagagcactgctatacagagagcgttcaatgatattgataaaattagtcctatgcgctatgtgttcatatgtgattataggacatgaggaacctacactaatg

SEQ ID NO: 289477 - DNA, 241 bp, Glycine max
atcgaaaagttggctgagacttgtattttcttcacaaacggggcatgcatgatgacccttaacactgtaaccgctgagattcccacatgctggaaagtcactaatgagacagaagagcattgcactcagtgcacaggtgatacttgagaatcgcatcggtctctactacaccctgattccacagatttctcatatcgtcaaccaacggacttagatagacatctgtgatctttcctggctg

SEQ ID NO: 289478 - DNA, 387 bp, Glycine max
  unsure (1)..(387): unsure at all n locations
agctttcttcaacaaacaaagccttgattcaagatttcttcaagatcaagccttgcctcaaaacaaagggtttcaaagtcatgcaaggctctggtaatcgattaccagaagggaagtttgagaaatagctgttgaaaagggttttgaaattgaaatttgaacatgtaatcgattaccatntntttgtaatcgattaccagcaatgaaactcctgatattcaaattcaaaagtcacgacccttcaaaatataattgtgtaatcgattaccagaaacctgtaatcgattaccagtgaagaaattcatataaaacttcttgaaaagacacatctctttacaccatattgaaaaggcatgaatggcctatatatatgtgtgtgtgtgactt

SEQ ID NO: 289479 - DNA, 462 bp, Glycine max
  unsure (1)..(462): unsure at all n locations
ctcaagcttgagaagctctctatganatgaaataatcgactgccccattctgtaatcaatttctaagtttctaggaatggaaaattagagggatttgaatgaattaattgactatctcatttgttaatcaattaaatttgctttttctgttaaaactatatatacacttacttgttcattcttattagtgactcttgattagatcttatgttttaaaaatcctttctaaggttatctaacggaaccattctgcatttcaatgagagattcatggtgttcaagatttgttcattttttaccatggtttgagcaaggaaagaatgacttgaagatattgtgatatgcacattttggtgtattcaatcatgtttcgatttctttctacgttattaccttgattaaggttatcaaggatattatgtgagttctgatctttcttttgtaaggtcacgacaagagtag

SEQ ID NO: 289480 - DNA, 414 bp, Glycine max
  unsure (1)..(414): unsure at all n locations
agctnttcgcaaagcttatggtaaaatccgggacctagccatggtagaagtctccacagaggccattgcctccctcgcccaatattatgatcagccattgaggtgcttcacctttggggacttccagctatcacccatggtagaagaatttaaagagatcctaggatgtcctctagggggaaggagaccatacctcttctcatggttctatccctcattagctagaatttctaagatagtccaaatctcagcgctggaattagaccacagaaagcaagtcgaaaatggggtggttggaatagcgagaaaatatttggaggtaaaagcaagaaacttggcaggtaaaggcgaatgggccccattcatagacattctcgcactgtngatcttcggaggagtcctctttccgaatat

SEQ ID NO: 289481 - DNA, 98 bp, Glycine max
ctcttttacgagttcaggactatttgcatggtatatgacgacaagtcaggattgttcgagactggtcgccatagatgtcagttcagaggaaataaaac

SEQ ID NO: 289482 - DNA, 408 bp, Glycine max
  unsure (1)..(408): unsure at all n locations
cagcttttatctgatatgaattataactaccaaagttgagtctaatctattgattttttttttggtctttggacatggagagaagatgcagacgtgcttctcaaacttggttccaaacatgcacctactttttacatgtcaatttttaagatctcagctgaaaatctacttacaccgcctgttttgtataaaagcttataaacgtgataggctataaatagacctttaaacatacctatctcttttttggtttgcttcacttgtcagttcgatttacgtgaggcaaggtactatttttatgagataagcaaatcaaggtaattttatgactntaatcctgtttggtgtcaattttcttcacatttattaattntatgacttcttattttattttttagactgaagtca

SEQ ID NO: 289483 - DNA, 431 bp, Glycine max
  unsure (1)..(431): unsure at all n locations
tgtgggtatgatacacaaaagaatagaagcacataattgattatattcatcttctaattntgccggatcaactagttaacttgaaattgaagagcgattaatatgtttcacccttcataacttataagtacatgttgataacaaaaaatagcatcttcaaatgacaaacacattaaatttattttaatcattttgaaaattatgtattttaaaaaatattgggcttcactatggtcacaaagttgtatagaatttgtggctgttgggcataattatctctaaatttagattgttattttaaggaaaaaaaatcttgaaagatgatagagaatgaattcggtgatcgaataataataacagttatataacaatgatgaatgttgttattgaaaagcacataatattcatcttctaatttcatcggatcaact

SEQ ID NO: 289484 - DNA, 382 bp, Glycine max
  unsure (1)..(382): unsure at all n locations
tgcttataaatcttcccaaaatcatacaaacaaagattaatagactagaatgataacgttcttattttntcaatcaaacaatcgtttttgatcaaataaaaaaaggactcattgacatgtttattcaccagattttaaatagtctgctgtgcatgacaaaaagaaaagcagtgtcgagaagagatttgcactgacaaatgcaattacaggtaaacccctacctgggggaaaaaaattgaccaagcaaacctgtcaatgctaggaatgggaaaagaacaaagtaaattgaaatatgtatcagaagtaccgttgacagactaccacgctgagcctctggtggaatctcaaaatccagttcacgtttctgcaaaatcatgcatct

SEQ ID NO: 289485 - DNA, 458 bp, Glycine max
  unsure (1)..(458): unsure at all n locations
tgtaatcgattaaaccgatatgaaaacttatctgcaagctattatacacttatgtaatcaattacgattagcctgtaatcgataaaaatagagagttttaaacacagaagaaattttctaactttagaacctttcttcttactcctacatgatgatgcatgatgcacatatgaaaagatagagactaagatgcaacacacatacaataatcaatacaaatgtcactcaaaagagttggacatgtaaaagacaaaacttcttcaagcttcaaggctaagtcttcatgttgctccacctatctctaacaatagacaggttatctctaacctcttaattatntggatatacnctaaccactttatctcttgcaggtatntaattatctacaagcaacacattatctgttagtactaaattatctactagctnttatctcntaaatatatattatctctaat

SEQ ID NO: 289486 - DNA, 413 bp, Glycine max
  unsure (1)..(413): unsure at all n locations
agcttacacaaacattcattagtccaaaacacactcaacanatagtcatcatccatccacaattccaatcaatcatgctcagtatgatgcatgcacctgacctcaaatctcaaatgcaatgtggtaccattatcaaggaaatagcctaagagtctccacatgacactctcacttatgaaaactaggcagtaagtgtcgaggtcaccctgtcatgcacaggaaactccccccccttggtgatcaacctgagtctcaagggaattccaaattgagtgacatgtgtgacatcctggaaatttctacccggaatttntgtaaacggtgcatnttgaatggctatatatatatataagtattattcagtgtatgtatatatgtatatatattcctggtaggagtangtattttggggg

SEQ ID NO: 289487 - DNA, 423 bp, Glycine max
tgtagggttaaagtctcacgattgtcacgtgctcatccaactattgttagccgtggctatacgagacatcttgccaaacaaagtcaggttcacgataactcgcctgtgctttttcttccatgctatatgtagcaaagtgattgatccagtaatgtttgatgagttggaaaatgaggccgcaattatactgtgccagctggagatgtattttccccctgctttctttgacatcatgattcacttgattgtgcatctggtcagagaaatcaaatgttgtggtcctgtttatctatggtggatgtacccggttgagcgatacatgaagatcttaatagggtatacaaagaatctatatcgtccggaagcatctattgttgagaggtacattgcagaagaagccattgaattttgttcagaatactt

SEQ ID NO: 289488 - DNA, 411 bp, Glycine max
  unsure (1)..(411): unsure at all n locations
agcttgaagaggataatttaatggaggaaaagaaagagagaaggggggagcacgaaattgaaggaataaaagagggagaaaagtggaactttgaagtgtgtctcataagactttcattcatcaaagttacaacaagtgttatacatgcttctatttatagactaggtagcttccttgagaagctntgttgagaaaacttccttgagaagcttctttgagaaaacttccttgagaagctagagcttaggctacacacacccctctaataactaagctcacatccttgagaagcttccttgagaagattcctaaagaagctagagcttagctacacacacatctctaatagctaagctcacctccttgagatgagaagctagagcttatgtacacaccctctataatagctaa

SEQ ID NO: 289489 - DNA, 448 bp, Glycine max
  unsure (1)..(448): unsure at all n locations
tccatcaatgaataacaactaataatgcacctgacctcaactatcaaatgcaatatggtatcattcattagaaaatagcctaagcgtatccgcgcgacattctcacctaagaatacttggtaacaagtgtcgaggtcaccttgtggtgcatagacaactcccctccccccccccccccccnngcatggtgatcggcctgagtctcaagggagttccaaactgagtaacatgcccccaagtataagtatttcccctcatgagaaactacaagtacttattggcaagctatttccatgaaatatgaagtatgaaacataggcaccatcaatgcattgaccgtggataattaaagattttaattcatccccctctagagatgctttaaactctttaaccattctatttctccgaccaaggatatctatcatggtcactgcatccctcatgt

SEQ ID NO: 289490 - DNA, 395 bp, Glycine max
agcttgtgcatagttgttacagacaaatggacctacaaaattaataatcaaatagtattgataaaaaatgtgcataaatcaagtacaaacccttcaaaacaaagtaaaatcaaatagcaattttagctgaaaatagaaaaagaagaaaaaaaagggataagaaactaaagttacaactaaatgtaagaacaaaatcaaaacccttgaaatttaatgtgtgtgagagagagctgaaccgaatgaattgtgacttttgaaaaacaaatcaaagtgaaaataaatagaagagagtgattattttgaactaagaaatatatacttcgtggcatggtttttgcacagccatatcataatcgtcctttgagaccattgagaaatcgagattcattggcaat

SEQ ID NO: 289491 - DNA, 456 bp, Glycine max
  unsure (1)..(456): unsure at all n locations
cgtgacactatgaaactcagctnataagcgcgggttcgggagacaaaggtttagcgttcgctatatgcgaagatgatattccgagtactgtggatttggtccgaccatgccctcctgatttccagctgggaaattggcgagtggaggaacgccccggcatttacgcaacaagcataatgtaaacctttacggttntaaaagctctatagttgggcctaagctttagagtntttccttttgttaagggcttgtgtctcttggttttgaaattataatacaaggatctttcttcatctgttcctggtctctacccactctcattcatttgtatgtttacttctttttctgaaacggcagatccgatgacgagtcccccgaaggtactaatacctgtgacccgtctatcgacttcgagcaagaaatgaatcanacggaagatgaaggaaatgatgatgt

SEQ ID NO: 289492 - DNA, 489 bp, Glycine max
  unsure (1)..(489): unsure at all n locations
tctcatactttatctcgacccatcgatgtcgttaattttaataacaaaannaatnaagcgtggtgtgctgatgcactaccaatggcgatnagccggcccgggatacttaagacgactgcagcatgctatctttgtccctccgcaagccttccctggacagggccctgaaatcaccgaaccttttattttaaaaaaaaaaaaatggcggggattttgcttggccaaccacccctgggccaaaattataaaaaaggacgaaggggaacgtttttgcattcaaaactttttttccccccattcaaaaccatacccccggaatttacaagtttgcagcctagggcactattttcaattttttgattcgtttgggctgtattcatcacaacaagtagtatccttcctaagcttcagctttcatgggtatttgactctttgtgcttaaatgcggatgagccaaaaggggggattcggtggttctgttggcgggga

SEQ ID NO: 289493 - DNA, 441 bp, Glycine max
  unsure (1)..(441): unsure at all n locations
ntataagcgcgggtctgggagacgaaggtctattgttcgcgatatgcgaagatgatgttccgagtactttggatttggtacgaccatgccctcctgatttccggctgggaaattggcgagtggaagaacgccccggcatttacgcaacgagcataatgtaaacctttacggttttaaaagctctatagatgggcctaggctttagagtttttccttttgttaaggctttgtgtcttttgttcttgaatttataatacgaggatctttcttcatctgttcctggtctctacccattctcattcatttgcatgtatacttctttttctgagacggcagatccgatgacgagtcccccgaaggtactaatacctgtgacccgcctatcgacttcgagcaagaaatgactctaacggaagatgaaggaactgatgatgtgtgact

SEQ ID NO: 289494 - DNA, 404 bp, Glycine max
  unsure (1)..(404): unsure at all n locations
agcttgtagaatggctagacatgatacatgtcagggcttggtttggttcaaggataaaaggggtgccccacattatttccatgacacaaatgcaaaaaatgatgatttggaaactttatgcaaaactggtcatgcatgcgcctatgcggacgctcaagtgtcaaatttttatggtcatgtgatgctagggctcacgattcatttcctctatcttaaatcaacccaatgtttccaaaatatgatcttttatcaatttgtgcattcctccaagtccacttcgggcgttcggtgaaattttcacagcattcacccttcaggtgtagacacgttttttttcttcaaaaatcggttatgatcattgaattnttttcaaagaatagttggaaatcatctcttttcaaaag

SEQ ID NO: 289495 - DNA, 394 bp, Glycine max
  unsure (1)..(394): unsure at all n locations
tgtctancgcttatgctttacggagactatcttgctagctatcatcgccaagtaccaagaagagttaggtctatccgcgggccacgagcatatgattgcggacgaatatgcccaagtatacgcggaanaaaaggctagatgaagggtgatcgactctttacaccaagaggcaaccatgtggatggatcgatttgctcttaccttgaacgggagtcaagaacttccccgattgttagccaaggccaaggcgatggcagacacctactccacccccgaagagattcatgggcttctcggctattgtcagcatatgatagacttaatggcccacataattagaaatcgtaggacacttgtatggtctctcagaccttgactagatatgacttccttt

SEQ ID NO: 289496 - DNA, 409 bp, Glycine max
  unsure (1)..(409): unsure at all n locations
agctttatcttctttangaatcttcttaaggaagcttctcaaggaggtgagcttaattattgaaagggtgtgtgtagctaagctctagcttctcaaggaaagtttctcaaaaaagcttctcaaggaagttttctcaagaaagcttctcaaggaagctacctagtctataaatagaagcatgtgtaacacttgttgtaactttgatgaatgagagtcttgtgagacacaactcanacttcaacttctctccctttttcttccttcaatttcgtgctccccctccctctttctctccctctttcttttcctccattgaagcatcctcttcaagcttcttatccaaggctcatcttggtggtgaagctccttcttccatggcttattccttaatggatggcgcctcctctca

SEQ ID NO: 289497 - DNA, 353 bp, Glycine max
  unsure (1)..(353): unsure at all n locations
tgcttctacataccctaatttcgtccggngacaattgttgtcgacatgcggatttttgccggccgagttgagctgcttaacatcaatcgctatgcaatccatagggtttcacaatgttacggaaagaaatgagcaaatactcataatgagggcaattgtttgtcgacatgtggattttttccaaccgagttaagctgcttaacagcgatcactgcacaattcgaagggttttgcaatgttttagaaggaaatgggcaaggaactcaagatgggggcaaaatggtccattatagaacgttccacaacccctgggcccacctggatccactagatgacttangggggaagcaacc

SEQ ID NO: 289498 - DNA, 404 bp, Glycine max
  unsure (1)..(404): unsure at all n locations
agcttccatgatatagaaaaatgaaaaacctcaattacttgaaaataataaaacacatggagaagttgaccataccaggaaaataatttttcagcaaacatttctgcagcactaaaagaaccataagctgaaaaccacaagagagatcggtgtngattcacatgcagacaagagagcacaattagtagtctaaagttacacccaatcccactaacttgagaattctccaaacgagttcatttcaaattcataagcaatgacccaaaactttcaaagatatataccctcatacgataaaaactactaaaatggtatttaagttgtacaaggaaaaatcaaaatacaccagaatagtcctcttaagtcttaacccgtgacctcaatatatgtattctacccatcat

SEQ ID NO: 289499 - DNA, 456 bp, Glycine max
ctctagatccttgaggtaatatgcgtcaagctagtgacgttaaagaagcgcttactgggaggcaacccaactctttttctttgttttcttaatcattgcatatagttaggtttcaacttgtttgggattgctagagtaagacatcaacatgttttgtatgagaaaaaaagggttgttaacgcttctgtgaagctgtggatgagaaataactctgaaaaatttttagtcatccactcgcttagcgctccctgtacgctaagcgaatcatccttcatgtgtcgagcgagtcctcactcgcgctaagcgcaccaacccttacccattggctgaaggggtccatctaagcgagacagttgtgccaagcccaaaaacttctttggaatcgcatttattggaattgggctaagcgagtcaactcgctaagcgcacctatgcactaagcacaaatatctctct

SEQ ID NO: 289500 - DNA, 410 bp, Glycine max
  unsure (1)..(410): unsure at all n locations
agcttctagacaaattgcacgctagtatatttctcgcctttacgctaacttctataaatttctgttacaaaaactaatttcgcctttatgccgccaaagtacataaagttggatctctaccacacctcaacactaaaacgaataaaccagatttgaatgcacttttttttttttaatcataactacaatttatcgtaaacagcatttcagcatatgcatcacaggtgaatgcatgtgttttctcacctggattaaaaacccaatccatgccaatgccaacccctacgtaacaattgggaagatcataaagaaggctatatccaattcggagatgaagaaaacgaaactgtattcaatgcaaaagaagaacacttgttaaatctctagcaaaggaatntacatcaatactc

SEQ ID NO: 289501 - DNA, 441 bp, Glycine max
  unsure (1)..(441): unsure at all n locations
tgcagctaaacaggccaaaaagttgagtacattnttttcgagtggtcgtgaatcatcgactaccatttgtattgcttgtaagcttgggttcttcatgtttaattcccgtaaacaatttgataatacaatgaaggggctaatggcttatattccaattgcttctatgataagtattatttccatctagcagatatatgaacatgaacacggaagggggaacaaactcagaccaacaaacaggatctaaaatatgtccgtaaaatttttctttcgtggaagataacgagtgaccgagctgccgttgacagaatcacagttgctgttcttcatagacccgataaagggcaacatattaatccaggtttccatgacaagcgtggcgagtttgaggacacattntcccttgaaccatcatttcgtgagtcgatcacttttttaccc

SEQ ID NO: 289502 - DNA, 408 bp, Glycine max
  unsure (1)..(408): unsure at all n locations
agctttctcaaagttttccggttttccaaaccttgaaaacttgtgctattcatccttttcattctcttctccctttgccgaanagaaatcaccatggactaaccgcctgaattctttttgtgtctctcttctcccttttccaaaaagaacaaaggactaaccgcctgaattcttttgtgtctcccttctcccttgtcaaagaattcaaaacgacacagtctgagaattcttttgattcttccctttcccatatacaaaagatttcaaaggacaaaccgcctgagaattcttttgtatccccattcacaaagtttcaaaggtttaaccgcctgagatctttctcttaacacattggagggtacatcctttgtggtacaagtagagcgtacatctacttgngtttgactg

SEQ ID NO: 289503 - DNA, 450 bp, Glycine max
  unsure (1)..(450): unsure at all n locations
tgtaggattatggngtacccatcacatgtggtactaggtggttgtcgggcgatggtgcacaacaagtttttccacatccacaatgcgcgcataaacccaccatcccctgtagcccacctccaactgagctcacgtactcccacgtagcccatatcctcgtttctctcaacaccgggtccccatcaatcctcccaagcttccccaacatcaaagtaatacaacattcaaacagcacaaactatcacagccaagaaaacagagcaaaggcagaaaactctgccaaaacaccaaccaaaatcacagcttttctcacttaaagaccccagtaacaattccttcgttccaattcgttaaccgttggatcgactccaaatttttactggaagtctctagtacataagcctacattntgaccgttgggatctactagcaaacatccagaactcattc

SEQ ID NO: 289504 - DNA, 415 bp, Glycine max
agcttcaaaactcaactcgaggatttgacaaagaacagagcctccaaccctcccttcgcgatttttttgaggtaatcatgatttctatgttttttcctagttagattgagcctattagtgtatctcttgtgatttggttaccgttattagatgtttttacatttcctttgaaaaacccttgaaaatgagacattataaaagttgtcttttataaaattgatttcgtttttgtgacctctgttgaaccctgatcacattggcgtgatcgttatttcaaaatgacatctctttgatgtggaccccaaaaacaccattttagacccttttaaaattgaatgggtgttttaccccggatgttaaaattgacattgtctttgaaatctatactaaattgtcttttgattgatatataaag

SEQ ID NO: 289505 - DNA, 428 bp, Glycine max
  unsure (1)..(428): unsure at all n locations
aatggatgtaaagagtgcattnttaaatggcttgattcaagaagaagtatatctagattatcccctaggatttgaaaactcagacaagcctaatcatgtttataaactgaaaaaggctttatatggtttgaaacaagccccaagggcttggtatgagcgtctgagtaaatttattttaaataaaaaattntctagaggtaaagtggataccactctttttataaagagaaaactaaatgatattctattggttcaaatatatgttgatgatattatttttggatccactaatgagtcattatgcaaggaattctctcttgacatgcaaagcaagttcgaaatgtcaatgatgggagaattgaattactttcttgngttacaaataaagcaaactaaagaaggaatanttttcaaccaagaaaaatact

SEQ ID NO: 289506 - DNA, 401 bp, Glycine max
  unsure (1)..(401): unsure at all n locations
agcttttgaacccacacttgtagcgtcaatgcaaggaaacatgcttatggctaggaatccaaaatttggttttagagttagaaaaacatgaaaattaagatttgcttgtgagaagtttttgctcgaatttgggctgccccatgtttgatactttacatagaggtagcgtggaaaacaccttgcaatagtgtgtatacataggtaaatataaggagcatgaaattcctagcaaagtatgaataattgttttcttaaatgaatgtatgatagtgtggaatgccctttttaaatgcaaatatgtgcaggatgtaattagctttccaatatgcatataaataaataggagtgaaacagtaaaaatttgtatggtgtacttcanatgtacgtaagtagtttgtgat

SEQ ID NO: 289507 - DNA, 448 bp, Glycine max
  unsure (1)..(448): unsure at all n locations
tanacattcaatttcgagcgtctcgatatattacgggactctatcaaacatacgagaaaaaagttattgtggtttgaatttgctctcagcttcaacattcaatttcgagcgtcgcgatatatattacgagactcaatcagacatccgagaaaaaagttattgtcgtttgaattggctcagaggttcaacattcaatttcgagcgtctcgttatattatgggactcaataagacatccgagtaaaaagttattgtcgtttgaatgtgctcagaggttcaacattcaatttcgagggtctcgatatattatgggactcaaccagacatccgagtaaaaatttattgtcgtttgaattggctcataggttcaacattcaatttcgagcgtctcgatatattacgggactcaatcaggaatccgagtnaaaagttatgtcgtttgatttggc

SEQ ID NO: 289508 - DNA, 308 bp, Glycine max
agcttcttattcttggctgatgaagatgaatttgtggctacttcatgcactcctctaatgacaatagcatcatttctggcactaaattgatgggagttggaagccatcttctgaattaaatttctggcttcagcaggggtcatgtctccaaaggctccaccactggcagcatttatcatacttctctccatgttattgaatccttcataaaaatattggagaagaagttgctcagaaatctagtggtgagggcaactggcacataagtttttaaatctctcccagtattcatatatgctctctccact

SEQ ID NO: 289509 - DNA, 454 bp, Glycine max
  unsure (1)..(454): unsure at all n locations
tatgctgcanatatttataatagaccccctcagtagcaaaactcaacaacagttttataattatgatctttcaagcaacaaatacaatccaggttggaggaatcatccaaatctgagatggacaagtcctccacaaaaacaacaacaacctgtccctcttttccagaatgctgctggtctaagcaagccatatgttcctcctccaatacagcagcagcaatagcaacagtcacaacaaagacaacaagcaactgaggcccctcctcaaccttccttagaagagttagttaggcaaatgaccatctagaatatgcaatttcagcaaaagataagagcctccattcagagtctgacaaattagatggggtagatggctactcagatgaaccaagctcagtcctaaaattctgacaaattgccttcgcaaactatgcagaatccgaaaaatgtgagt

SEQ ID NO: 289510 - DNA, 398 bp, Glycine max
  unsure (1)..(398): unsure at all n locations
gtttttgccggcgagaagaagacttctgcgacggataccacttangaacaccatctatgaatgagcgcggaagaagactctggaccaataagaataagtcgaagaatgggagaaggttgttgctgggtgcacggacgatgtatgagcgcggaagaagacaggttttttttttagaaaatttattaagttgtgatttttaaatgaagggcattttcgtaacttcaatgaattgctgggtgcaccaacaattatgctgggtgcacctagcaacagccggcccacaatgagaaaaagatcccaaattttatttagtactaatatacctcaaataatatattattgctaaattatatgtgataataaatgttacataaagcaattataattttaataaatta

SEQ ID NO: 289511 - DNA, 427 bp, Glycine max
gtgtcggtgcgatcggtactccgtagttgtggcagagacctttaatcaatgccggataacccactgcactattggacttctcaaggtccaccgggtgtctcggtggtgcaatacctacaaactagtggatggcatctaagataagttacgccatatggacattgatctgggtcatgatgttatagaccaactgacatttgggtagcgtgagatcagagttatggtcactgggaaggatgttattgagcaggagcgtcatccaaatttgagttagagtggtcatgctagtgcgcatgatccgcacccgcctccttgctacgctccatgcaaaatcatgtcccggggagcaaagtagctgacttatggcctcttcattcaaaacctaaaattggcttcttctctcaatgtacttgcatcattgtccctc

SEQ ID NO: 289512 - DNA, 400 bp, Glycine max
agtctgttggtaaccacctccctcttttcccctataaataggggaaagagggcaaagcaaattcgttcagcccttctggtatttaggattcacttgaaattagtgacaaaaattgttttcgtgaagaaaatccaagccgaggtgcttccgtaacgcttctgagacgtttccgtgagcgatttcgtgaagattctccaccgttcttcatcgatcttcgttcattcttcgtcctacttcggtcttcaaccggtaagttcccgaaatcaaacctttcaattcattctatgtgcccttagtggtccacacttgtttcgcgtgcttttatttttatttcgtttgtttcccgtacccctgtattgatgtgttttaaccattcatataagtcgttttctcgcctaat

SEQ ID NO: 289513 - DNA, 410 bp, Glycine max
  unsure (1)..(410): unsure at all n locations
ggaggagtgtgcaagtgaggactcacnccttgtttaacaccttcttacgcnaatatgctggccnatgtgcgggagtactcgcctgacacccatcatccggtgcactccccgcctacacggtagctcattttctcccaagccttgcatcatctagtgtttctcaaaaacgaaaacccctcaatcatgctcacgatcaaagcttgaggttcgcaatgttacacgaacaaactctccgggcaaagaactgacctatgcatacacttgcccacatccaagcaaaagccagcgtttcacttatgacccagagcagtcctcgttcattcgtcaccgtggacgacccacttttatggaattctatactagactcatttgacggtggactttacatactccaaataatctgcctgtcg

SEQ ID NO: 289514 - DNA, 404 bp, Glycine max
tgtcttatggtgatggagagagaaggggtaaaagggataaaaagaataagaaagaacgaataaatctcaatcatcaattaataaaaatctgacgatgtaaaatgcatcctcaactctccttatagctagagtctacaaaatttaatgcctttaagatttttgtgtgtgagtgaaaataataaatatttgtcaagattaaatcacaaaagttatgtaagttttttaaaaactcaatcattcttttaaggaataatataacattaaattttgaatatatatatatatatatatatatatatatatatatatatatatatatcctagatatacttatctcactctcatattaaaatagtcatcctaatatttgtgtatgtcatcctaatatttgtgtatgtcatgta

SEQ ID NO: 289515 - DNA, 448 bp, Glycine max
  unsure (1)..(448): unsure at all n locations
tgtcaaccacgatgcccaggtgctagtgctccttactcatctgcaagttagagcttatatggaccgattggggttatcagctcttgttacggtgcagtatcctaccgcatagtggatgatgtgtccatgagattaccatcacggtggatgatcttgtctgttgcacttacctgtgacaagaaagcccatttatcatgtccctctgctctttgatagtgaggcggtgaaggtttacatggctagtaggcctatctcaccgttatgttgatttaggctcgtatgtttgggctatcatgacttatctcatgcacttgatcgacantatgatacttatatacaagtcatcgactcacattcatgtcacctacctttagtatctcaacaacctggatgcttgccactagtacgcatgggaagtagctacactggcgtgcctttacaaccatct

SEQ ID NO: 289516 - DNA, 354 bp, Glycine max
ttatcttgtaacaatttaagggttatgttagggtaaacagatcaatttaactccttttgaatgtgtgtatcatctaagttcccataagttgtttctataatcgaaaagaaaatatggataaattgtttttatataacttgtcaggtgttttcataagttatcctagagaactaattaaaataaccttgtaacagctcatggacatataataagttatttcacaaattctctctattatcataagatatgctcacatgagtcgttcaaaataatatccacaccctaaggtcgtaacagagaaagaaaattaaaaaccatccaagacataacagatgatattcagacttaatatat

SEQ ID NO: 289517 - DNA, 441 bp, Glycine max
  unsure (1)..(441): unsure at all n locations
tgcacatttacactaagactcactcaatcagatcactaaatttatttgacatgttttttcgtgaaaaaatgttaactattaattattaattttttgtttgtatgaaaattgaaatccataacctttctattntgccttcttcactcaccaccaaaacaaacattataaccccaaagtatttgacatattagataattttttctactaaaatattatgttcatattagaacattttgctcctatcgttttcacgaacacttcctttaagattcctttacttaccacatgcacganatgagtgtcaagtccattcgattgtaagttaaacgcatagctggagcacatgcttcgtcaacacatttcgatattntttattggggataccactacattttcttttttaanatagagctagtaacaaaaaacaggtaaaatgtgttt

SEQ ID NO: 289518 - DNA, 404 bp, Glycine max
  unsure (1)..(404): unsure at all n locations
agcttctatccaaatggacttaccttgaattaattcctttgatagcccttttgagccttgtttccctttccttgttttgaagctcactacaagccttaagtgaaaaaccatgatattaccatatccttaaggaattttggagctttggaattgttttgggaataagtgtggggggtttttgtttcattggacaacttgttttgttgactatgcttcatgatgtattnngggtcatacttgatgtacattgtatattggttaaatgttggacatgctgaatgaaatgttgtttctcaaaggtaaaaaaaaaaaaaaaaaaatcaaaaaaaaaaaaaaatccaaaaaaaaaagagagaaaagcaataaaagtgagtgaataagatcttaaatggcacaagaatgat

SEQ ID NO: 289519 - DNA, 409 bp, Glycine max
  unsure (1)..(409): unsure at all n locations
tgcatagcagnttctactacttaagctgattacatagttgtatgaagttgttgtactcaaagtctttggatgaagcaacaactcgaagactttggagtaaaccttgatcacattcctctaaaatgtgacaacacaagtgctaccaatctaacaaataacccagtcaagcattctaggactaaacacatataaataaggcatcattttcttagagatcatgtgttaaaaggtggctgctgcattgagttcattgatagtgagcatcaactagaagaaattttcactanatcttctgctagagataagttttttattagaaatgaactatgcatgttagatgcatctagcataaaatgacattctgtttgcatagtgtgtgatgcacattgctactcatatcnatttgttt

SEQ ID NO: 289520 - DNA, 396 bp, Glycine max
  unsure (1)..(396): unsure at all n locations
agcttctcgttattagtgcacagtgtcataccctaatttcgtccggggacctttgcttgataacatgcggcctttctttggtcctttgaaagtgcttgacacccatcattaagcaatttgtgaaattccaagacatgccgaaaaaccaaaaaaatattaatgcacaatccgtaagtttccgtgacacaccgaaaattaaatggaagcatcgttgcataattaagcgagattccgtaaacattccgtaagtcaaaaaggggatgattatgtaatccggaaggttccgtaacattacggaaagaaaataagtatcgttacgaaattcgtaagtttccgtaactttacgaanaaagaatcacaaaananaaatcagaggggggtgtacttagtaaaaat

SEQ ID NO: 289521 - DNA, 457 bp, Glycine max
  unsure (1)..(457): unsure at all n locations
nttgcaagctggaatcatttatcctatctctgatagccgatgggtgagtcccgtccaggtggttccgaagaagaccggcctcacagtgataaaaaacgagaaggaggagctaattcctactcgggtgcataacagttggagagtctgcattgattataggaggctgaaccaggttaccaaaaaggaccattttcccctgccattcattgaccagatgcttgaacgcctggcaggtaaatcccactattgtttccttgatggtttttctggttatatgcaaattactattgctcctgaggatcaggaaaagaccacattcacctgccccttcggcacttttgcctataggaggatgcctttcggcctgtgcaatgcccctggtaccttccagcggtgcatgattagtattttcagtgattnttagaanatgcatagaggtgtcatggatgatttcact

SEQ ID NO: 289522 - DNA, 405 bp, Glycine max
  unsure (1)..(405): unsure at all n locations
agcttcttatctaatgctcatcttggtggtgaagcttcttcttccaaggcttattccctaatggatggcgcatcctctctcctcttctcctttgtcttccgctgcatctccatggtggaaaatcaccattaaaggacctcattgaagctcaaagatccagcctccatagaagccccacaagcaagcttcctaaggtgttcctcctcagttttagacttggcgatcatgtcgtctatgtagacttcgatctctcggtgcatcatgtcgtggaacacagccaccatagcccattgataggttgccccgacgttcttgagcccaaaggacatcaccttatagcagaaccttccncacagggtgacgacacatggtcttttccatatcctctggtgccatctttatctg

SEQ ID NO: 289523 - DNA, 468 bp, Glycine max
  unsure (1)..(468): unsure at all n locations
ctcaagcttgctaacccatggaagctcctaatatctcccacactntntggggtgggccattcttggatggccttgattntctcagggtccacttggaccccatttctaccaactacaaaacctaagaaaactatattatctacacaaaaggtacacttctctatatttgcatagagggtgtttttcctaaggactgaaagaacttgcctgagatgtcctaagtgatcatctaggctcctactgtacactaaaatatcatcaaaataaacaactacaattctacctaggaaatcccttaagacatgatgcataagcctcataaaggtgcttggtgcattagtgagcccaaaaggcatcactagccattcatacaaaccaaacttggtcttgaaagccggtntccactcatcacccnttttcatcctgatttggtgataaccactnttaagatcaatttntgaaaagata

SEQ ID NO: 289524 - DNA, 410 bp, Glycine max
  unsure (1)..(410): unsure at all n locations
agctttgtgtaatcgattacactaatttggtaatcgattaccagtgattgtttctgaataaatcaaaagatgtaactcttcaaatggtttttgactttttcaaattggttttaagtttttctaaaagtcataactcttctaaatggttctcttgaccagacatgaagagtctataaaagcaaggctttgatttgcttctcaatatacttttccaatcaatcttataaaatcatttacaagccttgaatctctttgaacttcttcttcttctttgtgccaaaagctttccaaagttatctggttttctaaatcttgaaaacttgtgctattcattcttttcatctcttctccctttgccaaanagaattcgccaaggactaaccgcctgaattctttctgtgtctctcttc

SEQ ID NO: 289525 - DNA, 448 bp, Glycine max
  unsure (1)..(448): unsure at all n locations
tctaaaggaggtcaacaacaggatgggtgtaaggaactatggttgattaaactttctagcaaaataacagtttttgcttggaggttaatagaagataggctaccaaccaagatgaatttacataggagacatgtgcaactgcaggatctgcgatgtcctttctgtaaagaagctgtagaggaggcatctcatttgttcttccattgcatcttcatccaaccaatttggtgggcatcgatgtcttggctgaactatcatactgcctttcctcttgggcctaaacaaaattttctacagcatatcttcactgaggtaaaaggattaaagattaagagatggagatattggtggatggcggtcacatgggctatatggaaactcagaaacagaattctgttttcgaatgcagaattngatgctaacagattgtttgatgagggctgtttct

SEQ ID NO: 289526 - DNA, 414 bp, Glycine max
agcttccctctcatcacttgcaaacaaatagaccttaaacaagccatgcacccactatctcaaactcttgctaaccaatatatgtttgtcgtagtcatcaatgaagattggttaaagaggaatagcaaaataatagagtatgatcgcgagaaagaaaagagaatgaaaaaaactcattaataaaagcagaacaaggtgataaaaaaaataaaagaaattggataagaatatttgagaggaaaggaagatcgtccgacaaaacaatacacttttgaaaataaaatagacaatttatataaaaaaaacacaagtataaaattttcataagttaaaaaataaaaataaaaataaagattcaaacaaaagaatgaaaaatgaagaatattgaaaaagaatacgaaatgaaggggaagc

SEQ ID NO: 289527 - DNA, 462 bp, Glycine max
  unsure (1)..(462): unsure at all n locations
tgatgataaaggtgaaaaatgtatctttcttggtgttagtgttcagtcaaatttatataaattgtataatcctaccactaaaaagatcattattagtcgtgatgttgttttttatgaagaaagattntgggaaaataacatagatgaaacaaatcaaattcttgcaaactttgatgaagagttgcagacaaggttgctagaagagcaacaaatttcagcaatcacagttgaagatgaaagacctcaacgagcaagaagaaggcatgcatggatgtctgattataaggtaacagaaattgaagatccgattacttattttgctttgttttcatattgtgaccctacaacctttgaaagtgctgtcaaagaagaanaacggagaaaagcgatggatgatgaaattgattccattaaaagaaatgatacttngggattgtgtgatcttccaaatggacataatat

SEQ ID NO: 289528 - DNA, 407 bp, Glycine max
agcttatggaaataatacataagaaagataactaagagtcggccaggggatcaaagcaacgcctgatgaagctcatatcattttcaagcctagtgatacaagtatccatcccataaaagcgagtatccatcgcatcaaaatgctcacccacaaatgctcgaagatcgtggagctctgtgaggatttcagtcagcagagaagaagcattcctttatggtggaggagatggggtacgttcgttaggaataggcggtgacaagtcttgtttgcaaatccactgaccatcaacatcctttcggtaaccaaaggaggtaacaacaccgacaccaatggagaaagaccttttaaccttgacatatggttaatcatccaaaggaacattgaaatgatgaagaacaagagtaaca

SEQ ID NO: 289529 - DNA, 418 bp, Glycine max
  unsure (1)..(418): unsure at all n locations
tccgtgaacatcaactcttctgactncattttgtaaatagtttaggctatctaccactttcgagtatcgaattaatagtatttattatttgttaaatagaatggtttttcaattccctgtgctcaagtacgggtataatttgggggactaattccccttcccattcaacaaaaaaaaaaagtgcgagtaaagaaataatgcgctatatgcatccccattcaccagagaaaaaaagggtacaagaatgtcattaataatacgctatagtcttgatgcaaagcatcatanatngagagtatatttgagtgaacgtcttgcaactttatngaatgtgtaatgacgtgactttatgtagaaaattatcttaagacttanatctgtttcttttttttgtaatgtanaaaaaaatcaacaatga

SEQ ID NO: 289530 - DNA, 576 bp, Glycine max
  unsure (1)..(576): unsure at all n locations
actgtctaacacttaaccaantanacactgatcatngaatcgttaagagagatagagaaggtnnnnnnnnnnnnnaagaggatgaacgtgtggatacgctagctattacgcgcacctatnnaanaccccanggnggancacaacnataacntgctcgatgagggccggctctattctactcgcatgagagagagggagcacagcaggctgaaaagcagaaccatcttccttgaaagggactaaaggtggctcccccagtaatacaaggcagtccaaccacatgaccaaagaaccaacccagacgatgaacaatcgatacacatgacagaagatgcaacacatggacaagtgagctcacccacgttgaccatgcgcgctgtgagagacatagcgaattcaataggaatctgacgaccaagatacaacaacatgaatccaacgctgatactacaaaaactggaaaagggtgcccgaaacgacaggacaaagccgcgagaacatgaaactggagacagaaaaacacacaaacgtcgggtcttataacatgcagcaagagagcacaggagagatacggag

SEQ ID NO: 289531 - DNA, 274 bp, Glycine max
agcttgtttctagcctggagaggagggtgcattagttttccagccaccatgattgtgtccgaactgagttctttaaaggttgggctaagaatttatccttgaaagaatgtagttctttctactttggtatgagttatgctccacatagaaacgcccattttctttactctggcttttgtactggcattgttaggattcaatgcaagtattatttcctcattctctcaatgagaggttgtcaaatttaatgggtcggctgatctagaatcaattc

SEQ ID NO: 289532 - DNA, 449 bp, Glycine max
  unsure (1)..(449): unsure at all n locations
actcaagcttatctgctcatacattgcctcttcttttgaaaaacattnctctacgagaatctcatccactatcatctagagcttggtttctgaatgacaagtgataaatgacagtcgaagcaactttataaagcatgatttgaatagaaaagtataaatgtatactaatatataatattattatagcgcattaatatatctaacttataaccatttatttatctcttttataatatactctcttctattttcatttctaacattaattttaataaatcgttctagaaaatggttaatatttaattatcgttatatcatatttaaattgttcatcttcaattcagaatataatgtatgaatttagaaatatttagttattataataaagatttaattatataaaaacaaatatcgctctgaagaagcttaattcgcatctatatcctatt

SEQ ID NO: 289533 - DNA, 407 bp, Glycine max
  unsure (1)..(407): unsure at all n locations
agctttgctccacaaaagtgatggtaatttctcctcttctttcaatttcaattgtatgattatgggtctttgggtttatgtgtaaggctttaattggaagacaagtatttgaaattgtgagatgttgttgtttcttgcttaattgacttgctctgcgagacgttgttgtgtggattttaatcaaattactgtgagtttgtgctttcttttgtgctctcangtagtttggagtaaggcacatgtgtgtgtgtctatatatatatatattaatacttgtccgggaatgtaataacaggtcataatcatagatgttgcaattcatactatgatattaaataaatagacatacaaaaccaggggctaagggtgtttctttctcaaagaagcttcagatttgttgaaagtta

SEQ ID NO: 289534 - DNA, 439 bp, Glycine max
  unsure (1)..(439): unsure at all n locations
tgacccttacgagtcagtttagtcaaatgtttagctaactatgagaaaccttctatgaatctcangtagtatcctgctaagcccaaaaatctcctaatctcaaaaatagatttaggactctcccattcaagaacgacttctatcttagagggatctacaactatacccccttgagatatcacataccctaggaaactaactttctctaaccaaaactcacactntgacaagttagcataaagttgtcggtccctaagggtatgtagcacaatcctgaagtgttcttcatgttcctctctagtcttggagtataccaaaatatcatctatgaatactaccacaaaactatctangtaagggtgaaagactntattcatgaagtatataaacacacctggagcattagccacaccaaaaggcatgactagatactcatagt

SEQ ID NO: 289535 - DNA, 407 bp, Glycine max
  unsure (1)..(407): unsure at all n locations
agctnttatctgcagacatatcctgatgaagcaatggaatcttatctgattcttctgcccttgcttcctttctgaggttgagattgaagcttggtgacttttgcatctgacaagagatggaattgtcggggtttgattcagtactgagccttgttacactgtcccttgtttcataaccaccatttgcaaatatagaatagattgaagatggttcaatggacatggtagctgctgaaggtgttaattctgcccctgcagatgaagctgcttttacatgttgtagatgttcttctcgtttctcanatgcttcatcatcaaccaagtccacagatggaactgttaacttataagaaacatggatgtcaatggcaaagtatttggtctcatttgctagcttccaatctgag

SEQ ID NO: 289536 - DNA, 443 bp, Glycine max
  unsure (1)..(443): unsure at all n locations
ntaagcatatatcaatcctatatatcctatctctntaaatcttaacctaacttataatataaatggcctccataaaacatatagctggaaaacaactcaaggatgtaatgttagagtggtgagtatttccaaagagataacttaagatgatggctggaatgaccattagcctgtaaaaaatttattggcaggcaatcatgtatagcaaggttaaaccaaacagttagtccttgtagtctactagatttgtattttggtccctatagtttattggctttgtatgagggagagccttggaacaatggtaaagttactgctttgtggcctagaggtcacaggtttaaatccaggaaacagcctctccagtttccacttgtgggtgtaaagctgtgcacatctaccttccccanacctcacttagtgggagccccatgtacttggtc

SEQ ID NO: 289537 - DNA, 403 bp, Glycine max
  unsure (1)..(403): unsure at all n locations
agtttgtttcgaggtacttacccgttgaagatcgaagaacgatgaagaacgaatgaagaacgtcgaagaacggttgaaacctttgcgagattcctcacggaaaacgttacggaaacgtttcggaagcgcctcggcttagattttcttcacggaaacaattttcccaagcaaattcgaaagagagagaagtgcctaaggggctggaccccttccttcttcatttcctcccctatttatagcagaataggggaggtggttgccgcccagctcgcccaggcgagctcagctcgcccaggcgagcatggttgcttcctccagaagcaaccgccttctggaggaagcttctggagggcccaagtgggcctgggtgctatntgcacccacatttttactaagtacaccc

SEQ ID NO: 289538 - DNA, 456 bp, Glycine max
  unsure (1)..(456): unsure at all n locations
tataagaacaaaattgcctcaatcatttcttaatatgcatgtgaattangacgcatcagcaagaatcaagccaaggctattgtgcaagcaatcaatggggcaaaacacaccaaatgattatgatgatggatggctcanattctcacaaaggtaaaatcatcactttcaaattgagctttcaaaactatcatgacatgtagagaagaatcaaggatttcaagtcacaaaatgtcaagaacttttattttcaaaacaattacccatttcttgaacatttcctataattcanagaaaaacatgcaaagtcgtacgtgcacacaatattgacccaaaatattaaactaaaaatctgacgaaactaacaacattaacaaattaacacaactaacaaattaacaaaaccaacataactagcataaccaaagaacactccccnccccccatacttaaacaaca

SEQ ID NO: 289539 - DNA, 400 bp, Glycine max
  unsure (1)..(400): unsure at all n locations
agtcttaccttctggtcctcctcatagttggtgcatgagaaaacatgctctattttcatctcccactccacgtaggcctccggatcattctttcctttaaatggaggaatgttgagtttaataccatcaattccgttntgtctaggaacaccatcattccctcttctcctcctttcttcttcattatgatctctattctccatttgatccaacctctcatggagcgcatcatctcgttgtttcattaacctctccaaatgttgcatcanagcttgcatttggaattgcgaaagccccactccatcattaggattagtacctgacatctcanacaaacatatcanacgtaacaagacaattatagttgctgttcgatacctcaccactcaagtgtatacac

SEQ ID NO: 289540 - DNA, 428 bp, Glycine max
  unsure (1)..(428): unsure at all n locations
tctggtgggacatcttgacttgctttccaatctgacattcttcacagattctgccttcttctattttcagattgggaatgcctctaacagcacctttgtcaataattttcttcatgcctcttaagtgcagatgtccaaatctttgatgccatattttgacttcatcttctttggagaatagacatgtggaggagtaactggtttcttgaggtgtccataggtaacagttgtcctttgatctgctgcccttcattaggacttcactcttctcatttgtcaccaagcattctgactttgtgaagtttacattgaatccttcatcacacaactgactgatgctgatcaagtttgcagtcagtcccttcaccagcagtactttgttcagactangaagtccatcatggactagctttcccattccagtgatc

SEQ ID NO: 289541 - DNA, 399 bp, Glycine max
agcttcttgcgtagccgctcttggtgctcagaaaatcccaaaaacaaatccctcttattactagctattttgaattctttagttcctgaatgtacaaccttcaaattgttgctcgttctcctctttcttttctgcaaaaaagaaaatcaatatcaaagaaaacatggatgaaatcctaagaaaatcaatatcaaagaaaacatggatgaaatcacaattaaaaagcacaactaccaatctttcagagtcctttggttaatttgtcttgtctccttatgtggtggggttttgtttaataatattatacttttgccttccaaaaaaaacttatgactgatcctcttttcattaatcctatcttgtatgttattgtataaaagatcatgggttctccacctt

SEQ ID NO: 289542 - DNA, 406 bp, Glycine max
  unsure (1)..(406): unsure at all n locations
tgtatttcagtatcttattgatcagttatgccaaatgcctgtattggccttacctgattntacaaagacttttctagtggaggtggatgcttcaggagtgggggtcggagctgttctcatacaagatcaccattccatagcctttataagtagaagcttaaatgttcagcaacaatccatgtcaacctataagaaagagttactagctgtggtgtttgttgtacaaaagtagagacattacttattacctaagcagtttgtaatcaaaactgatcacaaaagtctcaagtatattcttgaccagagactttccacagctttccaacaaaaatggttggtaaaacttatggaatttgatttcattattgaatacaagtagggaagtgagaaccaagctgctgatgca

SEQ ID NO: 289543 - DNA, 401 bp, Glycine max
agcttctattttactgtctccgtgtgagggacgtttctctttctgtggacattatttcacaaatttcaatggtggagatgtgcaaaaatgggttccaaaggtggtatcgaaatttcacgacaatccaacagttgacgagtctgaaatcgtagttttacgaagacaggttttgggtctctgtggaaaaagagaaagctacgatacgaatgacatttctctcacctcagataatatttcgcaaattccaacaatgagaatgttcgaaaatgagttctgaaaggtgctcaaatttcatgatgatccaacggttaacgagttcgggatcgttattttactgagacaggtttgagtgtatgtgggaaaaagagaggatttaagagaagaagaaggaaaacaaattg

SEQ ID NO: 289544 - DNA, 458 bp, Glycine max
  unsure (1)..(458): unsure at all n locations
tctagctcccaacaaaaggggtttagtctctcataaccatgagaggctttacttgtcatggatgactaacaacaagaaaaaaggagaatgtcgaaagcgagagggtttctcctaagggatagaccccgtgtgtgggttgtgagacggtgtgtattttccttctgttttctctctcctccttatataggtagcttacttacttcgcacttagtgcaggcattcacgctaaacgcgcctttgggctttttcgtgggccttatgcgtgcttagcatgtaacgcgctaagcctggagtgtaggttaagcctagagtgagtgctaagcctccaacgtgcacttagccaaaattgacacttgaaataaagatgtcaatttttcctttcagaattttttcttccagattntacatcaaactttctcatttgttntaattaattcaatttaagggtatggcagtat

SEQ ID NO: 289545 - DNA, 416 bp, Glycine max
agcttatttatatcgaggcgctcgaaattgaacaacggaagctcttgagaaattcaaatggtcataacttttaactcggatgtccaattcatgcgcatcacatatagagacgctgaaaaatgaacaacggaagctctccagaagttaaaatggtcataagttttcacactgatgtccgattcaggcttatattatatcgagacgctcaaaatttaacatcgaaagctctcgagaaattcaaatggtcataacttttcactcggatgtccgattgcagcgcattacatatacagactctcgaaaatgaacaacggaagctcccgagaaactcaaatggtcataactttttacactgatgtccgattcaggcctataatatatcgagagcgctcaaatataacaacggaagctcttga

SEQ ID NO: 289546 - DNA, 465 bp, Glycine max
  unsure (1)..(465): unsure at all n locations
agcttatgcgcatatttccctacgaacgttcacttgcacaagacatcctattaactttgaaaaatgcacccatatacaatcaaggtagcttcattacctagattatttacatgtacttccaaggtgtatttgttatttacatcacacacgcctccttggctaaatttacatacatgcatactcaaagcatttcggggtaccaaaaattgcacatgcgctcatcttggtatttctaatacctatacatataaaaacttcatgatgaatcttgactacctacgcaataaggtgctacatttcatgcttttttttttcaagtttttgctacctaaagccacatgaaaattcaagcatattttcctttgctgactaaaattgtattcaaattagaaggtatatatttttttgtaatatgttttcttcacataacatgcaacacatttatatatatnttttgtgagacat

SEQ ID NO: 289547 - DNA, 415 bp, Glycine max
  unsure (1)..(415): unsure at all n locations
agcttgtatgattatggggtacccatcatatgtggtactaggtggcgatcaggcgatggtgcaagtcgactttccacatccacaaatcacacataaatccaccatccccagttgcccaccttcaattgagctcacgtactcccatgtagcccttatcctcgttcctctcaacaccgggtccccatcaatccctccaagcttccacaacatccaaacatcatgaactatcaaaaccaagcaaaaacagggcagaggtagaaatctctgcccaaaacataaaccaataccacagtttttcttactcaaataccccagtaacattcccttcgttccaattcgttcaccgttggatcgactcgaaaattttactggaggtccctagtacataagtctacattntgaccgctgggatctg

SEQ ID NO: 289548 - DNA, 460 bp, Glycine max
  unsure (1)..(460): unsure at all n locations
ntgaaganataggatacgaatcctacatgcatccattcacactttctataaaaagcattatgtatattcttggaaagttggaaacactctcaaaacaccttgtatatgctaagagaaaagactaagagcttagctttcatatttgtttgtaagacaattaagagttagtcagtgagaaaacaaacttcaaatcttttgatttatttttagctagcagtgacttggcaggacaaagaatattggtttgtttcaagcttgttaaaaatggaagaaaagaaaaccttcacggatttgctcacggaaatgtcgaanaacttacccgttgaagaacgaagaacgaacgaagaacgaatgaagaacggtgaagaacgacgaanaacattcacggatttgctcacggaaatgtctcggaagcgttatggaagcacctcggcttgggatttcttcacggaaacaattt

SEQ ID NO: 289549 - DNA, 413 bp, Glycine max
  unsure (1)..(413): unsure at all n locations
agcttgaaggcatgtaacccaccatcttgtcatagtagaacactagtaatgtgtccactatcattgttatcatttccctctccatcgttgggggtgctacttaagctgccagatccctccacctttggacgtattctttgaaagattcatgctcccttttgcacatgttctactactccattctatccggagccatatcagaattgtactaatactgcctaatgaaggcaaccattaggtctttccaagaacggacctgagaaggttccatattattataccaggggatggctaccccagtaagactttcctggaagaaatgcatcaacaatttttcgtctttcgcgtatgcccccattttcctacagtacatgttcaggtgattcttgnggtaagtagttcccttgtactta

SEQ ID NO: 289550 - DNA, 459 bp, Glycine max
  unsure (1)..(459): unsure at all n locations
tccatcagttntgatgatgccaaagctcanagagttgttttatgattaaagaatcaagcattcaagattccactcaaagattcaagaatcaaataaagaaatcaagaagcatcaagccaagtcaaaataggtagtaaaaagtattttttcaaaaaacatcaaatagcacactttttgtttgaaaagtgattttctgaaatcttctaagttaccagagtttttactctctggtaatcgattaccattttatagtaatcgattaccagtaaccaggatggttttcaaactggtttcaatgctttgtaacgttccaaaatgattttcaaatagtgtaattgattacactatattaataatcgattacaagtgaatctgaacgttggaattcaaatccaattgtgaagagtcatagctnttcataaaatacattgtgtaatcgattacactattatggtaatc

SEQ ID NO: 289551 - DNA, 415 bp, Glycine max
agcttctggtgggacatcttgactagctttccaatctgacattcaccacaaattctgccttcttctattttcagatagggaatgcctctaacagcacctttgtcaatgattttcttcatgcctcttaagtgcagatgtccaaatctttgatgccatattctgacttcatcttctttggaggatagacatgtggaggagtaactggtttcttgaggtgtccataggtagcagatgtgctttgatctgctgcccttcattagaacttcactcttctcatttgtcaccaagcattctgactttgtgaagtttacattgaatccttcatcacacagctgactgatgctgatcaagtttgcagtcagtcccttcaccagcagtactttgttcagactaggaagtccatcatgagctagct

SEQ ID NO: 289552 - DNA, 379 bp, Glycine max
tgttaaagaacttaaaaaaaatcaagaacaagcttgttcgctcattgttcgcgtgtatgacattcactccacaaggtttgaagtagaggagaccttcaatcctattacgcaacgtggcggacaaaaatgggcagttaacttgaatggtcattattgtcaatgcggaaggtattctgcgcttcactatccatgttcacatattattgcagcttgtggttacgtgagcctgaactactaccaatatatagatgttgtttatacaaatgagcacatcttaaaagcttactccccacaatggtggcctcttgagaatgaagcggctattcctccttctaatgacgcatggacacttatccctgacccaactacaattcgtgcg

SEQ ID NO: 289553 - DNA, 396 bp, Glycine max
atcttatctgataaatgtatttgtatgcataattaatttcatgcaatatatttatgactatatattctaaaatataaattgcattggtaatatattaaaatgtagaatgtttgttttacatgtcatggaaattatttataactaaatttatactaaatttttcggcaagtttttctgaatgcatatatactaacattgtcaatcaaaaattaatctttcatcttgttaaaaagtgtaatattaaaaatatatttatagctaaaaaataactttgaaagtttgttgttgtcttacaaacaatgctcaaaagaaataaaaacgagagaatgaaaataaaatcgaaaatagtgaagggggaatattcatttgatctggaaaatattactactactatta

SEQ ID NO: 289554 - DNA, 443 bp, Glycine max
  unsure (1)..(443): unsure at all n locations
tgatagtgtgtttgatttgtggtgtggtgaaagagaaataattattntttcacgttaaaaaacacaactctttgtagcttcaagatttttagggtgaaaatttgattatttttttttcagtgttacggtgaaatgtactaaatagttttgtaaatagtaaatacacatcaacatcacgtggctgatcacgtgacctctctgaatttcctgtccctctttcctgtttttcatcaaatcccaaggctaagacagtacaaaatgtagcagttacagcacgtgatcccaaaggcatcaaatccaaattttcagatatttaccatttcactttcagattgtactaaaaagaaagaataaataaatgctgatttcacttgaccctcattggcttgaaggctcttaagtaatgccacgggcactacacagaatccttcaccacaacaatg

SEQ ID NO: 289555 - DNA, 414 bp, Glycine max
agcttgtatgattatggggtacccatcacatgtggtactaggtggcggtcgggcgatggtgcacaacaagttttccacatccacaatgcgcgcataaacccaccatcccctgttgcccacctccaactgagctcacgtactcccacgtagcccatatcctcgtttctctcaacaccgggtccccatcaatcctcccaagcttccacaacatccaagcaaaacaacattcatacaacacaagctatcacagccaagcaaaacagagcagaggcagaaaactctgctcaacacatcaaccaaaatcacagcttttctcacgtaaagaccacagtaacaattccttcgatccaattcgttaaccgttggatcgactccaaaattttactggaagtctatagtgcataagcttacatt

SEQ ID NO: 289556 - DNA, 440 bp, Glycine max
  unsure (1)..(440): unsure at all n locations
tcatgatgatgaatcaagttgattcaagtagttntgatgatttcaaagatgatgacaaaaagcccaagagaatgatttcaagattgagttaacaagtttcaagaatcaagagaagtttgatttcaagaagaaaagatgaattcaagattcaagtgaagaaatcaagaagacttcacaaggggagtattgacaagatttttcaaaaaacaaacatagcacagttttgtttttcaaaagattttttctcaaaattttctaagttaccagagtttttactctttggtaatcaattaccagtttcttgtaatcgattactagtggcaaagtttgatttcaaaagcttttaactgaatttgcaacgttccaattgttttttaaatggtgtaatcaattacaatatattggtaatcgattaccagtgtatctgaacgttgaaattc

SEQ ID NO: 289557 - DNA, 404 bp, Glycine max
agcttcattcatgtatccacgtagtagtcgtgcaggtacggtggcgtcttcctggtgcgtactggcctcgaggtggttactggtatcgacggtgaagacggtgcctgtgaggtgccggtggtgctgtcggtggtgctaacagtttggaatttcaacagtgttgccggaacaaattccgcagctttactcgcagatgggagtatatgttagaggaggaaagatgcacaaatggaaaattctgttttggtacgtgacgttatagtgcatttggaatctgaggaacaaaattgcttttagagatgctgatgtagagataggtcatcttttacaccgcatgatatctatatcttgacaatgcgttttgtataggaatgggtctaaaccatgatattctctctctgatt

SEQ ID NO: 289558 - DNA, 434 bp, Glycine max
  unsure (1)..(434): unsure at all n locations
tctatagaaggttcgttcctaatttctctttctttggatcttctctcaatgagctggtgaagaagaatgtggcatttacctggggtgaaaaacaagagcaagcctttgcttttctcaaagaaaagcttactaaggcacctgttctagcttttcctgacttttctaaaacttttgagctagaatgtgatgcctctggagtgggagttggagttgtattgttacaaggtgggcaccctattgcttattttagtgaaaaacttcatagtgccacccttaactaccccacctatgataaagagctttatgccttaataagagccctccaaacttgggaacattaccttgtttccaaggaattngtcattcatagtgatcatcaatcacttaagtacattagagggcaaagcaagttaaacaagaagcatgcaaaatgg

SEQ ID NO: 289559 - DNA, 380 bp, Glycine max
agcttattcatgtccatgttgaactgatgatgatgatcctctaaccattgtcctccattgctctcaaaggtatcctaaaaaatctcatgtaattctctaatgtatgggttgcggatttgttaagcatttaagattctgccatttagaaaaagtaatcatatgtggtgcctgttctattgatatttattttccataccataatacattaagacttgcgtggtctagtgccataagatgctatgtatacatcttttcaattccttttccaatttgtgttatattgtgagattcgagtacttaatggtgattctgaatattcagctttaacttcatacgaaaattatcatctgcgtctttctacaaccgtcttacaatcctaa

SEQ ID NO: 289560 - DNA, 300 bp, Glycine max
tcaaacttgcaacaaaggagttgagcatgtataaagattctttcttcaacttttagaggtgactttgagcgtctgtttatggaggagtcccaatcaatttctgattatttttctcgagtattggcccgtatcaattaacttaaaagaaatggtgaagacgtttatgaagtgaaggtcatggaaaaaatacttccaactttacatccaagttttgacttcattgttaccaacattgatgaaaacaaggatgtaaagaccatgactatcgagcaacttatgggttccttacaagcatacgaa

SEQ ID NO: 289561 - DNA, 411 bp, Glycine max
agcttttcatataactttacctctgctgtaggctacttatttgggggaaaaaatgataaatttgaagttttgtatgtggttgtgtatggaatttgtaatttgggaatttgtagtcttttattgtgtgtttggttttagtaggattttctagggtcatgttcaataccaattaatttttcacatgtttagttccatgttgagaaattgattgagcccagaattgatgagtttaagcaactgtaggtagttttttttgcgttggttcaagaattttatattgagttttactactaatatcttttataataaaaacatccaaacataacttcaaaatcatttttccaacgctcatccaaaattcctaattttcttactgactcttaaggaatgagaatgaagtttatgatgatt

SEQ ID NO: 289562 - DNA, 453 bp, Glycine max
  unsure (1)..(453): unsure at all n locations
tcaagaaaaagatggcctcagcaaactccttatttccagattggaattctatcaatagacctccaatctttaatggagagggttaccactactggaaaacccgaatgcaaatttttatcgaggcaatagatctaaatatctgggaagccatagaaatagggccttatatacccaccacagtagaaagagtttcaatagatggtagttcatcaagtgaaagcataaccatagaaaaacctagagatagatggtctgaagaggatagaaaacgagtacaatacaacctanaagccaaaaacataataacatctgccctaggaatggatgaatatttcagagtttcaaattgcaagagtgctaaggaaatgtgggacactcttcgattaacacatgaaggaactacagatgttaaaagatctanngataatgcactaactcatgagtatgaattat

SEQ ID NO: 289563 - DNA, 358 bp, Glycine max
agcttcattgcctaacaagccaacttacaacagctagccccaagagactcagcataaggatgcacagaccaaagttgcgtatgtaaaaaaattgtatgaccaagtgaaggtgcaaattgcaaagaagaatgaaagctatgccaagcaagcccaaaagaaaaggaaggaagtggtacttgaacccggtgatgatcttggacatttgaagacaaatgttttccaagaaggagggaatgatgagaatcatgaaacaggccaaatacagtctaaaggcccaagtggagaacgacgaacgcccaagtggagaatgacaaagcccccgagtggagaatgatgaatgcccacgtggagaatgatg

SEQ ID NO: 289564 - DNA, 376 bp, Glycine max
  unsure (1)..(376): unsure at all n locations
tcattgcctaacaagccaacttacaacagcttgccccaagatactcaacataaggatgcacaggtcaaagttgagtatgagaaaagattgtatgaccaagtgaaggtgcaaattgcaaagaagaatganagctatgccaagcaagccaacaagaaaaggaaggaagtggtacttgaacccggtgatgatcctggacatttgaggacaaatgttttccaagaaggagggaatgatgagaatcatgaaactggccaaatacaggctaaaggcccaagtggagaaggacgaaggcctgagtggagaaggacaaagaccctgagtggagaaggatgatagcccaagtggagaaggatgaaggctcaagtgtagatggatg

SEQ ID NO: 289565 - DNA, 406 bp, Glycine max
  unsure (1)..(406): unsure at all n locations
agcttgtcaatactttntaccttatgtttggctctaattgagacatggaagtacgcattattttcgtcccccaatttgagccagtcaagttttgatctctgttgtagaatttcctcatcaatctcgttccacctaatcacagtttttgtacacatattcactttatcaattttctctttattcatcctgtcatttacaagcgagtcttgagcttcagcaagatcttcccgagctttggccagctggagtttcgtatgagcaaattgttttgacaaagtacctaaaaattttcttaatcttttcaatttcttccacatcgctaccataggactaccatcaacagggctattccaactctatgcgacagcgtcatcaaaacctggcagcttggtcacacaattgagaa

SEQ ID NO: 289566 - DNA, 434 bp, Glycine max
  unsure (1)..(434): unsure at all n locations
tgtccaatgtactcttgtgcatgacatcaagcgacgagcctttgtcgataagcattntggccacgatgtggtccaaacacttgacggatacatgtaaggccctattatgtccccgaccctcgacgggtatctcctcattggcgaacgtgaggtaattgttggcagtgataatgttgatgattcctccaaagccttccacaaagatgtcttgggctacatgggcttcattcaagattttgaccaaaagcgcccgatgaggctcagaattcatgggtagttccaacagggagaccctagttggggttttattgagctgttcaattaccttgaactcgctntgctggatgatccgaaagaactcatttgcttcttcaacggatattntctttttgttgaagtcttcctctccctttgcaaacctcccagtcgggatc

SEQ ID NO: 289567 - DNA, 415 bp, Glycine max
  unsure (1)..(415): unsure at all n locations
agcttatgttaatttggcatggaaggtacaaggctggcggcttaaggttcaagcaacccaagtaagggctttaggcccaaaaaaaaaaaggtccaaattttttttagtactaatatatctcaaaaaaaatttattgtaaaattatatttgaaaataaattttaattaaaatattataagtatctgttactctttttattgatacgcaagtaacaattaatgagcaacaactcttcatcaatatcatagttttgttcaaaaaaaagaaatttaacagttaatagttaaagaaatccaaaagtttttctttcatttctattctctttattggctttctattcaattntaattcattcttcttttctcaatgtctttcatacttctttgtcttcacatgttgacctccttaattatat

SEQ ID NO: 289568 - DNA, 457 bp, Glycine max
  unsure (1)..(457): unsure at all n locations
tgcataagctattcatataaggtatcttacagaacttgtataaataagttattaacatcttatatatggattagttataacataagtttgtaagttctcgctaacactttcacaaaaacttaacatatgatcttagtcataaaatattgttaactcattgacaagtgtaccgatttgtctcaagtagtaaagtactcagaagtctgagtatcgaatccacaatgactttgtttgtacttagattgatgcaaactcaatttacaagtaagagataaagaatttaaaataaaagataaagaaagatagaagataagatacatatttaaaagaaaagataagagatttaaagataaaaaattagaagatagaanagataaaaaaatttaaattaaaagatgataaagataaaaaagtataagataaaatagataagataagtaaaagataaagataatga

SEQ ID NO: 289569 - DNA, 369 bp, Glycine max
agcttatctttatatttaaaaaacattgatagaatatacacagtacattattaatttgaataaatgacgcatacatgacattgattgacataatacatattgtacgaggatctaaagaaattgactaaagtggcgtaacgcagttgcagtcacaagtagttgattatctttatattcgaatgggcctgaccctgacatgcacgccacatgcatcattagttcataacatttgtttggcaactattaatcacagtattgtggccaggaccatgcatagtcacacatcagcatatatctcatcttcgtcaacccagaactggattcctcgacttaccttttaaaataatctgcatcatcgatttatatttt

SEQ ID NO: 289570 - DNA, 463 bp, Glycine max
  unsure (1)..(463): unsure at all n locations
ctcaagctggttgganaaggattaatattcattaacctgaaaaaagtcttttccttattataagtgttttctccaactcctaatgatcaagaaagagaccggaagagtagtcaaataagtaaaatcttattttttttctctttcaagaagttaaaacgcaccagaaaaaagtctcactataaaaaaatatacatattgggtatctattatttttgagaatcacatatttcaagatcttactaatttcctataattgttaatcttcaaaacccttaaaacccttcaagacatgtataagaggtgagtctctgcaccacatgaatcgtgtaaatctatgcccacatcaatttaaatataaatatttcaattgcaatgcatgccgaacagcaatatcacctaacaaacacgtctgatccacagataaagatactagggttgcctaattctctacatttcaatgacc

SEQ ID NO: 289571 - DNA, 404 bp, Glycine max
agcttgcccagagaatgagtccacggaggaaatgcttaccacctcaaaagactggaaagcggtttctaatgactcctctgcggcttccacataaggcatagaggatgggcagctcaccaagatgtcttcttcgcctgatacgatgaccagatgcccttccactacgaatttcaacttttggtggagtgtagagggaacaacccccactgagtggatccacgggcgccccaacagacagctgtagggggggttaatatccattatttggaaggtgacttgacaggtgtgagggcctatctgtactgggagatcgatctctcccctaacctctcggcgggtgccgtcgaaggcacgaaccaccatagaactcggctttaagtgggaagcattgaatggtaatttct

SEQ ID NO: 289572 - DNA, 454 bp, Glycine max
  unsure (1)..(454): unsure at all n locations
cgattcaatctatgtacccgtagtggtccacattgtgtttcgtgcatttttattctcgttttgtttactttntataccccctcttgacgtgcttgagccattttacttaagtcatttctcgcttaacttaaaaataaaataaatttccaccgaacttttgaattgtattatccattaacttcggttaaaataaattccgaccgttcggtcgtgccgtaaccacgttggaaatcaaaaagaggtaaaaaataatataataatcaaaaagacatctttagtaaaataaagcgaaaaatcaatcgggcgttntctctttgggatttctcattcttaatcgaattgattaataactaaagtgaaactaaaggctaaaatcaattcgcctagtcaagctcgtccataaaaatagggctttgaagtttgtcatttcattntctcactaagtaaaatggat

SEQ ID NO: 289573 - DNA, 414 bp, Glycine max
agctttgcctttatggcttgtacctcatcactttcttccgaagctttaacctcatcgtctctcacagtctttagatttgggagccaatccagtccttgtgttcggactctcagccacttatgatagccgccgatgatcccattactgcttcccctaagctctctgtcctttcttcacgctgcatcccatgccttgcgaactccttggagtaccctcgcgttgtggtcactgaaacctcgtgcgatgaaaggcgtgatgctttcgtctaatggcgctcctctcatggggtagccaagctgtcttatggtgagaacgggattataattaatacaaccccttgttcccatcaagggaacatttggacatccttcgcatgaagatagaatcttgattcttccttccttctagcgaggg

SEQ ID NO: 289574 - DNA, 467 bp, Glycine max
  unsure (1)..(467): unsure at all n locations
actcaagcttcatgattgaatcaagattgattcatgatgatgaatcaagattgattcaaggttttntgatgataacaaagatgatgacaaaaagcccaagagaatgacttccagattgagtcaagaacaattcaagaatcaagaatcaagtttcaagtttcaagaatcaagaatcaagaaccaagaataatcaagatcaagattcaagactcaagattcaagaatcaagaaaagactcaatcaagataagtactaaattttttttcaaaacattgagtagcacatgaagttttcacaaaagcttttaccaaagagtttttactctctggtaatcgattgccagtttactgtaatcaattaccagtagcaaagtttgttttcaaaagctttcaaactgaatntacaacattccaattaatttcaaaatggtctaatcgattacaagattntggtaatcgattaccagt

SEQ ID NO: 289575 - DNA, 407 bp, Glycine max
agcttttatttagtattcaattaatctatcttgcatcatgtcagcccactttggacttaaagtgatacattcagttacgactctatttctaagttataaattataccacagtccacataattcttagttaagaaatacgaatattgaatcatttgtgtcaataacttttaataaatcatacatttcaatgcagacctagattgcttttacaattcaagtatttcaagtaacattgttcgaaaagtggtttacggcctcaattacgcttgtaacttcacaatattgtggctttttcagtcaaaattgtgacttttagtgtctctggccgcaagttaaaaccttatttgttgctaggttaagttctatggatctgactagcattactttaatgacattgatcatgcatg

SEQ ID NO: 289576 - DNA, 366 bp, Glycine max
  unsure (1)..(366): unsure at all n locations
tactcaagcttatgccacggaaatgtaattatganatcgagatgcccgcttttcaccatnctctagttaaccatgcatgtaagtaccatgttcaattattttgttttgttgctgtgaaacgggtttatgatcccaacatggttggctcatggtaccgaatatatgcaaccaagaatgcatcatgaattttcatgcttcccttttttttgttttcgttttgtagaggaaaatgcagtgcttatgcatgagaaaacatgaatacaaaacgtatgcagtttgtagaacaacaagtatgttgaacgcatatgcatgatgatgctatgactcatgcaaaatgcgaggcttgaatatgataacggacaaatg

SEQ ID NO: 289577 - DNA, 404 bp, Glycine max
  unsure (1)..(404): unsure at all n locations
ttcaaccaatgagattgttcgaggcctgatctttctcctaatcatgattgctacacccggaaccaatctcgaaacaaagcttaacctttgaacgccaggcgaagcaaccttgatcgaaagacaaatatgaaacgtcctcgaatgactgagaaccgaccccgcgtgtatcgtccccagtagcataagtctaaaacacttgacacgcacagttagaaaaacaccaacacaaatgtcacaactttacgaacttgctcgcgttgaaaacccctacaaccaagagatcctaatattaacctatcaggccccaaccccttngattcaacacaacatgccattgaagcacgaattgaacaaataatagtgaataaccactggtattatctagcactccttacaaacatgcg

SEQ ID NO: 289578 - DNA, 424 bp, Glycine max
tggatgatcaaatagtctgaccattggtgttttaccattatttgttacactcaacattagttaatagttagtctatattgcttagaatggatccatccaatatggcaagaggtgtgtacggtgaaatgctctgacatttccaaaatgaagacattggagtctctctcatacaaagcacattgttaaattttcaaactctaaagtagatgttctcgaccagaacatcttggggtatgctttcaggagatttcatcatacatagcacacatctctcatctattgcccttaaagctaaagaatcaccagatgattttaataatgaaagtggtgaaattgatgaactttccatcataaccagaagcttacacaagatgttaggcaaaagggaaatcactacaccagtaatgcattcaagtatcgcact

SEQ ID NO: 289579 - DNA, 392 bp, Glycine max
  unsure (1)..(392): unsure at all n locations
agcttatagccttttcaaacgacaataactttttactcggatgtctgattgagactcgtaatataacgagatgctcgaagttgaatgtttaagctttgagccaattcaaacgacaataactttttactcggatggttgattgagtcctgtcatatatcgagacactcgaaattgaatgttgaagctctgagccaattcaaacgacaataactttttactcggatgtgtgattgagtcccgtcatatatcgagacgctcaaaattgaatgttgaagctctgagccaattcatacgacaataactntttactcggatgtctgattgagtcccgtaatataacgagacgctcgaaattgaatgttgaacctctgagcacattcaaacgataatat

SEQ ID NO: 289580 - DNA, 421 bp, Glycine max
  unsure (1)..(421): unsure at all n locations
taaacattcaacttcgagcgtctcgatatattacgagtctcattcaaacatttgagaaaaaagttattgtcgtttgaatttgctcagaggttcaacattcaattttgagcgtctcgatatatgacgggactcaatcagacatccgagtagaaagttattgtcgtttgaattagctcagagcttcaacattcaatttcgagcgtctcgatatgtgacgggactgaatcagacatccgagtacaaagttattgtcgtttgaatttgctcagaggttcaacattcaatttcgagcgtctcgttatatcacgggactcaatcagacatccgagtataaagttattgtcgtttgaatttcctcagagcttcaacattcaatnttgagcgtctcgatatatgacgggactcaatcttacatccgagt

SEQ ID NO: 289581 - DNA, 410 bp, Glycine max
atctttaacatagaaacctagttagattagtgctttgacaggtttgataacaagaacatatttgtgggtttgacaagaactatatacagctcatgactattctccaaccgagcaccacttggaagggttctacacccaatgagagtcgaggttgtgttgattgccaagcttcaacatagaaacctagttagatttttgggttactgtgtggaaggagaagaaaaaatgctagtatatgaatatatgccaaacaaaagcttggatgctaccattattttttgtaagactatttattgcatttgaaatattttgtttacgtgcctttttttgtacactcaaaattctattttgaagtagactaatgtaatgtatcatgcccctaatgaactacaagactgaaagttgtgtgt

SEQ ID NO: 289582 - DNA, 441 bp, Glycine max
  unsure (1)..(441): unsure at all n locations
tgtctcagcgtttatgcgagacggagaccatcatgctagctatcatcgccaagtaccaagaagagttaggtctagccacggcccacgagcatagaattgcggacgagtatgctcaagtatacgcggaaaaagaggctagaagaagagtgatcgactctttacaccaagaggcaaccgtgtggatggatcggtttgctcttaccttgaacgggagtcaagaacttccccgcttgttagccaaggccaaggcgatggcagacacctactccacccccgaagagattcatgggcttctcggctattgtcagcatatgatagacttaatggcccacataattagaaatcgttagggaacttgtatggtctctcagaccttgactagatacgacttcctttttgaaataaaatgagttggtcccatgttntctactccaaaaactt

SEQ ID NO: 289583 - DNA, 405 bp, Glycine max
agctttattgtctaacaagccaacttacaacagcaagccccaagagactcagcataaggatgcacaggtcaaagttgagtatgtgacaagattgtatgaccaagtgaaggtgcaaattgcaaagaagaatgaaagttatactaagcaagccaacaagaaaaggaaggaagtggtacttgaacctggtgataatcttggacatttgaggacaaatgttttccaagaaggagggaatgatgagaatcatgaaactggccaaatacaggctaaaggcccaagtggagaatgacgaaagcctaagtggagaaggacaaagcccccgagtggagaatgatgaaggcccaagtggagaaggatgaatgcccagaggcagagacactatcaagacaattaattgttgctaaa

SEQ ID NO: 289584 - DNA, 447 bp, Glycine max
  unsure (1)..(447): unsure at all n locations
nttcgattcattctatgtacccgtggtggtccacattgtgttttgtgtatttttattctcgnttcatttactttttatacccccttttgacgtgcttaagccattttatttatgtcatttctcgcttaacctaaaaataaaataaatttccaccgatcgtttgaattgtattatccgttaacttcggttaaaatgaattccgaccgttcggtcgtgccgtaaccacgttggaaatcaaaaagaggtaaaataataatataataatcaaaaaatgtcttttagtaaaataaagcggaaaatcaatcggacgttttctctttgggatttctcattcttaattgaatggactaataactaaagtgaaattaaggctacaatcaactcgcctagtcaagctcgtccataaaaataagtttttgaagtttatcatttcaatntctcactaag

SEQ ID NO: 289585 - DNA, 412 bp, Glycine max
atctttgaaatggaggattggggaaattttctccatcgaatccttaaggaggattctaaggattccgctccgattaaaatgttcctcttggtgtgggggtttggtggcaagcaacggcagctcgtggcggccaccggtggtcatgggtggtggagaaagaggtgttagggtttgggtggtgttttggagaggaagagagagtggaaatcgtgtttttcacactggagaacaaatttataatctacagatctcgcttagagagctcgtctcgctaagcggaagtccacttttcgtgcttagcacgacaattcgagcttagtgcaactccctctacactaagtctcgcttagctggccaattctcgctcagcgtaattccctctcgggttggaattatacttagcgcgcccctg

SEQ ID NO: 289586 - DNA, 430 bp, Glycine max
  unsure (1)..(430): unsure at all n locations
tttgtttggaattcattntcaattacctcttagttctgaacgcatgataataatatgtaccaaaagcatacaaagcatgataatatgttggacagagctcttcatatttttgcttggtgtaaattaatgaaaagttggtgcgtttggttaagtgtttattaactagatttgaaattatttgattntatatatganattgatttttattanaaatgaaattaaaataaagtgtcatgtttataaatattcattntaaagtaagtttatattacaacttaatatgattctttaacttanaatgaaaattttatttagagaataaaatatggagttatagtcatcgattaanagttaataatttaaattaattcatatattagagagtgatttgaattgtatcaatattggtcagcggctganaatgaaaaca

SEQ ID NO: 289587 - DNA, 340 bp, Glycine max
agcttgttgtgagaaagtatggaagagtcagtcttcctatttttgtttgctgaccacagagtggtacctggagatatgtcgcgggggtcatgagaccttggggacgtcaagtggggtgctattgcccaaaaccaagcttgaccaatcccgacccaaccccggcatagtcagtcagtgagaacctttgatgtacctaaacatgcaagctcctggcagtcaactaataaaagaacaaagtccacaaagcaacgaggcttgtgtggcggctggccaactacgaatcttgagtggtatctggaaattggcctctggtaatcgattaccaacggtgtgtaatcga

SEQ ID NO: 289588 - DNA, 432 bp, Glycine max
  unsure (1)..(432): unsure at all n locations
tgagaaatatagtgaaagttgaatcgaattatagagttttcatacatgtccttgaaaagttccttaaatttttttttcaattaggccctgaacttctgtttattnttaattaaatttgtcattgaccatagtcaacatatttaacaaggacctaattaaagaaaaaaaaatataagttagggactcaattgattttttttattaaaaacttaattaaaaattatcaaataattcggggatgtgcaaactaatttaacttttttttaactcaaagatgcctatatcatttcatcgaagataataaaatcaatacatgaagggactacattaaaaatacaataactaacatgaaattaaatactttaataagtgaacgagcgacttaatttgtttgtctctaaatgaaaaaactntaagctttgaacttgcaat

SEQ ID NO: 289589 - DNA, 402 bp, Glycine max
agcttttactctctatgtctccattatccagcaatatcttggctcttttatttggacattgagaagcaatatgtccaactccttggcacctgaaacatttgatatcatgggatctagaagatgaattaatttccattttacctttaggtgtagcaaatgaatttttggacttagcttcatctttttgactttgtcacagatttgttgttttgccaatttgacttccacaaagaagtggaagcaaatttggaagtactattagctttgcattgcctttccacttgaatagatttgtgcaacaagtcttccatctccacataatgctacaattctaccatattagctatctctttctttatacctccaatgaatctggccatagttgcctcacagtcttcttca

SEQ ID NO: 289590 - DNA, 429 bp, Glycine max
  unsure (1)..(429): unsure at all n locations
ntanacttgatattggatagtttacaatctgcattcagatttaaaagtcgtagacaatcaacttccgaagaagaagaggaggaggagtattcatgtgcaagaagacatggaagaaggcaaagaggtgaaccaagaagagataatcattttgggagcattaagatggcaacccctatgtttcaaggtaaaaattatcctaagttgtatttggagtgggatagaaagtttgaacatgtgtttcattgccataattatttttgaggaaaaaaatgttaagctagttgttgaattcaccaattatgctagtatttggtgggatcaccttatgactagtaggtgctcatcatagcctccatcattatggccattntctctttcatggccttcatcattatggccattttctctttcatggtcttcatcattatg

SEQ ID NO: 289591 - DNA, 405 bp, Glycine max
  unsure (1)..(405): unsure at all n locations
agctnttgatgtcatatatgaaaataggctcttcgccgaaatttccggttgttatgaacgccgataatgcaaatggggttatatataccaaaaatatatagtgcaagaataaaagttaggtgcacattttcagtatttaaagtggctttataattgatgggtaatcaaaattaaaattttacccctatattcaacgtcaattcctaaatgttgattatacgaattgtttaagatgaaactctgattttaataagaaaaaatattaaaaatacttaagaaactccgtcaaagtgtttgccatagtgcaattagcatagaaataatatatcaaggctccaaactctttttggnggcaaatcccttctgctgttggtagatagcaaccattgtcaatgtgattttgaa

SEQ ID NO: 289592 - DNA, 443 bp, Glycine max
ataagttagttataccatagtctaaatattaatatcaatttatggaaaactaatgatcaatgttacatgcacaggtataataaattataaattatgaatatattgaaatattaatcatcgtgtatgaaatatttactctaatacttattaacatttcttttcttggaagctgcgaagccactaatgatttaatttttttataggaattcacttttttaattttcataataaaaaatgattttaaataaacaagtcatttgtcaaaaatgttattataaggaaaaatttactagaaataatcaatcaaaattactcatcaatagatacttcattaaattacttaaaatataacattatagtgatcataaattaaaaggatataaagcataaatcaactactaaccaaatcctagaaacactgcatgtcccagatacaaaatgat

SEQ ID NO: 289593 - DNA, 408 bp, Glycine max
  unsure (1)..(408): unsure at all n locations
agctttaagcaaaatcaatcaacaataacattttactctcctgtccgattgtctcccgttgtatatcgagacgttcgatattcagaatagaagctctgagcaaaatctaatgacaataacttttttctcggatgtccgattgtatcccgtagtgtattgagacactcgaaattcagaatagaagctctgagcaaaatcaaatgacaataactttttactcagatgtccgaatgaatcccgtaatatatcgagacgctcgaaattcagaattgaagctctgagcaaaatctaacgacaataactttntactcagatgtccgattgtgtcccgtagtatatcgagacgcacgaaattcagaacagaagctctgagcaaaatgaaatgacaataactttttactcggatgt

SEQ ID NO: 289594 - DNA, 445 bp, Glycine max
  unsure (1)..(445): unsure at all n locations
cgaattcagatcgaattgaagttagcttagctgaaccttggccagcttatcggaatgattcagcctcagatgcaagggttgggcgctaagtgcttgagactcatggcttagcgcatgaacagagatgcgcttagccgcaggcttgcgtttagcgaaaggactgttttttttttttcagaaaagtgttttctaagttatttttcagtcctttttccaagaaattgaaacccttgtgttaaacattcaaagataagctgatatactcctatgtacaaattatacagcaagttccacatgatataatgcatgaaaaaacagagataacaaaaattaaaactgggttgcctcccaagaaacgcttctttaatgtcatgagctngatgcttttatctcactgggtgatcanatgaacagtgccctgtgtccttgtanattcttcatcatg

SEQ ID NO: 289595 - DNA, 414 bp, Glycine max
  unsure (1)..(414): unsure at all n locations
agcttgtatgattatggggtacccatcacatgtggtactaggtggcggtcgggcgatggtgcacaacaagtttttccacatccacaaatcgcgcataaacccaccatcccctgttgcccacctccaactgagctcacgtactcccacgtagcccatatcctcgtttctctcaacaccgggtccccatcaatcctcccaagcttccccaacatccaggtaattcaacattcaaacaacacaaactatcacagccaataaaacagggcaaaggcagaaaactctgcccaaaacaccaaccaaaatcacagcttttcccacttaaagaccccagtaacatttccttcgtttcaattcgttaaccgttggatcgactcgaanattttactggaagtttctagtacataagcctacatt

SEQ ID NO: 289596 - DNA, 450 bp, Glycine max
  unsure (1)..(450): unsure at all n locations
tgaaacttgagtgctattgatatgaatattgtgtggatttgcctcanaatgtttctgcagcttatgaaattttatttcattggcttcttatgttttactgtggatcagaatcaattaattatgagttgctttcagaaatgtctttgtaccatttttctgttctgtttgaagtgattctcagcttttatgagatttagttttggttattgtttaaggttatgtttggtttttgcttttctaaattccctttcatgaatgtttggttactttgcaagtatgttgtatattaatttttttttcttctgaaactcaattttataaaatcaaaacttgatttatttttacaatttcaatttacaaacaactatgaacttagttagaaacagaatttaaatattttagtgagaaaaaatagtctataataccttcatagaaaaaaatattacctat

SEQ ID NO: 289597 - DNA, 415 bp, Glycine max
  unsure (1)..(415): unsure at all n locations
agcttgtgcattcaatatcctaatgagggtgttccatatgctctcaaaactggactaatacatttactgcccaagtttcatgatcttgcatgtgaagatcctcataagcatcttaaggagttccatattgtttgttccaccatgaaaccccctgatgtccaggaagatcatatctttctaaaggcttttcctcattctctggagggagtggcaaaagattggctatactaccttgctcccaggtccattttcagctgggatgaacttaaaagggtgttcttggagaaatgtttccttgcatctaggaccactgccatcaaaaaagacatttcatgcatcangccacttattggagagagcttgtatgagtattgngatagattcaagaaattgtgtgcaagctgtcctcaccacc

SEQ ID NO: 289598 - DNA, 420 bp, Glycine max
  unsure (1)..(420): unsure at all n locations
aaagaccttttgatcctcatgtgcttgtgtttatgggtttattgtcaattttagaatcttgccaagtttatgtggtgtttgttttcatgggtgctttgagggtaaatagtagcctagacacttgaaagatagagtgtatatcttgtgaggctttatcacttttcattcttcaactgattaactattttgccatgattgggttgcttggatgattttcatgaatgtcttgacttttcggatctccttatgttagatgttacccattcctttcattccttgatgttcattgaaaaatatgtgaatgtttttgtttgcctctctttgatatccttggattttgttctttgcttcattttgcccaagagttgcaaaggctatgtatggngggttctgatgtgccatcattttcttctattttct

SEQ ID NO: 289599 - DNA, 409 bp, Glycine max
agcttttaatgaactttctcttcataataaaattcacataagtgttttgaggcataaaacacacgtcatacatatgattcgttcagataacaatcaatgtatattgatgttctcctttgggtgtacaccaacacacaacatacaaacatgatgatgctaataaaactcttaacattatttgacaattaaatatgcatcaattagtagtacctatttcctttgggtatataagtaaaactaattatacacacaaataacttacaattatattcattaattataagaacaactaatcaacctttgggcgatccataaatgccttataacaatgaatttcaatgtacccataaaccaataatcatataatttagcatccattattctatgagtaattgaaataatcattaat

SEQ ID NO: 289600 - DNA, 443 bp, Glycine max
  unsure (1)..(443): unsure at all n locations
tccatcaagtggtatcagagcacaagagcttcaagtaggtgttccttaaacctccattgaattgtttgctttaccttctcttccattgttgtttcttcattttttctccatgtatctcctcacatgtcttgtgctaaatgttgttaacatgattctttagagtttccaccaattaaacttgctatagaagcaagatttgattttctatggttcanatttcttgttcttgttcttgaaccatgaattgtgttgagtttaggttcctttgagttttgtcttgttattttttgttgctgaaacctaaatcataaaattcttacaaaaatattaaagtagaagaaaacctcaaaaatctagagtgacttgttcacctattgtagttntgtcatagaagtcatgtctagtcatgaaactngtcacataagatttcttatgttgtgctg

SEQ ID NO: 289601 - DNA, 411 bp, Glycine max
  unsure (1)..(411): unsure at all n locations
agcttgtctcttagttctacatattttcataatgaatatataaataacaaaggctagtaaaatcttcactatcaatttaaataaatgagctatccgtgggccattaatgttgagcttgtaatgcttgaacttgactcatttaaataattgagcctatttccaagcttcactttgtttatttaattaaacaaatgagcttgattgagcatttaataagttgagtttgaatagttcaggaatagctaagctcatttacatccctaaatttattttattttggaatctaagttccttatgtggtttagcccaagagcatggtaaatgtacatcatatgtggcactaactttattagttntttttgtctttctccaatctcattgctgttagcatatctaatgtaatatcaaatt

SEQ ID NO: 289602 - DNA, 427 bp, Glycine max
  unsure (1)..(427): unsure at all n locations
ntacaaggacaagtccaatcatattgtctttgttgagtgcttttagaagatgcaggaaaatcccataccttagcaaagtgagcatgcattangcatgcttgaagataagttgcttttcttgcaagccgaaagaaggcaataaaattacccgttcggcacgctctgaaaaggaaaacaagaaggaatggtcagatcgcaaacatgataaccaaaaaagaaacaaaaactaacttctacaggaatttcaaccttgctacactgcgagcaaatagaacttctggagtctgccttattgctggagtcatcttagcaatttcaagggagagctctgcaggttcaacctagtatgacatgcttagttccttggttntttcgtagtgaataaagccatataaatcanagcactacagaggctacttactttata

SEQ ID NO: 289603 - DNA, 408 bp, Glycine max
agctttatcttctcaaggaagcttctcaaggaggtgagcttagttttcagatgggtgtgtgtagctaagctctagcttctcaaggaagttttctcaaagaagcttctctaggaagttttttcaagaaagcttcttaaggaagctacctagtctataaatagaagtatgtgtaacacttgttgtaactttgatgaatgagagtcttgtgagacacaactcatagttcaacttctctccctttttcttccttcaatttcgtgctcccccctctctctttctctccctctttctttatctccattgaagcatcctctccaagcttcttatccaaggctcatcttggtggtgaagctccttcttccatggcttattccctattggatgacgcctcctctcacctcttctcct

SEQ ID NO: 289604 - DNA, 452 bp, Glycine max
  unsure (1)..(452): unsure at all n locations
actcagctatgtgccaagggtgtcggggttattgctaatctgcacctttggtgaaatatattaccaaaggtttgggcttcgcaagactgctctccctcgcggactgcatgcagatatgctgctcttctcttccctcactgccgacttccagtcgaccttgatctatcatctgctgtaacaattcctccacttacaaacacgtttccatgttatgcagctcgctggaatgcagcaaactaaaatcctccttatgcccaccatggggaatcacacctccctnttgtagggcctcaatgataaacctcctaggggttgccacatcctttaaaggttagaccggcagggcctatctgacccaatggcgttaaccgccccccctccatgattggcgaagcgggttggtttcacgttgggccgatcctcttggaacgtcagccatccagcatctatca

SEQ ID NO: 289605 - DNA, 410 bp, Glycine max
  unsure (1)..(410): unsure at all n locations
tgctgtgtttttttgattntagataaaactaattgtgtgaaatttattttgtttgaaactaatttataagtgatatgattaatgtttagatattttcattatgaaacttaagagtaaaatttagtataatttttatatcaaatctaaaaactattcaaaattatttaaacccaaaatcaattatagatccaaattcaattttcaaatcttctgtatgcataaaactaaagacaagagtatatctaaaataaattctaaactcaaaataaattcttttacatcaaactaaacacatgatgattntttatttttagttttgaatttataaaatattaaacctaattctaattctgagggtgatgtttcggttttaagatattagatgttgctttaagttgaaaatagataaa

SEQ ID NO: 289606 - DNA, 448 bp, Glycine max
  unsure (1)..(448): unsure at all n locations
tctaaatgaggggggaaaatgcgtaattttccagcatgtnctttaacgcatttgtataatatttaggcatcatttagcaagagttagtatgctatctaacaccacagcaatgcccttacagccatgctatgctgactggaaaaaatacaattgaaagtgcaggttcctgttgcatacaggtctgacccaacggtgatgctgtgcctgtacagtttcaaagaaagtcaaattttacctgatgtgcaaagcgagagttctgataaccagtcttcatcagctggccccatggctcgtgaaactgtataaagtaaattgcatgaattctagtgtccctgaccagtagaaacagaacttataatattgggaaaaggctaaacctcttctaccttntggtgtaatattctttgagcttcttgatgacttaatcgtactctctctctttcaagct

SEQ ID NO: 289607 - DNA, 393 bp, Glycine max
  unsure (1)..(393): unsure at all n locations
agcttaacatcagaccacttccagggtgctggaactacttcacatggacttgatggggcctatgcaagttgaaagccttggaggaaagaggtatgcctatgttgttgtggatgatttctccagatttacctgngtcaactttatcagagagaaatcagacacctttgaagtattcaaagagttgagtctaagacttcaaagagaaaaagactgtgtcatcaagagaattaggagtgaccatggcagagagtttgaaaacagcaagtttactgaattctgcacatctgaaggcatcactcatgagttctctgcagccattacaccacaacaaaatggcatagttgaaaggaaaaacaggactttgcaagaagctgctatggtcatgcttcatgc

SEQ ID NO: 289608 - DNA, 458 bp, Glycine max
  unsure (1)..(458): unsure at all n locations
tcntatttagacctcgatcggtcatcttttctggccgacgccgactgtcatttttttcgagcaatatcggtgaataatatttttttgccgaggtgggctaatgttttcctggccaaataaatgggaacatgccagtttcggccgaaaagaaacatcggttgagctcgcacggaaaaacctagccgacctacgttgtaaattttttaggcaacaccaaaacaaaaaacttcctctaccgttaaaaaaaacattatcggccagcgtttgtaaaagaaattgcgcaatttcggctgaaagatatcaatcagggacatataacgaccgacaccggccattgtttattctatttaatccctgaataacaattggatgatgtcgattangaaatgttcgatcggcatcatccggtgaagcttcttttttagacctcgatcggtcatctttcctggccgacgccg

SEQ ID NO: 289609 - DNA, 405 bp, Glycine max
  unsure (1)..(405): unsure at all n locations
atcttgtattacaagcatttcaaacaagatggatgcctacccttgtagtggtactttttagttagttgtgggggtgatgtcgttgtttgctaccattgatggtggtcaaagaaaaaaatttccctcaccccactgtggacgccaaatgttctttctggatttggcaagatcttctcatagtggtgttcctttataagctcctccacgaattgtggtaagtggtaccatacttgcaaagacactttgacattcaagttaaaggtgcagaggtatgcaagcatcaatatgtangttgaaatcaaaatgaattacctgaaccacaactatcccttntatagtggtgagaatggattatcttatctcaatctctcatctaagactaatgtaacatgannaaatatgatc

SEQ ID NO: 289610 - DNA, 436 bp, Glycine max
  unsure (1)..(436): unsure at all n locations
tgtangccttggatcttgttcatcaatgtgtttccattgcttcttgaagttcactggcagcggaatggagaaggaagaaatatgattggagatgccacttcaaggagaagatgagtcaagcacaagctcactaccataggaagccatggataagagcttgaaggaggagaaaatgagtggagggagaaggagcatgaaaattctgtgcctcaaatgaggtctgaactttgaattataattctcaaatgatccaaggcctacaagctctacatggagctacatcatgtggtatcaaagcatcttcctctacgtgatgttctattgcttcctctatctttttgtttggtcaattcactttaattccttgttcttctccatgtatctcctccattgtctcgtggtttggtgatgtttagagtagattaaaaaagataac

SEQ ID NO: 289611 - DNA, 399 bp, Glycine max
  unsure (1)..(399): unsure at all n locations
agcttttgaagcactgtaggacaggtgcatgttgctgaatggaactatgttttcaattcctttgtagttctttttctatctttagtaaaatgtgatttgttctttgaatttcttcaacctttgtccaatgttcacttgattctaatttatagaatgagcaatttagatggtattattgttttgtctgataaagcagaatgttaaatgcaatttataagtatatatttatcagtaaattggcattcattcctgcaactcaatacaattaaacctattgtatctatgctaaataagaacttaaaatgaactatataaaattatttaattgcacgaatganattatattcatctaagagcttcaattatttgaattacgcagcaattntatgaacgctgttg

SEQ ID NO: 289612 - DNA, 422 bp, Glycine max
  unsure (1)..(422): unsure at all n locations
tgtatgagttagtttatgtgtagttattatttgaggganagatctttagatagttaagtagttataactagctgagtttgttgttgtaagctccctccatgtatgaaaactattcattgtaaatcattcaaaggtgatcaataatacaagtctcattctcaattctttattaattcccctctaaatagaaactctgtgtgtgtaaaccacccttgctccaatagatttggtatcaagagccttgtgcgatcaagggagcttctgctgaaactgagagaaacgttcattattattgatcattgttgctacaaccatggctgggaattcgtgttttctaagaaatttaccaatacttgatggcaagaattgtggacgatggaacattcaaatgaaggtaatattttggtttcaagatgttcttg

SEQ ID NO: 289613 - DNA, 394 bp, Glycine max
  unsure (1)..(394): unsure at all n locations
agctattcttcgtgggttgatgggttctgtctcatagaatggcatgatcactggctgacatgttctcaattaactcagttgcttcttctggggtcttcagttttatctttccccctgcagaagcatctaacaattgcttggtttatggtctcaacccatctataaacatattaaatcgaattggctcataaaacctatgggtgtgagttcttctcaataaacctctgaacctctccaatgcttcactcagagattcatcagggaactgatganatgaagagattgcagctttcccttccgcaatcttggactctgggaagtatctctttaggaacctttcaacaacttcttcccatgttttcagactgttacctttaaataagtgaagccacct

SEQ ID NO: 289614 - DNA, 455 bp, Glycine max
  unsure (1)..(455): unsure at all n locations
tcaacccctcaccctttctcttccattntgtgtgtgaagatcttcaatggtatgtgggggagttcttcttaatgaactcagttcttggtttcctttgggagaaggcaaccttggtgtaatgatcctccatgcgtccgcatttaaaaatcttaagttttgtgaaaagaaaatatagtttaaccaaatttgtttttgtgaagctgtgatgaattcttgcagactgcttgttttcttcttcattttttgctctatttgtgattgggagagttacaaataaaaaggagactctgctcaatctttttagaattttttcacaagcttaagtttagaaatttggggccatgagaatggtgagattgactggaagattgagttctctggactagtctcagtagttcaagcctatcttanaatctacccattggtttttcatgaaattggtctttntttgcttt

SEQ ID NO: 289615 - DNA, 390 bp, Glycine max
agcttggacaatggttgggaaatcttgctaaaatcctagataaatctcttgtaaaacttggatgtcgcagaaaagaacgtacttcccgcacagatgcgtcgtaaggaagagaagtaataacatcgatctttgccttatcgacctcaatacctctactagagactgaatgccctaagactatacctccatggaccataaaatgacatttttcaaagttaagaacaaggttagtctcagcatcggtcaagaactctacagaggttatccaaacatgcatcaaaggaagaaccataaacaatgaaatcatccataaacaccttcatacaactctataataaatcagaaaagatactcaccatgcacctttggaaggtgccaggagcgttgcat

SEQ ID NO: 289616 - DNA, 462 bp, Glycine max
gcttgagtgatattgtcacagaatacacttgaggcacctcctctatttcatccaccccacttgaattctagtcgcgcattagttaaaaaggtgtatatttttacagcattgaggagaaataataatcaagggaataatcattctattttcaaaataataattgttacagctgtcatgaattactagtagttagttagagggggtaagaaaataaataggaaagactgacagagggaggagaataataaatgtaagaagagttggcctctcaaagagctaagttaggattgatgcagctcttgctacttcatgtattttgataaagaactatccaaggaagaaaagtttgacttaagtgagctcaaattggatggactaatcactagagcaaggagtaaaagatttcaagaagagtttgtcaagagactaaattctctcatggagggaaaagaagaagaagtg

SEQ ID NO: 289617 - DNA, 411 bp, Glycine max
agcttgatccacctgcagttggcaaaatagtggcatatgtggaaaacaattaattaatacaacttttttgtgcaatggaaatgaaaaaaataaggatgatatcttgtaaatggaaacttggggattgtttggttggaccaatttatgcagatacatatacattggaatttatttttctgaggttaatttcagtcatgacctcttggaagtaattatgtcttttgcttctttggatattttgtggttcccattcctaattcattttttaatatctgccacagggtcaaaatcagagttttgatcttcctattaagaaaaggagtgacatctgtacaataatgtatactagtggaactactggtgaccccaatggagtgttgatatcaaatgagagtattattactctcttag

SEQ ID NO: 289618 - DNA, 453 bp, Glycine max
  unsure (1)..(453): unsure at all n locations
tattaaacaaatagttgattnttattgtaattntagctgtttatttgttaatttacagtccttatagtaaaacacaggtagaaacgtgatatataatttctctggcagtttaatttttgaagctgtgcatgttaaacaatccaagaagaggtgagtagttattatgagatggcgcaatttgcagctccaactaataaggctggttacgtacgcagacggagcacatggtccctcagagacttattaactttacttgtctaattcactgcttatggcgcatcacgtgcccctactcttaccattaaggacttggatactaattgcaaaactttntttctcctatttttaccagtaaggtcaagtgtttaaatagattgtaaattactagtatnntgattttttaatatgattatatacacattattggagaataaatgcaagtttctgtattct

SEQ ID NO: 289619 - DNA, 325 bp, Glycine max
agctataaattttgatttaaaacgttcagaaactgctggtaatctattaccatatatgtgtgatctattacacagggcaaattttgaatgcaaatgttatatagctgttgtaaatcaggattggctcactggtaatatatgacatcctctggtaatcgattaccaaacagtttgtagtatgcaaaggactgtgtaacttacatctcttggacaaaccttgtgctacttcaataggaagacccttcctatttaatataccctttataagactctatatactgtcttgatcatccatcgcgaatatcatgaattgcttggtctcgaa

SEQ ID NO: 289620 - DNA, 457 bp, Glycine max
  unsure (1)..(457): unsure at all n locations
tgtctcttcatatttaaaggcaatgaaattcttattttgcttatactccttgttttgatggtgaacttcatagactctcaagatgctcagtagctcatcccatgcaagatttttttttttatctcttgcttcttgaataactatggtctttggttcccagaccttagggaagctatatagttccaaaaatataatcatcanaataaataaaattatgacttagaaccacatattagtggatgttatccaaacctctctccatgtgatgtgtgtacaccaaagcttaaaagcttctcttgaagtgtcatgttgatttcgaacctcttagagcatccncaatgagaaatgcttacatgaattgtttaactttaagtaacgttgcttattattgtcaggccccactagtctatatttaatataanacaatattataagaatttactttctatattaaaat

SEQ ID NO: 289621 - DNA, 408 bp, Glycine max
  unsure (1)..(408): unsure at all n locations
agctntagtctctatagatcttcacacagcaaaatctctcagaactctctggaacttggacctttctctctctaaaatctctagacatgcaaagctctgaatcccagtccaaactccttatctaaaatctgatttcaggcttaaataggtgaccttgttcgtgctcgtgcgcttagcgcaattttggaccgcttagcgcacattagtgaatttcggtttagcgcgtgcctttgtcgcttatcggatggactgaagcggtgcgcttagtgagatgaagcggtgcgcttagcgaacctatacaactcatcttcttccagattcttccttgcgcttagccaatgagtgttacgcttagtgggcgctcgctaagccaatggactggcttagcgagaaggtgaanaacaacac

SEQ ID NO: 289622 - DNA, 445 bp, Glycine max
  unsure (1)..(445): unsure at all n locations
nttatccatgacttcctatggtggtgagcttattcttggctctccttctcctttaagtggcgtctcaaatcacctttactccttctccattccactgccattgatcttcaagaagcaaaggactccatttatgaagaagatccaaggcctacaagctctacatggaactacattataaatggagaatgtgtacagattgtagggctatcaacaacataactgtgaagtataggcaccccatttctaggcttgatgatatgcttgatgagttgcatgtgcaaacatattttccaaaattgatgttaaaagtggttatcaccaaatagggattagagaaggtgatgaatggaaaaccgctttcaagaccaagtttgggttgtatgagttgctagtgaatgcctttgngctcactaatgcaccaaacaccttcatgaggctaatgaat

SEQ ID NO: 289623 - DNA, 407 bp, Glycine max
  unsure (1)..(407): unsure at all n locations
agcttgtaatcgattacacatatactgtaatcgattacctgagcagattttcagaaaatattctcaacagtcacatctttttatgtggttcttgaatggctatcaaaggcctatatatatgtgacttgagacacgaatttgcgaagagtttttcaaaacaaaaaagtcttatcctcttataaagcaaaattgttttatcctcttacaaattccttggccaaattacttgtgattcaataaggaatttttgagtgctcaaattgttcaatctatctctttcaagagagatttcttcttttcttcttcttcattctgaaaagggattaagagaccgatggtctcttgttgtgaaagacatctaaacacaaagtgatgtgaaccttacngtgcacggatcgcttgataca

SEQ ID NO: 289624 - DNA, 446 bp, Glycine max
  unsure (1)..(446): unsure at all n locations
tattgctntagcactaattttcagctcgcttgngcgagctgtaactgccccaaagtgaccctttgcctataaatagccatcctaggggtgttttaaggggttccaaggttcagaaggtgagggaattttgaaaagagagaaagaagaggaaacaaagtcgaggcattgccgaattgcaaccgcgatcattccctatttcgttntcttgttctgtgttcttcgtgcaaccgtcagttagtttattttttttgtaattgaatgtgatctatgtacccttaggggtgcccccccccccttgttattttgtgcatattcatttcctccatctatcattgacgatctcatttttctttataaagttcaatcttaaccgatcactagtgttgtaaagttgtctttanagagattgaaagttaataaacaaagccaagataaaaccaactcat

SEQ ID NO: 289625 - DNA, 407 bp, Glycine max
  unsure (1)..(407): unsure at all n locations
agctntggagtttccaagtgccaattcgtcttcttccttagtccagtcttcttctggcttcaattcatcagtgggctttccttctgtgtccagcatcttgggatgttcccagcctttgatgacagctttccaggttctgctatccagtgatttgaggaaggccaccatccttgctttccagtattcatagttggttccatccagaataggtggtctgttcactggtcctccttctttctccatgttcatcagaatttatctccctagatctcactcagtgatttcgagtgttggctctgataccaattgaaattctgatactggngacagatgtcgtacaggatgtcacgacatcacgcttcagaacatgcagattgtatttgacagtgtgcacagtttaagcaagt

SEQ ID NO: 289626 - DNA, 445 bp, Glycine max
  unsure (1)..(445): unsure at all n locations
ntaacctcatcgtccctcacagtctttatatttgggagcgtatccaatccttgtgttcggactctcagccacttatgatagccgccgatgatcccattactgcttcccctaagctctctgtcctttcttcacgccgcatcccatgccttgcgaactccttggagtaccctcgcgttgtggtcactaaaaccccgtgcgatgaaaggcgtgatgctttcgtctaatggcgctcctctcatggggtagccaagctgtcttatggcgagaacgagattataattaatacaactccttgttcccatcaagggaacatttggacatccttcgcatgaagatagaatctcgattcttccttccttctagcgagggaaccaattaacagacgcccccccatgctagccaagagttggtcccaattcgcctttcctttntcgacgcacgagcg

SEQ ID NO: 289627 - DNA, 407 bp, Glycine max
agcttctccatgcaaacttcattaaagaggtcaggttttgtacttggcttgccaatgccgtcatggtcaaaaaggccaacggcaaatggcgaatgtgcaccgactacactaatctgaacagggcataccccaaagacgtgtaccctctccccagcatcaataggttggtcgatgaagcgtacgaattccaggtgctaaccttcttggatgcctacttcggatacaactagattagaatgcatcctctagatgaggagaaaatgaaattcataactaaaaatgtcaacttttgttacaaggtcataccattcggcctagaaaatgcaagcgcgacattccaatgaccaatggaccgagtcttcatacaacagatcggacgaaatgtcatggtatatatggatgacatg

SEQ ID NO: 289628 - DNA, 414 bp, Glycine max
  unsure (1)..(414): unsure at all n locations
tgaatatganaaaaaaaacgagaattaaatatccccatctttttatccaaacatctttggacgttgcttccaatatgcttcctcatgggcaaggagatggttgagcttatatttgataatggaaaattgaagagttggctcttcataataagcttctctaagggtctccaattctttttggtatgaatctatttggatgcaaaaagaatttttcagttaacatccccaagcatgcatgtctgaggaagattttccaagacttgaaaggaaatcatcattgggtgcactagtccacccctactcaaaaacaagatcaatatctagtttaaggagccaagagttttcaaagtagaatttgcttttgaacaaatcttttgtgttgacatcaacctttaaaatgattggagagtgatc

SEQ ID NO: 289629 - DNA, 402 bp, Glycine max
  unsure (1)..(402): unsure at all n locations
agcttctaagaattggggctgcaatgattgtgcgaaattctccatatagaataacagaggaccaaagaccctgtggttcctacttataacttatgaatagaacatgtgtcattgtgaaattttgaaactgataatgcttctctaaactgatgcatcacccttccctctttaactacattatcatctcataaactatgcccaccacctgcttgtgacaattcttacataaaactgaaaacaatgcttaagaatatgcgactaaaacaagtatgaacattaaacaattcaagtaattaagcatggcttcttcctcaaatgtatgttctgcagcaagaacaatctttcccttaagtcctaatttggagaanaataaaacttggaactaaaatngaaagcttgctt

SEQ ID NO: 289630 - DNA, 387 bp, Glycine max
  unsure (1)..(387): unsure at all n locations
tatttaattntcttttcctataagtgcttatggagaagtttatccaaacagggcatcaattgcatttcgttcattntgtttatttaattntccctactaagtctattcatgtcttgctgcaaattntattccaatttcttgtcttanaattttctgcattaactgccatgatctccttcattntgtattttaaaacaaatatgctctcatacgtaaagtaaatgttctcttcgaatagtttatgtttgacttaattcaatggcatttgatctatatggcgtggatctcacgtagtgggaaaaggttatgggtttgttgatgttgaattccatatataattaaaaaagaataatggatataatattctagagacccatgcactcattt

SEQ ID NO: 289631 - DNA, 379 bp, Glycine max
agcttctcaatagagttaggcaggtaactctgtaataagtcttaaactctatccctacatacattatgcaaaatatgcagttgccctccctgtagagcttgtaggccttggatcttcttcatcaatggagtcctttgcttcttgaagatcaatggtagtagaatagagaaggaggaaaggtgattggagatgccacttcaaggagaagatgagtcaagaacaagttgaccaccataagaagccatggataagagcttgaagatagaataagatgagtggagggagagggagatgatgggcacgaaatctatttctcacatgaggtctgaaatttgaagtgtaatttctcaaattatcaaagctgaataatatgcacaca

SEQ ID NO: 289632 - DNA, 435 bp, Glycine max
  unsure (1)..(435): unsure at all n locations
tgtaaaaatttatagtgacacccttcaacatacatatagtgtaacacaaattcacgtcactcagtttcactttccaaaggaattgtttaatttaaaaaccatagttggcatattttagaaaaataagagtctaagattatactaaaataggaaaacactttaaaagtttgtggggatttacagagactatttacaatgtcatagtaacaaaacatatttttccaaaactaaatttgcattccaagtacccttttcaaacttattttccttttgttggcaaaattctattntagtcgtaataaatcatttttaattaacaaagtaccttgaaaatntatgagaaaaatgaagcattctctttagagataactntacgacanttcattttcatgcatganatatatgcactanatcactaaatatatactttttttc

SEQ ID NO: 289633 - DNA, 404 bp, Glycine max
agcttgtgccaatcccacatggttggagcattcttgcaaaacagcgtgaccccaactggtctctctatgattttacctagtgagagtgacctaacttactagtgtatggtttgacttgttatgtactcctaggcgcccgacgaggtttttcaatgaaacggtaccacattgcatataggattgagtcttagtgtatttgttgcataacgcttgtgtattgatagatattgattgatttagtaatattgtgttttgatccttgagtacgtgaatgttgtgaaaatgaacgagacatgtgttgtgatgtgatgttacacgacaaagtggtggaatgacgcgaactatgtttaagtaagttgtatctcatttatatgatatgtatatctatgttgtctcatttctct

SEQ ID NO: 289634 - DNA, 438 bp, Glycine max
  unsure (1)..(438): unsure at all n locations
atagttntatgtcaagattcatgaatagttttatattacattctaattatcccttcatgccaaatcccttatggcttgaagcgtggatagtgtgcaatcccaccagcctcgtgcttaaatttaactttntattacaaaaattggggcagcacagattgaaatctagaacactaagtcatagaatctttgttaccatatactggacctattatcccaaaatcttgagctattaaagtgaagatgcatgatgattntatattacgtctctaactcccataatatttaacaatttggcacttggatgaataaattntgtttgacttctgtcatctttctgtgcttgtgtgtgtagaatgtgatagagagagatgaaatgaatgtctggagatcttgaattggaagtttatgtatgatttcacatgtcaattcactgactaa

SEQ ID NO: 289635 - DNA, 398 bp, Glycine max
  unsure (1)..(398): unsure at all n locations
agcttcacagtttattnttttcaaacttgagttttggaagaccaattactaagtctttcctaactagatgatataaatgatggatgttaatgtgttcaaccctacaatgccacaaccatgaatcatcatctatcttactcaccaagcaacttagctcatgaaaagatgcatgctcaacattcagcatataaatattacctattctcttaccaatgtggacaactttaccagatatggcttcacttataagatagcaatttctgtcaaactcaatcttgaaacctttatcgcaaagttgactaatgtttagaaggttatgctttagtgcatccatatgtagcacattctttatctgagttttgtgttaattccctatatttccttccccagttattttt

SEQ ID NO: 289636 - DNA, 452 bp, Glycine max
gcttcatgatgatgaatcaagttgattcaagtagttttgatgattacaaagatgatgacaaaaagcccaagagaatgatttcaagattgactcaacaagtttcaagaatcaagagaagtttgatttcaagattcaagagaagatgaattcaagattcaagagaagaaatcaagaagacttcacaagggaagtattgaaaagatttttcaaaaaacaaacatagcacagttttttttttcaaaacagtttttctcaaaattttctaagctaccagagtttttactctctggtaatcgattactagtttcctgtaatcgattaccagtggcaaagtttgatttcaaaagttttcaactgaatttgcaatgttccaattaatttcaaaatggtgtaatcgattacaagatattggtaatcgattactagtatatctgaacattggaattcaaatt

SEQ ID NO: 289637 - DNA, 412 bp, Glycine max
  unsure (1)..(412): unsure at all n locations
agcttgtgtgatgttgcgcgtactgatgggtaccatgagatgttttctggggtttgacccacgcgggtgttgaagagacggcatgggcatctccttccttcctttntgcccctgttgccccgattcttttggcattcgcgtttgtagaggaaacgtaatcaaactttcctcttttcaatccaacctcgattctttccccggcaaacaccagatccgcaaagctggacggcatgtaacccactagcatctcatagtagaacactggcagagtgtctaccatcatggtgatcatctctctttcaaccatgggaggagctacttgtgccgccaaatccctccatcgctgcgcatattctttanaggtttcaccctctttcttgaacatattctgcagttgagtacggtcaggagc

SEQ ID NO: 289638 - DNA, 446 bp, Glycine max
  unsure (1)..(446): unsure at all n locations
tctatggaggctggatctttgagctntaataaggtccttctttgtgattttttgtcatggagttgtagcggaagataaaggagaagaggttagaggaggcatcatccactagagaataagccatggaaagagaagcttcaccaccaacagagtgccttggataagaagcttagagaggaagcttcaatggaggaagagaatgagagagagggggtgcatgggaattgatggagattagggagagaagttgaactttgaagtgtgtctcacaagtttctcattcatcaaagttatgacaagtgttacacatgtttctatttatagcctagcacatgggaagcttccttgagaaacaatgaaggtagcttcccggggaagctagaggaagaaagcttccttgagaagttagaggggggctactcacacccctccaatagctaagctca

SEQ ID NO: 289639 - DNA, 413 bp, Glycine max
  unsure (1)..(413): unsure at all n locations
agcttgtgatgttgttgtttgttggtttggcctctggctctttcacttatagggatagtattttgcattgtgttatgttctgtaatttgcttggctttggtactagtttctaactaatgctctcatgaatgaaatatactattattaggtgctctcagtcatgggtattttagggatcatttgatgtagctatatgtttaaggacaccctcccaagacccactaaaccttgatgccctataactataccacccagctaactgcattttgatgatgtccatcagtcacctcgtcagacacatgtaggctgaagtagtaacttgtggttntgtggaatcgtgtccccaggattagacctctccagaggagcatttcgaaacaattatttggtctagaaaaggtactttgatgtaa

SEQ ID NO: 289640 - DNA, 462 bp, Glycine max
  unsure (1)..(462): unsure at all n locations
gcttctgcatgtctagagatttctagagacagaaaggtccaagttccagagagtttgagagattttgttgtgcaaggacctgcagagaccggagcttgaagaggaagttgtcctgagagcttgagatgtgtttgtgagtgagtgtgaggtcctagaggtggaggaaacatccccactacttgtatttcttcaatccttcatctttctcttctctttgttgtaaaggaagcttcccagttatggagagctaaatcgtctgttgtttcttccttgtaggtacttgatgtaaatacctatatatctatttaatgatgttttgtgtgttcactgtgctatcagaacttcattctaccatgcttttgtcttgatcatgtagatgcatgtgttaataggatcattcaacagtggaaactggtttgattcttanaacttgataaggcagggctagtttatcgtattatc

SEQ ID NO: 289641 - DNA, 412 bp, Glycine max
agcttggacgaataaggtgatgcacttaggaaacacaacaacaaacaggtatgaaaatgttcattttttattagggttgatgaattcatggattttaattgttttttgtgtatttgaaatgtagggttgaatttgctcattgttatttgggatgccatgaacaacatgataacgctgcaacacactgaagttaaggcatcctttgagacaaatacacatgtggttgtacatgtttttaaagttaccttatacaagaggctacttggcatggtatcaaggtatgctttaaatcagattgctgctgagtatggccgtgcacattatgctggaaaaaaacccttctcattgtggatgtgtgataagaactacccacggtcttccatctgcatgtgagctattgaagtatgctctt

SEQ ID NO: 289642 - DNA, 441 bp, Glycine max
  unsure (1)..(441): unsure at all n locations
ctcaagcttggatttcctttgctctggaaacctctcctttcttatgtgaacccaaacccatctctccagattggaaaataacctttttgtgccccttgtttgcttgtttaacataactctcattcttcttttcaatttgggccttgactatttcatggagctttttcacatagtccactttggcttccttccttatgcttaaaaactgaaatattagacattggtaacaaatcaagaggagttagtggattgaaaccataagcaacctcaaaaggagaacaactagtggtgctatgcacaaccctattatgagcaaattcaatgtgaggtaagcaaacttcccaatttttaagattctttntcaaaatggtccttagcaaggtacccaaagtcctattcacgacctccgtttgtccatcccgttgagggtgacaagtagta

SEQ ID NO: 289643 - DNA, 405 bp, Glycine max
agcttgtccttctattgttacattctccccacactgcaagttctgacttgaaaaaaaaaaattatatcatgcaaatgctccaaatgaatgtggcacgtttctttttcaattctcacaaagttatgttggatcatatctcccaaaaagaaaaagaaagaaaggaaaaagttaagttggatcatggtatgcataattgaatcaattgggcaaaaattgacaacacaacatgtgatcaataatgttttgttaaactatgaaaaagaaaggttttgttaaacggtgcatagggagttctgctttcagaatctactactattttttctgatttcagaatcaaaaccataaaaggctacaaacaattacagctagttaaccaaacagcttgcttcaattcctcatctcata

SEQ ID NO: 289644 - DNA, 446 bp, Glycine max
  unsure (1)..(446): unsure at all n locations
tgcccagagaaggagtccacggaggaaatgcttaccaccttttaagactggaaagcggtttctaatgactcctctgcggcctccacataaggcatagaggacgggcagctcaccaagatgtcttcttcgcctgatacgatgaccagatgcccttccactacgaatttcaacttttggtggagtgtagagggaacaacccccactgagtggatccatgggcgccccaacagatagttgtagggggggttgatatccattatttggaaggtgacttgacaggtgtgagggcctatctgtactgggagatcgatctctcccctaacctctcggtgggtgccgtcgaaggcacgaaccaccattgaccttggctntaagtaggaggcattgaatggtaatttctccaaagtgctcttatgcatcacattcaaactggaaccattatcgat

SEQ ID NO: 289645 - DNA, 410 bp, Glycine max
  unsure (1)..(410): unsure at all n locations
agcttgcacaacaagtaactaaatctgtttttgtttttttttacaaaataaagtaactaactaaattccactaatatatagagtgactactcagaaggaagggttaggcattgattaggtccatctaatctacctaattaaactatttacacaacacaaagcccaacttcgcaacccaattattaaagtgcagaggttctgacttccaagccgaatttgaccctcaaaatgacagaaatgacccaagctaattttgaaaaaattgaagatctttttcttagctnttcagagactactcacacaccccatttggagttctacaatgtactatagactctgcacaagacaaataggtcaagtgagcataaaattctaagaataagccacaattattaattaagcttaatcat

SEQ ID NO: 289646 - DNA, 445 bp, Glycine max
  unsure (1)..(445): unsure at all n locations
tcttatccaaggctcatcttggtggngaatctccttcttcttggcttattttctagtggatggcgcctcctctcacctgttctcctttgtcttccgctgcatctacatggtggaaaatcaccattaaaggacctcattgaagctcaaagatccagcctccatagaagccccacaagcaagcttccatcaagtggtactccaccttggaaaggatttgacctcaaatcccgaggttctttatactctgggctccttccctcaacacctgtaaaaagaataaaaacatatgtattagcggtgttgggttacagtagggtaaggtctgaaaacccctttcatggacatcttcccatgagggaacatggttcctcaccaattcaatgagtggtgctacaagtatagaagaatatgggacaaaccttttgtaaaagtttattaagtcatg

SEQ ID NO: 289647 - DNA, 405 bp, Glycine max
  unsure (1)..(405): unsure at all n locations
agcttggatttcctttgctccggaaacctctcctttctcatgtgaacccaaacccaatctccaggttggaaaacaacctttttgtgccccttgtttgcttgtttagcatagctctcattcctcttttcaatttgggccttgactctttcatggagctttttcacatagtctgttttggcttgtccttccttatgcttaaaaactgaaatattacgcattggaaacaaatcaagaggagttagtggattgaaaccataaacaacctcaaaaggagaacaactagtggtgctatgcaccgccctattataagcaaattcaatgtgaggtaagcaaacttcccaattnttaagattctttttcaaaacggtccttagcatggtacccaaagtcctattcacgacctcc

SEQ ID NO: 289648 - DNA, 443 bp, Glycine max
  unsure (1)..(443): unsure at all n locations
taaggagacaagcctagatgactatgtgattgacctatggtttaccctgtttaacatgccaagccatgccttttaggattagagttgcttttgaaattntaaccaaaaatggttaaagtaagtttaaaccaaaaatggaaactcatcctatcctaatcccttagatagaggtgtgtaaccttccttggattttgtgtaatttgagtgaaccttgcacaaagtccactctcatagagcaaaattacactgtcactcaagacatagtgtaattctttcacagatgaaactttagctcataaattntttatatctctctcaagctatgtattntaagacaattcctagttataatttgctaacacattcatactaaaaaacaatggtgcatacgttaactgatatctataaaaatatatacaaatacttaagtatttaatattaat

SEQ ID NO: 289649 - DNA, 412 bp, Glycine max
agctctgcattatcgagaggaagcacttcctccaccaccttgtgattatgagagataggatttgttggagggattttgctggagagaattgaagcctcaaaccagaatgaatctagcaacctcagaacatgttctgcagccattattattactgtcacaaaatgaatgaatagcttaaattgaaattagatcctacaaagatatgatgaggatagaggagattatagagataagattaagatgtgtgtcctatgtggctatttatattaagagtggcattacttaattgccagtggctctatatgctgttgttttattcccctattttattcgaatatgcaatatgggaaatctcacgaagctttcttcttatgtttgtctggttctgagaaaatgatgaaattaatatctc

SEQ ID NO: 289650 - DNA, 471 bp, Glycine max
  unsure (1)..(471): unsure at all n locations
agctctgtacgtctgatacttgctttacgcgtccttagatactcagctgttcggtggtctacacttacctcagattaaaagttttttctcttctttgatacataaatgaattggttaaatgaacctaaaagatggtttttttttttataaaaaacatttgggtaaagcagccaattcttaagatgctttggtatcccgctccaaatggtacattcttgttacacaactgttgttctgaacgtataatatattgtaatcaacgaaataaaattactatcaatcaaagatactagggcattaacataattatgagtggattagttggaattaaaaaaaaactgantaacggggttgattgaatttaactaaattcaattataacctttttctcagtaactaactaattacaaaaagcaacacaagactcgatgagtgtcttcatgccccaaaatatgatactatgttacatag

SEQ ID NO: 289651 - DNA, 387 bp, Glycine max
  unsure (1)..(387): unsure at all n locations
agcttatcaccacaagttatttctgctaagcatgtcttaaatagtaaagcattgtaacaaatcttgattttacacacacacacaaacatatagtggaaatacaagaaattataaactttaatatagaagtactagacattgccaatctgaagtgagggagaagaaaataagtactgttgaagatacacaagtacatactatcttgcactgaaaactggttctgtgtcaggtgatggttgtgtccttcgagtgtatttgagtagcaacccttctgaagaaagacctggtaccttcagatctctgaaacatctcataaggggttaattcanatgtaaaaaagatgatacgtntgaaggtaaaaataattatgagatgttcacctgatat

SEQ ID NO: 289652 - DNA, 394 bp, Glycine max
  unsure (1)..(394): unsure at all n locations
taactgttttgtaaaatggaacatatgaactaaatcatgtttgtgataacaagatatgttntaaaccaattctattatatgcatcaaagtatgaaaaatttcataaaacatgaaaactattttgttcatgaaaagctcaaattaacattttgaacaatagctttctgaacacaacattttgagtactgcatctgcataacataaattgggtttttcataataacagtattctaagagacattaggttctcacaattgggttttacataacattttgaacttgagcaaatgtgattgacattaggttctcacaaatcatatcaaacatttaataatgagtataatgactaaccacttagaaagcttagctatctaagtacttgaacctctatgtc

SEQ ID NO: 289653 - DNA, 404 bp, Glycine max
agctttatgctgttcaattgcttcagattgttgcaaagaaaggcaaaggtctgtgtggtggtcgacagaggagcataaaccacagagtctggcgataggtgcagttttttgattcatggccagttgggttaccaggttaaccaaggcatctagtttaccttcaagcttcttagtctttgctaatgaagatgaattcgtggctacttcatgcactcctctaatgacaatagcataatttctggcactaaattgctgggagtttgaagtaatcttctcaattaaatttctggcttcagtaggggtcatgtctccaagggctccaccactggcagcatctatcatacttctctccatgttactgagtccttcataaaaatattggagaagaagctactcagaaatct

SEQ ID NO: 289654 - DNA, 409 bp, Glycine max
  unsure (1)..(409): unsure at all n locations
tgagatgaggaagtgttaaagggtgaaacttcctgcttttattgttgaccacagagtggtacctggagatatgtcgcgngggtcaggagaccttgtggacgtcaggtggggtgctattgcccanaaccaagcttgaccaatcccgacccaacccggcatagtcggtcagtgagaacctgtgatgtacctaagcaggcgagctcctggcagtcaacagataaacgganaacaagaccacaaagcaaggaggcttgtggtggctggccaactgtgaattttgtgtgatatgtggattatgacctctggtaatcgattaccaagggtgggtaatcaattacaaggcttanaaatgaagacaggaggctaagatggtctctggtaaatcgataccaaggggtgtaatcgatta

SEQ ID NO: 289655 - DNA, 205 bp, Glycine max
agcttctatcctatggacttaccttgaattaattcctttgatagcccctttgagcctattttcccatttctttgttttgaagctcattacaagccttaagtgaaaaaccatgatatcaccttacccttaaggaattttggagctttggaattgttttgggaataagctgggaataagtgtgtggtgggggggggggttttaaaat

SEQ ID NO: 289656 - DNA, 349 bp, Glycine max
  unsure (1)..(349): unsure at all n locations
tatatatncaatagtatttatatggtctatntatgtatatgtgntatatttgataaatgaatagtttgaggtagtataagataacaattttgtatagtttagtttgaattgttaatgttatatatgccagattatnttttgataaatgaatagttttaggtagtataagataataattctgtgtaatttattttgaattgttaatgttatatatgccagattatattttgataaatgaatagttntaggtagtataagataataattncgtatagtttagtctgaattattaatgttatatggtagatatgatatacggttatatgataaattagtgtcgcaacctacc

SEQ ID NO: 289657 - DNA, 394 bp, Glycine max
  unsure (1)..(394): unsure at all n locations
agcncgctacattggataacatganaaactgtctttgcagagacagagagggaaagatgtgaaaacccagttacctaggggaattttgcgatccgctccgagtaaactacactagtttggcactaggtttgatgacatgtcaatgagttacttacagaaatgatccaacaattgaatcagctcggctaagggtctggttttcgattcaaccagccgggccgagccgagtttaataacactgattgngtgggttccttacttagtattgaaaatcctgctttcaatttgatagtaggtagtaaagttcttcttcatggagtatgtctcattaagattctcccgcatttcacaaatggaggtagaaaacatacaattacagcttattttttgaatc

SEQ ID NO: 289658 - DNA, 369 bp, Glycine max
  unsure (1)..(369): unsure at all n locations
tgatgatgaaccaagcaattntgatgatgccaaaagcccatgtgattgattcaagacttcaagatcaagcatcaagaatccaatccaagattcaagagaagaaatcaagacgcaacatgtcaagacttcatataggataagtattaaaagaatttttcaaaaaccaaatagcacagttttgttttacaaaagaattttctcaaaattntctaagctaccagagtgattactctctagtaatcgattactagttatcagtaatcgattaccagtgaccggtttggttntcaaaatgttttcaaatgatttataatgttccaaaatgattntcaagtagtgtaatcgattacactgtattagtaatcaatt

SEQ ID NO: 289659 - DNA, 412 bp, Glycine max
  unsure (1)..(412): unsure at all n locations
agcttgtatcggacatctgtgtgaaaagntatgaccattggaattttttatgagcttccattnttaaatttcgagcctctcaacatattatgcgcccgaatcggacatccgtgtgaaaagtcatgatcattngaatttctcgagagtttccgatgtttaatttcgagcgtattgatatattataaccctgaatcggacctcagtgtgacaagttatgaccatttgaatttgacgagagcttccgttgttcaatttcgaatatcactatatgtgatgcgcctaaattggacatccgtgtgaaaagttatgaccatttgaatttctcaagagcttccgttgttcaattctgagcgtctcgatacgtgattngcatgaatcggacatccgtgtgaaaagttatgaccatttgaat

SEQ ID NO: 289660 - DNA, 371 bp, Glycine max
ttcgtcttcttctattgtccagtcttcttctggcttcaattcattagtgggctgtccttctgtgtccaacatcttgggatgttcccagcctttgatgacagctatccacgttctgctatccagtgattcgaagaaggccaccatccttgctttccaggattcatagatggttccatccagaatgggaggtctgtacactaggcctccttctttctccatgttcatcagaattcatctccctagatctcactcagagatttccagtgcccgctctgataccaattgaaattctgataccaatgccagatgtcccacaagatgtcacgacatcacgcttcagaacatgcagattatatttgagagtatgaaca

SEQ ID NO: 289661 - DNA, 406 bp, Glycine max
  unsure (1)..(406): unsure at all n locations
agcttttccattttttgcctgatgcctgaaatgtcttttttgatgttagtggncctagatgcacggaagaatttctccaagaacaccctcttaaggtcatcccagctgaaaatagacctgagagcaaggtagtataaccaatcttttgccactccctccagagaatgaggaaaagccttttgaaagatatgatcttcttggacatcagggggcttgatggtgaaacaaacaatatggaactccttaagatgcttataaggatcttcacctgcaagaccatgaaacttgggcagcanatgtattagtccagtcttgagaacatatggaacacccttatcaggatattgaatgcataagctntcataagtgaaatcaagtgcagccatctccctaagagtcctatcac

SEQ ID NO: 289662 - DNA, 443 bp, Glycine max
  unsure (1)..(443): unsure at all n locations
actagtcacttaaaaagtttttgtctttcgtaaaaatctttanaaacaagtcactggaagaattgtgacttttggaaatgtatctatcgaaatcagtcactggtaatcgattaaatgtgactcttcattctgaattttgaanattaaaacgtttagaatgtctggtaatcgattacaagtgttgtgtaatcgattacacaagtttataatgatntaaaactgttaaacacaagttgtaacttttgaaattcgaaatctgaacattttaaactctttggtaatgattatgtgaaaacttcttgtggtattcaatgttctgacaagcttttttagtacttatcttgattgagtcttctcttgattcttgaatcttgagtcttgaatcttgatcttgattattctagaatcatgattcttgaacttgattcttgaatcttggattt

SEQ ID NO: 289663 - DNA, 404 bp, Glycine max
  unsure (1)..(404): unsure at all n locations
agcttgtttcttatatgttcatgaaggacaaggcaaccgaaggaactagttccgctccggagtatgacagtcaccgctttaggagcaccgtacaccagcagcgcttcgaggccatcaagggatggtcgtttctccggaagcgacgcgtccagctcagggacgacgaatatactgatttccaggaggaaatagggcgccggcggtgggcatcactggttactcccatggccaagtttgatccagaaatagtccttgagttttatgccaatgcttggccaacagaggagggcgtgcgtgacatgagatcctangtaaggggccagtggatcccgtttgatgctgacgctatcggccaactcctangatatccgttggtgttggaagagggccaggaatgtgagtat

SEQ ID NO: 289664 - DNA, 467 bp, Glycine max
atctatgtatctaacacccctcaatttattggattttcaaggtttgagaagtgaaaatgagaatggggtaaatttggagcaaactctcacctcacacgagtctatatcatcaatctaaacttgctcaaactggttttacgacgaaaattctaccgaatcaaaatttgactcctcaacacccaattttaccctacaaatggctcttgccttcattttggtcatttgtttttctctcttgcacagcccaagcttcctcataagtcctaaatgacatttcaaactaggattaactccctgtaacctccaaataccactaaatccagacttggccttccaactctcacagtctcactctatttccactcataacactacattctcactgtctaaccctatgttaactctacccttcatgcctagcagttttccatccacaatttcagcacataaacatcacaagcatcatc

SEQ ID NO: 289665 - DNA, 411 bp, Glycine max
  unsure (1)..(411): unsure at all n locations
ttcttgtgttcttggcaatttctttaaaactagtcacttaaaaagttgtgacttttgaaaaaatcttcagaaacaagtcacttgatgaattgtgacttttggaaatgtatttttcaaaatcagtcactggtaattgattaccattaaggtgtaatcgattacacatcaacagatatgacttttcattntgaattttgaaaattaaaacatttagaagctctggtaatcgattacaagtattttgtaatcgattacacaagtttaaaatactttaaaactgtttaaacataagttataactcttgaaatttgaaatcttagcgttttaaaacactggtaatcgattactaccttctggtaatcgattaccagagagtaaaactctttggtaatgattctgtgaaaacttctt

SEQ ID NO: 289666 - DNA, 405 bp, Glycine max
  unsure (1)..(405): unsure at all n locations
gaagctagatcttagctacacatacctctctaatatgcttatctcacctccttgagatgagaagctagagcttagctacacacccctataatagctaagctcacccccatgacaaaatacatgaaaatacaaaaaaaaagtccctactacaaagactactcaaaatgcctcanaatacaaggctaaaaccctataatacttgaatggccaaaatacaaggcctaaacgaaggaaaaaacctattctaatatttacaaagataagcgggctcatacttagcccatggactcaaaacctaccctaaggctcatgagaaccctatggccttcccttggatctctggcccaatctacttggagtcttctatccaatgcccttggagggtaggattgcatcacctatcac

SEQ ID NO: 289667 - DNA, 413 bp, Glycine max
  unsure (1)..(413): unsure at all n locations
agcttcttatttttttcctataaataggggaaggagggaagaataaaaatgttcaaccctcctggtatttgagattcacttaaaattagtgagaaaaattgtttccgtgaagaaaattcaagccgaggcgcttccgtaacgcttccgtgacgtttccgtgggtgattttgcaaagattntcaaccgttcttcgtcgttcgtcgttcgttcttcggtcttcaaccggtaagttcccgaaatcgaacttttcaattcattctatgtacccttagtggtcctcatttgtttcgcgtgcttttattttcatttcatttactttctgtacccccttatgacgtgcgttagtcatttatttaagtcattatctcgcctaatcgaaaaataaaataaatttccaccgatcattcgtattg

SEQ ID NO: 289668 - DNA, 404 bp, Glycine max
  unsure (1)..(404): unsure at all n locations
ctatagaacactcacgcttgttganatccatggtttttacatagganacagnatctcataaattttatcctttttacatagngttctagagcaacaatactctgttttgtttataatgaaatctggaaccaattctaacactagcaagaaagctccaattctaggagctatggggaaatcttagtgctgtgcaagaaacaaggagggttcatgatgtagcataccgaatggagggattaacagaaaagttaaaactttggagaacttggtaccacatcagaaaaccaagactcgcacttgaggatgaggaagactggagagatgttagagcgcataatggcttcccccaacaggggtcccaaaacatctgcagggcattcagagggcaatgcagagcataatac

SEQ ID NO: 289669 - DNA, 406 bp, Glycine max
  unsure (1)..(406): unsure at all n locations
tgttttatgatgaatcaacaatgaaacaaagggggggngatgattacaangangacaacacaagaagaagacaaaggggangaacaaaaagctcanaagatcaaagaacaactcaagggaatcaagaacaactcaagagtncaagaatcaagatgaattcaagactcaagaagaaagtctacaatcaagaatcaagattcaagattcaagatctcaagaatcaagatcaagattcaagactcaagattcaagaatgaagaaaatactcaatcaagataagtattacaaaggtttctcaaaactatgaatagcacatgagtnnttgacaaaacctttaccaaagagtttttactctctggtaatcgattaccatattggtgtaatcgattaccagtagcaaaatgag

SEQ ID NO: 289670 - DNA, 144 bp, Glycine max
  unsure (1)..(144): unsure at all n locations
ctnntgaatgggctctattcaatgnnngagttgacaagaaaatatcttctttatctgttatcatacacatgcccacagtggccaaagatgcagtgggtagatctctgannaannncactcatgataggatacctcnncaaagtg

SEQ ID NO: 289671 - DNA, 364 bp, Glycine max
  unsure (1)..(364): unsure at all n locations
atttngtgatttatatcttgnatcggattaatcaattactgtcttatcataatcaattacatagttgtttttgagacaatgacagatttattcaggagtctctactttaattgattaccatgtgatataatcgattacttctctttctgtaagtgattcagatgtgaacaaagacactttaatcgattactttgagtatctaatcgattacattgttcttgagttgtntccgggggtnnggaaaaacactttaaacgattaaaaagataatctaatcgattacttcattgaattagtcaattacttcttcaattatgcaaggttttgcggacaggattgatcgggtggtatctatctatactct

SEQ ID NO: 289672 - DNA, 131 bp, Glycine max
tctataatactcagcttgaaatcgattcttgagaggagttgcattacttctttattgcctctgcatgtactagaatctggccttggcttgaagctattgcatgtttaggaacttctagagagagaaacgtc

SEQ ID NO: 289673 - DNA, 208 bp, Glycine max
ttcttgttgccttggatcttcttcatcaatggagtcatttgattcttgaagatcaatggcaacagaatggagaaggaggaaaggtgattggaaacgccacttcaaggagaagatgagtcaagaacaagctcaccatcataggaagtcatggataagagtttgaaggtaggagaaaatgagtggatggagagagagagggggggggggg

SEQ ID NO: 289674 - DNA, 455 bp, Glycine max
  unsure (1)..(455): unsure at all n locations
tccgttcccgagagcatctcttatttaagcatttcagcctttgttttcgtgtagcttaggaaaaacgtcatttcttcttctttctttcttccaaagccatttctaaagttccaagaactttctccatcacccacaaccaccattagccaccacaaaccatcgttgttctccacatcgagaggaacccttcaaccgaagcggaatcttccaacttggcttgcggtttcggtagagaacgaaaccctaatctgacctttcattttctttcgaggtaaccatggttctacgcttgtttcttgttagtttcatcttgtctttgcatcttttctgactttggaaccgccattgtatgtcttatgcttcctttgaaaaacttttgagaaagagactntgtaaacgttatcctttcatgaaatgcatgttattttcgtaacctacactgaaccccggtcaca

SEQ ID NO: 289675 - DNA, 371 bp, Glycine max
tttcttttttgttcaattatgagtgggtcgatatatgatgcgcctgaatcggacatccgagtgaaaggttatgaccatttcaatttctcgagagcttccgttgttcaatttcgagcgtctcgatatgtgatgtccctgaatcggacctccgtgtgataacttatgaccatttgaatgtctcgagagcttccgctggtcaatttcgagcatctcaatatatgatgtgcctgaatcaaacatctgagagaaaagtatgacaatctcaatttctcaagagcttccgttgttcaattccgagcgtctcgatatgtggtgtgcctgaatctgatatccgagtgataagttatgacaattttaatttctccagagct

SEQ ID NO: 289676 - DNA, 414 bp, Glycine max
  unsure (1)..(414): unsure at all n locations
ntcgagaatntaaaattgtcataacttttctctctgatgtccgattcatgcacatcagatatctagacgctcgagattgaacaatggaagctctcgagaatttaaaattgtcataacttttcactcggatgtccgattcaggaacatcagatatctagacgctcgaaattaaacaacggaacctctcgagaaattcaattggtcataactnttcactcgtatgtccgattcaggcgcataatatattgagaagctcgaaattgaacaacggaagctctcgagaaatttaaatgatcataacatttcactcggatgtccaattcaggcgcatcatatatcgagacgctcgtaattgaacaatggaagctctggagaatttaaattgtcataacttttcaatcggatgtccgattc

SEQ ID NO: 289677 - DNA, 372 bp, Glycine max
  unsure (1)..(372): unsure at all n locations
tgctttttgcatgagaacaattctcaagttgtggtaccaatcatcataattggctccgactagtttttcagattcaagaataccacgaagcgataagcgatagagaagatatactgttgattaagcacacaacaaaatataattatgtcagagcataatttttcaaaccttttaaaaaatataaaaatattaatgatatttctaataataatattgaaatgtaagagatacttatttcttttaagtggatcatataaagcctcttacaaattatgagtgagccacttggttatcaagttgtttctcatacacattataagacaatgtatcatatacattttcanatcaaaataaaaaataccatatcacata

SEQ ID NO: 289678 - DNA, 467 bp, Glycine max
  unsure (1)..(467): unsure at all n locations
ctanatgggtattgaatatgaattttatcttctgcagctngcagtgttatgttatgtgttttgtatttattctatttagatttgtttttctatgttttgcttttccgtaatatcttgtagtggttaaagcgtgtatatcagagaaatatatatgggatctatgatggttntcagagactgcattatctatctgtagtttcttcaaaggagttgaagataatcgtaattgactgagatcttgcttggcttgtagttttcgtcgattccattttgatttttgggggagaaaactatgcgttttgggtcacacttgttggcaaaacatttgtttaacaatctactatttcttcaaggtgcttcatataatggtattgcagtcttgaattgagtctcttgagttatcttgngaaatgatattttgaatacaattgtaaattttgtgatgcanataactaaataatctgatg

SEQ ID NO: 289679 - DNA, 382 bp, Glycine max
  unsure (1)..(382): unsure at all n locations
agcttgtctcctctgagttttccgactatgctcttgtgtggtggaacaagctacaaaaggagagagcaagaaatgaagagccaatggttgatacatggacggagatgaaaaagatcatgaggaagcggtatgtgccggctagttactcaaaggacttgaaattcaagctccaaaaactaacccaaggcaacaagggggttgaggagtatttcaaggaaatggatgtgctcatgattcaagcaaatattgaagaagatgaggaggtaactatggctcgatttcttaatggtttgactaatgatatccgtgatattgttgagctgcaggagtttgttgaaatggatgatntgcttcacaaagcaatccaagtggagcaacaatt

SEQ ID NO: 289680 - DNA, 404 bp, Glycine max
  unsure (1)..(404): unsure at all n locations
tactcaagcttgaatcgacatccgtgtganaaggtatgacgatttgaatatctttagatcttccgttgttcaatttcgagcttctcgacatattatgcacccgaatcggatatccttgtgaaaagttatgactatttgaattttccgagaatttccgatgtttaatttcgagcgtatcgatatattataagcttgaatcggacatccgtgtgaaaatttatgaccatttgaatttctcaagagcttccgttgttcaatttcgagcttctcgatatgtgatttgcctgaatcggacatccgcgtgaaaagttatactaattgaatttcgcaagagcttccgttgttcaattttgagcgtctcgatatgtgaattgcctgaatcggacatgcgtgtgaaaagtata

SEQ ID NO: 289681 - DNA, 403 bp, Glycine max
  unsure (1)..(403): unsure at all n locations
agcttcttggattataaacatgggaccaactcattttatttcaaaaaagaagtcgtatctagtcaaggtcttagagaccatacaagtttcctaacgatttctaattatgtgggccattaagtctatcatatgctgacaatagccgagaagcccatgaatctcttcaggggcggagtangtgtctgccattgccttggccttggctaacaatcggggaagttcttgactcccgttcaaggtaagagcaaaccgatccatccacatggttgcctcttggtgtaaagagtcgatcacccttcctctagcctctttttccgcgtatacttgggcatattcgtccgcaatcctatgctcgtgggccgcggctagacctaactcttcttggtacttggcgatgatagct

SEQ ID NO: 289682 - DNA, 468 bp, Glycine max
  unsure (1)..(468): unsure at all n locations
ctcagctttactatgtggcgggcgggtttcttactttcttgttcctcgtgagctctgaccactgtcttcttcccgcgatgcttcttttatgtccgcctgagtgggcttatagcctaaaccatacttcccacgattcccttgggtttttatcagactagttatgccgccattgtctttgcctaaacccatcccggcttcataaccgttccccaacataactcgggccatcattaccgccgcatcggacagacaaggttgcccaaagagggagtccacggaggaaatgctgaccacctcaaaagactggaaagcggtttctaacgattcttctgcggcttccacataaggcatggaggatgggcagcttaccaagatatcttcctcgcctgacacgatgaccaagtgcccctccactacgaatntcagctnttggtggagtgtagaaggcacaactcccactgagtggat

SEQ ID NO: 289683 - DNA, 410 bp, Glycine max
  unsure (1)..(410): unsure at all n locations
agcttgtttaataattnttcaataaaatattaattgttattcaaaaaaattattagacaaaaaaaaactttattttaaaattcgttntagacctttaaatgtgttgggctgccctgcataggtttaagagtggttggaagaaaaagggggacaatgacaaactttaatagtgaaaaaaggaaggaaatgtaagggaaaaaggaagagaaacatcgaggagaagaagaaaaaaataaggtaacattgtcatgtactcgacaaaagagaatgcatacatactataagtaatgagttntttttttttctctttatttatttttatcttanatatcaatttgatcaacacgattatgtgataatctcttctgatcgacagagtcttgaggtcaatatttgacctatgctaaaat

SEQ ID NO: 289684 - DNA, 304 bp, Glycine max
  unsure (1)..(304): unsure at all n locations
acaattctaggcttgaaagatgttccaatgactctntcgtagcttccacatagggtgtagaggatggacaactcactagtatcttttcttcccctaacactataaccagttgtccttccgccataaacttcaatntctagtgaaacattgatgggaccaccccaacagaatggatccaaggccgacctagcaggcaactntaggcggggtttatgttcattaattggaaggttatctggcacgtttgtgccccgatttgaattgagagatcgatctctcctctcgcatcatgttggctaccatc

SEQ ID NO: 289685 - DNA, 397 bp, Glycine max
  unsure (1)..(397): unsure at all n locations
agcttcttgcgttccgctcttggtgctcagaanatcccaaaaacaaatccctcttattactagctattttgaattctttagttcctgaatatacaaccttcaaattgttgctcgttcccctctttgagaatgaggaggatcttcataggacttcatccagctgatgtttgtcngcantttcatcatccaccacccttttcttctgtgccttctcacgttcattggtgttaaacccatatttatgccttcttcccttcatgtcttggttgatcacaactttagctgaatctcccatcttcagcatagttgaatctcctatcttattgtcacatgccacattatgatggcctgtatctcttatgatcgtatgttccactggctcaccttcacaatgcat

SEQ ID NO: 289686 - DNA, 416 bp, Glycine max
  unsure (1)..(416): unsure at all n locations
agcatgcgttgatgttgaatatcttatagcacttagcatcaggtggagttgataacaaagctgccaaagctgcaacataccttattattaattggagcatgtgttgatgttgaagaacgtaaagcacttagcttcaggtggagttgataacgaagttgccatagatgcaacattaaattctgatgccgtttgatttagttcagtctctacaagaaattgaattntttgctccactgttgccatttcttgaaaacattnttcctcggttgttgccatttctttgtcgcattnttcttctatctcnttgaatttatcatttaattctttcacctttntcaacatgtctttnttcgattnttgaaattntatttatttttcaagagagtangtgtcgtagttnttctgtgacaatgtac

SEQ ID NO: 289687 - DNA, 417 bp, Glycine max
  unsure (1)..(417): unsure at all n locations
agcttgtatgcttgtnttctaccttcttctcatagtagaacaccggtaacgtgtctactatcattgctatcatctccctctccatcattgggggcgctacttgagctgccagatcccttcatctttgggcatattctttgaaagattcatgctccttcttacacatgttctatagctacattctatccggaaccatataagaattgtactgatactgcctaatgaaggcaaccattaggtccttccaagaatggactcgggaaggtttcatattagtataccaggtgacgacttccctagtaagactttcctagaagagatgcatcaaccaattttcattttttgagtatgcccctattttcctgctatacaccttcaggtgattcttggggcaagtagtcccattgtatttatcga

SEQ ID NO: 289688 - DNA, 426 bp, Glycine max
tggagatgatgcttcaatggaggataagaaagagagaaggaggtgtcactgttattgaaggtataaaagagggagagaagtggaactttgaagtgtgtctcataagactttcattcatcaaagttacaacaagtgttacacatgcttctatttatagactaagtagcttccttgagaagcgttcttgacaaaacttacttgagaagctactttgagaaaacttccttgagaagctagagcttagctacacacacccctgtcataactaagctcagctccttgagaagcttccttaagaagattcctaaagaagctagagcttatctacacatacctctctaatagctaagctcacctacttgagatgagaagctggatcttagctcacacccctaatatagctaactcaccccatgcgaaaacatg

SEQ ID NO: 289689 - DNA, 355 bp, Glycine max
ttcttgttttattttaaaaccaaggccaccatcttttgtgcaatttgattgcatgttgactttggtagcatgaaacatctcatcacataagaaggaatagcttgcaccactgactttattaggccactcatcctgcttttgaaaacgtcttctccttccaacctttcagcttcttccaaactctatctctagcaaaattaaacacttgagtctttgatctccccaaaatggttggaagacccaaataatttacatgtctctccactgcctttaccccataacttatcaagttcatcaattctggtactagaacacatttggatacaagagagctaagatttctctagattgatcc

SEQ ID NO: 289690 - DNA, 426 bp, Glycine max
  unsure (1)..(426): unsure at all n locations
tatactcnctccatcccataataatagtcgtgtaagaaaataattattgtcccaaaataattgtcattntagctcttcaatataatattaattgttttttttcacttatatcccttataatattaatgatatggactacaaaaactaaaaatgaattaatgatgataaggttaattttgtaaaattattattctttttcatttgcttattagttcttcttggtctgagtaaacaaactggtatgggacgacaattataatgagatgaagggagtataaactctcatccgtggtgcatacagacacacaatttcagttcaatgcctttgtttcctctttcttaagatggtattggagcctatcctaaatctattaccgataacctaccatattatccatgcaccanacccaaaaagtactgggcgtg

SEQ ID NO: 289691 - DNA, 417 bp, Glycine max
  unsure (1)..(417): unsure at all n locations
agctnttgtagattctgggtgntcttttactttcatatgcaaaagtgttcagccccaacataattgttttcgaagtaacataataactaaacctaaaactatgtttggagacataataaccaatgacacagaaacaaaaaattttactatccaattatctataaactgtgatatctttgacaacaaaatctttataaataaagcagatgttgtagatttacaaccagccaaagaaaaaatgattntaggactcaattttattgtacatgataatagatcaatcactattactaaggattatntattgatctctacaaattcacagatgtcaccaataatagatgaactcacatcagagttgtgaacaaagcatggtggtacccctattaatgttaataataaatgcccttgtgacac

SEQ ID NO: 289692 - DNA, 481 bp, Glycine max
  unsure (1)..(481): unsure at all n locations
tagaaaatntatttcacgagaacatatnagtaaatttaatatttttatgcttacatagataatataatactactatacgactattaaaggagtgtgtgtaagaaaataaataaattaatgtgcacaagagttgaacacaagatgtttttattgagggtattcaactttactagttgactntaatcgtcattgttgccttgtttagagttagatgcttatgtgaggaaatgggagatattttatttatttaatttaagataaagtctttccgttgtttactcttgaatcttgatcaatgataaagaacaaatttggaaattcgaagaanaagtaccaaaaacacctttntttcgtgtattggattatgatttaaaaaaatctggtaatataatgtaatatttaattaagaattttaggaatttttttanaaagttaacaaaatgaatttntataactntaaaaaaatctttagatattaaaa

SEQ ID NO: 289693 - DNA, 369 bp, Glycine max
  unsure (1)..(369): unsure at all n locations
attgncttatcatatgaaaattatatagtgattacattntacacatatatactataataatgagtatanttttaaaaataaagaatctaggttcatgaatcgcaaacagattcctaaagtatacttaagtaaatatatatcatatacaaaattataatctaaaatgagttgtcgtagttgtatcattaaataaatttataaatttatactacaaatcaggatcttatctatatattccaaacatgaatgaatatacactaattatattgaaaatgcaaactacaaggcattcaaagcacaaattaattcaatatttatatcacaatacaccaaaattcaaccaaaaattactgcataataatttcaata

SEQ ID NO: 289694 - DNA, 395 bp, Glycine max
catgaaaagacctatgccctttcttttaacttctccaaatggggagtctcaacagccttttgctttcccggagagtagtagagtcactctgaccttccttctcctggcacataatccttgggcttgtcagctcatcaccactcttggggagtggacctgagcaaatatcaatctttcccttgcctgagaatcctcatggataccaagctctaagttcttagagaaagcctcatagaacttggttgaatcctccttggtctctgtcattacatagaacagctcaatgcacttcttgaccaagctcttacggatgaccttcaagatcttgatctggtgcaacatttcatcttgaaatgctgagtgggagatcttcagaatcaacaataccccttgac

SEQ ID NO: 289695 - DNA, 403 bp, Glycine max
  unsure (1)..(403): unsure at all n locations
ttcngttatatttttgaagtcaaaatgcaattccaaagcagtatcatttaaaatatttaacaaaaaatattattaaatgagctaattaagatattaatataaaataataatgaaaaaatcttgctttctaattttacgacaatttaaaaaattataataagtaaaatataagtcgcatatataatttaataaactattaatttggcctttntaaatatttatttgacattgattntgcttttaatttttagtgagatggagtgagtcttttaaacattgaaaagtattaaaatctttttgtgatatggagtaagtcttttattntaattatgtaagtttgctccttacatataatagaaatggtttttctcatatattttttttatgaaatgcgagatgagtg

SEQ ID NO: 289696 - DNA, 366 bp, Glycine max
tatataacactcaagcttgtgggaagacactgatcgaatcatcatcatcaccactcttgatacagctctctctagacgcgtactttgcacgcttccttccgcacagctattcttgcactgcggtcgttggctctctatgctctcgggttgctctctcttctttacctcctacggtgcttgatatacttaaagatggtaaaggcggagttcttgcatcccgtatgggttaactacctattcgctccgtggatatcgtggattctattgcttcaatcggagccattcgtggcgccaacaacagcaacctacttggttctgtggagggtgttcacggtgccggtggtagtgctggacgtgaagatctac

SEQ ID NO: 289697 - DNA, 415 bp, Glycine max
  unsure (1)..(415): unsure at all n locations
atctnatgtatgaagagttcaaaatgagtatgatgggagaattgaagttcttccttggactttaaatcaagcaagcggacgaaggaatatgcatacatcaaaccatgtagtgaaaaaacttctgaagaagttcaaggtggacgatgcaaagcatatgaaaacccccatgcatccaaccattgtacttggactggatgatgaatcaacgaaggtggatgaaaatacatgcagaggaaatatgatatctcttttgcatctcactgcgtccagccttaacattatgttcagtgtatgtctctatgttagattccaaaaggaaccaaggaaaattcatttatatgatgttaaacgcatatttagatatttgattgaaacttctaaccttggtctttgctttaagagagaaatcgaatac

SEQ ID NO: 289698 - DNA, 430 bp, Glycine max
  unsure (1)..(430): unsure at all n locations
tagatataaacattgaacagatgataataacctcaaatatatttataaatgtttacatcaagtgctcagtagaaattcccaacaaaggattttagccctccattacaagggagtagcttttagaaatatgagaagggttttagagaaattaccagatgacaaagtagtggggatgtctcctccacttctaagaacctagaaaataaatctaacacctagaatctacctaaaagttaggacctttgcttccttgctcagcttttcctctgttctttgcacacaattcatagtcaattcaaacctctttcacattgtcatactctcttcacgctttctctttntttctgtgcaaatcaggcttaaaaatggctttctgacctcgaaggcgcgcttagcgccatcctcgcgcttagcgcgagtaagtgatatt

SEQ ID NO: 289699 - DNA, 437 bp, Glycine max
  unsure (1)..(437): unsure at all n locations
caattgactgtgtganctttganaccacctaggaaaacgcgaggcttggcagccatttgtttgcgacttttatggaaaaccgcgaggggctatgggggatttcgccgccttcgtacagccggagagggccaagaatgagcacaaaaggcgaatatgaagatagccacctaccgcaagttcttccagatcgaaccgtgggaagaaagaacctctgaaagaaagggagacatgcaaccaactaaacagtacacaagcaagccgagaaaggcacctatcatgataatcataagcctagtcgggaaaacatgagcgatccaccgcagcttgaatccacatcagagcaaattgaaacaacgactggattgtgaatgtcgcctgacatatcgcatggagacggctgagtcatatcctcacctcggaaattttgaatgacatcg

SEQ ID NO: 289700 - DNA, 357 bp, Glycine max
  unsure (1)..(357): unsure at all n locations
ttctttttattaaaaatcaataaaaaaatactaagaatatatattagtgtacttagtgttgcgttgattttatacaaataaatcatagaaattcaaaattatttattccagcattatccagctcaccttanaacgaattaatgataatataatttattaaaaatgaatacttataacgttataagatgtttattcaactaattaaaataaacaagtcaataaaaataataacaatagattggttctaccagatcggcgtcacctccgccgaanaatgtcgatcccacgcaatctgcaacaattacaatggttcatgtatagatgttgtcatcaacttttcaacaaagatgagctcat

SEQ ID NO: 289701 - DNA, 469 bp, Glycine max
  unsure (1)..(469): unsure at all n locations
ctntanatgagcttcacctttctcgcgactatcatgttgtctgtctcgtgtgcttttagtttatcctanatttatcaacgattagtcaacacaaagttaccatctcaacttcaaaatattttctgctttaaaaacacatcaaaatatatgctactttagaaaatcaagatcaattatatttattttaataatatttttgtttattttcttagtatagactatatatatctttaatcagaacattatgaagtatggaggataaaattttagctntgaatctttaacacatttacatatccaaaaatatattcattattggtatcttatgtgaaatattntattaatttacaatattatactgtaactcctttaatgaaaatattntaataaaagaacatgagaccagcttattaaaaattaaaaaatggaaacttatcacacttaaccaagctagtcaaaacaaatatta

SEQ ID NO: 289702 - DNA, 423 bp, Glycine max
  unsure (1)..(423): unsure at all n locations
agctntcgtatgtgaaatcatgtgcagccatttcccttagagtgctctcacagggtggaggttgtgccatgttctcagaatgttcaaaattataatgctcaaaatcaccaataacagaatgctcangatgctcaaaaggtactaaatgatgtctaactaatcaatgaaatgtcctatctatctcangatcaaagggttgtaagttagatggattgcctctagtcatacactatattcagcatgcacaactagttgccttcttatgcaagtaacaatgtaggtttgaactacggctaccattaaatgatatccaaatgacttgaaattntgtgagcaaccttataaaatgatgagaagatagcacanaaaatttcaaacaaaaattcaaagtctaactatagaagctaanaatgataagttaag

SEQ ID NO: 289703 - DNA, 468 bp, Glycine max
  unsure (1)..(468): unsure at all n locations
ccttccctggttagtgttntggtttgtgttattggtggtgtttggaattggatgatttaggggtggcctttatggatgattgagtgttcttggttgatagggtggtgggtaatgaaaagggttaatattggctgagtattgatattgttgagctggtgagaaatttggccatgtaggaatagtagtcataacatgggttcctccttccttctcattctctccatttgccccaggcttcctattcatcaaagcaggataatcaaattttcctctcttcaaacccacttcgatcctttcaccggtgaaaactaaatcagcaaagcttgaaggtgtgtaacccaccatcttctcatagtagaacaccagtaacgtgttcactatcattgntatcatctctttcttcgtcatntggggcgctacttgagttgccagatccctccacctttgggcatattctttgaaagattc

SEQ ID NO: 289704 - DNA, 416 bp, Glycine max
  unsure (1)..(416): unsure at all n locations
agcttgttcgtatttgagtccacggaggaaatgcttaccacctcaaaagactggaaagcggtttctaatgactcctctgcggcttccacataaggcatagaggatgggcagctcaccaagatgtcttcttcgcctgatacgatgaccagatgcccttccactacgaatttcaacttttggtggagtgtagagggaacaacccccactgagtggatccacgggcgccccaacagacagctgtagggggggttaatatccattatttggaaggtgacttgacaggtgtgagggcctatctgtactgggagatcgatctctcccctaacctctcggcgggtgccgtcgaaggcacgaaccaccattgaactcggctntaagtgggaagcattgaatggtaatttctccaaagtgctctt

SEQ ID NO: 289705 - DNA, 459 bp, Glycine max
  unsure (1)..(459): unsure at all n locations
cttcgattcaatctatgtacccgtagtggtccacattgggtntcttgctattttattctcgttntgtttactttgtataccccctcttgacgtgcttgagccattntacttaagtcatttctcgcttaacttanaaataaaataaatttccaccgaacttttgaattgtattatccattaacttcggttaaaataaattccgaccgttcggtcgtgccgtaaccacgttggaaatcaaaaagaggtaaaaaataatataataatcaaaaagacatctttagtaaaataaagcgaanaatcaatcgggcgttttctctttgggatttctcattcttaatcgaattgattaataactaaagtgaaactaaaggctaaaatcaattcgcctagtcaagctcgtccataanaataggcttttgaagtttgtcatttcattntctcactaagtaaaatggatca

SEQ ID NO: 289706 - DNA, 411 bp, Glycine max
  unsure (1)..(411): unsure at all n locations
agcttattctggctgaatgcaccngnngngcttagcgcactgatctcgtgcttagcacgtggctttgatgttgatgctctgccagattctcctttgtgctaagcgtgctgaagctgcgcttaacggtggaattagggtaccaattaaagctacatcttgaaagggtaccaattcacaccccctcttaatttgtgagttccatcatctttttcaattggtatcagagctacatcttgtaagttactcaagatcacaatttttctaaagacgggctccaaacaaacaatctttaaatcaacctcctttgtttgagggagaacattnttcctttcggcaaaagagaatgaaaatctttatttaattagttgatctcgatgcatggaatgccattgttaaagggtcctttatacc

SEQ ID NO: 289707 - DNA, 410 bp, Glycine max
  unsure (1)..(410): unsure at all n locations
aaaacttaatctgcagatccctcttgtaaagctaagttntaattctgcttcattcaagttctaaggcaacaatacatttcccaatgttaaaatcacctaactaggcacacaaatggttgattagaccaagagaatacaaaatttaagcactgaaagaagcattgaacacaagatacaaaatcaattagatatgaaataattgcatcagctgttcattagaaatccccaacaagggtgtttagccagccattacagacgaaaccctaacaataataagcttacaaaacctaagcatctctgcaaaagttgttcctcttgctgcctctagagctcttttcccgaaataagcattgtggcgtgatgtggaatattgtgccctggccttcttgttgttgttttaccctaattct

SEQ ID NO: 289708 - DNA, 395 bp, Glycine max
  unsure (1)..(395): unsure at all n locations
agcttgttaagttcccagcttggacaagtgttgcccagactgtttctgctaagttgtccaaggaggacatattttttattttacaggtgaagtttgacatgtcaagtgagtaaaattcctatatttgataattctgtccttttctgatcgttggaaaacgcattaaagacatgtgtttcgtttgtctttttccgcaggtgagtgcagcacacacacgttactcttgcttacatgtcactcgaggagtggacacatattggagacgcggtgtgtggtgcaaattttcagggtgtcatttcagctcccaccaattaccanagagtcgtacctccacttaaatagagtgtacatttggtttttgatcaccaccattttntaattcctgctntgaaatc

SEQ ID NO: 289709 - DNA, 467 bp, Glycine max
  unsure (1)..(467): unsure at all n locations
tgtgagacactagannataaagtagaaaccatgttntacacactatataaatacatagtatagtaatataaagcttgtcaatatagctctcctttgcttaaaacttatttgtctttgattaaatntagacttagcctatagaacttgagagtgtaaatttaagcatagacttagtctatgcttaaattttcattgtggctgaacaactganaatatgtcacaatgaaaatttaagcatagtgttgtaaatttaagcatagacttagtcgatgcatgatcctttntttctctgaataaccttagcataatgtttaatagcacattaatctgtgttaagctgcatttttcttataacatttgaagggtctggctacattgagcacataaatatactgttgtagtagacttcacctcactgngaagaccccataatctacgcanaaataagtntgattctgcatttacta

SEQ ID NO: 289710 - DNA, 417 bp, Glycine max
  unsure (1)..(417): unsure at all n locations
agcttgtatcgttcattcgtgtgaaaagttatgaccatttgaatttctcaagagcttccgttgttcaatttcgatcctctcgacatattatgcacccgaatcggacatctgtgtgaaaagtcatgatcatttgaatttctcgagagtttccgatgtttaatttcgagcgtatcgatatattataaccctgaatcggacctcagtctgaaaagttatgaccatttgaatttgacgagagcttccgttgttcaatttcgaatatcactgtatgtgatgcgcctaaattggacattcgagttaaatgttatgaccatttgaatttctcaagagcttccgttgttcaattctgagcgtctcgatatgtgattcgcctgaatcggacatnccgtgtgaaaagtataaccattngaatttctc

SEQ ID NO: 289711 - DNA, 489 bp, Glycine max
  unsure (1)..(489): unsure at all n locations
cgtctcagcgtctatgcgagacaganaccaacatgctagctatttcttcaagtaccaagaagagttgggtctagccacggcccacgagcatagaatcgcggatgagtatgcccaagtatatgcggaaaaagaggctagaggaagggtgatcgactctttacaccaagaggcaaccatgtggatggatcggtttgctcttaccttgaacgggagtcaagaacttccccgattattagccaaggccaaggcgatggcagacacctactccgcccccgaagagattcatgggcttctcggctattgtcagcatatgatagacttaatggcccacataattagaaatcgttaggaaacttgtatggtctctcagaccttgactagatatgatttctttntttgaaataaaatgagttggtcccatgtttctactccaaaaagcttgtgcanatcanatcactcctacatctcatctctagcatgcattttctt

SEQ ID NO: 289712 - DNA, 399 bp, Glycine max
  unsure (1)..(399): unsure at all n locations
ttcttctatttcaataatttagattcatttattgtttacaaattaaactacgttttcataatgtagtactttatacttttcacacaaattatttttaatttataattgattttattatttaaattattagtacatttatgtattgtaaaaattaatcaattaaaaattagtgcatttttttcacacattataattgattgttttttgcatttagttctcattggcaaagctttctaattggaaattgcaaatttttaggcgtttttgtgctttctaattggaacattttatgctttctacactcatcatgtataaactnttttaccaccaaaagttgtactccaataacattttccaattntaaccattcgaatacattcaagtgggtgcaattcttat

SEQ ID NO: 289713 - DNA, 481 bp, Glycine max
  unsure (1)..(481): unsure at all n locations
tgatcattgggccaaattcacaagtcttaggtaggatgctttggttttatttgaacctcttaattgacctgggttcgcctttgggtaatgttagactattggcaagtgcaccaaattatcacaagtagtaaagttaaagtagaagtctgagtgtcgagtccacagaaactttatttgtacttaggtatgtgaatatttaattagtaaattaatttaaagaaattgatttgaaaaggttgtgagaaaacagtaaaataaattggcagaaaattaaaataaacaaggaaagaaattaaacatgaatttaaattaattaattaaaaacagaatagatgagaaaaaccaatattatagaagttaaattcagaagatgagaaagttggggacttagcctaagagagctactcttgatataatattaatgaattttctctaattatggttattccaattntacacctacacctactcatatactcta

SEQ ID NO: 289714 - DNA, 374 bp, Glycine max
atctttttttgtctaagacgatgcattcaaagaagtcaactacaacgtcagtcagaatcatcaaggattctatcaaggaggtctgccaaggtactatcaacaacgaaatttctcacaaagccaatgttggagatcccatccagggaataacttcaacaaaaaccaatgatgttcatccaatagacctcccacacaaggcccaaatctatatgagagaaccaccaagttggaagacacgctgacacagttcatgcaagtttccctgtcaatccaaaagagcactaagttagccatcaagaatttggaggtgtatgtgggccaattatctaaacaactgactgaaaggcccactgtaacctttgttgccaacactg

SEQ ID NO: 289715 - DNA, 384 bp, Glycine max
  unsure (1)..(384): unsure at all n locations
atgtgactcttcacattngaatttgaattcttctgttcaaaggcactggtaatcgattaccaaaacattgtaatcgattacagctttttgaaaataattggaacgttgcaaattcaatttgaaaactttttcaaaacaattttgctactagtaatcgattacaacaatctggtaatcgattactagagagtaaaaactctctggtaaaaggttttgtcaaaaactcatgtgctattcaaagttttgaaaaactttgtaatacttatcttgattgagtcttctcttcattcttgaatcttgagtcttgaatcttgatcttgattcttgagatcttgaaccttgaatcttgattcttgtctctagactttcttcttgagtcttgaa

SEQ ID NO: 289716 - DNA, 385 bp, Glycine max
attcttttccaaacaaatatatattgaagcggtggacacgacaagcaagatgtgatacgtacaatgataatagtgggaggcaaattgatgttgatcctaggttggagagttcaaatcgatataagcaattatgtccaatgcttatgagattgtccgatgaggcatctgactatccggaagcatgttctttagtttatcaaggggtgttagagcttagtaagaaagtggctgaaattcgattgaaccaacaaccacatggtcctcgtgattccacacgtgaagccacaaggtatgctatggagcctttggcatccaaaggaattggatctaagaagagagatggtaaaaggatgaataatataaccctctgggaattggactgata

SEQ ID NO: 289717 - DNA, 410 bp, Glycine max
  unsure (1)..(410): unsure at all n locations
tgctagttcctacaaatgaacactcgcgtaggagaggtcgttatatggcttagtctgttcgcattttggtgctaatgatgaagatacatcctacctttctttgtcatgaccttttgtgagtgagctttggcaatgacttanttctatgtataaagtggcgctagatctttcttctccgagtgctctcttatatgtatacaattggggttttagtaagcaagtatctgaaagatgcgggtgtcaggatcataaatgatgcttgcgttatttggattcatatgaataatatccatttagagaatgtgaatatacccatttgctcgttaaaatacaacattatggcatatctagccttgacgtaaaggttctctagactaactatggtttctagtgtagaggagttctctatt

SEQ ID NO: 289718 - DNA, 399 bp, Glycine max
  unsure (1)..(399): unsure at all n locations
agcttgtctaattaacctgaaattgagaganaatgattattaaacacacaaaatggaagtactaagtatttatcacctatacttaatagaaaatacttataacactacaaaataaccataaattggaagagtttgatacaatttatacaagttttatgcacaaaagttagtcgtattcaccgactaatacataaactccctgttttaatcgatttccaggctattcataatcgattacacaagtcttttgagaagctttaagagagatactcattttgattaccggtcatccgtaatcgattacacaattcagttaagaccatgtctagtttttaggagtctctattntaattggttaccaggtgatcgtaatcgattacttcattcttgaaagtgttc

SEQ ID NO: 289719 - DNA, 428 bp, Glycine max
  unsure (1)..(428): unsure at all n locations
cttaccctatggcttgcctccggatttcactccccgtgccgtccttgaagatttgagtcaagcccctaccttcgaggggcaactcccaccttatgacgattatcccgtgcaagacgatgaggaaggagatacccatctcggccccctgctccacctcaaagatccacccccccatgaactaccccaaccaaacatagtctgccacgttccatcttcacccacacccgtaatcgaatccattcccttcgcagaggataagggaaagattgatgcacttgaggagaggctgatagcggtagatggccttggcaattacccattctcggatctagcgaacctatgtctcgtgcccaacatcgntatccctcccaagttcaaagtaccggactttgataagtacaaagggacgacatcgtccgaaaggcatc

SEQ ID NO: 289720 - DNA, 412 bp, Glycine max
  unsure (1)..(412): unsure at all n locations
ttctntttggtgtcgagaagaaataacatgtttgtcatcatcaaaaagggggagaatgtgaatgtatgtatacatgattttgatgatgtcaaagaagaatctaacaaggctacttcaaatgataagcatttgcttcaagaataattcaagattgcttcaacaaacaaatccttgtttcaagattcactaaagaccaagccttgccttaaaacaaagtgctttcaagacatgcaaggctctggtaatcgattaccaggaagtgtaatcgattacccgaagacagggttgagaaatagctgttgaaaaaggttttgaatttgaattntcaacatgtaatcgattaccatatgtctgtaatcgattaccagcaacgaaactttggaaattcanattcaaaagtcattaacccttc

SEQ ID NO: 289721 - DNA, 227 bp, Glycine max
tacattttagatgttgacaaggcaacctcgatatggcgctgaacatcggtgtacataatatataaagtagagaaggcctattttctgtctattagaaacattagacaaacccctagcaaacaacgaatggacggatgagacctgctacttcagctcatattgagaaccgcatggccgtatcatggtgtatgagaagagacaatttatcgtccctaatctcatacttt

SEQ ID NO: 289722 - DNA, 376 bp, Glycine max
  unsure (1)..(376): unsure at all n locations
agcttattgtatnnataagnctcattcaacaaatgtttgttgtctctaaacagatatatttcttcacttgagcttgcgtctgaagagtgtggccgttaaagcatttaattcttgcattaaatgcacatactccttcatgttgaaaaaccattcttatgagctattgtgtttatcactcaagtagaaaaccacttgctttaagtcagagcaggtatgtcaccaaaagtgagtgtcttttgatggtgttcgacaactttcagatcttgaacttcatgtattcttcatagaattcgatagattctaggagaatgtctttataaaacaaatctcatgacatgtatcttctagcgtctaataatacagatgtagatgtatg

SEQ ID NO: 289723 - DNA, 462 bp, Glycine max
  unsure (1)..(462): unsure at all n locations
ntaggaataacattaagagaaccatgcgtgngttataattcattatccacatgttcaagcctatcatgtcacatatcagaacattcaacgtttgcaacaaaagaagaaatgctagatattttattaatagaaataagcataataattaacctaaacatcccatcacgaatatagcctttaccaataaaaacactatgtctagcaataacaactctatttgactcanaaacatccttgtacccttgttggactaacaaagaagtaattagaaatgtgatagactctatctaaaataggaaaattccctaaagatagctctagcttcacttgaccttctcttaacacatgtgtcatactcccattccccatgctcacaatatgtgtgcttgattcatgatatanagaanacaattgtgtatcatcacacacatgaacattagccgcggagtccataatccaatc

SEQ ID NO: 289724 - DNA, 384 bp, Glycine max
  unsure (1)..(384): unsure at all n locations
ttctttgtttatgagaaatacatatattcagagatgaatatcttgacctacaacattagggggctaggtagaggccttaaatgggcttctattangaatttggtggataaatataacatagatcttctgtgtctgcaagaaactaaaaaggatgtgttagacaaagcttcgtgtcaattcctatgggggcaatctgatttagactgggaatggcagcctgccttanatgctgcagggggtctgttatgtatttgggacaacaacaaattccatgttgatttaaggatttcagataaagacttcattatgctgggtggaatatggctacctcaaatgcaaagagttgcagtcattaatatatatgccccttgtgatcatgctggg

SEQ ID NO: 289725 - DNA, 451 bp, Glycine max
  unsure (1)..(451): unsure at all n locations
ctaattntaatatgatacattattgaaagttttagctnttaaatagtcattattataattattgttttatataataatgtaaaactataataaacagaacttggattataattttttacatctacagtaaattctatttgtaataattcatacacatacacaagttaatttaaaccattattgagatatggtttttatattacctaaccggcactaggttatacgagagcatcattctcccaactcattgtgcaagttaatcaatttcctggtttttaacaaagattcaatgaaaatgatccatcatgaaaaagttcatatttaaaaatgaaccaaccgtattttcacaaatgagaaatctactaaagttttgaattaaccatcaacattgtaaaaactcaaatntgatntgngctgctaggatgctcaccgaacttatattagccatcat

SEQ ID NO: 289726 - DNA, 170 bp, Glycine max
  unsure (1)..(170): unsure at all n locations
actgccgggtcggatgccaaatctcatggctgacagtttaccatctaattaatgtcatccatgcgatcattatcacttattcgagcgtcgcaacctgtcgcactgaggcaccaatcactgtcataatataatgacgcgctcacctgccaatcatcgcagctctggagaan

SEQ ID NO: 289727 - DNA, 75 bp, Glycine max
tcgcatgcagatcagaagggatatatttctttgtaatatgtcttcttcacataacatgcaacacatttatatata

SEQ ID NO: 289728 - DNA, 416 bp, Glycine max
  unsure (1)..(416): unsure at all n locations
agcttttattatttgaagaaaaagacccattccatccattgtttaatagtctaatgaattaaggaaaaaccaattaatcatattaaccatccattattcacatttcacaataactcaacccatgcaatacatttaaatatatttttttaaaatgaataaattggattgaagtatgaatgcattgtttaaattagacacatgaatcactttcccaactttattcaacatcgacaatcatttgtaataattttcataaatcccgaaactttaataacctttttattgtttacaaactgtgccccccatcaactaataagcaatttacacacttccagctntgttgataagatgtttggcttgaatgtattaacagacaacggatcgatgctgcttatttcatatcatctatccgacac

SEQ ID NO: 289729 - DNA, 481 bp, Glycine max
  unsure (1)..(481): unsure at all n locations
cgactggctgaacaagtntgtagaatatatgtggccgtatcttgtcttgtttgtagttntaatatatgctntaactcttcgagattaacatctactatactaggcttttgattctccttgtttctaagcttgtttgactatggagatatttttaatttatttaggcaatttgcaagactgcgaagaacattgcaaaacctataattgctgagcagattcctaaatacaaaattgattccgttgagtttgaaacactcacactgnggtcactgcctccaacatttcaaggttagtaagtagatccggataagaaccttgtaattgtccgacaatgtcttgtgaacagtgttagctgttttcaccgagtttctattctcttctattgcttacaaggggataaatatttgatgtgngatttctgcagtcagaaagacagaatnttgaatcttaacctttacaacaacaacagcaacgccttatc

SEQ ID NO: 289730 - DNA, 390 bp, Glycine max
agcttggacaatggcagtgaaatcttgctaaaatcctagataaatctcttgtaaaacttggatgtcgcagaaaagaacgtacttcccgcacagatgcgtcgtaaggaagagaagtaataacatcgatctttgccttatcgacctcaatacctctactagagactgaatgccctaagactatacctccatggaccataaaatgacatttttcaaagttaagaacaaggttagtctcagcatcggtcaagaactctacagaggttatccaaacatgcatcaaaggaagaaccataaacaatgaaatcatccataaacaccttcatacaactctataataaatcagaaaagatactcaccatgcacctttggaaggtgccaggagcgttgcat

SEQ ID NO: 289731 - DNA, 475 bp, Glycine max
  unsure (1)..(475): unsure at all n locations
cgagtgatattgtcacagaatacacttgaggcacctcctccatttcatccaccccacttgaattctagtcgcgcattagttaanaaggtgtatatttttacagcattgaggagaaataataatcaagggaataatcattctattttcaaaataataattgttacagctgtcatgaattactagtagttagttagagggggtaagaaaataaataggaaagactgacagagggaggagaataataaatgtaagaagagttggcctctcaaagagctaagttaggattgatgcagctcttgctacttcatgtattntgataaagaactatccaaggaagaaaagttngacttacgtgagctcaaattggatggactaatcactagagcaaggagtaaaagatttcaagaagagtttgtcaagagactaaattctctcatggagggaaaagaagaagaagtgacattcatttatttta

SEQ ID NO: 289732 - DNA, 399 bp, Glycine max
  unsure (1)..(399): unsure at all n locations
agcttcttatcctaggctcatcttggtggtgaagctccttcttccatggcttactccctagtggatggcgtctcctctcacttcttctcctttgtcttccgctgcatctccatggtgtaaaatcaccattgaaggacctcattgaagctcaaagatccagcctccatagaagctccacaagcaagcttccatcactgaggacatggaaaggatgatgttcgtcaccctttggggaatgttctgctacaaggtgatgtccttttggcttaagaacgctggggcaacctaccaacaggctatggtagcattattccatgatatgatgcacanaagaaatgaagtctacgtggatgacatgattaccaagtctaaacccgaggagaaacatctcatcaactt

SEQ ID NO: 289733 - DNA, 455 bp, Glycine max
  unsure (1)..(455): unsure at all n locations
tatgcagcggaaatgtaattatganattgagatgcccgaagaatttctatttcctagttaaccatgcattangtaccatgttcaattattattttttgttgttgtgtgttttttttttttagaaatgggtttatgatcccaacatggttggctcatggtgcctaacacatgcaactaagaatgtagtgtgaagtttcacgcttccccttttttgtttttgtagaggaaaacacaaggatgagcaaacatgaaaacaaatggtatgcaattttgcagatcanaaagtttgttgaacgcatatgcatgatgatgccatgactcatgcaaaatgtgaggctggaatatgataacggaaaaatgcaggaacgatatgttcattatgatgttatgaagagatgcttatgatatgaatgcattntacggacacgagagcccggaaaattatctcttcttac

SEQ ID NO: 289734 - DNA, 410 bp, Glycine max
  unsure (1)..(410): unsure at all n locations
agcttgtattntccaggttttgttttatttctcatttcgtttgatcacttgcatgtactagaaattgaggttgatcagtagtgctatacaataccatatcagttgcttctggatcatttgtcaaacaccattacgtaacctagtactctgcttaattaaaaaaaaaaaattgaggtcaggttatttaagtttatttaaaaaaaaataggtttttcttatataaaataagtaatttttataatattttgatatgtttgttttaaattgttttacttanaataaatgttttttttgtttttttttaaaacaaatactatctacttcttataaaanaaaggctnttataaaaagcactttttttaatttttttttttnttagtttacccttttttgttcttgtgacaatatgt

SEQ ID NO: 289735 - DNA, 451 bp, Glycine max
  unsure (1)..(451): unsure at all n locations
acccatcacatgtggtactaggtggcggtctggcgatggtgcacaacaagttttccacatccacaaatcgcacataaacccacaatcccctgttgcccacctccaactgagctcacgtactcccacgtagcccatatcctcgtttctctcaacaccgggtccccatcaatcctcccaagcttccccaacatccaagtaattcaacattcaaacagcacaaactatcacagccaagataacagggcaaaggcagaaaactctgcccaaaacaccaaccaaaatcacagcttttcccacttaaagaccccagtaacatttccttcgttccaattcgttaaccgttggatcgactcannaaatttactggaagtctctagtacataagcctacattntgaccgttgggatttgctagcaaatatccagaaatcattctgcactactctttccac

SEQ ID NO: 289736 - DNA, 399 bp, Glycine max
  unsure (1)..(399): unsure at all n locations
ttcttatatcaattcagatcaaattgaagttagcttagctaaaccttggccagcttagcggaccaaattagccttagatgcaagggttgggcactaagcgcttgagactcgcgacttagcgcatgaacttagcgcgaggcttgttcttagcaaaaggactatttttcagaaaaaaaaatttctaagttatttttcagtcctttttccaagaaattgaaacccttatgttaaacattcaaagataggctgatatgctcctatgtacagatcagacaacatgttcaaaatgattaatgcatganaaacaaagataacaaaaattcaaaactgggttgcctcctaggaaatgcttctttaacgtcattagcttgacgctnttacctcactgggtgatcttat

SEQ ID NO: 289737 - DNA, 472 bp, Glycine max
  unsure (1)..(472): unsure at all n locations
aatactacgcttgagatgaggaagtgtagaatggtgaaacttcctgctntnattctttgaccacagagtggtacctggagatatgtcgcggtggtcaggagaccttggggacgttaggtggggtgctattgcccaaaaccaagcttgaccaatcccgacccaacccaggcatagtcagtcagtgagaacctgtgatgtacctaaacaggcgagctcctggcagtcaacagataaaaggagcaaagactacaaagcatggaggcttgtgtggtggctggccagctatgaactttgattgatatatgggatatggcctctggtaattgattaccaagggtgggtaattgattacaaggcttaaaaatgaagacaggagactaaaatagtctctggtaatcgattaccaaggggtgtaatcgattactatgcttgaaaacgaagtcaggaagctaggggagcttctggtaattga

SEQ ID NO: 289738 - DNA, 399 bp, Glycine max
tttctatatcattttattaataagaaaaacatcaattgttctatacaatgatgagaaacatcaaaacattatggattagcatagaacctagacgacatctttgcaaggacatgaaccatttggttcgccaaaattcacatttgagatacctagtaaacgaaggttattattacaaaagtgaaaccaatttcgaatccatatatattggagcacgactgaagcaagtcacaaacatgtttgcaatcagtctcgaaggtgacgttgttgtcgcccaactcaatcgtcctttagatttcctctgcagcagggatgttttcagctttgatagaagtcttgcacatacaaagtgacctccataatcacaaatggtagctttcatggatgcatttacattacact

SEQ ID NO: 289739 - DNA, 399 bp, Glycine max
ctcacgcttgtatatccgttagtaagatgattaagaactagtcagcgattcatttctatcaaaatatattatgattatgtttagagccattaatagcttggtagaataaaacatacccggttcttcaagcttgttctgttatagccagaagtggcagtggaatataatacttgtaacatgtagaagttaaagaaacttggtggtatgctctaggtgcagactataatgaatttgtaccacaaccgatctaaaaggacgttctcatgcttcttaagcgttacccaaactgaaccttttacattggttgtcaagcaactgatgtataaagtagatgtcttatatccattgtgtttacgctcgatgcaaaaagtattgatttctatcaaataattaatggat

SEQ ID NO: 289740 - DNA, 410 bp, Glycine max
  unsure (1)..(410): unsure at all n locations
agcttatgataatgaagttgttacaaattntatcttgaatgaaactgtgccaaaaatagatgtcatgaagttgttacaatatataatgcacttaataaccttgcaaataaacttcagataatcttaatctttggaaatgtattgatattaggacaaatggtcatcacatatgcaacaaacatatagccatcctaatttactcagttacatgaagcttgttatgttcaaaatatcacacatgcaaattgatgacaccttatagataatagccttagaagttgattatcatgactcanaattaagggtttcaccattacactatcatatcatttaaccacaacagagaatttaatacaaagtcacactaaacttgagttacatcacatctacttatggcactaagtataaac

SEQ ID NO: 289741 - DNA, 647 bp, Glycine max
  unsure (1)..(647): unsure at all n locations
acgcaaccctattttntttgttgacattcnctagctatctagcgtgacatctattatgaatactcacagccttgagggaagaaaattgtcccttacccttcaacactttgannaatgtggttttttcatatatgttcnntaaatgnnncccacganatnngtcttatnntgtagattanagaaatgtcatttcgaagaaagaacgaaatgataaatnttgcgcanagtaagggggccaaatgtaagtgttcattggtttgcttgaaagggttgagggagcccattgcagatgcccgaatgggcattgacnccaagnnnactcataatggcnncatggtgaaagtttgaaatgggttgttttgcttatattcangtctcttttcatttanngatttnnggtggtagccccttgcaaaagtggtcccatttttcgataaacccagcagggcacncttcctatattcatttctagcangcttcattcanatgnngtagggatttttgggaattgatcccttatacggtcattggcngtttatatgccacgatannatccacacagaaatgccatgatccatcccctcttcttgaccaacaaaaccggcaacgagaaaggaactggagtggatttgataattccatttagg

SEQ ID NO: 289742 - DNA, 386 bp, Glycine max
  unsure (1)..(386): unsure at all n locations
agcttgttaaacaatataagcaatgaagaaatgctgattnttaatgagtcgctcaaaaaccaaatactgctcatcaccaaataatcaaataataaataaaaacaaaagaaaaagaaattaatacttctctccgagtgcttaaataccaaatactgctcatcaccaaatatggtttctagtaagtaatttcaccaactggctgaacttaagattatgcaaattgctgaatggtacaaagcatatctcacacgaaaagtacgaaaatagaaatcaacggctgtccatcatttccgtcaattctggttttcagtattcttttatttttttcatttaatgttcaaccaanaaacaaagcaagacatantctcatatctttcatggttatg

SEQ ID NO: 289743 - DNA, 400 bp, Glycine max
  unsure (1)..(400): unsure at all n locations
tatacctgatgagaataacttaattgataatatatacgtttattttgtagataagatctggatttgattatcacataatatatgtttagaacagtaatagattttaagtgtgattaaatcttaaattttaaatgtaagattagtcttataactaccacaagaatctaaaatttgtgaagatcctttggagtcctactctatgagctgtgaactcaatggttagattacagattcattatattgcgaatattcatgttgtgtgatggtctacaactgtacctacatatgaggaaaataaattagagatntctttatctttcctactcttatgaaatagatcctttatataatatgagacacctaagtacattatcatatttttctctcatattattcccag

SEQ ID NO: 289744 - DNA, 397 bp, Glycine max
  unsure (1)..(397): unsure at all n locations
atctttgttcctttcacgcgagccattcccttgtacagtcgcctctgaaatcaaccgaccttttttttttaaaaaaaaaaaagtgcaggttagttgcctgggcaagcagcccctgcaccaaaatataaaaaatgaagaagggagacgtttttgcattcaaaaacttcttttccccccattcaaaagcaatacccacggaatttacgagtttgcagccctagggtcactatttttcacattttttgattccgttttgcgcttttattcatcaccaacaagtaagtattccatccttaagctttctagctnttcattggtgtattttgatctcctttcggtgctttaaattgtgggaatgtgctcaaatatgtggggcaattttggtttgttttcttgc

SEQ ID NO: 289745 - DNA, 473 bp, Glycine max
  unsure (1)..(473): unsure at all n locations
ntataagcgcgggtctgggagacgaaggtcaagtgttcgcgatttgcgaagatgatgttccgagtactttggatttggtacgaccatgccctcctgatttccggctgggaaattggcgagtggaagaacgccccggcatttacgcaacgagcataatgtaaacctttacggttttaaaagctctatagttgggcctaggctttagagtttttccttttgttaaggctttgtgtcttttgtttttgaatttataatacgaggatctttcttcatctgttcctggtctctacccattctcattcatttgcatgtttacttctttttctgaaacggcagatccgatgacgagtcccccgaaggtactaatacctgngacccgcctatcgacttcgagcaagaaatgaatcanacggaagatgaaggaactgaggatgtgggacttcccccagaactagaaagaatggtcgcccatg

SEQ ID NO: 289746 - DNA, 386 bp, Glycine max
  unsure (1)..(386): unsure at all n locations
agcttcttcgatctattggggaggctacatgcatgagattgcacgtactttgataatagaaagcttagctttcagagcaattaataaagcaaaagcattatagagagcttctataaattatgtgaaggcggtgcatgattcgtattaaattagacaaagaaagatcataaagatgcatcttcgattggctgaatgattgattgtaagggctcgatctgtgacatatcattttgtgtgagaatgatttttgaccaggaacttttggagaagaggacttaagtgggattcaataatagaccctctttattgctgaaatggatatgtnttttggcaactggaaagatagataaatggctcaaagtaaaaaggagtagtcttaattacta

SEQ ID NO: 289747 - DNA, 355 bp, Glycine max
catgcaacaattgttagccgtggctatacgagacatcttgccaaacaaagtcaggttcaccataactcgcatgtgctttttcttccatgctatatgtagcaaagtgattgatccagtaatgtttgatgagttggaaaatgaggccgcaattatactgtgccagttggagatgtattttccccctgctttctttgacatcatgattcacttgattgtgcatctggtcagagaaatcaaatgttgtggtcctgtttatctacggtggatgtacccggttgagcgatacatgaagatcttaaaagggtatacaaagaatctatatcgtccggaagcatctattgttgagaggtacatt

SEQ ID NO: 289748 - DNA, 378 bp, Glycine max
tatctttgttcacaaaagtcacttaaaaccgttttaaggtccaacgccttaaacggtcctctttgcttttatcggttaacatggaccaagcaagaaacgagtcagacagagggtgaagaagacgaagacgtaggacttcccctagagctagagaggataattgctcaggaggatcgagagatgaggccacatcaagaagagacggagcttgtagacttaggtgctggcagtgaaaggaaggaagtgaaagtaggcataggtatgaccccccccccccccatccgtgaggaattcgtggccctgccgagggactaccatgacgcctttgcttggttgtaccaagatatgcctagtttaagtcacgacatcgtgaaacat

SEQ ID NO: 289749 - DNA, 465 bp, Glycine max
  unsure (1)..(465): unsure at all n locations
tataagaacaaaattgcctaaatcatttccaaatatgcatgtgatttatgaagcattaacaagaatcaagccaaggctattgtgcaagcaatcaatggggcaaaacacaccaaaagattatgatgatggatggctcanattatcacaaaggtaaacttatcactttcaaattgagctttcaaaactatcatgacatgtagaggaaaaacaaggatntcaaatcacaaaatgtcaagagacttttattttcagaacaatttcccattntttgaacatatcctataattcaaagaaaaatatgcaaagttgtacatgcaaacaaaattgacctataatattaaactagaaacccaacaaaactaacaaatttaacacaaacaaaactaacaaaactagcaaaaccaaaaccaaagaacactcccncccccatacttaaacaacacatggtcctcaatgtagcacaat

SEQ ID NO: 289750 - DNA, 416 bp, Glycine max
  unsure (1)..(416): unsure at all n locations
agcttgttcttattaaaatggacataaatagtgggatgttaagttagttttacggggatttcaatttgaaatctgaaatgtgttcattttattttgtgaaggtttttgattcttctgcccagcaaagggatctttatgaacaagttgttactctgatagttaatgaagttctagagggatttttatgcaggccatgctagcaatcttgccactcaagcagaccaagttgaggttgagttgactgttaattattttcattatttatactcttgctaattatattcttatgtttgatttcatttgcacttggaaatttgagtgcaaaacatatgtggactgacatgctacaatggaggaaggagtttggtgttgatactattatgcacgtaaatgcanttggaatttatggcatttgt

SEQ ID NO: 289751 - DNA, 464 bp, Glycine max
  unsure (1)..(464): unsure at all n locations
ctggagaaccaagccaatcagaatgctagacgaaatatagatggttatatatgtaacaatggtggtaatgacggaccgaggcataaccgggttgagggagtaaagctcaatgttcctcccttcaaaggtagaagtgatccagatgcctacctggactgggaaatgaagactgagcacgtatttgcctgcaatgactacactgatgcgcaaaaagtcaagctagcagcagttgaattctccgactatgcccttgtttggtggcataaatactagagagaaatgttgagagaggaacggcgagaggttgatacatggactgagatgaaaagggtgatgagaaaaaggtatgtgcccactanctataacagaaccatgcgacagaaactccaagggctgtcccaagggaatttaaccatggaagaatattataaagagatggaaatggcgttagtgagggtcaacat

SEQ ID NO: 289752 - DNA, 411 bp, Glycine max
agcttagtaaagttaagcactaacaatctccccctttgggaaattttgtctaaaacatacttagacacttcctgagcaggtacgagcagttatgcaagtgggatcagcaactttcattatcagagtaatcaagcacagcggaaattctgcatgttgcaagtcgtttccaggatgtcaagacatctcacatgacatcagctttctgcttctgctccccctgtctccatgcttactgcagcatcttctaacagctactagtcttttccaggatgtcaagacatctcatgtgacatcagctgctccccctgtctccatgctcttactgttgcatcttttatcagctactagtagcttacaccagtcatcatcagcagcagcagtctccccctcaaatcatatacatacaactcc

SEQ ID NO: 289753 - DNA, 489 bp, Glycine max
  unsure (1)..(489): unsure at all n locations
tactcagcttcctcaagatccttttatctccctgttgaaatctcatntgtccattagttgngggtggtaaggtgtggaaattctgtgcacgaccccatactttntgagcaaggcatacatggatctattacaaaaatgggtgccttgatcactaacgatggctctagagactccaaacctgcaaaacatattagatctaacaaaatccacaacaaccttagcatcgttagttctggtggctntaacttccactcactttgaaacataatgaacaacaaggagaatataaacaaaaccaaaagagacagggaaaggccccataaagtctatacccaaacatcaaacacctcacagaacaacatgggttgttgaggcatttgttgtctccatgaaagtgagccgcctgctctctgacaaggctcacaagtgctacagattctccacgcatccttgaagatggtgggccaatagaaaccacagtcaagcact

SEQ ID NO: 289754 - DNA, 418 bp, Glycine max
  unsure (1)..(418): unsure at all n locations
attcagctcggacccgggatcctcttagtcacctgcagctgcagcctttttgttcttttatatcagagggactgatggtcactatgaatgacaaatctcttgagataaaggtagtgttgccatgtattcaaagcccgtactaatgcatacaactccttatcataagttgaatagttaatggtaggaccacttaactnttcactaaaataagcaattggatggcctttttgcatcaacacagccccaatcccaacatttgaagcatcacactcaatttcaaaagatttttgaatgtttggcaacgcaagtatggnggcattagctagctcttgctaagatcattgaaagctcttcttgtttctctcgccatatgaaccaacatttttttgacacttcattagaggtgctgcaatgtgct

SEQ ID NO: 289755 - DNA, 515 bp, Glycine max
  unsure (1)..(515): unsure at all n locations
agagatacntttgatgcctcgtagatctacacctttatacacacgccagcgaagctaatcactcacaatataatcaagtgccaatacattttcttgcatgaggagtttcaggcatgcagataagaatgaagatcaggcttgtatgcatccactgtatggacaaatactctcccaacgaatacagaatgatctgctcacatggtgcccatagcattcaaaacactttaatgatcagctatatcacctatctccatagatagtgtgcatgcatgtacatctatcacaaaacgagcagagaccattatctgcctaactataacgatgggatcggacccttcgataattccagcaacatanccaaaggtgtcaatccacacggattgccctacactattctacactagcccacctatattaaccttctgataggcgcacttatatacctgactgacctatacactaaatgctgctcccgcgtcattaacacacattgccttacggaggcctacaaacag

SEQ ID NO: 289756 - DNA, 414 bp, Glycine max
  unsure (1)..(414): unsure at all n locations
agcttgttagtatttattggtgtaatttgcctgttccattatgctcttaatgtctttagaggttacttcctcattgacatcttttgtcttgaatggaattgccatgacaggtctgttgttactgtctttgatattcggtagttgatattgtgttgcgggaggtaattccgattggattaactcaccatccttcacttgccaatttgttatgacatttgttgttggatcacctatgatgtcttgtttccaagggtaatctatatcctttctgatggcataagcatgaaaccaataaaagaaaaggacattaattntgactcgttcgacaaattcgtagaacttgtcttggatttgttttctgtttgtacccttgtaatgttggaaaaaccatctcctttgaggttcattcttcgg

SEQ ID NO: 289757 - DNA, 464 bp, Glycine max
  unsure (1)..(464): unsure at all n locations
cgagaactctctcttagggaattctttcttctctatcatcattttctatttcctttntccatcccttctcctccatcaattcctataacccttgtctagtgtaaggtcccttatggttatgagaggctaaacccttagttagggtctgacaggcctaaaaagtcaaaaaatgtattgtatatttcatatctatcaatgcaaacaagtgttttctttcctattatcttttcttacttttaatttcatgcatcattcatccttacatcatttttgggggttaggtgttcgacaaaaagtaatccttaatagatatacaaggaaggtcttacatgtatctattttatgagctcgacagagggtaatntctaatagaattaanaggaanatgtatctgttcttctttccaacgtgtgtaataaacataaaatttgaatgcattctctctctatctccnactctctttc

SEQ ID NO: 289758 - DNA, 407 bp, Glycine max
agctttattattatgccaaactcccttccaaaatctgatttcaagcttaaataggtggctttgttcgtgtttgcacgcttagcgcaactctaaaccgcttagcgtgcattagtgaatttcagcttagcacatgctttcctcgctcaacggatgggctgaagcggtgcgcttcgctggatgacccttcgcatagcgcaatttcacaactcatccttcttccagattcttcctcgcgcttagtcaaggggtgtttcgctcaacggatggctcgctaagccagaagattggcttagcaagagggtgaaaatcaacacttcacaaacttgcctaattaacctgaaattgagagaaaatgattattaaacacacaaaatggacatactaagtatttattacctatctttaac

SEQ ID NO: 289759 - DNA, 480 bp, Glycine max
  unsure (1)..(480): unsure at all n locations
tgtcttagcgtntatgcgagacggagaccaacatgctagctatcatcttcaagtaccaagaagagttaggtctagccacggcccacgagcatagaatcgcggatgagtatgctcaagtatatgcggaaaaagaggctagaggaagggtgatcgactctttacaccaagaggaaaccatgtggatggaccggtttgctcttaccttatacgggagtcaagaacttccccacttgttagccaaggccaaggcgatggcagacacctactccacccccgaagagagtcatgggcttctcggctattgtcagcatatgatagacttaatggcccacataattagaaatcgttaggaaacttgtatggtctctcagaccttgactggatacgacttcctttntgaaataaaatgagttgttcccatgtttctactccaaaaagcttgtgcgaatcaagtcactcccacattntatctctagcatg

SEQ ID NO: 289760 - DNA, 398 bp, Glycine max
agctttgttgggtgcaccagcaaaaatgctgggtgcacctagcaacactcaactttttatggaaatcagactttgtcctggttcggtccaattgatacttgggctgtaactcctgaacttgtcttgaaaaaaattatttcctaattgagcctaaattgttttggaattgttgagcaacaattaccataccgctggtatcaataattattatttatcaaactaacttataaacaaatggtttgaaatacctttgttgtactatttgtttattaaaaaaaatacatatttattaaagaaattataaattaagtaattaaagtatgtaacttttattattaattcaaaggatttgagttaaaagtatgtaactctttttatataaagtatctaaacttatc

SEQ ID NO: 289761 - DNA, 435 bp, Glycine max
  unsure (1)..(435): unsure at all n locations
tgtgaacattctcgaaggcttgaactgcacactggattttattgctgctgaacagaagaggattgttaattatgtcgcctcgttgcaggagatggggaaaaagggagaattgaaaggtttgttatctcaactcaatatctattntgtggttatctaatgatgcaagaactgatcttggactgaatttcatccatgttttgatattgttgttgttcaatgaatttacaattgttggagaagaaagttatgtgtttgggaagtttggatagtttgtatgaggtcttangttttatttgggctgaaaccagggtatccttcagcttagagtcgtagagtaatttcgtgaggtactgagatntgtttaagacgattatcactcctagaagatctgtattccatacacacggacctgaggaccgaacctttgactacatg

SEQ ID NO: 289762 - DNA, 409 bp, Glycine max
  unsure (1)..(409): unsure at all n locations
agcttgtatcttaatttagaattcctctataataaagtttattacatcaatccttttcattntttggtggtaaggacggctttagcccatcaatcctttttctatatctatcatattaatgatccgggctcctttgaatattttacaggaaagattctatttcacctgtaatccgatttcgtaatcccgtgatgtgaccgttttatttcatataaattaattccttcttttatatgtgcacatacaagagttgggttagccgtttttttcttgtacaaaagtaaattaaaccattttcaccagtttagcggctntcgccaccttcttctacctctacaatatcccaccactgccacaatgcccccttcacgtgtcacctcanggcgtcngacatcctcctctgtcatgt

SEQ ID NO: 289763 - DNA, 444 bp, Glycine max
tgatatttgtgccatagtaggccagatattgattatggtatgggtttggtaagcagatatatgaatgatctaaggacttctcatatggctgcagtaaagagaattttgagatatgtgaaaggcacacttgattatggcttcttattctccaaagcaaatcataatcaaggaataaggttaattggtttttctaatgcagactatagtggtgatgtagaggacagcaaaagcaccactagatatgtcttcaaattacttggatcaacaatctgcttgagttctaagaagcaagaagatgttagactttcaacttgtgagttagagtacatggctattgtctcagcagcttgtcaatcagccttgttggagtccctgttgtagaattgaatattcagcttgattcagttgttcaacttaatatggacaacaagtctgctatatgtc

SEQ ID NO: 289764 - DNA, 411 bp, Glycine max
  unsure (1)..(411): unsure at all n locations
ttcttgtatcatataaagtggatccgaggaactctcaaggacttggtcaagatgtctataagctggttgttggagttaataaatttagtactaatttctttggactgcagctttttccgaacaaaatgacaatcaatctctatatgttttgttcttttgtgaaatacaggattagaggtgatgtgaagagctgcctgattatcacaatacaactttatttgctgaacatcacanaattttaattattgaagttgtttaatccacaacaattcacaagtaacaagagccatagctctatattctgctnttgcacttgatcaagcaaaaacactctgtttcttgctttttcaagagacaatatttcctccaaaggatacaccatatccagtggtggatcgcctgtctatggga

SEQ ID NO: 289765 - DNA, 402 bp, Glycine max
  unsure (1)..(402): unsure at all n locations
ntcctttcttgtaaaagataaaaaagttcacttatataattctttcattcatgcttgaaacaagtaaaataatccaactaagcataaactaatacaagtagaaggataagaaaaaccagtaaatgatcaaaccaaactgtattttattcatattccatgtagtcttagatacatggaaatttgatcacatgaaccccattattctagtccctttttttgacacaagtaaattaacaagaaacaacattgagtgacactacttaattataacaaacaaattaacggaataagtgatgactagtactacttattagttgtagtatgttcctggggtttggaaccagtgcatgtatatttaatttcctttctcataaatctggactttggtgtcataagtagcac

SEQ ID NO: 289766 - DNA, 407 bp, Glycine max
  unsure (1)..(407): unsure at all n locations
ttcttcttgttgttcattgactccagattgctgcaaagatagacagagatctgtatggtgatctgcaaaagaacatagaccacagactcttgcaataagtgcatatttctaatttatggcaagctgagttactaggttgaccaaggcatncaagtttccttcaagctttttattttcagtagatgaagatgaatccgtggccacctcatggactcctctaaggacaatagcatcatttcttgcactgaattgttgggagttggaagccatcttctcaatcaaatatctagcctcagcaggggtcatatcaccaagggctccaccactaatgagggcagctngcacacaatttcttgaatcttttccagtactcatacaagctntctccactaagttgcctgatgcct

SEQ ID NO: 289767 - DNA, 459 bp, Glycine max
  unsure (1)..(459): unsure at all n locations
ntgaaatgggctcacatgtaggggtgagttgcgagataaatctctcgatataattcaacctgcccaagaaacctcgaacctgcttctccgtgcgtggttccggcatttcaataatggccttcattttctcgggatctatcgctatccctttctgacttacgataaatcccagcaacttccccgactttaccccgaaggtacacttggttgggtttagcttcagttggtatttccgcaaccttctgaacagcttacgcagattgacgaggtgttcgtcctcagtctgagatttggcaatcatgtcatctacgtagacctctatttccttatgcatcatgtcatggaacaacgccaccatggcacgctgataggttgccccagcatttttcagcccgaatgccatcactttatatcagaacgtcccccatagggtgacgaaagtggtcttctctacatctt

SEQ ID NO: 289768 - DNA, 410 bp, Glycine max
  unsure (1)..(410): unsure at all n locations
ttcttgatggattacttgatgccttggtcaacctagtaactcagcttgacatgaatcagaaatatgcatctgcacctgttgcaagagtctgtggtctgtgttattctgtagatcaccatacagatttcatccttctttgcagcaatatggagtcaatgagcaacctgaagcttatgctgcaaacatttataatagacctcctcaacagcaaaaccaacaatggcaaaataattatgagctttcgagcaatagatacaatccaggttggaggaatcatccaaatctgagatggacaagtcctccacaacaacaacagcctgtccctcctttccagaatcctgctggtccaagcaagccatatgttcctcctccaatacagcagtagtcacaacanagacaacaagcaactg

SEQ ID NO: 289769 - DNA, 475 bp, Glycine max
  unsure (1)..(475): unsure at all n locations
tatatttgacanaatngaagaatattttcttatctttccattgactactcacatgctccatttggagttatgtagtatcctctaggccctgcccaaggcagataggtcaagtaagcacaaaatccaaaaattagctacaattctcaattaagctcaatcatttacctaagaccaaaactgagttagggtgagaaaataagggtcaaagagatgttaattgagcgaagaagaatagaaaaatattaaactataaatgctcaatcaatattttacatttttttggtttattgctaattatacgacatgagtttttctaaaaaattgatgttgtgaagtgtatgttaacattagttttttgaaaaccaaagttaacattgagttcattaacgttggtgtttaaccaatgttgaaagttgaaaaaaaccaaagttaaaatcctattttctagtagtgaatcanactntcccaagttatc

SEQ ID NO: 289770 - DNA, 395 bp, Glycine max
  unsure (1)..(395): unsure at all n locations
agcttcttatccaaggctcatcttggtggtgaagctccttcttccatggcttattccttaatggatggcgcctcctctcacctcctttcctttgtcttccgctgcatctccatggtggaaaatcaccattaaaggaccccattgaagctcanagatccagcctccatagaagccccacaagcaagcttccatcaagtggtaatcagagcacaagagcttcaagtaggtgctccttaaacctccattaatttttttgctttaccttctcttccattgttgcttcttcatttttctccatgtatctcctcacatgtcttgttctanatgttgttaacatgattctttagagtttccaccgattaaacttgctatagaagttagaattgattttctat

SEQ ID NO: 289771 - DNA, 454 bp, Glycine max
  unsure (1)..(454): unsure at all n locations
tcttcatttataaccttgatattcatgtatttattgtgtcacatcggttggattcttcactcttgttcttcgtttgaagtcttgagcctgttggagcatttagtgcttgtactaaatgcacatcccttcttcattcaaagtccatgccaataggctagtgtgtcttgtattttagcaggaaagtcatttctttcaacataacatgattgtaacaatagagtgtgccttttgatgaggatgtgtgtctttcagacagtggtctccatttattattcttaagactttgaaagatcccaggagaatggtttatgcagganagaatctcacacacagagtattaaatgaaggtcttanatacactacttaaatgctatgttagatcgtcttatggatgcaacatatgaatatacagtcgtagagatacagaaaatgatttcatagcatatcacacacc

SEQ ID NO: 289772 - DNA, 398 bp, Glycine max
ttcttgtgacatgaggccattaagtgcctctgccacaatgttataaagaagaggtgatagagggtctccttgccttagtcctttctgaggtaggaactcagctgagggactaccattcaccaaaaatgaaacagatgctgattttagacacccctcaatccattgaattcatttgctgcaaaagcccatcctacccatcatataagtgagaaactcccaagacacaaaatcatatgccttttcataatcaaccttgaagacaatgcaaggcttttggcatcttttggcctcttcaactacctcatttgtagtcaccacgctgtgtagcatatgtcttccttctataaatgctgattgcctctcatgaataataaaaggcatgaccttcttcaatctat

SEQ ID NO: 289773 - DNA, 466 bp, Glycine max
tgtaggattatggggtacccatcacatgtggtactaggtggctgtcgggcgatggtgcacaacaagttttccacatccacaatgcgcgcataaacccaccatcccctgttgcccacctccaactgagctcacgtactcccacgtagtccatatcctcgtttctctcaacaccgagtagatgcaatcggctctgatgtcttgatgatgatcatgatgatgtgttgcaattgatgcaaatgggctgttcaagattaaaattcaagacaatacttcaagattacaaggcacaacatcaagatgatcactagaatattatgaagggaattcctaattgaattatcagaggataggccaagtgatttacaataaaaagtgtctttcagaggctctactctctggtaatcgaacaccagaggatgtaatcgattaccagtggccaaatacgtgttataacagctatgaaaac

SEQ ID NO: 289774 - DNA, 405 bp, Glycine max
  unsure (1)..(405): unsure at all n locations
agcttcttatcctaggctcatcttggtggtgaagcttcttcttccaaggcttattccctagtggatggcgcatcctctctcctcttctcctttgtcttccgctgcatctccatggtggaaaatcaccattaaaggacctcattgaagctcaaagatccagcctccatagaagccccacaagcaagcttcctaaggtgttcctcctcagttttagacttggcgatcatgtcgtctatgtagacttcgatctctcggtgcatcatgtcgtggaacaaagccaccatagcccattgataggttgccccgacgttcttgagcccaaaggacatcaccttatagcagaaccttccccacagggtgacgacacatggtctnttccatatcctctggtgccatctttatctg

SEQ ID NO: 289775 - DNA, 482 bp, Glycine max
  unsure (1)..(482): unsure at all n locations
tgctaacccatggaagctcctaatatctcccacactntnntgggtggtctcattcttggatggccttgattntctcagggtccacttggaccccatttctaccaactacaaaacctaagaaaactatattatctacacaaaaggtacacttctctatatttgcatagagggtgtttttcctaaggactgaaagaacttgcctgagatgtcctaagtgatcatctaggctcctactgtacactaaaatatcatcaaaataaacaactacaattctacctaggaaatcccttaagacatgatgcataagcctcataaaggtgcttggtgcattagtgagcccaaaaggcatcactagccattcatacaaaccaaacttggtcttgaaagcggttntccactcatcaccctttttcatcctgatttggtgataaccacttttaagaatcaattttgaaaagatattggcaccatgcaactcatca

SEQ ID NO: 289776 - DNA, 176 bp, Glycine max
aaaaaaaaaaaggaggggagagaggaaaaaacacacaacaaaaaagaaaaaaggacaaaagaagaaaaaaaaaaggaaggcaaaaaaaagacgaaagaaaaaaacagaaaaaaaaaagaagaaagccagacaaagaaaggaaaacacagagggaaaaaaaaaaaagaaaaaaagaa

SEQ ID NO: 289777 - DNA, 270 bp, Glycine max
ccaataaaggaccccattgaagcttaaagatccacgctcactagaagcccccacaagcaagtttccatcaatatggataacatatagatatgaccataatcactgagataaacttcatgaaacaggacctcaacatcgggcaacatgtcgagcacaatgtcgatgaaacttaagacacttgagcatctcacaacaactgaatttctatactctggacggaccttagatatgaaggcgagcacattacccacgaactgatcaagtgcttca

SEQ ID NO: 289778 - DNA, 416 bp, Glycine max
  unsure (1)..(416): unsure at all n locations
agcttattatatctaaattgcctaaatcatttccaaatatgcatgtgaattangaagcatcaacaagaatcaagccaaggctattgtgcaagcaatcaatggggcaaaacacaccaaaagattatgatgatggatggctcgaattctcacaaaggtaaacttatcactttcaaattgagctttcaaaactatcatgacatgtaaaggaaaaacaaggatttcaagtcacaaaatgtcaagagacttttattttcagagcaattacccattacttgaacatatcctataatttanagacaaacatgcaaatttaacacaacaaaactaacaaaattatattagaacccaacaaaactaacaaaattaaactaatttaacatgactaacaaaaccaaaaccaaagaacacactccccc

SEQ ID NO: 289779 - DNA, 379 bp, Glycine max
tcatcaagagattataaatatgtgaccatggcatttgtttcttgaatgatctctcatctatcatctatctttcaatctatctttcaatatcttctttcatctctttcaacagatctttctaaattatttctcttcattattctaaaagattttttcaacactttctcttccaagaaaagttttttgttcagaaacttgtgctattcatctttttcattcacttatccctttgccaaaagaaccaaggactaatcgcctgaattcttttgtgtctctcttctcccttacaaaagattcaaaggactaaccgcctaagaattctttggattcttccctttcccttaagacagagattacaaatgactaaccgcctgagata

SEQ ID NO: 289780 - DNA, 415 bp, Glycine max
  unsure (1)..(415): unsure at all n locations
agctnttatttcaataaataagtttaaataagttggcccataatcaatataaagtaatggaaaaaaaacataatcaaacatctatttgtctttatcaagtctatttcaagtctagtattaaaattcaatatttttttttatataatgttactctgtaataatttttatatgcatttattatcaaaattaaaattcattntaaatgtattgaaatagagtaattntaattaaacatatacaatttttaattattttaaaacaatatttttaatgattntaaagatattaattntcattatgtgataatattaaagattaatctcatcgtataataaataaaacactntcatttagtataattaaaattatatattattatcattattattatcaccattaaaattataaaacactt

SEQ ID NO: 289781 - DNA, 421 bp, Glycine max
  unsure (1)..(421): unsure at all n locations
tagtagggaatctatccttcctaagatggagttctttccagtcactgtcgttaagaactagctcttttcttcctctattgcctttagttgaatacacctttgtgtggttctctatttggttcttaaccctctcatgcaacttctttacaaactctgacctagattccctttcttgatgtataaacaaagtgtccagtgggaggggaataaggtctaacgatgttagggaattgaacccatagacaacctcaaaaggggattgcttggtggttctatgagctcccctgttgtcggcaaattctacatgaggaagatactcatcccaagacttatggttgccttttagaagagcccttganagggtagataaagacctattcactacctctatttgcccatcagtttgtggatgacaagtagt

SEQ ID NO: 289782 - DNA, 421 bp, Glycine max
  unsure (1)..(421): unsure at all n locations
agctttttcagtttcataaagcttttggactaattaaattaatactttcaaaattaaagataaatatttcatatatcatcatttttatatttttattattttaaaaatgaccataatatttttatgtaaattaaactagttttctaggtttttaaccataatatatgtatttttcaaaacttccatttcaaagaaaataatatttattattttaagttcaaaactcaaagaggaaaaaatgcatgcaaacaaattcaaataataagtattggctaaaatatttttattatgaaattaaattttttaaggataaataatttcattntttgtaatatttgatattttgattnttatttgatccttanaagtaacattgtaacaataaaataatatttttcanagtttatgaaaaaataatata

SEQ ID NO: 289783 - DNA, 482 bp, Glycine max
  unsure (1)..(482): unsure at all n locations
ctgagccaaaatcccaacttaccatataccttgaaccagggtgttattataatccttgccctcggaagaaaacacaaaaagataggaacttcccaatcaaaagagtggaagaaaacaaaaagagaaaattcccaatcgaagagtgggagaaagcaaaaaaaaggaaagaaaattcccaatcaaagatcggaggaaaacagaagaaatatacagaaaggtctttggaccagacaatatctgaacaatacagaattgtcaccaagaaaatatgaaaagaaaggaaaccacgacctanagtggtcctctccctttgattaccaaccaaaatcctgtgcgtcggtgacttgtttgcctcgcgctaaacaaaaatagaanataaaaaggccaaaaacactcaaagccaaatttcccaccaagaataaccccattcccaagaaaaagtcctactgatccatgatcacgcatgtaatctttgatttgat

SEQ ID NO: 289784 - DNA, 409 bp, Glycine max
  unsure (1)..(409): unsure at all n locations
ttcttataataataaacttggccttctcttaattgtctttgggcttggcgaccacgatcaacaaagtactttcggcacctactatatgttgacttgaccaacgctgttattggaatgctgcgacaatctttcaacaccttattcacacattctgataggttggttgtcatgtgaccatatcgtcgtccagatgtatcgtaagccatgctccatttttccttcgaaatgcgatcaatccatcttgctatggctggactcagttgacgaaatttttctaagttttgatcaaacacatgcttgcaaggagtgtacgctgcatcaaatttgttatcatganaagttatacgtagacatcaaagtcaaaataatataatgtataaaataaaccttacccaatttcttgaacatc

SEQ ID NO: 289785 - DNA, 477 bp, Glycine max
  unsure (1)..(477): unsure at all n locations
cgaagatgatgttntaatggaggataagaaagagagaatgtgggtgcacanaattgaaggaataaaagagggagagaagtggaactttgaagtgtgtctcataagactttcattcttcaaagttacaacaagtgttacacatgcttctatttatagactatgtagcattcttgagaagctttcttgagaaaacttacttgagaagcttctttgagaaaacttccttgagaatctagagcttagctacacacatccctctaataactaagttcacctccttgagaagattcctaaagaagctagaacttagctacacacacctctctaatagctaagctcacctccttgagataagaagctagagcttagctacacacccnctataatagttaagctcacccctatgcccaataacatgagtatacagaaaaagtccctactagcaagactactcaaaatgccctgaatacaatgcta

SEQ ID NO: 289786 - DNA, 411 bp, Glycine max
  unsure (1)..(411): unsure at all n locations
agctttttcatttgaagaagaagaaagataagtagcaaaggtttcaagatttctcaaaagttgttcaagaaattctaaaaaattgttctaaaaagttattaaaatgcaagtcaaggtcttgcttttatagactcttcatgtctggtcaagaaaaccattggaagagttataaccttgagaaaaacctgaaaaccattggaagagttacatctcttgactttttattcaaaacttgtcactggtaattgattaccaaaaccatataatcgattacacaaaacattntatgaaaggatgtgactcttcacaattgattntgaatttcaacgttcagatacactggtaatcgattaccaatatattataatcgattacaccatttaaaaatcaattggaacgttgcanattcag

SEQ ID NO: 289787 - DNA, 478 bp, Glycine max
  unsure (1)..(478): unsure at all n locations
tcttatccaaggctcatcttggtggtgaagctccttcttccatgtcttattccttaatggatggcgccttctctcacctcttttccttttcttccgctgcatctccatggtggaaaatcaccattaaaggaccccattgaagctcaaagatccagcctccatagaagcccccacaagcaagtttccatcaatatggataacatatagatatgacaataatcactgaaataaacttcatgaaacaggacctcaacatcgggcaacatgtcgagcacaatgttgatgaaacttaagtcacttgagcatttcagaacaactgaatttttatactttggttggaccttgattntaaaggcaagcacattacccaggaacttatcaagtgcttcagacgatgcanttaaattgagatcaccatccttgaacaaagataatcaatttctgcatcaaacagttgtgatgatagcagataacatac

SEQ ID NO: 289788 - DNA, 394 bp, Glycine max
  unsure (1)..(394): unsure at all n locations
atctntttctgcacatttgcctcaattattttttcattccctacatcccattcaagtaagtgccatctccatctaattttacctttgccttgagatgtttggtgctttgtttgttgatttctttgtaatgtttgtgagatgagttgtgtgtaaacccatggtccaatgctttgattggtggctgtactagatggctctaggcctatctttgattttttttttacagattagcatgtcatgttgctccttatccctcatttatacatgctttaacatatgcacaccaactatntgatgaaataacacanttgctattctacgtgttattttgatgcttgaatgggtaatgatatctacacatgttcagccattattttacgtgtatgatcaactt

SEQ ID NO: 289789 - DNA, 467 bp, Glycine max
  unsure (1)..(467): unsure at all n locations
cggattgatttaatctaactagggatcgaggtttagtaatttattgctcagcatagagcacanaaacatgattgagtagagaaacatctttatatgcatcagctggtttgttagaaagacctaacacctttacctactgctgtcaatcttacttacttgcatttttactatatttagcctagacttattttaattttgttttaaaccatcaattatcaatgtttctttcaacaatgccttatttctgaatttaaccctgcctaatactagttccctgagttcgatactcggattcatctgttttaattntaaatacttgatgacccgatgcctttccatcaaaccggatttcccttgaacatatttgtatgaagaaaaagtggaccaaaaagtatatgcatgggaaatccaacactggtcttatctgtagtatgcttttgcatactaagcatgtgattaagatcact

SEQ ID NO: 289790 - DNA, 412 bp, Glycine max
  unsure (1)..(412): unsure at all n locations
atctntggaaattgattnctatacaaaagttagtcgtataaagcgactaacaaactcccccaaatttacagttttgcttgtcctcaagcaaagaaagaacagttcacttgtcctcaagtgacaaagacagtggccaaataaaagaaaatggtgtttgattcatcaaggacatcaaccatatgaactgaataccatggaatgcttaaatcaattacttctcacaagcatgcagtctttcaaagataagagcacaagtattagagtcacagctgaaataagctagtaagcatgacaganatcaaggaaggatcatcaaccaaaacctcacagtcattgtttcactcaaactcaagtgtntaggcttattccatcatatacaaccaacacaagttccaacctttgcatttcatct

SEQ ID NO: 289791 - DNA, 403 bp, Glycine max
tggttcgaggtacttacccgttgaagatcgaagaacgattttatcgaatgaagatcgtcgaagaacgggtcagacctttgcgagattcctcacggaaaacgttacggaaacgtttcggaagcgcctcggcttagattttcttcacggaaacaatttttccaagcaaattcgaaagagagagaagtgcctaaggggctggaccccttccttcttcatttcctcccctatttataggaaaataggggaggtggttgccgcccagctcgcccaggcgagctcagctcgcccaggcgagcagggttgcttcctccagaagcaaccgccttctggaggaatcttctggagggcccatgtgggcctgggtgctatgtgcacccccattcttactaagtacacccccctc

SEQ ID NO: 289792 - DNA, 409 bp, Glycine max
  unsure (1)..(409): unsure at all n locations
agcttgtgatgttatgagcaagtggaagagagttgagcttatctgactttattaaaggaagtttgtattgataatcgaaaagataggaaggaggatgggtcttgctagctgaacggcgaggagaagaaggttgatgggagattggtgattcatttgaggaaggaggagacatggttgatggtgaataaagggacggctcgttgaatggaggattggaaatagggctactaagtgaatttggtaaaggtgatgaaggggatgtggtctcaaagggaacaaaaggtgtgttggttggtatagcaggtgaggatggtgtatttagtaagttagtgatggaattattangaagaggaggtgaatgtnnggttggattgataggagtagtgtgaaaaggaaaaattagttcatg

SEQ ID NO: 289793 - DNA, 370 bp, Glycine max
  unsure (1)..(370): unsure at all n locations
cgccattgccaaanaatattaatatcactaagtttacttttatgtattttntattccatttatatattcttgttttttattttaatttttaccgattaatttggaattgtatttatgttttatttttttagcattcttgaattttcatgtttctaacctttataattttttttctatttttatttaattttttttatatgaaatagcaattaaatgcgtattaagatttaagggacacctcatagagggatatctcatgcacgctcaattctcttaattatgagtcacggtttgcaaattgcaacccttgaaattataggatagaagaggaaattgattatcaattcatttggggtaatggatgagatag

SEQ ID NO: 289794 - DNA, 400 bp, Glycine max
  unsure (1)..(400): unsure at all n locations
atgcttttctccatcaccacaaccaccagtagccaccacgaaccgtcgtagttctccgttgaaacctcacaccgagaggaacccttcaattggagcgaaatcttccaaacttacctcacggtttcggttgagaatgaagcccaatctgaccttcgcagttttcttcgaggtaaccgtgattctaagcttgttccttggtagtttaagcttatccttgcatcattttctgactttggaaccaccattgtaagttttatgcttcctttggaaaaccctagagaaagacactntgtaaaagttatctttntatgaaatgggtgttattttcgtgaccttcactgaatcccagtcgcattggcatgactnagaatttcaaatgatgctccttttgtagactcga

SEQ ID NO: 289795 - DNA, 464 bp, Glycine max
  unsure (1)..(464): unsure at all n locations
nttaaggccaaaccttntcaaccatcatgatattctnttaaaatataatggactaacatgaatcttttcttttgatctcttgatcttgacttgaacttgtagtgtaaaaaataatggactaacatgaatcttttctttaggtcacatgtttgttggtatatgtagaggatgaagactcacccatacgaccaacatttttcaaatggaatcattgatgttttgtagtcgttggggatggaatgagttcgctacaacaagcaataataaggtggatggacttgttcaaggaaatgaggatcttccaaggatacatcatgagttcaaaagggtatatgatgaattntagtttatggattcattgctctcggtcttactcatttcttggatattagagagggtagactagactgtcgttcatgatgtattaaactcttggatctgacttagatgttatatgtatttaa

SEQ ID NO: 289796 - DNA, 387 bp, Glycine max
agcttttataggtgaaatcaggtgcagccatttcccttatagtcctctcacgaggtggaggttgtgccatgttctcagaatgtgcaaaatcagaatgctcagaatcagaatgctcaaaattataatgctcaagattaggatgttcaaaatcaccaataacagaatgcacagattcaccagttatacaatgctcagaatgatcaaaaggtataaaatgatgcctaactgaaattctgatactgaggacagatgtcgtacaggatgtcacgacatcgcgcttcagaacatgcagattgtatatgacagtatgaacagattatacaagtaaataacacaagagaattgtaacccagttcggtgcaacgtcacctacatctgggggctacc

SEQ ID NO: 289797 - DNA, 464 bp, Glycine max
  unsure (1)..(464): unsure at all n locations
nttccacttccacacaaaaatgtaattctaattctatcacttgtttntactgtggaagaagaggacatggcatatcaacttgctacttcaagaaaaattatagtaacattaaaatgatatgggtcccaaaaggatcctcagtttatactaacatgcaaggacccaataaaatttgggtacctaagtcaaaaacttgattatgcaggtatctttgagaaagaagtggtacatagatagcggatgctcaaaatatatgactggagatgcatcannatttacacacatatctccaaagaaaagcgggcatgtaacatatggtgacaacaacaaaggtagaattcttggagtgggtaaaataggtacannatcttcanactccattgaanatgttctacnttgtgaaggccttaagcacagcctgcttagcgttagtcaactatgtgacanaggctatctagtatcat

SEQ ID NO: 289798 - DNA, 407 bp, Glycine max
  unsure (1)..(407): unsure at all n locations
agctntataaagtgtntgtctccttcgtagtcaaataacacataacttggataatttgaggaccattgtctatgataagcaaaaggaacctcaatgacgttctgcaaattaacatttgaagcatattatttatttgatattaacataaataagtaaatgtttaggggtgaaagtcatgacctgctcaagatggaatgacgcatcaaatcggtgcacaattctcggtactcataaatttgatgggccctagatgagaaacgtttatgtaatgagtaagtgaacaaagatgtacccattgaaaggagaagataaatatgcgcaatatcaaacatgtactatgaacganaagagcaagcatagaaagatgaaggatgcatgatgaagcaaactcgaacatatacttataa

SEQ ID NO: 289799 - DNA, 474 bp, Glycine max
  unsure (1)..(474): unsure at all n locations
ctatcttttaatgcgagtntagatactagttgatatgtaaaatatcatctcaacttcactagacaatgtgaaagttataactactagcttatgagaaaacatgaaaaaccacatctagatggtgaaatcaaacacgctattaatccttgagggaagtatattactattgattntctatttccatcatttgtgtaataaggcatttctttccttgaactataaattagtataattggggatcttaatgcttaattggactatctgactcacagatcccaaatgaccttttagttttttaagctctgaatttgcgtttctaattgaaagatgaatgactaatgatctgaattttcttcttgcaatggtgacattnttggcagacttatgtgtccaacaatgaaaagattgtgcatctcagaccccggacttcaaccaaagaattcaagctaacaagaaaatccaagtttgataatc

SEQ ID NO: 289800 - DNA, 416 bp, Glycine max
  unsure (1)..(416): unsure at all n locations
agcttgttcattttatattctgatgagggtgttccatatgttctcaagactggactaatacatttgctgcccaagtttcatggtcttgcaggtgaagatcctcataagcatcttaaggagttccatatcgtttgttccaccatgaagccctctgatgtcctagaagatcatacctttctaaaggcttttcctcattctctggagggagtggcaaaagattggctatactaccttgctcccaggtccattttcaactgggatgaccttaagagggtgttcttggagaaattctttcctgcatctangaccactgccatcagannagacatttcaggcatcaaacaacttagtggagagagcttgtatgagtactgngaaagattcaagaaattgngtgcaagctgtcctcaccacca

SEQ ID NO: 289801 - DNA, 283 bp, Glycine max
  unsure (1)..(283): unsure at all n locations
gtgaactccggaagcctatttactggattgtttctccccggattgtaacttgtgccaggattgaaatcaccggtgggacgaggccttgcangagctgtggcttgagtgatggctctttatggtggggttgatgtcccttgccggacgggtgtcgagttggaggggtttccgacgtgggccgaaaagctcggaaggtgctgggtatactgatgattattgtgatggggtgatagtggttttggccaagcatgatccgacgttatggagtgagcatccacttctt

SEQ ID NO: 289802 - DNA, 414 bp, Glycine max
  unsure (1)..(414): unsure at all n locations
agcttgttccttacatggacatccaactcaaaagacgttaaagaagcgctcatgggagacaacctagtatttttgaactttcttttaatttcttttatacttcctggttacatatttgtgttgtttaaatatttatttatttgaactctttttaaattgttaagattatacttaattataagtttattataagagtttttgtacccatgaaaaaaaaattgcccttaactcacctgngctagtggacagctcgctttggcgagtgaatgtctgtagtgaaaaataaaaatgggtgaaatctaatttcaccccactctcatttcacacttcttcttccttctttttgcatganaccttagccctcattcttccaaaactcgcccaagctaccttcttttccacaaatccttcatt

SEQ ID NO: 289803 - DNA, 477 bp, Glycine max
  unsure (1)..(477): unsure at all n locations
gcttcatgatgatgaatcaagttgattcaagaagttntgatattgtcttgttgttgacaaaaaacccaaagaatgatttcgagattaaatcaagatcaaattcaagaatcaagagaagtttgatttcaagattcaagaaaagatgaattcaagttccaagagaagaaatcaagaagacttcacaatgggaagtattgaaaagattttttaaaaaacaaacatagcacaattttgtttttcaaaagagttttcacaaaattttctatgttaccagagtttttactctctagtaatcgattaccagtttcctgtaatcgattactagtggcaaagtttgatttcaaaagcttttaactgaatatacaacgttccaattgatttcaaaatggtgtaatcgattacaagatattggtaatcaattactagtgcatctgaacgttggaattcaaattcaattgtgaagagtcacatcctttc

SEQ ID NO: 289804 - DNA, 419 bp, Glycine max
  unsure (1)..(419): unsure at all n locations
agcttggttcgttgtacttacccgttgaagatcgaagaacgatgaagaacgaatgaagaacgtcgaagaacggttcaaacctttgcgaaattcttcacggaaaacgttacggaaacgtttcggaagcgcctcagcttagattttcttcacggaaacaatttttctaagcaaattcgaaagagagagaagtgcctaaggggctgaacccttttccttctcacttcctcccctatttatagcaaaataggggagatggttgccgcccagctcgcccaggcgagccangttgcttcctccagaagcaacaaccttctggagaaatcttctggaggccccaagtgggcctgggtgctatttgcacccccattnttactaagtacacccnctctgcttntttttttgtgattcttttttcgtaa

SEQ ID NO: 289805 - DNA, 306 bp, Glycine max
tctaagatgggctaacttgagccatagtccatttatggctccatagtagttaattattgagagggttccttgcatggtactgaatcttgctttcaatttcatagtaagtagtaaagtccttcttcatggagtatgtctcattaagattcccctgcatttcacgaatggagggataaaacatgcaattacagcttattttgtgaaccaaagtgccatatctaggtttatgataagagagtcttcatcatccctagcctcaaactttggacctaccctttcaatatggctcaacttcatatgcctttt

SEQ ID NO: 289806 - DNA, 366 bp, Glycine max
  unsure (1)..(366): unsure at all n locations
ttctttttctttanggcttgtacctcatcactttcttccgaagctttaacttcattgtctctcacagtctttagatttgggagccaatccaatccttgtgtccggattctcagccacttattatagcctccgatgatcccatcactgcttcccctaagctttctgtcctttcttcacgccgcctcccatgccttgcgaactccttggagtaccctcgcgttgtggtcactgaaacctcgtgcgatgaaaggcgtgatgctttcgtctgatggcactcctctcatgggacatccttcgcatgaagatagaatcctgattcttccttccttctagcgagggaaccatttaacagacgcccctccatgc

SEQ ID NO: 289807 - DNA, 436 bp, Glycine max
  unsure (1)..(436): unsure at all n locations
ntctanactntgttnttctgcaagtggaaattctgcagattatatatctgtgctattntttcttccttctccctcttgcctaaagattcaaaggactaaccgcctgagaattcttttgattcttcctcttccctttaaacaaaagatttcaaaggactaaccgcctgggatatcttttgtttccccttacaaagattcaagggactaacctcctaagaattctttgtcttaacacattggagggtacaccctttatggtacaagtagagggtacatctacttgggttgttatactgagaacaagagagggtacatctcttgtggatcagttcaagtggagggtacatccacttggatgttcaaagagaacaagggagggtacatcccttatggatctttgcttgtaaaggattttacaaggttattggaaatccta

SEQ ID NO: 289808 - DNA, 411 bp, Glycine max
  unsure (1)..(411): unsure at all n locations
ttctngtattgattttgaaaggngaaaccctgctgcttggacaagatctgcctttaaggtaaacacaaaatgtgatttgcaagtgaataacatgtgtgaagcattcaacaatggtaaatggagtacaaagataaaccaattattactctacttgagggaatctgattntacataagggccaaaattgtgaagctgaggactatcctcatgagctatgagggttcaatctgtcccaaaatttagcaaatcattgaaaaaaaataaaaaaaagcatgtgaagcatggtgggcacattggtgtggtgatgctgatttatctttgtttgaggtgtcaagggcatggaaaaanttgttgtgaatcttaaaanatagaaatgttcttgtagaaagtgggagctaactggatcaatgg

SEQ ID NO: 289809 - DNA, 476 bp, Glycine max
  unsure (1)..(476): unsure at all n locations
tgcagccagtacctttatggcacagaggatcacttctgtgattgttctgtcagcactctgtgagactattgatgctgatgtgtcaaggttatttttatttttattnttttatttgngattgttagttgttagtttttgttagaacatctccaatgcatgatgcttaaatgaattgcttaaagttaaacaatgtttcttaacaattttttttattanaatggatgatatgtcaatgctctgtataattgagttgtttaattgattattataaaaaaagaccaattttttaatctaaaatttaatgtgactcaagttaagtgcttactttanaaactttagagctgaaataaattcttgtataaagttcttaaatctatgtggcattaattgtaggattcacaaatttaagacaaacaattcatttaagcaatcatacatgatagacgcttttggtggagaaattcgaacccccaact

SEQ ID NO: 289810 - DNA, 413 bp, Glycine max
  unsure (1)..(413): unsure at all n locations
ttctttttactgaatttgcaacgttccaattgatttcaaaatggtgtaatcgattacaagattttgataatcgattaccagtgcatctgaacgttggaattcaaattaaattgtgaagagtcacatcctttcataaaatgctttgtgtaatcgattacaaggatttggtaaatcgattaccagtgacaagttttgaacaaaaatcaaaagatgtaactcttccaatggttttcaggattttctaaaggttataactcttccaatggttttcttgtctagacttgaagagtctataaaagcaagaccttgatttgcatttaaaacaatactgacaacctttacaaacaacttttccacatattcttttactagctntgaatctctttgaacattttcttgaacttcttcttctt

SEQ ID NO: 289811 - DNA, 480 bp, Glycine max
  unsure (1)..(480): unsure at all n locations
nttanattgaatntacaatgttccaatttatttcaaattgttgttatcgattacaagatattgctaatcgattaccagtgcatctgaacgttggaattcaaattcaattgtgaagagtcacatcctttcataaatagctttgtgtaatcgattacaaggatttggtaatcgattaccagtgacaagttttgaacaaaaatcaaaagatgtaactcttccaatgattttcaggtttttctaaaggttataactcttccaatggttttcttgaccatacttgaagagtctataaaagcaataccttgacttacatttaaaagaagaacttacaatacttacaacctttacaaacaacttttccacatattcttttacaacctttgaatttcttcttcttcttcctttgcaaaaagctntctaaactnttctggttttccaaaccttgaaaataaaagtgtgctattcatctttttcattccc

SEQ ID NO: 289812 - DNA, 415 bp, Glycine max
ttcttgtatactctagattcacttgtcttctttcattatcatcatcaaaataccttttgaagcatttcaatctttcacgagtaagttttccatcttagtgtgaaagaattttatttgaatcttcacttacgagcctatgaaagatgaagaaaaaattataaaaattggaaagcaaataaaagatttcaagggtgcaaaccttacaaagttccaatgcacccaacttgaaccaaaatagtaaatcagaggtcaacaactacaaatgcaacaaacaacaagtcaaagtcagcaaccgtaaatgctatgaaggtcataagcaaaacgaacagcgataacaacaaactcaaaccagtaacgaatagacatgaatgagagaaccaataaaaacgtacgtgaatgaaggagtgacatgact

SEQ ID NO: 289813 - DNA, 378 bp, Glycine max
  unsure (1)..(378): unsure at all n locations
tgtcctcggtgacgaanacaatagaataagccccttcgattctttcacaggcgtcatctattcgaagaatgaagggtctgtgtttggaggtggcgatgaggtggaggacaacctcggtgtcagaggtggtgttgaagatggagccgttgtcttcgaggttggttcggagggtcttatagttgacgaggttgccgttgtgggccacgccgacggagccgaagcggtaaccggcgacaaagggctggacgttattgagcatggattggccggcggtggagtagcggacgtggccgatggagaggctgccggagagctggtctagttttgattggttgaagacttctgagacgaggccaacgccggtgatggattggatga

SEQ ID NO: 289814 - DNA, 391 bp, Glycine max
ttcttgttcctggaagaacttgttccctggagctattgagaaaagcttgatgattttagagcactgcaagaaaagggtctattaaggatgcaaaatgggtgtgtgatcaatcaattgtgcctgcagtataagccaattgaggaggaacatgcttgcattttgatgatgacaattcacaatttattttgaagagaccagcaatgacatcttatctggcagtcaaagactgtaaaagatggcattccatcggttttaatggcatcccagattttggatcttgtgtcatttagtttaatttgactctaacattaactagtttgttatttaacctgctatgtttattaactattaagaaatacattagagccattacatgcaatcactctttcat

SEQ ID NO: 289815 - DNA, 445 bp, Glycine max
  unsure (1)..(445): unsure at all n locations
tggctaggcttggctcgtttccaccctatattgtatgctaataattgtaagcagcactaatgggtagtgggtgccagcacatggccgcctgctccaccaatccaacttccctttcttaaatcatataaacataaggacaaatttgtaatcatttatttatcaaaaaacttttttaattcaattatttttatagttgaaagctagctatcagactaattcttctttttgtgtgtttgatttcaaatccaaaatttacatttagagtaaaatcacattaaaagattatcttatgtaatgttacaataaaaatatataaaaataatactagtttgaccaacattactaatgtaattctatgtttttctctaatctccccttcattntcaattcaaattgcttcgacttgttttgttcatctctgacatgtgttaattctgccatatcg

SEQ ID NO: 289816 - DNA, 344 bp, Glycine max
  unsure (1)..(344): unsure at all n locations
ttctttttgtgatgatcttagaggaagaacataggagtaacttgagcatccaccctggtgctaccaagatgtatcaggatcttaagacaatgttttggtggccaaacatgaagagaaaggttagtgagtttgtgcatgcatgtttagtctatcagaaggctaagatagaacatcagagaccctcaggtaagctgcaacccttagagataccttagtggaagtgggacgatatctccatggatttcattgtagggatacctangacccccaaaggtgtagattctatttggtttgttgttgaaagattaatcaaatctactcactttatccccatcaatatcaag

SEQ ID NO: 289817 - DNA, 464 bp, Glycine max
  unsure (1)..(464): unsure at all n locations
tgcctaattaacctgagattgagacattatgtattttaaacactctaaatggaagtactaagtatttattacctatacttaacagaaaatacttataacactacaaaataaccaaaaattagaagagtttgatacaatttccacaagttttatacacaaaagttagtcgtattcaccgactaacagtctgtcgatccctactatcacaattgtctttgggaatatcccatgagctcttggttgaatgagttttcttctcaaatgtgcaagtgtgaaacctcaaggattctctttttctttatatatatattntttaaacaatcacaagcgtgcatgggttccattccagaatcaaaacttantagcaaaattagtcattccttgatccacatgggctttattgggcttgtaacatggtcaggggtaagaggtgatgcantcctaccccgcaagggtatcggata

SEQ ID NO: 289818 - DNA, 389 bp, Glycine max
ttctttttccaaatggacttaccttgaattaattcctttgatagcccttttgagccttgtttccctttccttgttttgaagctcactacaagccttaagtgaaaaaccatgatattaccatatccttaaggaattttggagctttggaattgttttgggaataagtgtggggggtttttgtttcattggacaacttgttttgttgactatgcttcatgatgtattttgggtcatacttgatgtacattgtatattggttaaatgttggacatgctgaatgaaatgttgtttctcaaaggtaaaaaaaaaaaaaaaaaaatcaaaaaaaataaaaaatcaaaaaaaaaaagagagaaaagcaataaagttgagtgaataagatcttaaat

SEQ ID NO: 289819 - DNA, 458 bp, Glycine max
  unsure (1)..(458): unsure at all n locations
tgcatagcagtttctactacttaagctgttacatagttgtagtttagttgttgtactcaaagtctttggatgaagcaacaacttgaagactttggagtaaaccttgatcacattcctctaaaatgtgacaacacaagtgctaccaatctaacaaaaaacccagtcaagcattctaggactaaacacatagaaataaggcatcattttcttagagatcatgtgttaaaaggtggctgctgcattgagttcattgatagtgagcatcaactagaagaaattntcactaaatcttttgctagagatagtttttttattagaaatgaactangcatgttagatgcatctagcataaaatgacattctgtttgcatagtgtgtgatgcacattgctactcatatcatttgttntgtttagcttgtgtcccagtttattgattcatatgcatactcattagtag

SEQ ID NO: 289820 - DNA, 112 bp, Glycine max
agcttattcttgcatcattttgtgacttgggaaccaccaatgaaggtatagggcatccttggaataacactaaagaacgagacgttgtacacgctatccttacgtgagacgg

SEQ ID NO: 289821 - DNA, 510 bp, Glycine max
  unsure (1)..(510): unsure at all n locations
cgcctttgtgcttcgttgacggacctatgatactcagcttgtccgcagctcgctcatgcgagcatgggtgctacctacacagtcttcttacgtctagacgaaccttcaggagggcccagatgggtatggctgatataagaatgcacatctttactatatacacccacttgccgttcctaaggtgatcctattctcgtacagagatgcctctgacgaattacgcctcgactcttgagctctttccggactgcatccgaaccttgcggatttcatactcatacccttcattgactatcatgatgctacggtgcctcactaattgtgcagggatgcttacatttgacaacgcgtgtgtcaccgaaccgtgcggacangtgcgtgatattacctttagatttccagcatgtaccggagttccacaattgcctacgatgggtgcatgcacctccatcgacgtacttanatagatgtctacggcgatagccacgacgacattaggcttacagtgcn

SEQ ID NO: 289822 - DNA, 415 bp, Glycine max
cttattgagataccctgggggatatgagacaaatttgatttaggaagtattttagccccactttttttaacttctcttcttaaaaggagagatgttgagtcaaacacattttttaaagagctcttaaaaggtttagcagtttaattttataaagagaaatgaaaacaatagttttcttcttctttttttaaagctaggtgacctggtgaaggagattttcaaatcaagttgtcatctcctttctctcccctctctcgctctctccatgttctttctatttctctctctccccactttctgtctcactctcttcctgttctctcctctctttctctctctctctctctatctctatctctctccctgctcttttatctctccgtcttccagctctcactctcacaagtcatctctt

SEQ ID NO: 289823 - DNA, 219 bp, Glycine max
  unsure (1)..(219): unsure at all n locations
tacaatacggacatggctcccgatcggaaccagcttcagggtatgactaaacgagagcatgagtccattaaggaatatgcccaaagatggagagatctcgcagcccaagtcgtaccgcccatgacggagagggagatgatcacaattatggtagatacgttacccacattctactatgaaaagctgataggctacatgccagctaactntgcggatctt

SEQ ID NO: 289824 - DNA, 414 bp, Glycine max
  unsure (1)..(414): unsure at all n locations
agctttctcggttccattttctgcgaaggcaaacattnggaaagttagttttaccagtgggacactactaaaaaaaaatggcatacaacctcctcccataaatacaaacatcaatgtaaatttagagcaagcttatgcgcatatttccttacgaacgttcactngcacaagacattctattaactaagaaaaatgcacccatatacaatcaaggcagcttcgttacctagattatttacatgtacttccaaggtgtatttgttacttacatcacacacatttccttggctaaatttacatacatgcatactcaaagcattntggggtaccaaaaattgcacatgtgcacatcttggtatttctaatacctgtacatgcacaaacttcatgatgaatcttgactatctacacaat

SEQ ID NO: 289825 - DNA, 486 bp, Glycine max
  unsure (1)..(486): unsure at all n locations
tcttgagatgtgaacctggatctgtcatatatggcctgngtatgtgtataaggagcctttcttttcttagatgcaatttgtaaaatataagacaaaacacaaaagattagcacatgttattttcacaaaaacataaaaataaaactgaaattttgattaagcgcttagcgcagcaggctgagcttagcgtgccttatgaaattttacacatgcgctaagaaaaacagactggcgcttatcctgaagacacataaaatattttttctacagattaagcttagctcaacagctgagcttagcctaagtctacaattttgaaaaccaaagaaagttggagcttattgcagcatggcgcgcttagctcggcctcatcagaataacactcangcttaacgcacaggcgcgtttagcctaactacaaaaatttaaaagacaatgagagagttgagcttagcgcatcttggcgcttagctcaacacacaacat

SEQ ID NO: 289826 - DNA, 416 bp, Glycine max
  unsure (1)..(416): unsure at all n locations
agcttatctcataaagcatatatcaataaagtactagagagattcaggatgaaaaagtgtttaacatcacctgttccaatttagaaaggagacaaatttagtcttgcacaatgtcctagaaatgatatgaaacgaaaaacaaatggaagcaattccatatgcatcagttgttgttgcatctactatggaagctgaatttgtagcatgttttaaggctacaattcaagctaattggttgcagaactttatttcaaggctngaaattgtcgacagtattgttaggccactataaatatgttgtgataactctgcagtagtatttttctaagaatgacaagtactctaagggtgctaagcatatggaattgaagtactntgtcgtgaaggaagaagttcagaaacaaagagtgtcaata

SEQ ID NO: 289827 - DNA, 443 bp, Glycine max
  unsure (1)..(443): unsure at all n locations
ntgaggatntggtctttgccagtgaaaggatcgatgtgggtctgaattttgcaaatttgatcatcctactaggacgactgagataactggggcaaataaagagggtgaggatgagggagaaacccatgctgtgactgccattcctgtacggccaagtttcccaccaacccaacaatatctttactcagccaataacaaactttctccttacccaccacccagttatccacaaaggccatccctaaatctaccacaaagtctgtctaccgcacttccaatgacgaacaccacctttagcacaaaccanaaacaccaaccaagaagtgaattttgcagcgagaaagcctgtagaattcaccccaattccagtgtcctatgctgacttgctcccatatctacttgataattcaatggtagccataaccctagccaaggttcatcaa

SEQ ID NO: 289828 - DNA, 387 bp, Glycine max
tttcttattattgtacgaaatggacaaacatgaaccgtgttcttgaagaagtgggtctgcctcaagaacctcatttttctcattataggacgtatagcaatggtggaaactaatgttacgtagaacggaaagcgatctcccatgtttgctcctaataaagggttgcacaaaggtgatttgctattaccttacctctttgttttaggtatgaacaaactctcccacattatcttgaaagcagtggaagcttggaaacctttttgtatgggaagaaagggccccctcatctcgcacttcatgtttgcggatgacttattattgtgtggtcaggcttctactaagcatatgaaatgtactttggacactatgcatttgtttggcgagatg

SEQ ID NO: 289829 - DNA, 562 bp, Glycine max
  unsure (1)..(562): unsure at all n locations
cagacacgaacacgccgaagcacgaattaagtaaaaaaccaaaacaaacncacaggcggnnnnttgatgcctcgtggacagccacccaaagaagcgcgcaggaagagcaacccacaaaaaagaaaagacgtcgtttaaaaacacaaaagccgccagggggaaagcgcagaagcaacacccaagagngagcaaaacaaagacacagaggaggagaaaaccacggccgaggaagcaacacaaagagggccccacaaggaggaggaggaggacgctaaaagacgggcaaacnccacacccgaaaacaagaacacacgcgaccaccgcaanaagacgacgcaaacggcaaccaaanaccggcaaaacaaacaaaccaaacgaaaagaaggcgacaccgaagaggaccccgggacagagaaccgaagacagaaagaccccgcggagggcccagaagatagagggacgaacaagagacgagagcgacaccggcccagcgggaaacgacacaaaaggacataaaacggcgacacacgccagccgaaagaggaacaagaccacaaaagag

SEQ ID NO: 289830 - DNA, 410 bp, Glycine max
  unsure (1)..(410): unsure at all n locations
ttcttctcttgttctggatcagctntggatgtatcaaattgtgcccaccattttacaaatgcttgcctccgtagtgatggatattgattagttttctcagtcttactgtaacgatattgccatgaaaaaattcatgacaaagaaaaactggagaaatattttaagtctgtcggaattcgtgattcctgagaattaaattgttttttaaattgagcaaatccttgttgaacctgctctgagaaaatctccggaatagggccaaagaaatcccaccattgtaagaaccaatttgggaaattatagattgtgttggttttgaaatatattaaccatgagtgcttgaagcgggtgtnttggtgccaaaaaacctttgtccaagcatcaacataatcccaataggtataacctac

SEQ ID NO: 289831 - DNA, 443 bp, Glycine max
  unsure (1)..(443): unsure at all n locations
acactataatactcagcttgaactattggtgaggtagactagganaagagaggttggttgtttaattctactcaatatcctcaatattagaaaataaatcaataaaataagaatttaacatgtccttaatttgatgatccttctctatccattgcccttaagtatttcttaacataagaatcttatttctttttcttatgttgatagtcttgagatgctagaatctcgtgtttctgtctccatcttggatccacttggttcttgattgttgaaaccaatcaagctcctcctgcttaaggattgcatcatactcatttagacccttttccattcacaaccaanattggttggatctcccttcataaatctttttttggatctctcccaacctattaatgactctctgctttctatatctaatgcaaccaaacacctttctcttc

SEQ ID NO: 289832 - DNA, 409 bp, Glycine max
attctttgatggttttgagaagaaatcacatgtttgtcatcatcaaaaagggggagaatgtgaatgtatgtatacatgattttgatgatgtcaaaagaagaatcaaacaaggctcattttgcttcaagattaatacaagattgtttcaacaaacaaagccttgattcaagatttcttcaagatcaagccttgcctcacaatgaaaggtttcaagtcattcaaggcacatgtaattgattaccaatacatgtaatcgattaccaatggtttgaaagtgtgtaatcgattacacatcatatgtaattgattaccagagactctgaacgttgggaattcaaattttaaatgaagggtcacaactgttcaagataaacaactatgtaatcgattacactaattctgtaatcga

SEQ ID NO: 289833 - DNA, 630 bp, Glycine max
  unsure (1)..(630): unsure at all n locations
cggcaacgatggggnntttgtagacnatcnctagctacatanctcgacatctatttagaatactcaagccccttgaagtgacangnnttgactanatacctnntgtaatnntagttaaagttttatgatatactnntggtagtnttgtcanatannattganacaccanatttcatgtggggtagaagatgaaactcagtatttaaatctnnnttgtaaccttaatattgggtttcctttttgtgttttntcttgggctttaanagtggaccatanaggggtttaannnatttgaatttttgtnntttggaaaagtatctatttttgttttacccaaagtttcttcttcaaatagataacctntgttnnntgttaaaaaaaagaacttgaaaatatttctataaaccacacattcaatcttcttcttcttgtgatantttgcatttacaatatatatatatatatatatatatatatatatatatatatatatatatatatatatatatatatatatatattctaacaatcatctaattgtctaaggtctaattaagagtagactgtgcgcacaaagaaaatgcacatatcgccgcacaatctactacaagtcacattattcttaattcg

SEQ ID NO: 289834 - DNA, 406 bp, Glycine max
  unsure (1)..(406): unsure at all n locations
ttcttattttctaaaccaagaaggaaacctcaccctgacaagggcatgagagagagagagagagagagagcaaacacaaagcacaaaattcagagttccgaaacaagtacaggaaaatcttaaatattcatatttcataactttttacttttttaggaggcttcacgcaattcaggttgtttttttcagctaatgctgtagggcccttattaattggtttcttacttccagttttaacgatgctttatctcagtgcatcactccctcaacctcaacatatccctgctaggaccactatgatctcaactaattnttttatgtaacatatagttatatttntcaatttataaaaaaaattaatgaaacttgactacatgtgaagaagaaattagtagaaaccagtctc

SEQ ID NO: 289835 - DNA, 410 bp, Glycine max
  unsure (1)..(410): unsure at all n locations
cgtaatgagcatgataacttgactgttctcgatacattttattttctaatgtcntatagttatatgaagcattatgtaatgttgttttgacatatctatactactgcacctacattgtactaaccatatatttctttataatgcaagtatactaaactacattttatgaaaatgtgtgaaagtctatgaattcaagtgttggtccctgatatctatataatgacaaatgtatgacattgatttaaccgctcttgtatagtcagattacatcaagaactttgtattgataaggctactgaaatggtctcctaagattataagaatcatgtgatgtttaattcaccacagtcatactgtgttgaccaccgccaaatgtcgatttttacgaatttttctaaggatgaccatgc

SEQ ID NO: 289836 - DNA, 388 bp, Glycine max
ctgcagcttttatttattagatgaagatgaatccgtggccacctcatggactcctctaaggacaatagcatcatttcttgcactgaattgttaggagttggaagccatcttctcaatcaaattcctagcctcagcaggggtcatatcaccaagagctccaccactagcagcattaatcatactcctctccatgttgctaagtccctcatagaaatattgaggaaggagttgctcagaaatctggcggtgagggcagcttgcacacaatttcttgaatctttcccagtactcatacaagctctctccactaagttgcctaatgcctgaaatgtcttttctgatggcagtggtcctagatgcagggaagaatttctccaagaacactctt

SEQ ID NO: 289837 - DNA, 477 bp, Glycine max
  unsure (1)..(477): unsure at all n locations
ctcagcttcatataagctngaaccatttatcaataaacacaagttgagttttattcaganaattagagtttatctcttttatcttagtgagagtgattctcctaaattcttgagtgattcaagaacaccctggctgtatcaaaggactttcacaacctttgtgtgttgccctcgcaggaaagagtgattctttccttcctatcatctccacccttgttctttcaaaccacaattccagaaaatccacctctgcccagaattatctcgtggccataactcccattttacacactcaaattaagtgattgttgagcctaaattgactttcaaaacgagacctttcacctcgttttgaaatcacctcatttggagccctgtagctntagttattgtcatttctatatntctgtccagccaccacttaacctacattntaccatcccattcatccattttatgccaagaaccaccttatta

SEQ ID NO: 289838 - DNA, 414 bp, Glycine max
  unsure (1)..(414): unsure at all n locations
agcttattagaacaaaattgcctcaatcatatccaaatatgcatgtgaattangaagcatcaacaagaatcaagccaaggctattgtgcaagcaatcaatggggcaaaacacaccaaatgcttatgatgatggatggctcaaattctcacaaaggtaaactcatcactttcaaattgagctttcaaaactatcatgacatgtagaggagaatcaaagattccaagtcacaaaatgtcaaaaacttttattttcaaaacaattacccatttcttgaacatatcctatgattcanagaanagcatgcaaagtcgtacatgcgcacaaaattgacccaaaatattaaactaaaaatccgacgaaactaacannaataacanattaacacaactaacanattaacaaaaccaacaaaa

SEQ ID NO: 289839 - DNA, 395 bp, Glycine max
tgtctcagcgtttatgcgagaccgaggtctatatgttggccatcatcagcatgtaccaagaggaattaaatctagccacggtccacgagcacaaagtggcggacgagtatgcccgagtgtacgcggataaggaggctagaggaagggtgatcgactcgttacatcaagaggcaacaatgtggatggaccgatttgctcttactttgaacgggagtcaagaacttccccgatagctggccaaggccaaagcaatggtgaacacctactccgcccccgaggagatccacggacttcttatttattgtcagcatacgatagacttaatggcccatataattaagaacctctatgaagtttggattgtcactcacatcttgactagttataactttctg

SEQ ID NO: 289840 - DNA, 352 bp, Glycine max
  unsure (1)..(352): unsure at all n locations
agctttttgttnttcccctctcaaattgacttctcttgaaagacttgaactttcatagtgtcacagtcttgagagcttcccagaaatattaagaaaaatggaaattataacagaacttgtgttggaggcctctgccataaaagaattgccattttcatttcaaaatctcattcggcttcaaatattacagttgcgttgttgcggaatgtttaggttaccaagtagctttgtcatgatgccaagactggctaagattattgcttgggaattgaaagggtggctatttccagaacaggttgagggtgaagaaagagtagctcaatggtgtcttcaatgtagaatgctttatctc

SEQ ID NO: 289841 - DNA, 454 bp, Glycine max
  unsure (1)..(454): unsure at all n locations
ctanaatatgataatgcaatctgggggtgtagtacatgataattatgtttgaaacanaatgatctggtgtgatcgagttacgtgaatccaagtaagactatccatcaatgttctatgtaactttcaaaatgatgtatattacaaacagtatacgaaaagtgcaattgctagagcataaaagtgtttttggaagtacaatttcttaacgaaatcttatcaattttgttgaanagaagtatattggctagcttgtgacaaggagtgttataaagatgacatggcttctaaatgcaactgttaattaaaaagagaattagaaagtgcaaattagaactctcttttaagtggtgcatgcaantttcagtggccagtgctgttaacataggaattaagagacaagaatcgatgcanagcaattacaaatcatgtcttttcaataagaatattaacatat

SEQ ID NO: 289842 - DNA, 377 bp, Glycine max
  unsure (1)..(377): unsure at all n locations
tttcttttatatcgtcttcacaacatgagaacaatgtacttactatgagcttcttaattnttttccctttacacccaattattgctggtcttctttattttccctgttttggtcctttaattcagatctgttattctctgaagatgaaggaaaaattattttgatcttatagctttctcaatcgttcatggtttttggtagtgaatctttacttccttgctatagaagccacctttaaccaacaaattaaattcatactgtgctttttgactttttggctaaacagattataagttntaagtatgttgcatgggtcattntattgngtgacaatctctctttgcagttatgccctgccattgcaaaaagctcaagct

SEQ ID NO: 289843 - DNA, 448 bp, Glycine max
  unsure (1)..(448): unsure at all n locations
tgcagaatgcatggtttggcactncattacgttgtntcgttcggctccaagtggntagaaagtcttctgtttgccaattgcatttggaatggcctgttcccgaaaatacttccttctcttgagcttcctgatcatcctgatcttcttcagccgtttggggtcaacaactttcttgcttttttccaatatctctttccttccctccttataagcttgaatggttttacttctctgatcatctggtaataaagccaacttggaaaatatcttgggactcactatctcaagtttctcagtaatttccttgaatgctggaacaaggccacgccttatgaagcacccttctataagccgcatcgtatttaactcggggagactatgagcatcttttaactccagatcctagcaaaatggtgagtcatttaaccacatcctgagagagtgagcc

SEQ ID NO: 289844 - DNA, 342 bp, Glycine max
  unsure (1)..(342): unsure at all n locations
agcttattgcaatggtttgattagcatgggcagaaatgtgtcagcattaataggtaaatatgttcctcacattcctgagaaatataaggacccaagtactttctgtataccttgcattattgggaacaacaaacttgagagtgccatgctagatctaggagcatcagttagtgtcatgcctctgtccattttcaattctttatcttttggatctttgcaatctacagatgtggtgattcatttagcaaatagaagtgttgcttaccccgtangtttcatagagggtgtgttggttcgggttggtaaacttatttttcctgttaatttttatgttcttgatat

SEQ ID NO: 289845 - DNA, 443 bp, Glycine max
  unsure (1)..(443): unsure at all n locations
tcctctctcggtcgacgctcgcctccagccgcttcgtcttgtgaacgagtctgtcacactcctcagtgagagtagtcgtttcattcgcgagatgagtgacgaggtcgctgagctggtgcttgagagcagaaacctcatagtccctatctttgaccagcaagtcgaagtggaggttcatttcctggagcttgttcttgaaaaagacagaaacgacgacgttttggaggtcgaaggtgaggttggtgttgaatgtgacggcggactagagagagtgaatttgttggaggtgttgggtggtctccttgagaaggagggcattgaggtttttgaggttctgaatctgcagttctgaggaggagtcatcaaccatggagatgggttgttgttctgctttggggtccagagattcngacatacatagacattctctgccagagagaggg

SEQ ID NO: 289846 - DNA, 364 bp, Glycine max
  unsure (1)..(364): unsure at all n locations
agcttttctcagtcgtttgtaaggatgatngggtgttagaaagcggcgatgcctactgtagactgtttttctcccatgtttcagttgtgtgtaacttgtattttcttcacagatggggcatgcatgatgacccttaacactgtaaccgctgagattcccatatgctgggaagtcattaatggtacaaaaaagcattgcacgcatttcatacgtctccttgcgaaacgcatcanatactacaaccccctcgtcccacaactttctcagatcttcaaccaacggacttagataaacatcaatgtcatttcctggctatcttgggcccgatatcatcatagacaacatcatgtattttcgcttcatg

SEQ ID NO: 289847 - DNA, 444 bp, Glycine max
  unsure (1)..(444): unsure at all n locations
tggatattcagcttgacgagggatcgaaggtttagtaatttatgctacttcttagaacacaagagcacgattgattagggaaatatatttccatgcatcagcttgtttgttagaaagatccaacatatctactgtcgcaacgtgcccttttgcgggcgagcgaaggcgaggctcacgggtgcgctttccaaaggaggaaagatgcgcggagtcgccaccaacgtttatttgtggaaaacgtcgggaaaaccgaaggaaatcggtcaaaaatgaaaattctaagttcgggagttgtatttacgtttgaggaaggtattagaacctctcacgtttgtctcanaggacaacaacctattttttagaattgtggaaattgtgttaccttaactntatttctttntattttttgaggtcgacaaaagtggggctcttgctcctacgtac

SEQ ID NO: 289848 - DNA, 412 bp, Glycine max
  unsure (1)..(412): unsure at all n locations
agcttgtaggattattgtgtacttatcacatgtggtactaggtggcggtcgggcgatggtgcacaacaagttttccacatccacaatgcgctcataaacccaccatcccctgttgcccacctccatctgagctcacgtactcccacgtagcccatattctcgtttctctcaacaccgggtccccatcaatcctcccaagcttacacaacatccaagcaaaacaacattcaaacagcacaagctatcacagccaagcaaaacagggcaaaggcagaaaactctgctcaacacaccaaccanaatcatagcttttctcacttaaagaccccagtaacaattccctcgatccaattcgttaaccggtggatcgactctaaaattntactggaaggtctatatacataagactaca

SEQ ID NO: 289849 - DNA, 448 bp, Glycine max
  unsure (1)..(448): unsure at all n locations
tctcaaggaagttttctcaagaaatcttctcaaggaagctttctagtctataaatagaagcatgtgtaacacttgttgtaactttgatgaacgagactcttgtgagacacaactcaaagttcaactactctccctttttcttccttcaatttcgtgctcccccttctctctttctctacctctttcttttcctccattgaagcatcctctccaagcttcttatccaaggctcatcttggtggtgaagctccttcttccatggcttattccttaatggatggcacctcctctcacctcttttcctttgtcttccgctgcatctccatggtggaaaatcaccattaaaggatcccattgaagctcanagattcagcctccatagaagccccacaagcaagtttccatcacaagtgatttggatcaatggaaaaaataagacaaatcatac

SEQ ID NO: 289850 - DNA, 373 bp, Glycine max
  unsure (1)..(373): unsure at all n locations
agcttttacacattattttaagaaatacttagtatctattggtgaaaaatccgttgtgcctgcctaggatttctggccttgccagctttctttgcttagttgttggcatttttatattcaccgcatgctctgcatttctctctgtagtctcccttaccagagtttattttacattcttatggagtattacactactcaagtaagactgtaacacatggcactgcggttgattcaaaataaattattaaattaaatnttaacgggtacaaaactttgtagagtattagctggggattgggagcatattagaatttctcctctctcatagcctgcactctttgctctttcttgctcccacattatctnttcatgt

SEQ ID NO: 289851 - DNA, 451 bp, Glycine max
  unsure (1)..(451): unsure at all n locations
actcaagcttatcttttgaaactatcccttatagacttatagtaagtttgtgtgtggtcttattctgctgacaaaaaaaatataattgtcgatgaagacgaagacaggatgcggaggactataaaacaaaacccatagtaaaggtaacgacgcaatgaggagaaaaattcttgtgcagaaaaaacacgacagctaatccaacaattatttaataataaattaagttatcaaatacactaataattaattaatgggcaaattcatatatttcattttcttgtatctcacttttatttatttattgcacaatcatatgtattactaaatccctttgttacaatttactggtattagttaattntttaatacaataaacatctttctgattnttttaatattttttaaaaattattctacttatatattntttataataattaaatcttatata

SEQ ID NO: 289852 - DNA, 380 bp, Glycine max
  unsure (1)..(380): unsure at all n locations
agcttatctattgaatgtgtgttttacttgctccgccaagaagcttcacaaggaagttttctttcttcatgtattttggcatgtgggtgaactttggaaaagtgtaacactagtttctcaaagaaactatttacgctataaatagaagcatgtgtaatacttgtgggaactttgatgaataagtcttatgagacacttcaatgttcaacttctctccctatctttccttcattcccacaccattttttntctctctctctctcattctctttctccattgaagtttcttctctaagctacttaatcaaaacactctcttggtggtgaaatttcttcttccatggcttattccctagtggatggtgtctcctctcacctct

SEQ ID NO: 289853 - DNA, 444 bp, Glycine max
  unsure (1)..(444): unsure at all n locations
ctgaacctatttggactgtaggcacaaaattcatgttttcccttttattgtgcctggttgactaaaactattatgcttttcctagaatgtaaagtgtaattgcacatattctgataggagttacaaagaattgatggccaattgcactattcttggaagaggtaaggctcgttatagcaaaaagcttgagaaggttaaagagaagatcacaaaactgaaggtaagtatgctccagaaatacattcaaaactgcaacagctcttgaaccaaatacattcaaaacaaaaaggcattatcgaagcaaattcaattgctcagaattcaaattagaaagcttatggcagaggagcatgatttgtctaanactgagccaaaatagaacacgaatatgatgttaatgctagagaatatcaccacaaccacccccttacaagtacactacat

SEQ ID NO: 289854 - DNA, 345 bp, Glycine max
caagtgtctaacagactacatgttatgtgccaaaagttgagctttcacatagaaaatgaaattacagagtcatttacatatactcttagaatgatgtagcaaaaacaaagcctttttgttaatttcacttcaaatcagagaacactcttaacgtagtaagactagttagaacaaccgcattattttttctttaatttacagtagtacaattatgcggaaacctcagttactgcaagagcaagagtctctggcacagtcatggatgggtcagccactactggaggtgcaacacaagactgcaacaactgagtgtaatgaaactcaatttgtagcctatgatgaaat

SEQ ID NO: 289855 - DNA, 389 bp, Glycine max
  unsure (1)..(389): unsure at all n locations
agggggagtatgaaatgagtgaacgcaatatatcacgcatatacattacttatatcttgatttcaggaattaaattgtcatcataaaaaagggggagattgtagaaacaaagactttgtctttgatgttttgatgatgatcgtgatgatatgatgaaaacgcgcttctcaagtttaattcaagacaaggatccaagaatacaagatacaacatcaagaagatctctagtattttaggaaggaaattcctaattganatagcaaaaggtttggccaacaaattacagttaanaagtctttttcaagagatctactctctggtaatcgattaccagaggatgtaatcgattaccagtggccaaatggtttacaacaaccattaaaaatttg

SEQ ID NO: 289856 - DNA, 402 bp, Glycine max
  unsure (1)..(402): unsure at all n locations
agcttctatttactgtgagtgattcaggcttagtgccactacatgcgctaagcgcacttccaatgatttcaaaacagaacgatgttggcgcttagcgcatcctttcccgctaagcccacttagcgcatcatccacgctaagcccactgcttaaggtgcaacttacaatgaagatgttgggcttagcgcagcgatgtgcgcttagctgaaccattcagccaatcaattangggtctttgtgcttagcgtgagcaagctcggcttagcgcgtgaaaagatggcgcttagcacaaggttngcgcttaacggataagcaatctgaaattnttctaagtcattttctgcttatctcttcacacataatttaaaaaccctntnntgtcattactacataagctgaaat

SEQ ID NO: 289857 - DNA, 436 bp, Glycine max
tgccgcccagctcgcccaggcgagcaaggttgcttcctctatattcaacaaccttctggaggaatcttctggagggcccaagtgggcctggttgttatttgcacccccctttttactaaatgcaccccatctatttttttgataattctttttccgtaacgttacgaaactttgcgactttcgtaacgatacttattttccttccgcaaggttacgaatccttacggatcatgtatttactttcttttagctttcgaagaagttacggaaactcacggattgcacaaaaacacctcttttcgatttccgccacattacggaatttcacggatcgcgcaagcctgcttccttttgatttctgagacgtctcgggactttatttatttcatatcatcaagtaataatccccggacgaaattatggtatgacaagcatg

SEQ ID NO: 289858 - DNA, 288 bp, Glycine max
  unsure (1)..(288): unsure at all n locations
agcttcttggntntcgaagctagatttgcgtcaaggctttcaccaaatacgcatggcggaggacgatgttcataagacggctttctgcacgcaccagggacactacgaattcagagtgatgccgttcggcctctgcaacgcgccgtcgacgttccaggcggccatgaacgataccctcaagcctttcttgagaaaatacgtggccattttcttcgatgatattttggtgtttagctccgatttggacacgcacgtcacacaccttgaatccgttctagataccctctc

SEQ ID NO: 289859 - DNA, 440 bp, Glycine max
  unsure (1)..(440): unsure at all n locations
ntgacatcaaaatttgttttccctcttggttgttgctctattggaagacaaaaaatgattgtctacaagtacatgccctgnggtgctcttagtcaatatttgttaaattggaaagctgaagggttacaacctctggattggagtggaagacaaggctaagaattgccttggatgttactagaggtgtcaaatattctattgcatgagcaaataaaattttatccatagcaatataaaatcatctaccatttcgttgggagaagatatgcatgccaaagtatcaaactttggattggttcggcttttacgtgaagggaagaattcatgtcaaaccaaactaaaggctggaactattgtatattggcacctaagtatgttatgagggacacattgcaacaaaggtggatgtatttagtttcaatgcaatccttatgtagatg

SEQ ID NO: 289860 - DNA, 400 bp, Glycine max
  unsure (1)..(400): unsure at all n locations
tttcaagctttttatccaaggcaattcttggtggtgaagctccttcttccttggcttattccctagtggatggtgcctcccctctcctcttctcctttgccttctgctgcatctccatggtgaaaaatcaccattgaaggacctcattggagctcatagatccagcctccatagaatcttcacaagcaagcttccatcagctgtcttactggtttagcctcaccctctaaatntatccgatgcatacatgtggatgggctaataccaccaatgtccaccanggtccaacctatagccttcttatgcttcttgagaactgataacaacttctcctcttgctcatcaactagggaggcagatataattactgggaaacttttgttatcatccaagcaagcat

SEQ ID NO: 289861 - DNA, 422 bp, Glycine max
  unsure (1)..(422): unsure at all n locations
tatagganaaccattcgcattgttgccttttaatttcccttataaacccaaaactgtctcggtaaaactatgatcctggttttgttaaccgttggattttcatgaaatttggatatgttgctcgaaattcaattgggcacaccgttgggatttgcgagataatattcttggagggagaaaaaggaatctcatgaagacaatacaagtggaggtttcaatctcttctccgtctctctgacgtttgggaattctattggagcagtaggaggaataactgaaggaatctcanggaaccgctagagatgctgctatccctggctgaagacacgtgagtccgctcagaggtaagggatgagttattcacaattgggaattagtgagaacatgtgtagggatccttagagatatcaattggaatgagt

SEQ ID NO: 289862 - DNA, 382 bp, Glycine max
  unsure (1)..(382): unsure at all n locations
tgctcgcaagcttttgcattgcagngangacctatcatcaaagctggttgtggaggtccttttgagaactcgcaatgattgggaggcggctttcacttttttcttgtgggctggcaagcaaccggggtatgctcattcgattcgcgagtaccattctatgatctccatccttggcaaaatgaggaagtttgatactgcttggaacttaattgaggaaatgagaagaggtataactggtgcatctcttgtcactccccacacactgttgattatgatcaggagatactgtgctgtacatgatgtngcaagggctatcaatactatctatgcttataaacagtataactctcaagtgggctagatgaattcataaccttctttc

SEQ ID NO: 289863 - DNA, 353 bp, Glycine max
  unsure (1)..(353): unsure at all n locations
tatntaagcataatcaacgtttactctgttttntctattttatatcacgcatattacaatttcagattgttgttaattcgcgtcacagtagtaatatgttgaataagttattttagttaatccttaattttttattaactgagaaatctgtttagatgcaaaagaataagttttttttagtaattgttaatgtctttttgaaacactttttaaaataatatcttttaaaaccttagtcactaactgtttatattttctctcattcatatatccaatatatttatctaatttattaggtacactttgtaaataaatcattaataatttttttttcattttacattttcagctac

SEQ ID NO: 289864 - DNA, 364 bp, Glycine max
ttagcttttatactttatacaagaatgaagctctgataccacttgttagacaagtggcctcagatatcataagaaggggggttgaattaagatattccaaactacttccccaattataaatctatatcactttttattcaagttataaatgcccttaataatgaacttcttaaatattgattcacataaaacactctgaatatgactatatagcaataatatacaaaggagattaagagaagagaaagtgccaactcagatttatactggttcggccacacccttgtgcctacgtccattccccatgcaacccgcttgagagttccactatcttgtaaatgccttctacaagctctaaacacac

SEQ ID NO: 289865 - DNA, 423 bp, Glycine max
ctgacattagtgttgaatgcattatttgtaaacagtatctttgacagaaattaggtgcatatagagttacagacatcttggaattgatacatacagacatttgtgggtcatttcctacaccttcatggaatggtcaacaatattttatatcattcatagacgattactctagatatgcatacttgtttcttatacatgaaaagtcacaatctttggatgtgttcaaaacatttaaagttgaagttgaaaatcaactcaacaaaagaataaagtgtgtcagatctgaccgcggtggtgaatactatggcatatatgacggttcaggtgaccaacgtctggcgccttttgccaggtacctagaggaatatggaatcgtcccacagtacaccatgccgaggtcacctatcatgaatggtgtggctg

SEQ ID NO: 289866 - DNA, 397 bp, Glycine max
ttgctttttcatttgttggttacaagactactttctctattgttgtttttttcttcggacattgtaatattttcatgtttgactacctttattgatgtttatggttggttttgcagactaagacactccttggatatttgagagaatcaagacatgaagtgtcttcttcaagttacttttatcagccaaaaaaatattattaaaataggtaccggcagtaccatagagacaacaaagcagtgtcacatagttacagaaagagaaaaccccaaaagtagaagatatctcttgcgtaactaagaacaacggataaaagaacaccaaattaaccctcatttctaaagatgtaaagaattgatctccttctaataacttccccacacctcaacatgcacct

SEQ ID NO: 289867 - DNA, 435 bp, Glycine max
  unsure (1)..(435): unsure at all n locations
tgtatttaanaatgttttanaaatacttttaattaatatttaaatttttattcctttattaatatatatgtgaagggtagagggtgtcacatcatacctcccccctttcatttttcctcattcttattttcatccttgtatccatttaccaatggtatatgcacaacccagaccagttgattgttcgttgttgcgcttataagacaatcatatttcaaatcaagtgtgggaaggccaagagagaatcatccatccgaggtatacttctgtttgggcttttagccacttggatcaaatagataatcatgtaaaaaaatctaatcaatttagctggtttcggacatattataaatgttggaaaagttgatattaaccaacatttggttagtgcgttggttgaacgttggagaacagagacaggcaaccattacttta

SEQ ID NO: 289868 - DNA, 311 bp, Glycine max
agctttataacagattttagtaatgacccactaacctagaattaaaataacttaatgccattaacctatggaattaaaaaaacttaatggctgagtgtaactgaaattgtggcaaccaaaagtcacccccaacagccaacaagtcagccaccatttggtctcccaaaaggctgatgcctatgttgccaattgggcccttattacaacttgaactaaacctaactaaagcccttttagttgattaacccaaaacatatttttggtcagccaactttacaaggattgggcaattatttagacaaactaaacac

SEQ ID NO: 289869 - DNA, 436 bp, Glycine max
aaagctctagatgagggttcactgtaatcatgcaagtcggagacctagcatgatcccagattcacctccgctccttatgttcccatgaacccgggtatagggccctttttcactcacagtgtgtgcaaatagtgttggtgtttgtgtgcatcaaatgaataaatatttaccctatgcatacattttaaaatgcactaaaagcaacaaagagtttatatacataagaacataatgaagggaaaccaacaaagggataagtcatggtaaaacattgcacaagattaaatggcctaactctctaaaaacaatccccagtggagtcgccaactgtcgcaacctacccttcggcgggagggcgacgcgagactcgcgggatgcgtgttccacgaaaggaatacgcgcggagtcgccaccaacgtttatttgaggaaaacgt

SEQ ID NO: 289870 - DNA, 332 bp, Glycine max
  unsure (1)..(332): unsure at all n locations
agcttttatagcatattcatctacaatctcccgcttttttatgatgacaacaatctgaaaacaagataaacgatatacgatttgaaatgcgtgcactcatccttactcccccttaaatttgtaatttatggcctaatttttagataaaatttacctttagtttctctccccctttggcaacatcaaaaagtcaaaacgaccggagaaaacaacaaatccagagaatatccaaagcaagtagcttaactcgtcaaaaaactaaagcaaacacaggctatatatccaaagaanattataagccaagcaaagtctaaatatccaaaccaaagcat

SEQ ID NO: 289871 - DNA, 443 bp, Glycine max
  unsure (1)..(443): unsure at all n locations
tgtcaattctcttgtgcagctcgggatcagaagggggagcttccggtgtgttgagcaggagcagaatcataaaacggagatggaacaagaggaggaggataatgcgaagggtatgcaggtggtccttggtgctgctgctgctgctgctgaagtagaagatgaggcgggggaggggcatgagggtgtaattgtggaagtggctgttgctgctgctgcagggcaggatgataagggaattgttgcataggggggtgtgcaggaccaggacctgnggggataaaaggagaaccgtgcattgacgaaggaaactgctgatgctggggatgaaatccaaactgctgctgttgttgcatattagcagcttgtcgttgttgctgagcatatgccatagcagatgcagttgcataatcatgaccctggcgctccataacctcaacagcact

SEQ ID NO: 289872 - DNA, 350 bp, Glycine max
agcttctagagaagtctgcacttcacgtatagatggtcttacgcattggccgatgtctttgtttacttactttttaagctgcagtttttgtactatgatatttgtactcaggcttggtttatgcacttcttatgctaaaactgggttttctttaataaatacatttctttttgcctttttaaaaaaacacgttgatttatggaaattttattgtcgaatgaaattgtttatttaatgtacgaagacaataaatgcacaactttgatttcgaaacaacttttcagaaatcgtcattcatgttgaacttgcagctcttctggaagaacatggagggacttgagatctgatat

SEQ ID NO: 289873 - DNA, 433 bp, Glycine max
  unsure (1)..(433): unsure at all n locations
taacacatgtagcatgaaaccttanaatgaccaacatgtgtgttaccctctttgttcagccgctagggtttgggtcccaatgcaattgacttagtcatttatcgtgtatggcaaacaactttgcttgatgagtttaaatatagttacatccaacaccaagatattagattgtgtggcacgcatatttttatttaaaattaattccaaaaaccattggaaaataaaggttcatcaatttatatatagctcgtgtgttaaatgttttttatacttctgctttggtgctgcttttgaaaatcactactagatctnttggactgatctgtgataaacttggttgtcatgttaatttatttaccataatagtataatgttagggaacaagaattcgtgggatacaactttggaaaaaaaaaaaaaaaagcgctgtcat

SEQ ID NO: 289874 - DNA, 406 bp, Glycine max
  unsure (1)..(406): unsure at all n locations
agctttgcatacattatatttaaaagaaagtagagtaattatttaatatactttctgtttagttttagattttcccttacaagttctactactaaaattgtgagacgcggccaactaaaccccgaaaagtaataaaatgataaaaagttatttttttggttagataaaaatgttctttgaaaatccaagttgttatttatttgagttcaaaattctaaatgttgtgtgacttaaataaaaatattagcatatcttgagggactaaatgacaataagtattaagtttaggaaataaactgatacagtaaggaatttcattatntacttttagggattaaattaacactatctcacacttttaggaaagaatttgnattattatttatcttanatatttaaattaata

SEQ ID NO: 289875 - DNA, 446 bp, Glycine max
  unsure (1)..(446): unsure at all n locations
aactcagcttacactgggcgggacagaaattggtagctggttatagtatatgttgagatcactggaaacacgaataatacctttcttatcattaacaggtgtgaagctcaaaggcagacctaagtcaccatcaacagctacaacatcaagtggacaatctacatcggttcttgccgaagcaaggccaccgatatcggaggaagccggaacgatgtagtaaatcgaatcagctcgaactttcttccccaatgcgtccagcactggctcggatgcaggaccagctagtgcctttgtgatcaaggcaaacacaaggaccaatgttaccaatgtcatcttcatttttatgtatctaattntgtgtttttgtaacttgtaatggatattgaagaagagggatatttatatataggatggngattgctctaatctatgtacccatgtgcacc

SEQ ID NO: 289876 - DNA, 391 bp, Glycine max
  unsure (1)..(391): unsure at all n locations
agcttttatgtctgagtgggctcgtccagtgaaacatctgcttaaccctaaagggttttctcaagttttaaatgaccttgggatagattcttgaaatctcttcgtaggtttttataagcttttgagacaatatatgagtaagatagaagctcatgataagcttttctaagagatttaggatcatcaaaatttacctcatctttttggtataactcanacccttcaaaagttatgtccgccatcatccatatgttggcttcttcatcgtcttcctctgacaaagtgtcgtccaggtcttctcatgtactcataagccccttcttttctttagtgctaaagaatntcttcatatcttgatttttctctaaatctggacattcagacttgaaat

SEQ ID NO: 289877 - DNA, 450 bp, Glycine max
  unsure (1)..(450): unsure at all n locations
tctcagctntcagattcagaagactagtaggagtaccatgttcccttacttatacttggatataatgatatgtacaatgaaaaattaccaagtaaacttgttggctactacttcagaacctactcgtaaatgatacaaaatctattaaccatagtttctagttctcagttggttgcactaagtatggttgcttcttaatagtaaaattgttttatataaatcccatgatcaaggatcaagtttaaggtcaaaacatgcttttgaagaaacataattaactgcataacaatagtaaaaaagaagcaataaaaaaggacacaacacatcaaggagttatactagttcacccaacttgggctacaccaatccctacaaatgtaggctntccactaaaaccaagcatcttgtggtattctttctttcttgaagccttcaaaggctcctacaact

SEQ ID NO: 289878 - DNA, 310 bp, Glycine max
agcttctcgacatatgatgcgcccgaatcggacatccgtgtgaaaagttatgaccatttaaatttcgcgagagttttcgatgtttaatttcgagcgtatcgatatattataagcctgagtcgtacatccgtgtgaaatgttatgaccatttgaatttctcgagagcttctgttgttcaatttcgagcctctcgacatattatgcgcccgaatcggacatccgtgtgaaaagttatggccatttgaatttctcgagagcttccgatgtttaatttcgagcgtatcgatatattataagcctgaatcggaca

SEQ ID NO: 289879 - DNA, 444 bp, Glycine max
ctcacgcttatgatatattgatacgctcgaagttgatttacacaaactctcgacagattcaaatggtcataactgttcacacggatgagcgatacgagcgcataatatcgcgaggggcttgacattgaacaacggaagctcttgagaaattcaaatggtcataccttttcacaccgatatcctattctagcaaatcacatatcgagacgctcagaattgaacaacggaaggtcttgagaaatacaaatgatcttaacatttaactcgaatgtccaatttaggcgcatcacatatagtgacactcggaattgaacaacggaagctctcgagacatctagatggtcataacttctcacattgatgtgcgattcacgcttataatatattgatatgctcgaaattaaacatcggaagctctcgagatattcaaatggtcataacttt

SEQ ID NO: 289880 - DNA, 373 bp, Glycine max
ggagaaacattatgggatcttaatcttgagctctaataactctaaggctatgtttgagaaacacatgaatataaaaatcagaaccaatgaacgaaaatgcacaacatttaaccaaaaaaatacattcaattacgatgtaatgcatcctaccactctgcataaactatacatttcacgtctcttgatgaagatatcacatcgactagtgttgagaccacaataatatatataaataagagacaatcctcatcttacaaattgatttcataaagttgagttagattaataactcacataatatcctagcgattcgttgtcgagtgttacagatctcacatctattatggtaggttcgaattattgaacctcatct

SEQ ID NO: 289881 - DNA, 414 bp, Glycine max
gacctaacaaactcagcttgaccccttaatcagccttgagactattgtactaataattttagatacataacattatttagattagtggcgttcacgatgatgaatatgcgatagtctgcagccaagtgcttaaagctgctgctggggcatctgatatatattaacttgaattataagggcgtgatgattaacttgtgtgcgcgggcagagctgatgtaacaaagcaacacgagcaaccttatcgttcatatgggggggagataatacaaaacaatgaatgggggtacgtatatctgactagaacatatggaatagaagtggcattgtgtgatattatagatagttgataatggaaccgaaaacatcttttattttattgtgaggaatagggatggaacatactggagtataacg

SEQ ID NO: 289882 - DNA, 349 bp, Glycine max
  unsure (1)..(349): unsure at all n locations
tttgcaagcttttatccatttcacacgacagtaacttttttctcggatatctgattgagtcccgtaatataacgagacgctcgaaattgaatattgaagctctgaactagttcaaacgacaataactttttactcggatgtctgattgagtcccgtaatatatcgagacgctcgaaattgaatgttgaacctctgagtaaattcaaacgacaataacttttttctcagatgcttgattgagtcccgtaatatatcgagacgctcgaaattgaatgttgaagctctgatccaattcgaacgacaatacctttntactcggatgtctgattgaagtcccgtatatatcgag

SEQ ID NO: 289883 - DNA, 429 bp, Glycine max
  unsure (1)..(429): unsure at all n locations
tcaacattcaatttcgagcgtctcgatnatgacgggactttatcagacatccgagtaaaaagttattgtcgtttgaattggctcagagcttcaacattcaatttcgagggtctcgatatattgcgggactcaatcagacatccgagtaaaaagttattgtcgtttgaattggctcggagcttcaacattcaatttcgagcgtctcgatatatgacgggactcaatcagacatccgagtaaaaagttattgtcttttgaattggctcagagcttcaacattcaatttcgagggtctcgatatattacgggactcaatcagacatccgagtaaaaagttattgtcgtttgaattggctcagaggttcaacattcaatttcgagcgtctcgatatattacgggactcaatcagacatccgagtaaaacgtta

SEQ ID NO: 289884 - DNA, 385 bp, Glycine max
  unsure (1)..(385): unsure at all n locations
agctttataaagaccatgataaatagcaatgagttatgcatgcatactagttgtaaaaccacagtaccctagagaaggcagatattcaattactaagatagtgtcgaaggatatcgtcgaagcctaaacgaccaagactgcctttggaactcccatcagtgttgaccttaataaaaaaaaaaaagaccttgtggcggctcccaattgacttgacaagaaggttgaatctaacaggcatgttgaaaggccaccatcatatcgctatagatagtttgaacctgattaataagacgccaaatgtctagattcttatcgtanaaaactgaagcattctttgccttccanagagtccaacatgtcaccacatacaatgaactactatagc

SEQ ID NO: 289885 - DNA, 376 bp, Glycine max
acccctcttgctcgtactaacgatggcagcgttccgatggaagagctttgaggagaacgaggatcaccctgaactgttctttcactttctttgaagttaatgctggaagaagtctatttgtatcatttggaaagaagtaagcttaagctgcctaggatattatttttaatgttgagaagattttcttgggtattgcatgagtgcctcatccacgaatgtaaaattatttgtctggctgaagaccttaacaattattagttgttcgagtgagttcatgcaatacttacactaagacatttattgcgattgatggagctggaaagcgattagctgatgaagtgagtcccgagacatgcatatgtatgtatctcaagtt

SEQ ID NO: 289886 - DNA, 412 bp, Glycine max
  unsure (1)..(412): unsure at all n locations
tgtttgcttgcttgttatgcatgaaataggtggactatttcaaaaacactctatcatacactagtgtccattttttgaatgaatgaaggttgaaaatcgaactttatccagtaagagacatccaatgtttctgtggtaatccaaaaaaacttatctgaggcatagctcaatagttcaaataatgattatgttaagattggaagtatgataatattacaatttacaacgaacctttactgtaacagttgttccagcattcccccgaagcctttgtgcagcagtttcactatcaatgccatcaagcctctcacctgtagaatccaattattttcagaaaagaaaatcacacttgtttcacttcagacataaaanaattatttcctactaataattgactgaaacaagctggaaa

SEQ ID NO: 289887 - DNA, 440 bp, Glycine max
  unsure (1)..(440): unsure at all n locations
ttaggatcaaactntnttctctctttntctctcaactgttcttcattcttcttcctcttttcactttctttcttcctttctcttgcaaaaattttgtggattttccattgatgatgatcatggaaggctaaacacttaatcaatccaaggatccactccaagcaaggctgaatttgagttctggtttagtatttctaatctttgtgaatgttcatctttttcttcattcctattttcaattttcatgattatgattatgcttaggattcaaaatggattaagttattgattcatttcctaatttcaaaatttaatcccagattgtttggatattttccaacctaatatgcgatctcaaacaatttagggatgtattcgattgaactatctctaatgcattngattgaaatttcacactctgaacatcattcatagtaact

SEQ ID NO: 289888 - DNA, 391 bp, Glycine max
  unsure (1)..(391): unsure at all n locations
tcttctttattctttggncctcctcatagttgtggcatgagaaaacatgctctattttcatctcccactccaagtaggcctncggatcattctttcctttaaatggaggaatgttgagtttaataccatcaattcggttttgtctaagaacaccatcattccctcttctcctcctttcttcttcattatgatctctattctccatttgatccaacctctcatggagcgcatcatctcgttgtttcattaacctctccaaatgttgcatcaaagctcgcatttggaattgcgaaagccncactccatcattatgattagtacctgacatctcanacaaacaaatcaaacgtaacaagacaattatagttgctgtttgaatacctcacccact

SEQ ID NO: 289889 - DNA, 420 bp, Glycine max
  unsure (1)..(420): unsure at all n locations
ctcagcttgttacctatgatgaattgcttttttagagttgnttatatcaccactaattgttctccttttgaagttgtttatggttttaacccactaactcctcttgatcttttgcctatgcctaatgtttctgtttttaaggataaagaacgtcaagcaaaggcggactatgtgaagaagcttcatgagagagtcaaagatcaaattgagaggaaaaataaaagctatgctaaacaagccaacaaagggagaaagaaggttgtcttcgaacccggagattgggtttgggtgcacatgagaaaagaaaggtttccggaacaaaggaaatcaaagcttcaaccaaggggagatggaccatntcaagtgcttgaaagaatcaatgacaatgcttacaaagttgagctgtccggtgagtataat

SEQ ID NO: 289890 - DNA, 385 bp, Glycine max
  unsure (1)..(385): unsure at all n locations
tctgcttatgcgcatatttgcttacaaacgttctcttgcacaagacattctattaaccgaaaaaaatgcacccatatacaatcaaggcagcttcgttacctagattatttacacgtacttccaaggtgtatttgttacttacatcacacacctccttggctaaattcacatacatgcatactcaaagcattttggggtaccaaaaattgcacatgtgcacatcttggtatttcacaaacttcatgatgaatcttgactatctacacaataaggtgctacattgtatgctcttttcaagttattgctacctaaagccgcatgcaaattccagtatattntcctttgttgactaaaattgtattcagattaaaaggtatacattttt

SEQ ID NO: 289891 - DNA, 436 bp, Glycine max
tgcttgtggagcttctatggaggctttatctttgttctttattgaggtcctttaatggtgattttccaccatggagatgcagcggaagacaaaggagaagaggtaagaggcggcgccatccactagggaataagccatggaagaaggagcttcaccaccaagatgagccttggataaaaagcttggagaggatgcttcaatggaggaaaagaaagagggagagaaagagagaggggggagcacgaaattgaaggaagaaaaagggagagaagttgaactttgagttgtgtctcacaagactctcattcatcaaagttacaacaagtgttacacatgcttctatttatagactaggtagcttccttgagaagctttcttaagagaacttccttgagaagcttctttgagaaaacttccttgagaagctagagcttag

SEQ ID NO: 289892 - DNA, 299 bp, Glycine max
  unsure (1)..(299): unsure at all n locations
tcaagcttcttcctctntnctcctatatatagggggaggagggaagaacaaaaatgttcaaccctcctggtatctgagaatcacttaaaattagtgagaaaaattgtttccgtgaagaaaatccaagccgaggcgcttccgtaacgcttccgagacgtttccatgggtgatttcaagaagattntctaccgttcttcgtcgttcttcgttcattatttgtcgttccctttggaaagaactacgtaggtttgatttcctcttcgatggagggtacgtaagagcaaaagccccacttttgt

SEQ ID NO: 289893 - DNA, 444 bp, Glycine max
  unsure (1)..(444): unsure at all n locations
tgccattcanagcgctgtgggcctgngaaaatgcggtgtatttctaggttaatgtggtagagccctgggtgagacgagtcactgcttcaagttggtcaatggtgggctgacagatattgtgttctggcatggtgaggtagaggaggaggaggctggtcagaccaattgttagtgttgacagttgtatgtctatattaagaattaattagacaactggatgtttatttttgcaattaattttctagaagattgaataattcagatcaagatcatattattccaattttgatatgcttttattattattttgggtcagaatcaaatctctcttatttgatctgatccctttctatttacttttctttctgcatttattatgtaattggtagccttgcctatatatgtaaatcttttattcctaaataatatacaagaattattctt

SEQ ID NO: 289894 - DNA, 408 bp, Glycine max
  unsure (1)..(408): unsure at all n locations
agcttcttcacaattttttaattagaaacacaatcaatatattattagttaagaaaaatcatacattttagcaaataacaacacatgtcaatgagtttattaagaaggatctcaatttgattctaacataatatatctttaaagaaaaacaaaattttttaagtttgattaaattttgaacttagaattaattttataatcgatctaaaagattaaaattataaaaatcttacaaaatttcaaaaaagaaaaataaaaaatccttattattaatatggttaaaaaattatatattaaataaaanattgaattcaccttcgttaataaatcttatatgaagttcaatcaataataaagtaatgacaacaaatgtattattagcttttaagggattttattcgatcacat

SEQ ID NO: 289895 - DNA, 438 bp, Glycine max
  unsure (1)..(438): unsure at all n locations
tcagattgtcaattacaccatgttccaagaagagtagatgttgctacctttgttgagtggttttattagcattttgttagttgaaataaaggcccaaacttgtgttgaagtggctgtcaattctctttggatttgcaccacctatgggcttgttttaatttgaagaaattaaggtttaataaggtagaaactctaggtttgtggctgcctcttggctgactaggagttgcacatctttccacatgtttttgtgtcttaattctagttttaattaggtataatgacaccatcaattgttgttattggtgataatttgtctgaattctagttctaattaggtataatgacaccatcaattgttgttattggtgatcatttcatcttttcataaccaacttgatgccattcctttntatgggctgcgcattttctaataaa

SEQ ID NO: 289896 - DNA, 448 bp, Glycine max
tggtctctgtagatcttcacagaacaaaatctcttagatttctctggaacttatacctttctctctctagaaaccctagacatgcaaagctctgaatcccactccaaactccccttctaaaatctgatttcatacttaaataggtggccttgttcatactcgtgcgcttagcacacttatggaccgcttagcgcacattagtgaattttggcttagcgcgtgcctttctcgcttagcggatgaactgaagtggtgcgcttagtgagatgaagtggtgtgcttagcaaacctgtacaactcattttcttccagagtcttcctcgcgcttagcccatgagtgttgcgcttagcgaacgctcgctaagccagcagattggcttagcgagaaggtgaaaaacaacactttccaaagcttgcctaatgaacctgaaattgagacaaaatgatt

SEQ ID NO: 289897 - DNA, 341 bp, Glycine max
  unsure (1)..(341): unsure at all n locations
agcttgtctttgagatagcatgaaagacatgcgcaaagtgtgactatatgatgtggcaatagggtgtagtaagcaaatgctcacctccccctctaaaatttaattggattgggcttctaccaattcaattaaatttatttcccaacacacatatcaaatattcacttagtgcatgtgaaattacaaaactacccttaatacaaaaactagtctaggtgccctaaaatacaagagctgaaaaatcctatatttctagggtaccctacctacattatggagccctanatacaaggaccaaatataatgacatcctagtctaatatgtataaagataattggac

SEQ ID NO: 289898 - DNA, 451 bp, Glycine max
tccaagagttcggcaagcttctactattactttgattaggttacttttgtttgttgtttcattagtataataaaagcttctatattttgcatctaagatcacacaagattcctgtcggtagtctgaatgagaactttatagaacaccctttttgaattttaagtatgaatttttgtgaattcgagtaagcaagtaatgatattactgtgtaaaaaaagataatgatatatattcctctggacttaaatatatataaaaaaactaactcaatttaatgttgataatctcatgaaaaaagttaattcattttttaaagtaccatttatattaattgcataggacaaaaaaaataaggttattgaaaataaaactctaattaaataaagagtattttggggatattataattaaataggagagaattaattaaaatttacttatattttaattc

SEQ ID NO: 289899 - DNA, 391 bp, Glycine max
  unsure (1)..(391): unsure at all n locations
agcttctatgaaggtttgttcctaatttctctacacttgcctcacctttcaatgagttggttgatgtgtcattattttctcctatttcttaactctttttatcaccaatttaatttctgattaactctaattgtcgaatttattatttagttttatcaattgggcccacttgactaatttggtgtttttaattcaatttcaggataattataagcaattgggctgagccaaattggacttgaagagagaagacaattttattagatttcgtctaatttcattntattgcattcagttnttatttagtatttttatttcattntagaccanaataatgtaatcaggcccagtgactntgagtgatccttataaatagcagccttgggattcg

SEQ ID NO: 289900 - DNA, 458 bp, Glycine max
gactcaagcttgtacttgtacttgctattggcagattacatgcattacttcttcctttctctctcatcaacgtgagtgggcattttattctttttctataattacggggttaataagatgaaacaatagggtgatgaaacgaatagggtgtcctctcactgcttgaagcatccaatttttatttttatttttatggtagaacatattatcatatcttggaagcatcagctgtgactcggctaaaggctaccgcggtctttgagccagatgggcgccccaaatgcttgccgatgaactcaccggctaacatgagctttccgagatcaacgttggttttcaccccaagtccattcagcatgtacacaacatcttcggtagctacatttcctgaagctcccttggcataaggacagccacctagaccagcaactgaagaatcaactgcactgatccccatc

SEQ ID NO: 289901 - DNA, 344 bp, Glycine max
  unsure (1)..(344): unsure at all n locations
agctntttctttgacttttactgggttatatacgccatgttctaatttttcactatagaatagattggtagtatatataatatatgaatggctatttgatgactgattcagtcacttaaatgaattttgcaaattgacatttgcacagaagttttgaatgttgatgaaataaatttggtgtacttaacttaaccccatgatttgatgtcccgaataaacaatattgtcttgtcaatatgatacgtagtgtttaaggtaatctccacggtattgaagtgtttttaaatgaaagacaagccaatatcttttagtattttttttctcaacaaaggtgtattttcaat

SEQ ID NO: 289902 - DNA, 268 bp, Glycine max
  unsure (1)..(268): unsure at all n locations
cttctccacgatgtgagctntgatatgagaggtgtgtgtgtttctaaactctagctactcacagaagtgttctcaaagaagcttctccaggaaggtgtctcaagaaagcttctcaaggaagctacctagtctatacaatagaagcatgtgtaacacttgtagtaacttggatgaatgagagtcttgtgcgacatacttgaaagctccacttctgtccctattttattccttcaattacgtgctcccccctctctctttctctctatct

SEQ ID NO: 289903 - DNA, 366 bp, Glycine max
  unsure (1)..(366): unsure at all n locations
agctntttaacattctaaacatgcgaactaaagactgaaattaaaaactgaaacagaaatataaacccaaattataaagtgtactaaaagcaggaaatgataataaaagtgttcaaaagacaggaaaataggataaaagtcctgtcatgggtcctgtcgtgcaaaagggacataatccatagctgctgcatcatcctcctccttagagagctccagtaccagtgttgtcactggggatgcctgcggagtagagagctccagcacaggtgtggtcactggtgatgcctgtggagtcgtctctagagtggcctccgcagtgtcctcctgagtagctgggtcagtctctgggtcaacctctggcatgtc

SEQ ID NO: 289904 - DNA, 440 bp, Glycine max
tgggaagtcttggttcaatggcatggctttttcccagattatatttcttgggaggattggtctgctttgcttaatgactatcaccttgaggacaaggtgatttcccaagggccgcgggatgatatggaaaacacatatcacagagtaggggtacaaagagaacattctgcagaggtgcagaatatggaaaagcccataaggagagtaatgaggccagcttaccttcaagattatgcgtaagggtagaaaagggattagtgggatagtgccgttagagcacgggacaagcttaacggtattgattctgtgatattcctcttgcaccaaaaagataagaattctgctagcataggatagtatgaataacgttgtatataaaatcagaatcataaatgagaatatattttcttgccttattccttctccccttacttctatgg

SEQ ID NO: 289905 - DNA, 404 bp, Glycine max
  unsure (1)..(404): unsure at all n locations
cccgggatcctctgaggcgatctgctgctgnctgcttttctgagcactgatagggaagcttgaggcatgctgggtacaatcttttctccacttaagatagactaaatccttaaagcaagttctgtggtaatcagctctcttccatgctgcccaaaactctggaagacaaggaatcatctgtcaaaaaaaccagaataaccaatttgagataactatccactacatgccacattataactttctcttataagaatgcctatacataattatattatcataaagttcccccttttcttacatacacattttcccctgtgcttatcattaacacanatgaatgaggaaaacttacaataagaattctaggctctgacctctcatcattgcctttctttcctttgaat

SEQ ID NO: 289906 - DNA, 358 bp, Glycine max
cccttctacacaaggctctataccggtagcttagtagcttgctcgtgagttgtgctgcgctatattttttgcttaaaaaaaactacttcattggggggtcgaagtggaactttcgactctctttatttgaagactatacataaaaagcggattttgcgtgttataaaatcacacgcacatgtctttttatggaatatgatgatggggtgggtgatctttgcttgcaagattggaaggatcctaacgcgaccgacactaaacatggtatgtgttgtctgacaatatgaaatgaagagtattatgatatcgtttaccgaatgttggtgccaatgcaatggcttactgggggaatatagat

SEQ ID NO: 289907 - DNA, 389 bp, Glycine max
  unsure (1)..(389): unsure at all n locations
agctttttgcttcttgtcataacaactttgcactattctttgggattcttctcagtatttgctccaaagctactggatgacttctcaactatatgcttagccagttgacccacctggatctcaagatttttcagggctgactcagtgctcttatgattggatatagtcacttgaatgaattgagccagggtctcctccagcttggtagtcctctgaaaaagagtaggcccttgttgaggtggcctattggaaagttcaccctggtccttattgaattgattgccaaggtgtgatcttcattgaccttgctgattgtanggaccttgctggaaacctgagaatcctcttggntgacccttgccttgctgattcccatgtantaacttcat

SEQ ID NO: 289908 - DNA, 442 bp, Glycine max
  unsure (1)..(442): unsure at all n locations
ntggaagaaagtgatgaggtacaagccctataggcaaatcttgtaagagcccgggtagtcaaagagaagttcaagtccatagccatcaaagtctgaagagagtatgatgaactaagggacgttaatatggccaccgatgaagccttggaatgagaaaccaagaaggcccgaaaggaagaacacgaccaaagcaaagttttgaggggctttatagggcagcaatagtgagctcaagctccgaagaggtgaaaggaatcatcatgggtcaaaggcatgatcttgaaggatgagctaaaggttttccttatgtcgaanagaaatttgtcccaacagttaagcgagactgaagggaatatgtgggccatcatcgataagtgcanagagaagctaaatctagcggcgactcacgagcaaaggctagaggatgagtacgccaagatat

SEQ ID NO: 289909 - DNA, 390 bp, Glycine max
  unsure (1)..(390): unsure at all n locations
cgttttgtctgcttatttcaaaaggaaaaagtattgacatccaatttcctcaaccaatttataagatttgcggaaaacatgcaaaatatttcaagtctgatgctcaaatgcgtattcgctttacaagttaatggttggattgaaattagtaaagattatctagatgaaatgtgacaacatatgaaggttagtatataattaggtcaattatattcaatttatttatatatttgaatattagttatatcttcaaattagtttgataatgtattttggtagtatataagttttgctttttttgatgaaaacatgtaatataaggatgctnttagtttacttgatgagacgacagaatatgcaatgaagcatattcaatctcaatacaagaat

SEQ ID NO: 289910 - DNA, 445 bp, Glycine max
tactcaagctggactttgttaggcaaaatgtctcgtatgtcatgactattatttgttgcatcaagacgtgactatcatgagactttaagcttaccaacttaagatccttcaactgcacaaggctcttaatatttgaagagtatccttgtggaactttgacatgacacatacactaacaaaaactcatcttctcctttctgggcaaagtatgacaagctgaaggcaagtatattttttaccatcagaccttggatataactgcactcgtatatccatgccaactagatcttgacgagtattcaaaccatctttcatcttgccttgaatgttaaggagcgtcccaataacattatcacatacatttttctctacatgcataacatcaatacaatgtctaacatctagatcagaccagtagggaagatcaaacaaaattgaccttttc

SEQ ID NO: 289911 - DNA, 397 bp, Glycine max
tttcttgttaaaacctaagtaagcctgctgattcctttatggtctccgtaatttactgttgttgctaccttcttccacttgtattatatgcatttggcaaaagatcacctttacttcctttacccaacagattaatcagaaagtgattgtggatcagaaaatcaaatcacttgtattgtgtactgatataaatagcttcctcatcaaaatccggtgcccttcactttggccaaaaggtttcatctgttcaacatctatgctaggcagaattcccttttcagaacaagcattaatagaatggcctcctagaagattaatatcgttctctatgggatatgggctgcctaaacttataactatggttaacctcaatactttgttgttgaaaaagcttctt

SEQ ID NO: 289912 - DNA, 403 bp, Glycine max
  unsure (1)..(403): unsure at all n locations
nttaacactttntgaatganaacttatatgatgttaatattccaattattcacataaaaagaaggaaaataagagagaaaaattaacaaatcctacataagtcaatcccaaaatatacctatacataacagttattattgacaggctgcagcaactctagactcttgtaaacttattttaaatgaatccatatttttaatagctctaggatgtattggaatctaatctaatgtaccttaatccaatatgcgctttctataaaacttatggatagacataaaaagtgttacacaaaattccagtttgaatttaatggagtattttcttttgcaagtgcaagttatttgttttgtttgtctctgtttttcttttntgttgtgttttggaagctatattcatgaat

SEQ ID NO: 289913 - DNA, 291 bp, Glycine max
  unsure (1)..(291): unsure at all n locations
tttttattgnaatcgtgaaattcaggacagtactctaatttctgaaatttttcggataaaaatggtcattgaccagtcccttttccatgacttaaccaaattacccagtgacggtgtaccatttgaaggttcactgaatgactactggaaatttgatttctctgcccatgatgcccgccagttggtttgcaccaacaatgcggatatgaccggacgtcttcttgccgggtcattggcttttgaaagccgcatccttcactatttaattgagcgtactttgcttgcactgtc

SEQ ID NO: 289914 - DNA, 436 bp, Glycine max
tcctcggggccatttcctgcgagatctaacatttagaagttagttttacaagacaatgcttatcttaacgcaaaaagtgtcatgctaatccctctgattttagaatgaactcatgtaatctatttatgcacacgcgtatttgtggaatatcctactatttatatcaacgtagaggccatccaacacatcctaattctcatacatatatatgcatttgaaaagaacatacattctcacgcctaaggcatcgcgtcaaaactcacacttaattatatcctaaacatttgctaatacaaactacctacacacatttgaaatatgtatcatacaaattttattgtttctgcatattggaaagctaattacatcctgcacacacttgcattcaaaagggaattccatgctatcatacatccatttaggaaaataatcattc

SEQ ID NO: 289915 - DNA, 400 bp, Glycine max
agctttttcattatctatgtttggacatagacggcataatagaaggatattctctaaaagtttcacttttcaaaaatcaactttaaagttcaaataacgagataatttttcatgattgagtctattttacatagtaattctccatcaaacaaaaaccttttttcatccacaaagtattcaaatgatagtcgcccaaaatcttatccattgtcatcaatatgctctaaataattacatctcctattaaatccttgcacggtcattagacccttagagcttatctattgttctcaatatgttataaatactttcattatcgttagctcacatcaagacgacatgccacctaacctctacactaccaagaagactcttaatcttcatatatggatatatcatc

SEQ ID NO: 289916 - DNA, 449 bp, Glycine max
tgtagacctaacattatctatgatttataagcaaaacatttctcaacaaatgataataataacttgcactatattatttttttaattatagctcaaattcaaatggttgtgattttgtatttgaagatactcttcacaaaatatattaaattgcatatataaataatggtgttgacaagaactagtaatacatcccatgaccccaccccttatctacttattccatattgacacatatgcataattaatattaagttataaacttataaaaaacaaatttttatgttggtaaaaaaatgtcaatattaacaattatctatcactaaaaaataattaaattcgactaagaaaatttaaatatttaaataaaatcaataaaagacttataatataaaatattataaaaagtataacatatttaattatatattataataatttattatctt

SEQ ID NO: 289917 - DNA, 398 bp, Glycine max
  unsure (1)..(398): unsure at all n locations
agcttatctttgtaagttgtagaagtgacagtgaagaatacttgtaacttttgataagttagtgaaatcttggtaggctgctaagaactgaacgtagtctcggtgtagaaagtataacttcatgtgtgttattctttattgtttttctttgtgtgttgattgacgaaggatttgaatttgctttttatatcttatatttgtttttgatctgttaagaaaattgttttctcattgtctgataaagtctttcttaaatatatcttttcttttattttagttaaatntgcatgagacgataaaagtgtttttagtctaagaaaaattttaaaatttctaaaattacaattaaacccctnttgttgtgtattagcttctcaactattagctaattggttata

SEQ ID NO: 289918 - DNA, 440 bp, Glycine max
tgtgttctcccttgtagaactactaactgcagtaattgttgtagtttaactatccggtagtgatgacaatagaatcaatgccttcacctcatcatcaaatttaatctgcactgattccaactgggcaagaatagtattaaattcattaatatgatcagttacagagataccttctcccatcttgaggttgaacaactggcgcatcaagtatactttgttggctgtcgacggcttctcgtacatatctgataacgccttcattaagcctgtagtagtcttctcgtttacgatgttgaacgcgacgttcttagctaatgtcaatctgatcacgctaagagcttgtcgatccagcaagttccattcttcttgcttcatgtcgtctggcttaacccctgataagggctgatacgacttcttttgatatagataatcctctatct

SEQ ID NO: 289919 - DNA, 392 bp, Glycine max
  unsure (1)..(392): unsure at all n locations
agcttcttttggaccttgaacaagccatcaattcctctttcagaaccatgctatgtgctcgcgactggtccctttcttcccttcgcaacttgagttcactattgctaccccatagagctccgcgaaatttgttccggccatactcttccttgcgagccctcttggtctctcgttcaagggctcttgcggtaattgcattctcttcccgtaacccggcacactccttccgaacgtgtgtagcagccaacttgaacttctccttggcgagttttgcctttcctaactcgcttttgagagcttggacttcctcgtcctcttccggtgcttcaaaattctcttcgctgacgactnttaacttggcgagccaatctaaacctcgtatgcgaactttc

SEQ ID NO: 289920 - DNA, 447 bp, Glycine max
  unsure (1)..(447): unsure at all n locations
tgagaatggaggatttccttgagggtcctctcttangcatttatggaacacagttccaaactcaaaaatggaggacacatgaatgacaacgcaattcattcatggggctccgaaaaagggtaagaatggaggatttgcttgagggtcctctcttaggcaatcatggaacacaactccatactcgaaagtggaggacccacgaacaggcctaagcaataacattcatgtggctccgaaaaaggatgagaatggaggattgcgttgagggtcctatcttatgcaatcatggaacacagctccaaacttgaaaatggaggtcacatgaatgacaacgcaattcattcacggngcttccgaaaagggtgagaatggaggattgccttgagggtcctctcttangcaatcatggaacacagctccaaactcgaaagtggaggacacatgaac

SEQ ID NO: 289921 - DNA, 403 bp, Glycine max
  unsure (1)..(403): unsure at all n locations
agcttgttcttggtttatacatgattgatacatgatttgggacttgtatgatttgatttgggcaagattggatgaggggaagtgtggttttcgaaatctgcattttgtgcagatttttgctgtgaaattgtgcagcaggattttgcacaagtgcagaaaaatactatgcatttgctggttgtggaaagagcagtgcagaatgagttctggatgtttgctagtagatcccaacggtcaaaatgtaggcttatgtactagagacttccagtaaaaatttggagtcgatccaacggttaacgaattggaacgaaggaattgttactggnggtcttaagtgagaaaagctgtgatcttggtggtgtttggcagagttttctgctttgtctgtttcttggctggatag

SEQ ID NO: 289922 - DNA, 438 bp, Glycine max
  unsure (1)..(438): unsure at all n locations
tgcacttcttaactntcctcaagaatttcagcctctttcctacttagactttttagctttgggagccaagttatcccttctgttctagacttcaaccacttgtgatagtcgtcgatgacgccattgttacttcccctaagctccttattttttgatgcaatcctaacccgcaagggcattggatagaagactccaagtagattgggccagagatccaagggaaggccctagggttctcatgagccttagggtagatttcgagcccatgggctaagcatgagcccgtttatctttgtaaatattagaataggtttttcattcgtttgggccttgtattttggccattctagtagtataaggttttagccttgtatttcgaggcattntgattagtctttatagtagggaattttttgtattttcatgtattttgtcatg

SEQ ID NO: 289923 - DNA, 379 bp, Glycine max
  unsure (1)..(379): unsure at all n locations
agctttatggctgagaacctatataacaacaccaaggttctagttttaggattctttttcgttttanggagaaagaataattttaggttttgcaattccagtttttactattcacgtaacaatcgttttctgcttcaatctgcaatttcgttttctactgattaatggaaggccaagtctccaacgttgttttctcttgaggatcaagcacaactctctttgaggttntgttattactattgaattctgatcagttnttcctcttcaccaattactctatatttgttgtattaatccatgcatgcttagtgcttgattaattgtctctgcgcttaatttacgttcatgcttaatgatcnagtttcgtcatgattaattg

SEQ ID NO: 289924 - DNA, 430 bp, Glycine max
  unsure (1)..(430): unsure at all n locations
tgtctcagcgtttatgcgagacagagaccaacatgttagctatcatcgccaagttcgaagaagagttaggtctagccacggcccacgagcatagaatcgcggatgagtatgctcaagtatatgcggaaaaagaggctagaggaagggtgatcgactctttacaccaagaggcaaccatgtggatggatcggtttgctcttaccttgaacgggagtcaagaacttccccgattgttagccaaggccaaggcgatggcagacacctactccgcccccgaagagattcatgggcttctcggctattgtcagcatatgatagacttaatggcccacataattagaaatcgttaggaaacttgtatggtctctcagaccttgactagatacgactntcctttttgaaatanaatgagttggtcccatgtttctac

SEQ ID NO: 289925 - DNA, 384 bp, Glycine max
  unsure (1)..(384): unsure at all n locations
agcgatgcttagcattatatttgggatgacccctatttgtggaagttgtgtagtgaccaagttattaggagatgcattttggacaatgagattgactcggtcctgaatttttgtcattcttccgcaccaggcgaccatcttggtatacagaggatagctcgcagggtgcttgactgtggtttctattggcccaccattttcaaggatgcatggagaatttgtagtacttgtgagtcttgtcagagagcaggtggttcactttcttggaaacagcaaatgcctcaacatcctatgttgttctgtgaggtgtttgatgtatacggtatcaattntatgggacctttccatgtatctnttgggtntgtntatattctccttgctgct

SEQ ID NO: 289926 - DNA, 433 bp, Glycine max
  unsure (1)..(433): unsure at all n locations
tgttttaaagacccaattntatcaacatctatgtcttcttgttgttttgattctaatccttgtgttgatgaattagccatcaaacacaacttatcttcctcgtcctttgttgaggcttcatcttcagattgatccttagataactcatcaactttcagagctcttggtgcaatcatttgtggtccacactcagtggaaccttcatacaatatagaaagaatgtccaacatttctttggcatttttgatatagcgcacctttgcatgctcttttctgataatgcacagatgatggcgtttcttgcttttgagttcaacaagtatctctgtttttgcttatcaatccatctctgtcttggaagctcattgaggttgttatcataaggattctagtttccattttctattacatccatcgtatcactatggcagta

SEQ ID NO: 289927 - DNA, 365 bp, Glycine max
  unsure (1)..(365): unsure at all n locations
ggctttcaaaggctactctttatcctacaaatattgntaatctgctaatggattcaatctcccctcacgatatcactatcacaggtgctattggattttgtctatatagatatctatgtttgtggtatggccttgaactgttattaaatgttattaagttatttgaagcatgcatttactgtatctttttgtgattaaactatcctggattttttcttgtcataggaggacatttcttgagtttattaactttttaaaattagttaatcagatgatgatcattggagaaagttgatggttcttgctttcttgaacattgttacatggtgcatgggaaaagacatggacttatattttcaactatt

SEQ ID NO: 289928 - DNA, 424 bp, Glycine max
tgagtcttagtataattgttgcataatacttatgaattatttattatgaaattggtgaagtgttgtcactgtcacgtcttgagtcgagtgtgtgattcatgtgtaatgtgatcggcgattgaaaaataaattttaaatgataaagtggagaagtgacatggattgcattaagttgaactatgtgatacatattgtcataattgatttctcttatggctttggatatctgcattttatttacaaatgtgacaactcactcctgatgtgtgtttgtgtttgggctaaatgccattttgtttcaggtgagctatcctatgatgatgatcatgctacaaatggaaacgcttagtcttactcatggaaattctctgatagatgtgacattgatgcatggggctgatacttcacatgttataattacatg

SEQ ID NO: 289929 - DNA, 383 bp, Glycine max
agcttttcataatcgattacatagctctttttgagacaatgattgattgtttacgagtctctactttaatcgattacttctctcttaaaatgcgcttcaaaagtgatcacaacttttaataaaaatagaataaggcgtcgtaatgggtgcaagctatgtaattgattacatgaagaatctaatcgattacattgttcttgaaatttttccaggtggtgggaagaacactataattgattgaaatgataatataatcgattacttcttacacataatcgattacattgtatatttaattgattacatgcaggtataactggtttctctataaatagacaccttgtgttctgccatttaataacatctaacaacttgtgaatgtg

SEQ ID NO: 289930 - DNA, 436 bp, Glycine max
  unsure (1)..(436): unsure at all n locations
tgcttatggagcttctatggaggatggatttttagctttttgtggtccttcaatggtgatttttcaccatggagatgcagcggaaggcaaaggagaataggagaggggaggcaccatccactatggaataagccaaggaagaaggagcttcaccaccaagaattgccatggataagaagcttgaagaggatgctttaatggaggaaaagaaagagagaaggggggagcacgaaattgaaggaataaaagagggagagaagtggaactttgaagtgtgtctcataagactctcattcatcaaagttacaacaagtgttacacatgcttctatttagagactaggtagcttccttgagaagccttcttaagaaaacttccttgagaagctttcttaagaaaacttccttgagaagtttctntgagaaaacttccttga

SEQ ID NO: 289931 - DNA, 399 bp, Glycine max
agcttgtatggtttttgtctcacgattgtcacatgctcatgcaataattgttagtcgtggctatacgagacatcttgccaaacaaagtcaggttagccataactcgcccgtgcttttccttccatgctatatgtagcaaagtcattgatcctgtcaagtttgatgagctggaaaatgaggccgcaattatactgtgccagttggagatgtattttccccctgctttctttgacattatgattcactctattgtgcatctggtcagagaaatcaaatgttgtggtcctgttcatacacataattcaaattcattaatatgtaatgcatatattggatgaaagctttgaacatggaacttatggcagttcattctatattgttgcaagtactcctacttct

SEQ ID NO: 289932 - DNA, 424 bp, Glycine max
tgctggtgtgggtctcttttgaggaagattttggttgtgtattttaagtgggattaattaccaatatggacatattaaaaaaaattatcataatgggtatttttttttaaaaattacaaaaatgaataaatcatattttgatataccatatcacaatgaaaaaattgtatatcaaaatacgattttacttttgatttgtttaaaatcatttttattaaacaaaagtgaaaatgtatgtcaaaatacgatttcaatttttttttcctaatgaaatcgtgtaatttttttttctgacaaaattgtgttcaaatacatgattcttaaaataattaaaaaaatattgaaattatatgtgcatatatgattttaatgttccaattctttggaaagaaaatcattctttgaagtacgatctcttcataat

SEQ ID NO: 289933 - DNA, 399 bp, Glycine max
agcttttatcaaacaggctgaagaggataatgccattcataattgatgaaagacagaccgctttcatagctggacgacagctgctacacagtgtaatcatcgctaatgaaacagtggacgaagccataaggggtcaaaagacatgcttggtgttcaaagtagattttgaaagggcttacgactctgttttgtggaactttttactatacatgctgcgaaggttagggttctacaataaatggattcagtggattgacggttgcctcaaatctgcctcggtctcggtgttggtaaatggaagccccacctcagaattcatccctcatagaggccttagacaaggtgacccactagcgcccctattattcaacattgtagatgaagccttaatgtgtctca

SEQ ID NO: 289934 - DNA, 397 bp, Glycine max
  unsure (1)..(397): unsure at all n locations
taactaacttaaccaacttanaactacctaactgttacatgttataacagaataatagaaaacagaaaaataactaagttggtaaagtctaagagaacctaactaatggttgttaatgaaccaacatacaacactatgggttgctaacactacaatttgttgatttcaaccggtaaagtttgaaaaaacatagagtattttttgaatttcaaaattttcaattgcattgcatgattttgatcattgcatatttgagttttgaggggtcgtgtgtttttctttggaggattttgttctgtgtctgtggtaaatttttctaattgttgttgttcaaggagttcaaaaacttttcgagatggggagtgctctgaagttcgggtgttaaaattttgctatg

SEQ ID NO: 289935 - DNA, 385 bp, Glycine max
  unsure (1)..(385): unsure at all n locations
tttcttttggtatcatggtagccatcagagaagacattctatttccactcttatctgtctgcataattaatcctttcgcagaatgatataccctacacttcccatgttgaatcaaaatagtcaagcctttttcttgaagttgtcctatgctcaccagaaattgcctgagtaaatccactcacttgcataagaatgatacctttttccacaacatccattctggtgttattgccaagttttacagtttggctaaagctttcatccagttctgagaaccactccttgtttccaatcatatgattgctgcaaccggagtcaaggaaccacacttcttccattntgtcttgctccaggtcaacataagacattaataaaaaatctttca

SEQ ID NO: 289936 - DNA, 393 bp, Glycine max
ttctaggataacttatgaaaacggtttatggcttatactttaacagcttaaccctattttttccttccattatatgagaggttgacatacataaataaggtctgattcggaggggccataattgaactgtttatgcgaacggtgcaatatttcataactcaggacataactacatcaacaacccagttcagattttcatcccatggtgctacaaaaataataaacaccactttcaatttacattaatgaatgaataatcaaataactaactcctgaccacatcaaattaaacccaattgcttgtttatatcaatttttttttctgtttccatcggtgtgagtgacaaacaaataaaatcaaaaaatgaaactgataatacaaattgaaaacta

SEQ ID NO: 289937 - DNA, 395 bp, Glycine max
  unsure (1)..(395): unsure at all n locations
ttgtatactaagtgctcaccaacactagataagaatccctcaggttgtttcatgtaaacctcttcttctagatcaccattcaggaacgccgttttcacatccatttgatgcagctcaagatcaaaatgagctactaatgccagaattactcgaagagagtctttcttagatacaggggaaaaggtctctctgtaatcgattccttctctttgagtgaatcctttagcaacaagtcttgccttatgtctctcaatgttgccttctgagtctttctttgttttgaagacccatctacatccgatggcttttacaccaacatgcaactcaacgagatcccanacctggttagatgccatagaatccatctcatctctcatagcattataccacaaatt

SEQ ID NO: 289938 - DNA, 430 bp, Glycine max
  unsure (1)..(430): unsure at all n locations
tctggtgggacatcttgacttgcttttcaatctgacattttccacagattctgccttcttctattttcagattgggaatgcctctaacaacacctttgtcaatgattttcttcatgcctcttaagtgcagatgtccaaatctttgatgccatattctgacttcatcttctttggaggatagacatgtggaggagtagctggtttcttgaggtgtccataggtaacagttgtcctttgatctgctgcccttcattagaacttcactcttctcatttgtcaccaagcattctgactttgtgaagtttacattgaatccttcatcacacaactgactgatgctgatcaggtttgcagtcagtcccttcaccagcagtactttgttcagactaggaagtccatcatgaactagctntcccattccaatgatctt

SEQ ID NO: 289939 - DNA, 397 bp, Glycine max
agctttatctcaaatttctggctaacttatcttttattccactaacgacagagaaaggatttaaatgcttaattaatgtagttttaaaaggatgttgatctctccattgcgtaggcaagagcaagacaacgcttaccaaacaaaaaccgctcttaatttttaaaacatataataaaatgttcccttattataataatcaaattgacttcaattagcataaaaataatagcctttagtgggacaatccatagtaacctaggaaactcagtacaaatacacattaaaaatacaaaagcccaaggatataatatgcttcaaatatttgttttccacactcaaattgccatatcacgggtgaataagtgaattcaaaccaagatctaaacaaaaagctatc

SEQ ID NO: 289940 - DNA, 446 bp, Glycine max
tgagactttgagaaacatgaagaaacaaaacaaacccattgatgtggagggggaaaaaaaggggattttgaggagggaattgtgatgagaggttgacaaaaaagaaaagggtatgttgagagtgatggagaagtgaacaaaaaatgagaatgatttgaagaaaaccacacaaactgaaaccctagagggagagggaaagcttgcttaccccaccaaaaggtggagacatttttggcctttgatcaaaagggtgtggcttggcattgagaacgtgtggagtggggctggcgaaaaggaaaggaagaattatacttttcgtttcgtttgggagcacagcatcgaaggaaaatggtggaagcaagcaagagtccaaagggaatgggtttgtggtttgttctcccgagagaatgacagtgacacacgcacacgcagaaacagtcacaggg

SEQ ID NO: 289941 - DNA, 394 bp, Glycine max
agcttcttattgtaatcttgaaattcaggacagcactctaatttctgaaatttttgggataaaaatggtcattgaccagtcccttttccatgacttaaccaaattacccagtgacggtgtaccatttgaaggttcactgaatgacgactggaaatttgatttctctgcccatgatgcccgccagttggtttgcaccaacaatgcggatatgaccggacgtcttcttgccgggtcattggctattgaaagccgcatccttcactatttaattgtgcgtattttgcttccacggtcttccaaccttgccctggtttctgaggaagatctaattatcatgtgggcctttcatacagggcgtcaacttgactgggcacacttagtcacatatcgcatg

SEQ ID NO: 289942 - DNA, 449 bp, Glycine max
  unsure (1)..(449): unsure at all n locations
tcctcggggccatttcctgcgagaacaaacatttagaagttatttttacaagacaatgcttatcttaacgcaaaaagtgtcatgctaatccctctgattttagaatgaactcatgtaatctatttatgcacacgcgtatttgtggaatatcctactatttatatcaacgtagaggccatccaacacatcctaattctcatacatatatatgcatttgaaaagaacatacattctcacgcctaaggcatcgcgtcaaaactcacacttaattatatcctaaacatttgctaatacaaactacctacacacatttgaaatatgtatcatacaaattttattgtttctgcatattggaaagctaattacatcctgcacacacttgcattcaaaagggaattccatgctatcatacatccatttangaaaataatcattcacacttggcaagg

SEQ ID NO: 289943 - DNA, 413 bp, Glycine max
  unsure (1)..(413): unsure at all n locations
agcttttcagttgcttatccaaaacttcaagggttgatgagttaacaaggcattgtggaatggttcctgtcaacatgttgtgagataagttgagaatctcaattgcacttgcattgcaaattgaggaagagaagccaccagtgattgagttaaaactaagatcaaggtaagcgagtggtttcttccacgagaattggtccaatgattgcgtcaataggttatgagagaggtccaattccaataacaatgagttcgtttcatgcaaccaatttggcactctacctttaagtttgttattggacaaatggagtgattcanaaatgggactnttcccgataantttggaaattcagttaaatccatagatgaatagtccaatctccatanacgggagaaattatacttgacattgg

SEQ ID NO: 289944 - DNA, 441 bp, Glycine max
  unsure (1)..(441): unsure at all n locations
ntatggtttcgcaaataattgaggctttctgcttataaatttagaagatctcataatctgtgaacatgagttgctttggttgcactttacatgagcaatctacaccttttctcactatattggggtatgtaatttatctaaggaaacaattaactaaccaaaacagaataaagcaatccttgaagtctcataatttgaaaggaaatcttgcagaactggagatgtgacgtcatttttctgaaccaaaagcatctgacagttggaaaaagaaaacagattaataactgtttacaaagttgtttgagaccagtgatacccacttaaacaaaattaacaatcttaacaacagcaaattcagcagacaaattataatcaagtggcagaaaacaattatttattattaatgtaatgtcacgtactgctttttgtcattaaaaaaaa

SEQ ID NO: 289945 - DNA, 384 bp, Glycine max
  unsure (1)..(384): unsure at all n locations
agcttttggaagtgctttttataattctagntcttgcttgtaggaagaactattgggcatatactgcagtttgtatatcagttgtcacatgcctatgaatatgaggaaaatgtctctcggaaacatgagataactgtattatactttatttaatcgattaccttggctgcctctactatctcaagaggcaagtttttggaaaactcttgccttcgttgacagcaactttcatttgctctgcctttccgtgaaattagaccgaaattatgttgtataaatagtcagtaactgagatatagtttctgatttggtgtcatatccatcaagctttatagtttaacaatcacccgtgcattggtggatctttatcttgatcttaataat

SEQ ID NO: 289946 - DNA, 425 bp, Glycine max
atgtaaccctggaatgaaccaagacaatgttgacaatatttgagacagttgattatgaaacgacgaaatttcctttgaaccggtaagctggggcgtccatacattgccactggaatgcatacaactgaacaacttctctatttaaccatctgaacaaataccaactttagaaggataactgacaaattattacatcctaaaaaggaaggctgtctatgataggattcttaaagcagcattgtggcttatacaaaattagagtctacattaagaattgaagcacaaattataatggaatatctaactaaattgatcttcagaataaaacatcaactctgtaaaaatgaatagttggcatttgcatacagcactatacagtcctgtaaagctgttattgattgaataaaatcatcttgttacataca

SEQ ID NO: 289947 - DNA, 405 bp, Glycine max
agcttgttgaataaccatttaatgaacctatctatgcatgcatagcctatatccattatcacaaagactacctaccagcaaatcattgaaattcactcccagcaccacaggcttgcttgtcattaacaaaataaccgaatattataaatcttatgttcaggatcttttattcattcaacctgctaggataacataaggaagctgtgacattatggcattggactgcaacgacactacatcatgatgctataaccacataacaaacactagagagatcctacagttaagcgcaatttttgattaaagatctagtgatgttattcacaactagcaagtctagtaagagtcaatactcgatataccactactaaccttacatccaagcaatcatgaatcaccactcat

SEQ ID NO: 289948 - DNA, 441 bp, Glycine max
  unsure (1)..(441): unsure at all n locations
tccatcaagcagaatcatcagaaaggtcatttgacaaatgttcaaatcattaatccaagagactatcgggacttaaccaccaagcagaaactatacctaaaagtttaaccactcgataaaagcaacgaggcttaaccattaagagcagaaacaaaacaacgattcaatgcttaaccatccatgtcaaaaacttaaacaatgtttaatcaccgcggacagaagcttaccaggacttttcacaaacattgtgtgaatcaacaataatcaaagcttaatcactcatgatagaagctaacaaatgaacaatgcttaaccaccacacatgacagaagctaaaatcatcagaacaagtcgaagaactntagaagtatntaatcaaacaccttgtagacaaacaaaatctgaacactagacatgaagaaacttacacaaactttggag

SEQ ID NO: 289949 - DNA, 400 bp, Glycine max
  unsure (1)..(400): unsure at all n locations
gtgtgagactatagggtactcagcatatgtggcactatgtggcgatcgggcgatagtgcttgtcaactgtatccatacgcaaatgacagataaatgcaccatccccaattgcccaccttcgactgagctcacgtacttacacgtagaccttatcctcgttcttattaacaccgggtacccatcaataccttctagcttccgcgacatgcatgcaattctacatacaaacatcatgagctatccttatcgataatatatggcagatgcagataactattgctccaacacatttcggtgccgcaacgtgacgtactcaaataccgcagtcacattttcttcgttgcgatacgacaaccgttggatcactcaaaactctactggaggccctangactaaatgg

SEQ ID NO: 289950 - DNA, 270 bp, Glycine max
tgcagagttagtatgatttggaacaaatattcacttcttcagtttgattgccggtcatcaagcatgttttaaccccttgtggctgttcgaaaggaaaacacctaatagttgctccagtctcctcctttacttttaactcatcttcatcactgctaaattgtgtaaagcttgatattagagttgtgaataaatcatgttccttgtctaaacatgtgttggaaggtacattatcaacatcaaaacatataggcgaaaattgggggggggggg

SEQ ID NO: 289951 - DNA, 317 bp, Glycine max
  unsure (1)..(317): unsure at all n locations
agcttgttatgaggaagtgtngaagggtgaaacttcctgcttttatcgttgaccacagagtggtacctggagatatgtcgcaggggtcaagagaccttggggacgtcatgtggggtgctattgcccaaaaccaagcttgaccaatcccgacccaacccgggcatagttggtcagtgagaacctgtgatgtacctaaacaggcgagctcctggcagtcaacagataaaaggaacaaagaccacaaagcaaggaggcttgtggtggctggccaactgtgaattttgtgtgatatgtggattatggcctcttgtaatcga

SEQ ID NO: 289952 - DNA, 410 bp, Glycine max
  unsure (1)..(410): unsure at all n locations
ntgcaacatctgaaaacctagctngaaccaacaaagatttatttctaggatctagagaaggcatagcttgagcatatgatcggatcacatcatttgttacctgcatatataaaaataacaacaacatcaatatttttaaatcataacataattaacattcaattaaatagaatgtattacatacttttacagatctacgaaggtgttgtttccaaaaagaggagtagttgtagattccatggtttaggctttggtactaacgttaagaagaagttaaagagggatatatgagaacgagagaaagtgagtctttgagtgagtgtatatgatgacaatacatgcattgtatatatagaaaaaaattaacactatcataatttattcggttggatcttggtcattgattttgt

SEQ ID NO: 289953 - DNA, 232 bp, Glycine max
  unsure (1)..(232): unsure at all n locations
cgtttgcaagcttgtatccattttaagagaatgagcatgcgagtagaagtatgactaanaatgtcacttagtttgtcagattgattgtgaaggaatgcattaaccgtatcccggtgagagtgtgatccttaaattctgagagaaatgactatcatttagtactgatttttgcatgaatctctaaagtatggattgaatgcatgaaattaaggatgatgaaagccatggttta

SEQ ID NO: 289954 - DNA, 438 bp, Glycine max
  unsure (1)..(438): unsure at all n locations
ntacattatattaaaatcaatgactttgatgtaatactttttatttattctgatataattttatctctcctctttgtaatgagataattcttcaataacagttttttttctccacttttacttagttgattttattcctgaattaataaaaaaaattaccaactaatatccttcccttcaactgttcatgtataattgcaatctgtgtattatttttaaaatttactcttcaacggatggaaggaactacacaaagccgctaagtcaccaagaataactacatccagttnttatccagatttttacataatagctacacgttattnttctgtaagtgtacattatttttctctattattnntttctatctaactcccacgcaaggaagtgcatatccaactgaatcatgtactaattgcatccgttgttcctttatat

SEQ ID NO: 289955 - DNA, 388 bp, Glycine max
  unsure (1)..(388): unsure at all n locations
agctttataaaatttcattttgctgaaacaatttccatatataaattagttagatataaaaaattcttctcttaacaattaacctagagcacaaaattcattctaggtactactacatcaattaatgattagtaaaatggcaaagaggaaaacttgtacagagatgaggaaaatgcactaacctgtaacatttctttcatcaccacccctgttgtatgcaagtctttcaaagaaatgacacaataggggatgatacttaataatactaaaaagagtcctcttgcactctgtttgatgattgagccaatatgattcagaatgcttatctttaatcttccttgccatggctgcaaaattcaccttntaaaccagctggatttagaaatgt

SEQ ID NO: 289956 - DNA, 410 bp, Glycine max
  unsure (1)..(410): unsure at all n locations
ntgcatgccaccggacttgattgtctctggatggccagatgggtgactaaagtagtctcggccgatagacactgaatctttgacaaggggtgcagatgaccatatttgtttccgtgcgtcaatgggctcgcttaccttgagttagtggaggggagactaaatagtctcagtcgatagacattgagttttcgacaaagggagcaaatgaccatattggtctctacgcgtcatcggacttgctgtctctggatgaggaagggagactaaagtagtctcggtcgatagacatcgagtcttcgacaaagggagcagatgaccatgttggttgctgcatgtcatcggacttgctgtctctatatggcgaagggagactaaagtagtcttggtcgatagacgtcgcgtcttcaaca

SEQ ID NO: 289957 - DNA, 402 bp, Glycine max
tctgcttatccttatggtttgcctccggacttcaccccccgtgccactccagaagatttaagccaagcccctacttttgaggggcaactcccaccttatgaagactatcccggacaagacgatggggaaggagatacccatcttggccccctgctccacctcaaagatccatccccgcatgaactaccccagccgaacatagtccgccatatcccggcctcacccacgcccgtaaaagaatctgttcccttcgcggaagatacgggaaagattgatgcgcttgaagagaggttgagggcagtcgagggcctcgacaattacccattctcggatttggcagatctatgtcttgtgcccaacatcgtcatccctcccaagttcaaagtaccagactttgataag

SEQ ID NO: 289958 - DNA, 427 bp, Glycine max
  unsure (1)..(427): unsure at all n locations
tcanattgttaattacaccatgttctctgaagagtagagtgtgccacttttgttgagtagttttattagcattttgttagctgaaaaaaaggcccaaacttgtgttaaagtggctgtcaattctcttgggatttgcacaacctatgggcttgatttaaattaaagaaattaaggtttaataaggtgaaaactctaggattgtggctgcctcttggctgaccaaggagttgcacaattttccatatgtttatgtgtcttaattctaattttaattacgtataatgacaccatcaattgttgttatcaattctagttttacttatgtttaatgacaccatcaattgttgttattggtgatcatttcacttgtgtaaccaacttgatgtcattcctatttataggctgcacattatctaataaaaaaaat

SEQ ID NO: 289959 - DNA, 254 bp, Glycine max
  unsure (1)..(254): unsure at all n locations
ggcgattcagctcgtacccgggatctctaatcgattgcagctctagctttttatccatgaagtatcacgaatttgatattgatgtaacccatggaaatttgggaacgaaccttttgagctttccacattcgctttacttttggagtggactccaccaataggcggcacgngaaatggcactataaacggatattggtcatgcacatgatcacagtcctactcctacctatgcacacaattaaatctaattgggg

SEQ ID NO: 289960 - DNA, 433 bp, Glycine max
  unsure (1)..(433): unsure at all n locations
tgcactagaagctaanaaccgattctctgcgcgtacatgtatcttattcaggtgctttgcgtttacaaattaagcttatatatgtgtctgtaataatgcaatttctattataatgaggctgtaactgattgtctctgttttcccatgtaaatctagttttgtctaataaagggaagagaaggatatatgatgctggcttgtttggtctgatcggagaggatgatgatgaggtgggtgtttttccctagttaagaattgagaaacgttgctctcttatttttttttctgaatttctcctgttgttaattattaattaattatcatgagatttggtggctgaatttagcaactatgaaaattacagggatttcttgatttcatgcaagaaatggccttgatgatgcagaaagtgagacccaaggtattgcatatc

SEQ ID NO: 289961 - DNA, 393 bp, Glycine max
  unsure (1)..(393): unsure at all n locations
agcttattagaacaaaattgcctcaatcatttccaaatatgcatgtgaattangaagcatcaacaagaatcaagccaaggctattgtgcaagcaatcaatggggcaaaacacaccaaatgattatgatgatggatggctcaaattctcacaaaggtaaactcatcactttcaaattgagctttcaaaactatcatgacatgtagaggagaatcaaggatttcaagtcacaaaatgtcaagaacttttattttcaaaacaattacccatttcttgaacatatcctataattcaaagaanaacatgcaaagtcgtacatgcacacaaaattgacccanaatattaaactaaaaatccgacgaaactaacaacattaacanattaacacaactaac

SEQ ID NO: 289962 - DNA, 459 bp, Glycine max
  unsure (1)..(459): unsure at all n locations
tctatcaaactcagcttgtcataagactcttctcttgatgaagggaaaattatatttccatgtgctacataagaaaggacgatagtttttcgagttgaaattgtgaaacttcacctttacaaagatggattcatgcctaattacatggtttggattgatcatggtgaaaagatgccacatgttgataatcatcacatgggtgttttaagtagtggtgtagatgtggcctaaggtgaaccatttatgttaatgcaggagatgatgtttgatgctcttaggcagcccaaaatatttgaagcaccaaaatcagataacatggaagagcctataaatgaagaagctcaaggattttataatatgttggtagaggcaaataacgtcattgtttgaagggcatcagtctctaagttatcaattntcacttatagcttgcaagtccaattggaatgttcctaagta

SEQ ID NO: 289963 - DNA, 380 bp, Glycine max
agcttgtacttggtttatacatgattgatacatgctttgggacttgtaggattcaatttgggcaaaattggatgaaggtaagagtggttttcgaaatctgcactttatgcagaattttgctgttgaaatgtgcagcagaattttgtatatgtgccgaaaaatgcttgtgtatggctggttgtggaaagcgtagtacatatggggttctggacatttcctagcagatcccaacggtcaaaatgtagacttatgtactagagacttccagtaaaattttcgagtcgatccaacggttaacgaactggaacgaagagaatgttactgtggtttttgaatgtgaaaagctgtgatattgggtttgtgtttgggcagagttttct

SEQ ID NO: 289964 - DNA, 466 bp, Glycine max
  unsure (1)..(466): unsure at all n locations
gacacttccaatactcaagcttgagatgaggaagtgttgaagggtgaaacttcctgctntttttgttgacttcagagtggtacctggagatatgtcgcgggggtcaggagaccttggggacgtcaggtggggtgctattgcccaaaaccaagcttgaccaatcccgacccaacccgggcatagtcggtcagtgagaacctgtgatgtacctaagcaggcgagctcctggcagtcaacagataaaaggaaaacaagaccacaaagcaaggaggcttgtggtggctggccagctatgaattttgtgtaatatgtggattgtggcctctggtaatcgattaccaagggtgggtaatcgattacaaggcttaaaattgaggacaggaggctaagatggtctctggtaatcgattaccaaggggtggaatcgattaccaggcttgaaaacgaagtcaggaaacttagggag

SEQ ID NO: 289965 - DNA, 402 bp, Glycine max
  unsure (1)..(402): unsure at all n locations
agctttcttgaaacatatatgtttggtcttgttgctgacagatacaacaaactaccaattatacttctataaacagaatcatttgctaaatcaataccatcatttattgataacttttcattcacaacaattggagtgacaacaggcttgcattgctccatgcgaaacttcttcaatatctccaaagcatatttcttttgtgaaatgaagatcccatcattagactgagaaatctccatcctaagaaaatacttcatttcacccaagtcagtcatttcaaattctttttccatgtccttcttaaattggtttaaggaatcagattcatttcctataaccaacaaatcatcaacatacaaggaaacaatgagctgcatttcattnttncacttcttcacatac

SEQ ID NO: 289966 - DNA, 451 bp, Glycine max
  unsure (1)..(451): unsure at all n locations
tcaagctntgtgtgtggaacattgtaataccatatctgcaggagattttcttgctattttatgaacgggtaaacggtcagacagagaacgataattgacaagatttgagtcggtttctaccttctctctgcttttaggccactcaattgggcgtttatatccttcaggaacaggaacaaggcaggtaggaggttcttcaggacagtgtctttctcgatgttcatagtgtttagtactccggagactcctaatagctttccagttgtcaaggcatgggataaaatcaggaccagcagtgacattgcaaagcttccacttgtatccagttgcctgcttggaggattcttgagactccttttcattcttagactctgctgcctgagttgaccaagacccagtttctgtagtactttcttcgtgaagctcagactgagccccagaaggatatacc

SEQ ID NO: 289967 - DNA, 404 bp, Glycine max
  unsure (1)..(404): unsure at all n locations
agcttctagtcgtccatagacctcctctgtggtacggtctagcaaacgttgcatctgtgcattcatcgcatccactaacagacgttgagcgccgtccaactgatggtactcgtcaccaccaccacctgctccagccataattcaacaggaaaaaaaaaatgtgcaataaaaattattaaggtttcaggacctcacaacactctactcacgtctcttagatggtagtacactcgtgtttaatgctctcaataggcttttgtgtaatgtattccctcttgccttttaccactcgtgtttcctcttaagttcctggatggaccaaattagacacacaaggtaatataaaataaaaggaaagacaatataatgatcacaaacagaattgatntgggataaacaactgg

SEQ ID NO: 289968 - DNA, 445 bp, Glycine max
  unsure (1)..(445): unsure at all n locations
catgagagagtcaaagatcaaattgagaganaaaataaatgctatgctatacaagccaacaaagggagaaagaaggttgtcttcgaacccagagattgggtttgggtgcacatgagaaaagaaaggtttcgaaacaaaggaaatcaaagcttcaaccaaggggagatggaccatttcaagtgcttgaaagaatcaatgacaatgcttacaaagttgagctgcccggtgagtataatgttagttcaaccttcaatgtctttgacttatctctttttgatgcagatggagaatccgatttgaggacgaatcattctcaagagggagagaatgatgaggacatgaccaagagcaagggcaaggatccacttggaggacctatgacaagggttagagcaaggaaagccaaggaagctcttcaacaagtgttgcccatattatttgaata

SEQ ID NO: 289969 - DNA, 403 bp, Glycine max
agcttcttcttggtcttcctctccttagccacccgcagctcagactttgactctttcagtcgagcctcaaggtccaccaccaatttggcaagctcatcctgctttgccataatgccttccacttggctatccaagtccttttgctcctactgcaagtccttacaacattcgaacaacttatcaccatccaacctggtgcgcaacaacttggccaaaatgcccctaaccttggaagacagttggtggtttgacttcacaacttcaatgaaggcaatggtggccctagctaccttatggcgctcttgtctccaaaccatgcgagcagtagccatccatttggtgacctttgcctccaaggatgccaccttgcgtagaagcctctggtgtcgctgtgcattctcct

SEQ ID NO: 289970 - DNA, 397 bp, Glycine max
tggaccttgaacaagcaatcaactcctctttcatatccatgctatgtgctcgcgactggtccctttcttcccttcgcaacttgagttcattagtgctaccccatagagctccgcgaaattggttccggccatactcttccttgcgagccctcttggtctcttgttcaagggctcttgcggtaattgcattctcttcccgtaacccggcgcactccttccgaacgtgtgtagcagccaacttgaacttctccttggcgagttttgcctttcctaactcgcttttgagagcttggacttcttcgtcctcttccggtgcttcaaaattctcttcgctgacgacttttgactttgacttggtagaacctcttgtcggattgatttgatcccatgcttacta

SEQ ID NO: 289971 - DNA, 401 bp, Glycine max
cgctgcaagcttctatagaaggttcgttcctaatttctctacaattgcatcacctctcaatgagctggtgaaaaagaatgtggcatttacctgtggtgaaaaacaagagcaagcctttgctttgctcaaagaaaagcttactaaggcacctgttctagctcttcctgacttttctaaaacttttgagctagaatgtgatgcctctggagtgggagttggagctgtattgtacaaggtgggcaccctattgcttattttactgaaaaacttcatagtgccacccttaactaccccacctatgataaagagctttatgccttaataagagccctccaaacttgggaacattaccttgtttccaaggaatttgtcattcatagtgatcatcaatcacttaagta

SEQ ID NO: 289972 - DNA, 429 bp, Glycine max
  unsure (1)..(429): unsure at all n locations
cctgactcaccatanaccttgacccatttgagaatgtcaatccttaccctctgaagcaaaaaaagaagagaaggaaaatttccaatcaaaggaaaaaagagaaggacaatttccaatcatagagaaagcaaaaaaaagagagaaggaaaatttccaatcaaaggaaaaaagagaggaaaggaaattgccaatcaaagagtgggagaaagaaaaaagaaaagaaagaaaagtcccaaccaaagaatgggagaaagtaaaaaggaaggaaagaaagttcctcatcaaagaaactagaagaaatgtgcagaaaggtctttttgaccagacaatatctgaacaatacagaattgtcaccaaatgaacaaaagaaagaanaggagaccatgacctatagtggtcttctccctttgattaccaaccaatatcctg

SEQ ID NO: 289973 - DNA, 388 bp, Glycine max
  unsure (1)..(388): unsure at all n locations
agcttatagtttatataagaagaaacctttttataatgttgacattccatctagagatcatagttctttttcaacttatcaaactcattattagcatggacacattttttttttgcaaaaaaagcttgtgtttaagcatttccttggactcttcttttgaatcttcaagagttgtggttaaggatttcatcctttcttctgaatcttaaaaatccttaagaagagtctctcgtccactggataccttttaatccggtaatgccttgacctactcacaaacaaaggtgtcttgtacatcacctggggaagtggttctaggacaaaatcaactaaaagagttcgataagttttcttaagatcctgatngctcttttcaagatgttgaaaa

SEQ ID NO: 289974 - DNA, 429 bp, Glycine max
  unsure (1)..(429): unsure at all n locations
tctcaaggaagctacctagtctataaatagatgcatgtgttacacttgttgtaactttgatgaatgagagtcttgtgagacacaactcaaagttcaacttctctccctttttcttccttcaatttcgtgctccccctccctctttctctccctctttcttttcctccattgaagcatcctctccaagcttcttatccaaggctcatcttggtggtgaagctccttcttccgtggcttattccttaatggatggcgcctcctctcacctcctttcctttgtcttccgctgcatcttcatcgtggaaaatcaccattaaaggaccccattgaagctcanagatccagcctccatagaagtcccacaagcaagcttccatcaagtggtaatcagagcacaagagcttcaagtaggtgcaccttanaccttca

SEQ ID NO: 289975 - DNA, 334 bp, Glycine max
  unsure (1)..(334): unsure at all n locations
tttgcaagcttgttaaaataggttctaagagaatctcaagtggaatttagcatacttctatgaaacaatcatgagaatagaataacaagggacactttgacattcctaaaaacaaaatttaacaggagttctcctcttttgagggaaagagcctattttatttcaatatgatagatataaggcaatttattttgagttgtgtcactagaagcaagcacatacctaattgaataaagatctacttctactcgaagcacatgtagaaatgaaccatcaagagaccatgctaatcttctaaattctanagaaagatggcaccatctcattatggaag

SEQ ID NO: 289976 - DNA, 405 bp, Glycine max
  unsure (1)..(405): unsure at all n locations
ctaagctgcccccactcgcaggcgagctcatttgccagtgatctagtgcttctccaaagcaccgctttggaaaacttctggaagcccaaatgggcctggtgctattncatcccccctttttactaaatacacccccttacctttnttgctgattcttttttctaacgttatggaaacttacgaattatgtaacgatacttgttttcctttcgtaatgttacaaaaccttacggattacgtaatcatcccttttttgccttccggaatgttacggaactttacggattgtgcactaacacttccttttaatttccggcatgtcacggaacttcacggattgtgctacaatgctttcttttgatttccggcatgtctcggaacttcacgaattgcctaacgatgggt

SEQ ID NO: 289977 - DNA, 378 bp, Glycine max
agcttgttgttcttcattgcgctaaagatcgtgacaagtacgtttcatttcgtctacctgtgtcgctctattgaatagctaggtttgtttctggaacctttggttaacctaaggaccttttttggtttctggtgcaaggattggggaactcatggtgacctgagacccattgccgctgccattgaatagctgagtctcgctgccattgtcggtgttgagtttgaggtaagcttcatgtcttcattgaaactttgtgcttccgcgtacgtgctctttgtgctcacttctctttgaagcatgtgtatgttcccatcgtaatctgttcttatgaaaactagctggttatagattgtaattagcttgtcattagtactacta

SEQ ID NO: 289978 - DNA, 409 bp, Glycine max
tgattgacgcgggatggctaacattccatttgatggtttttatgtgaagacaaatccgctcgccaatcatgggggaccggtggtaaatgcaatagaggcatgcgggctgtaaaggcctaagcaaatgaaggacggggtaacctcaagaaggtttatctttgaagcattgaaagaggcgggcatcgtttcctttgatgggcacaaaggggactcctgtttgatgcatctgggtgcatcacatgacatggagacatgttcaatggcagaggagctattacagcaaatgatggaccaaggccgatttgagatcagtaaagggaacaagggagaacaacacatgtacatacagttggcgaacaaagaaagccccgctagacctaagcctttggtgatacacttcactagggat

SEQ ID NO: 289979 - DNA, 327 bp, Glycine max
tctagcttttataaatatacttggcctgcgttgaattgtctttgggcttggcgaccatgatcaacaaagtactttcggcacctactatatgttgacttgaccaacgttgatatcggaatgctgcgacaatctttcaacaccttattcacacattctgataggttggatgtcatctgaccatatcttcgtacacatgtatcgtaagccatgctccatttttcctttgaaatgcgatcaatccatcttgctatggctggagtcagttgacaaaatgtttctaaggtatgatcaaacacatgcattgcaggagtgtacgctgcatcaaat

SEQ ID NO: 289980 - DNA, 425 bp, Glycine max
tatgctgcacatattaacagtagacctcctaacctcagtagcttaatcaaccacagcggagcaattatgacctttccagcaacagatacaaccctggatggaggaatcaccctaccctcagatggtccagccctcagcaacaacaacagcagcctgctccttccttccaaaatgctgctggcccaagcagaccatacattcctccaccaatccaacaacagcaacaaccccagaaacagccaacagttgaggcccctccacaaccttccctcgaagaacttgtgaggcaaatgactatgcagaacatgcagtttcagcaagagactagagcctccattcagagcttaaccaatcagatgggacaattagctactcaattgaatcaacaacagtcccagaattctgactagctggcctctcaagct

SEQ ID NO: 289981 - DNA, 387 bp, Glycine max
  unsure (1)..(387): unsure at all n locations
tagcttatcatggtatcaaaacgtataaagaaatcgttaataaattctacatcatcaattaattaaatattatttaagatgttacttttagaataattattataaaatttaataatttccaatcatatgataactcgtaatttaattattataaattacaataattttcaattatatgacaactcattattgaataattacattaaaaatatttatgttgtcaatatatttaattaaatttaaaataaaaataaaaaatagatattgaacactaaaatgattattagtgtatttggatntttttttctttttttggacgcttggatcttcgttatttcatagtgcacgtatgtcanaatccgaaaaagacgtaaaagtaaataatat

SEQ ID NO: 289982 - DNA, 433 bp, Glycine max
  unsure (1)..(433): unsure at all n locations
ntgaatgctctattcaatggagttgtcaagaatattttctatacttatcaacacatgcacagtggccaaggatgcatgggagatcctgaaaaccactcatgaaggaacctccaaagtgaagatgtccagattgcaactattggctacaaaattcgaaaatctgaagatgaaggaggaagagtgtattcatgacttccacatgaacattcttgaaattgccaatgcttgcactgccttgggagaaaggatgacagacgaaaagctggtgagaaagatcctcagatctttgcctaagagatttgacatgaaagtcactgcaatagaggaggcccaagacattcgcaacatgagagtagatgaactcattggttcccttcaaacctttgagctaggactctcggataggactgagaagaagagcaagaacctggcg

SEQ ID NO: 289983 - DNA, 105 bp, Glycine max
tagctttttcggaaagtttccggataaagacttcttccggaaaaagaatttgggaattccggaagtagtcacaaacttcgtccggaagatcgtcatccggaagtt

SEQ ID NO: 289984 - DNA, 546 bp, Glycine max
  unsure (1)..(546): unsure at all n locations
cacgtccacatccaanncgccccacatacagtgcctatgcaaacagactccgtaanacaacaacactncnntcnntnaagcncgccgnncnttgaggcctgtgaatgcgtcgcaanccgcccnncaacnnaacncacgccaccgcgcaccgcgagacaaacaggcacattagccgggtctaaatcaaaaccgacggagacaccgagcagggcggaccagcggctaacgcgaaaaagcaggcggccgggcgccaacaagaagacgggcccgaaacacggaccataacccagagagagcagccccgggccccaaggcccaagcgaccctgaagagcagagggcccacaccagaaaggagacaaggcaccggcaaacgaaccatcaccacaaaggagaggcccaagcccagaccagaaccacagacgggacaagggggaaacacacatgcacagacaaagcgcgaaccgagaaagcaccgcggcaccccaacctcagggagacacctccacaccgcagaggccccaccagaaccacgagggcgacggcc

SEQ ID NO: 289985 - DNA, 410 bp, Glycine max
  unsure (1)..(410): unsure at all n locations
agcttgttaaatcaatggaatccatgattctgtttgacacaagtcgtttaattttgttcttagaaatgtgacctaagcgcttatgtcatttccaacaatattttaattaaaagacaacctaaacacattgtttccagatgaacacaaataacccaatttgtccaaataagaaaccaaaaccaaatttcgtctaaatgacggtacaacaaaagtgtctttcaaatccaaataaaaactagtacataataatctaaaatgccatatagcttccacctccacctatttaccatctccaacatatatccatctttcagaattaattggcttccggtagcttaggcaacactgcattgaaacactgatngtagtagtggcaccagactctaaccaccaagtggttctaagtactg

SEQ ID NO: 289986 - DNA, 445 bp, Glycine max
  unsure (1)..(445): unsure at all n locations
ntgatgtgccctctagtgatctctcaggaatggcagcagtctctggtctctcctatttttcccctgcttcangatgaaggtggtctcggaggaagcatcctatacctgttagggtacctgggctgtgggaccttcaccttccctatcaagagaaggttgggtcccaggccaggctaccctctctaaaaactgcttcactgataggatgaatcctggaggagctaccacctgtagactctacagcaatataatctgaccctaatggatactttgaggcatagcttcaaagcgctgcgagtcaacatgagctggaactgaaggagctgcagaagtagatgttggagtaggtgctggagctgcagaagaagatggaatatcagctggcctcgccctcgccctcctagccccccggaaagcaactgttagatcatcaatgtttcaatag

SEQ ID NO: 289987 - DNA, 402 bp, Glycine max
  unsure (1)..(402): unsure at all n locations
agcttgttcgcacatctttcgcgtgtatgatatccactccacaaggtttgaagtagaggacagcttcaaccctataacgcaacgtggcggacaaaagtgggcagtaaacttgaatggtcgtcattgtcaatgcggaaggtattctgcgcttcactatccatgttcacacattattgcagcttgtggttacgtgagcatcaactactaccaatacatagatgttgtttacacaaacgaacacatcttaaaagcttactccgcacaatggtggcctcttgggaatgaagcggctattcctccttctaatgacgcatggacacttantcctgacccaactacaattcgtgcgaaaggtcggcaaaataacaaggataggaatgagaggattggtcaaccatctga

SEQ ID NO: 289988 - DNA, 439 bp, Glycine max
gactcacgctataatatttgaattacaacgtttagaaactgctggtaatttattaccatttatgtgtaatcgattgcgcagtgcagattctgaattcaaattttaatagctgttgtaaatcagttttggccactggtaatcgattacatcctctggtaatcgattaccagagagtaaatttgttgaaaaagactttttaacttaaatttcttggccaaactttttgctacttcaattggaattcccttcctatttaatataccctttctaagactctagagactgtcttgatcatccatcttgaatatatttaatttctttgtcttgaatagagctttgagacgcatgtgaaactttggcatcatcaaaacattcagcttgatcctttgtctacagtttcgtgatagaatactatataaagttagtggacaaaaactca

SEQ ID NO: 289989 - DNA, 361 bp, Glycine max
  unsure (1)..(361): unsure at all n locations
agcttcttgctacaattactcattccagtataaggcaggacataataacgtggtggtggatgctttctcgcgtcttcaagaaccagagcaaacagcagaatacttccaaatcttctccatgcctcacccgaaattccttgatgagctgaaaaaggaattatcgggatcagaggaattcaaaactctcatgcttcaggtccgcaatgaaccttcgaaaaacccatattttgaaataagagacaacctattgctttttcaggggtgaatttggattaatcagggcaatcttttcattcctctnttattggaagaataccacaaatctccacttggtggtcacatggggctagctaagactctc

SEQ ID NO: 289990 - DNA, 451 bp, Glycine max
  unsure (1)..(451): unsure at all n locations
taagctctttcaactgcacaaggctcttaatatttgaagattatccttgttgaaccttcacccgacgaaaatactgacaaaaacttatcttctcctttttggacaaagtatggcaagctaggggcaagtaaattttcttcccatcagaccttggatgcaactgtgatcgtatccccatatcagctagatcttgacgggtattcaaaccatccttcgtcttgccttgaatgataaggagcgtcccaatcacactgtcacatacatttttctcgacatgcataacatcaatacaatgtctaacatctagatcagaccagtacgaaagatcaaagaaaatggtcctcttcttccatatgcaattcttacgtttatccttctttngggtctttccaaatacagtattcaggtgttgaacccactgatatacctgctcactagtcaacggtatggg

SEQ ID NO: 289991 - DNA, 386 bp, Glycine max
  unsure (1)..(386): unsure at all n locations
agctttttgtttgttcttgaccaaatctttagttaatcgtctttacgtaaagcagtctttgtattcgtttaaaatgcatgaagataaatcagtaggagaacaattggatttgtttaataaactgattcttgatcttgaaaatatcgatgtcactattgatgatgaggatcaagccttgttattgttgtgctctttgcttaagagttactctcatttcaaagagactntattgtttggaagagactctgtttctcttgatgaagtgcaagttgctctgaattcaaaggaattgaatganagaaaggaaaagaagtcttctataagtggtgaagggctgacagcaagagacaagaccttcaagaaagatagtanatttgataagaaga

SEQ ID NO: 289992 - DNA, 450 bp, Glycine max
tgtacactttgtcttccatttcaaaataaagtaattatgataaaattatctattttcaaataaggtattttataaatgaaataaacttaattgttttattcaaatataaaatttaaaaatgaataaattttgttattttatcaaaataagaaattttaaaaataaaaataatattcaatcaagaaattaaaaaaaattgaaggaatttcaattgaaattcttaaagtttaactttttttgtaattctaaaatttttcatccaaataccacgtaaaaggaattcggttcaataaaaaaaattcctaagcgtagctggcattgataacccagtcatcattatcatttgttgtgcacacagtagagaaaaatcatttcttataaaaaataaaagtagagaacaatcaaaaccaaatttaatcaatattcataaggttgtgtgagccaaatact

SEQ ID NO: 289993 - DNA, 417 bp, Glycine max
  unsure (1)..(417): unsure at all n locations
agcttatcttgaattattattgtatcctttgcaccctttgtgagctaaattacattntcaaaattgaaccctggacttgaatgaatatctccagataccttgtttagattctaggagagcagatagttcaaggcaaattacctcaaatttgggggagttgattgggatgtaaagtaaaaggtaaagcatcagcacacacaacaaataagttgtgtgttaaaaaaaatgttgttgtaataaggtcaaatgcaaattaaagtgaaaggctggtgagaaagttaattgtattgaaagaaatatttggatgaatctanngattgtgctctcttagaatctaagtctttgaatcctagaanaaccaattaattntgtagccaaacctcactancagcctatgaaagtccttctgattctatt

SEQ ID NO: 289994 - DNA, 444 bp, Glycine max
  unsure (1)..(444): unsure at all n locations
taataaggttgtagcccagaaatgtattcaaaatttcaaacgcattcatgactggcactggtggtgctgaagaccctgcttcatcccccttatcaacacgcttttgtgaatcccgtgcaccaaattaggcacactgacatcaaggttagaatgattaatcatatccaaagctctgataagcaatatttaagcaggataaaagttagagcaaaagttcttacatgaccaaaactaaaattttgcctgaaaaatctaggaggctgataattctgcatgaaccattcattctcaaagatctcattcattgtaatccgctgtttcatgcgataagaagaggcgatataataagatatgttaatttcgtgagatgaattanggaaacaaagaatatttgctaaagaccatattactaacatggctcaaccaaattagcaaacaataata

SEQ ID NO: 289995 - DNA, 378 bp, Glycine max
  unsure (1)..(378): unsure at all n locations
agcttgtctttgggcaatagcaccccacctgacgtccccaaggtctcctgacccccgcgacatatctccaggtaccactctatggtcaacaaataaaagtaggaagtctcacccttccacacttcctcacttcaagcttgtaggattatggggtacccatcacatgtggtactaggtggcggtcgggcgatggtgcaagacaattctccacatccacaaatcacgtataaacccgccatcccctgttgcccacctccaactgagctcacgtactcccacgtagcccttatcctcgttcctctcaatgccgggtccccatcaatcctcccaagcttncacaacatccaagtaattaacatccaatctcataaactaaca

SEQ ID NO: 289996 - DNA, 431 bp, Glycine max
  unsure (1)..(431): unsure at all n locations
ttcacaaattacaatcgagtgaaggtgtgtttctcacgatctttatgcatgtgtttagtattataggagcaaaatagtaaaaataaaaaggttaaattaataccaatttattatctcttcgctataactttctacattcttctaaaaaaatattctctctagggaaacacctgttttttatgggagcaaaatctttttttatcaaatacatataagaaaaaaaaaattattgtggggtaattgcccccttagtccctaacctacatccttccctgctactactactttttctaagccacataatgggagcagagttaatcgtgtctgcaataagtttggcacacatgattcgtgccccatctttagcaagattgttaagagttgaggatattttagtttttatattntatttgtaatatgcgtgtatgtct

SEQ ID NO: 289997 - DNA, 321 bp, Glycine max
  unsure (1)..(321): unsure at all n locations
agcttgtctctatgttatggtgagggcattgcgggggggactcttgttgctgctcactcactatgtggagaattatgcactcatttacaacaggactgtatcagcatgcgactcggtctaactgttaacccaagtagccgcaaaagggattgtttaatgtgatgccttggaatcagattctgtcttaacccaaatagattctattactgcagctantgtggaaggggctgagnggatctctgacgaaccagaactaattgaaacctgacgtgtgttcactccaaacattgtgatcaccccagcgatgcaaaaacggcgatc

SEQ ID NO: 289998 - DNA, 266 bp, Glycine max
ctgttttgactatatttccacggcctaaaaacaagattagcccacaaaaatatttgatttcaattgtatctttatgaaaccactattattcattcttgtatttatctttattaaatgatgtgatcgtacctcctcgatacctaccatattttatggtgcttaagagactagaataactcattatattaaatgaggcgaaaaaattaaacaatctgtatggaatcatatgacacactttggattttttttttggaagctttaatata

SEQ ID NO: 289999 - DNA, 393 bp, Glycine max
  unsure (1)..(393): unsure at all n locations
agcttattggcgcaacagtactcaggtagtgcaggctagctagactgcgagagtacgcgagggaaagattaaatttaccagcatacaaagatggtcgttataaaacccgtcattgggtaatccagttcaacaatgatgcctattaaacctgtcgttgtaattggaagacgacatcgttttcggtataaacgtcgttgagataaagcgcatatttactaaaatgtcaccggctgttaaacaacgacatttttcggaccaccgtccttgaaagcgggtcctagaatcaagattntgtagtagtgaatattctatattacattctataactattttcttttacattttatgcatcatgcaatattttcatattagtaatgtctaaattctaatata

SEQ ID NO: 290000 - DNA, 430 bp, Glycine max
tccatcatctagtgtcaagggaaattgtcttgtgttaagtgagattgttcggtgtcgagggtggtaacctcgactagtgtaagagttgtaggtatgtgaggcatgtcaagctcccctagcttggacgactattgtttaggcttcttctggcaagttgtctggggtggacatgcttttgatcttgcaagcaaagttagacgtgtcaggtggatgatgtccttatatatgacaattcagcccttttttgatcattggaggatgcattgaagacaaatgtttcgttttgtcttttgctacaggcgagtgcaacacacacatattactcttgcatatgtatcactcatggagtgggtgtgtactgaagatgcaatacatgggtgagtggagctgcatcatggtttaaaaaattaaggcaccattttagcttatg

SEQ ID NO: 290001 - DNA, 392 bp, Glycine max
tagctttatagcacagcaacacagaatctatgtgtccaacacccctcaattcaatgggttttctaggtttgaaaagtgaaatcgagaatgaggtaaatttgaagcaaactctcacctcacaccagtccataacatcaatctaaacttgctcaaactggatttacgcttaaaatctcaccgaatcaaaatttgactcttccacacccaaatttgccctagaaatggctctttgttcactttggtcatttgtttttctctctagcacagcctaatctttctcataagtcctaaatgacatttcaagctaggattaactcactttaacctccatttaccacagaatccagaattaacctttcaactctcaagcctcactctttttcactcataca

SEQ ID NO: 290002 - DNA, 403 bp, Glycine max
tctcttggaccttgaacaagcaatttactcctcttttataaccatgctatgtgctcgtgactggtccatttcttcccttcgcaacttgagttcgctattgctaccccatagagctcggcgaaatttatcccggccatactcttccttgcgagccctcttggtctcttgttcaagggctcttgcggtaattgcattctcttcccgtaacccggcacactccttccaaaatgtgtgttgcggccaacttgaacttttcctcggctaatttcgcctttcctaactcgcttttgagagcttggacttcttcgtcctcttccggtgcttcaaaactgtcttcgctgacgacttttaacttggtgagccaatctaaacctcgtatatgaactttcagccattcatgata

SEQ ID NO: 290003 - DNA, 395 bp, Glycine max
tagctttttaaaggttgcgcttagcggcaccaactcttcaaaacttccactaagtattaggagcttagcgagagaagctcgcttagctcagaggatgccgcaacaaatcgcgcttggcccaggaaagctcggcttagcgcgcgactatcaacaaaaaattgtctaagttacttgggcttagtgattcagcctcgcttagccacatgtagttcagcaagaggatgagtgttcatcctcaaaggttgaactcgcttagcgcggtaggtgcacttagctagttctttagagaacgcctatatacacaatgagtactgatgaactcgcttagcgcagcatgctcgcttagcgagttcatcacgttttccagaaaacgcagaaaacacagttcgttttct

SEQ ID NO: 290004 - DNA, 420 bp, Glycine max
  unsure (1)..(420): unsure at all n locations
tcaagaattatggtctcatcaaactatttgtttccttatggaaattctataaacagacctcccatctttaatggagtgggttaccactagtggaaaacccgcatgcaaatcttcatagaggcaatagatttaaatatttgggaagccatagaacaaggaccttatgttccctctataatagccggaagtgcaaccatagaaaaacctagagcagattggactgaggaagaaagaagattagtacaatataatttaaaggccaaaaatattattacatttgccttaggaatagatgaatactttagggttttaaattgtaaaagtgctaaggatatgtgggatacactacaagtaacacatgaaggcacaacagatgttaaaagatctangataaacactntaactcatgaatatgaactt

SEQ ID NO: 290005 - DNA, 330 bp, Glycine max
  unsure (1)..(330): unsure at all n locations
ttctgctttgagaacactccagacatcttctgaaagatcccaacggtcagagcatggacaagtgtcgtgtgaagttgcagaccacatttcgagaagatccaatggttaacgaaggctgggcagcgttgttaccgaggcagcttcatgtagctttctctagaagcttcattaagaggctcctccagaagcttcattaagaggcttatagcacactccataaatcttctcaatgatcccaacggtcagatcatggataagtatcttgtgaagttgcagaacanatttcgagaagatccaacggttaacgaatgctgggcatcgttttaccga

SEQ ID NO: 290006 - DNA, 421 bp, Glycine max
taaattacttctgtcagaaaagccttacaaattggaggaggatgacatgggaaatttagaagagaatcaggaatctagaataggactatataactggaattatcttgtagacaatattcaagctagtgacaaggaattattgtcgggactgcaggctctttcagcgctggagattaatgggtattggagactagtagacgagagttacatggacatgattctgggaatgcttttgaaaaatgcagtgttgaatgactggtcacttaatgctttaaatgaagatgaagttgtgagtatactggaatcagatggatttcctagggtgcttgcaaggcattgtttgcacgtatatggcaacaaagtaaatgagtgcatgcctagctttgtttggaagttggatgagaagcgagtatgcatacat

SEQ ID NO: 290007 - DNA, 403 bp, Glycine max
  unsure (1)..(403): unsure at all n locations
agcttgttcagaaaatgaatctactgaggaaatgcttaccacctcgaaagactggaaagcggtttctaatgactcctctgcggcctccacataaggcatagaggatgggcagctcaccaagatgtcttcctcgcctgatacgatgacaagatgcccttccactacgaatttcaacttttggtggagtgtagagggaacaacgcccactgagtggatccacggacgccccaacagacagctgtagggggggttaatgtccattatttggaaggtaacttggcatgtgtgagggcctatctgcactgggaggtcgatctctcccctaacctctcggcgggtgccgtcgaaggcacgaaccaccattgaactcngctntatgtgggaggcattgaatggtaatttc

SEQ ID NO: 290008 - DNA, 451 bp, Glycine max
tgtaggattatggggtacccatcacatgtggtactaggtgttggtcgggcgatggtgcacaacaaggtttccacatccacaatgcgcgcataaacccaccatcccctgttgcccacctccatctgagctcacgtactcccacgtagcccatatcctcgtttctctcaacaccgggtccccatcaatcctcccaagcttccacaacatccaagcgaaacaacattcaaacagcacaagctatcacagccaagcaaaacagagcaaaggcagaaaactctgccaaaacaccaaccaaattatagcttttctcacttaaagaccccagtaacaattccttcgatccaattcgttaaccgttggattgactccaaaattttactggaagtctatagtacagaagcctacattgtgaccgttgggatctactagcaaacatccataactcattctg

SEQ ID NO: 290009 - DNA, 403 bp, Glycine max
agctttataaagatatttattttggtggctctaggggaggttatggtagaagtaacggtggtcgtaatacttcatctgatcgcggtggtggtgacggtggttttggcagaggccgcggtggatgcaggtttgccaacttttagtgtcaaatttgccttaagtatggtcacactaccaatgtgtgccattttcaaactcacgagtcactcacttttgttgatccaactacactccaacctatttcgtattcaattggttcgattaggtcctcaaacacttgtgttaatcctaactcccagtctgttgctcagccaactaatcaacctagtgttatgctaacaaactcagcatctcatggaaatggtcaagctagctcgacatggattccagattctggagctag

SEQ ID NO: 290010 - DNA, 437 bp, Glycine max
  unsure (1)..(437): unsure at all n locations
ntgccgatttagttnttgtcggtgaaaggattgaaatggttctgagaagatgcaaatttgagtatcctgctttgatgaatgggaagcctagggaaaatggagagaacaagaaggagggaggaacccatgttgtgactgtcgttcctacatgacccaatttcccactagctcaacaatatcaatactcagccaatatcagtctttctcattacccaccaccttatcagccaagaaggccacccctaaatcatccacaaaacccgtctgccgcacatccgatatcaaacaccacccttaacacaaaccaaaacatcaactacggaaggaattttccagaaaagaagcctgtagaattcaccccaattctgttgtcgtatgctaatttgctcccatatctactcaataatgcaatggtagccataataccaacaaagatt

SEQ ID NO: 290011 - DNA, 392 bp, Glycine max
  unsure (1)..(392): unsure at all n locations
agctttatttatatactagactatgttttcattatgtatgaattgcatatgcataaatttgatgaagatagccttagtaatgatgatggtgttagatttgatgacaataagagtgaaaatgatagtgatgttggttgtgaagatggagccgaggagcaacatggaagtcttcatgaagagaaaaggatatcttatttgacaggcgatgagataaagggtctccattgggaaagtgaagatagtgtttttcaattctatacaagatatgctagatgccatgggtttgtagttaggaaagatgatgtatttcaagatttgaatgacaatgttataaaacatcaatttgtatgcaattgaaaggtttgagaatangaacacttatgaggtggata

SEQ ID NO: 290012 - DNA, 451 bp, Glycine max
  unsure (1)..(451): unsure at all n locations
tgtaagcctaagccaatagtaatgatcacatgcaatgcatttagatatgcaagtaaatgaaaattgttttgtaatcaaacctgacacaaatgagggatgcaaataaatgtcctcttataaacaatgcaactgcttatttttcaccaaaatagccttcaaacatacagctacacaacttaaggcacagtatccccctgtgcaatgacctctctaacctccacacaaattcaacgtgtgactcattaggatacaatacaatttcagcaaacttttgatttaagatccaaaccttaatcctaatcacaacaatcatatgcagtggatacaaatacacgcagttttgtgactctcccgtcatctccttcattcctgcttatttcactaaacttcacagtaaatcttatcaatatggcgttggtttttgtggtatattgngatacatcggaatgat

SEQ ID NO: 290013 - DNA, 411 bp, Glycine max
  unsure (1)..(411): unsure at all n locations
agcttattacaatatacttgtccttcatttaactgtctttgggcttggcggccacgatcaacaaagtactttcgacacctactatatgttgatttgaccaacgctgttatcggtatgttacgacaatccttcaataccttatttatacattctgagaggttcgttatcatgtggccatatcgacgtccttctctatcataagccatggtccatttttcctttgaaatgcgatcaatccatgttgctatggctggactcagttgacgaaattnttctaaattttgatcaaaaatatgcttgcaaggagtgtagcctgcatgaaattagttagcaacaataattngaagtatacatganacttanattaacatgaccatgataaatgaaatcttacccaattntttcaacatt

SEQ ID NO: 290014 - DNA, 444 bp, Glycine max
tcagaacataatggcaaccattcctctctcaaaccagatgtggaaacgcccctcaaacaagaagtggaaacacccctcaagggttcgagagatcgccaaagttttgcttgctgcgcgttgatgaccactcatttagggctttttatttaattcaattgagataacgacgggtttttaataaaacccgtcataatttttatgaccaatacacattctaaggtggttttcaataaccatcttagaatgtgcatcgtaaaagacttttatcataaaataattacaaaaatgtcaatgtctcattttctaaagtggttccaaaagaaccgtcgtagaatgtctgtcgtaaaaacacaagtttcttgtagtgattgagtcatctgtgtactctaaaattgaaaattgtatctcatcaactaccttaactccatcaaatagacctgcatc

SEQ ID NO: 290015 - DNA, 397 bp, Glycine max
agcttatacattcaatttcgagcgtctcgatatattacgggactcaattagacatccgagtaaaaatttattgtcgtttgaattggctcacaggctcaacattcaatttcgagcgtctcgatatattacgggactcaatcagacatccgagtaaaaagttaatgtcgtttgaatttgctcatagcttaaacattcaatttcgagcgtctcgatatattacgggactcaatcagacatccgagtaaaaagttattgtcgtttgaattggctcataggttgaacattcaatttcgagcgtctcgatatactacgggactcaatcagacatccgagtaaaaagttattgtcgtttgaattgctcatagcttaacattcaatttcgagcgtctcgatatat

SEQ ID NO: 290016 - DNA, 425 bp, Glycine max
  unsure (1)..(425): unsure at all n locations
ttgagcaaattcaaacgacaataaccttttactcggatgtctgattgagtcccgtaatatatcgagacgctcaaaattgaatgttgaacctctgatccaattcaaacgacaataactttttactcggatgtctgattgagtcccgtaatatatcgagacggtcgaaattgaatgttcaacctatgagccaattcaaacgacaataacatttaactcgaatgtctgattgagttccataatatatcgagacgctcgaaattgaatgttcaacctctgagccaattcaaacgacaataacttattactcggatgtccgattcaataccgtaatatatcgagacgctcaaaattgaatgttgaacctctgagcaaattcaaacgacaataactntttactcggatgtcttgattgagtccgtaatata

SEQ ID NO: 290017 - DNA, 390 bp, Glycine max
agcttattcctgaacgttatgcgacatcttattcgtggctaagcgggatctattgtcgccaagcgcaattccttacggccttaattgaggtccatgacgctaagcgccagtcatggcagctaagcgagattctttgcagcaatatgagcgctaagcgagtacctctcagctaagcgcgtgctcctctgtacttaagatgcatcattttagctacattggctagggccaggcttagcgagagttgcagcttttctaatctgcaggtctcgctaagcggacgtactcttgtgctatgccgagtttctgttcaaaaaaaaaattcaaatttgaaacgtcggctaagcgcacgtgttcgctaagtgagcctgggtgagaaaccaaatgtctctc

SEQ ID NO: 290018 - DNA, 396 bp, Glycine max
  unsure (1)..(396): unsure at all n locations
ntagtggaataaaatgagaaatctatggtgtctaagatatttacatgaagaggtctggagatagattcaaccttcattcttttgcgtcttcggctagaagcaccagcctatttctcccagaaattctattagaaataacgattgacaataaagaagtagaacaaaatgacaaggtagatattaatacctaagttaaaggaagattagggacaaaggattttttagcagcaacatatttgttagttctcttgaaagttaaagtttgctctggagaagggtcctcttctatattttccaagtcaatcgtctcaactcgatgtttagccatcaaggaaaatgttagtagaataacaacggtgaaaaaagagaccataagataacgctataacgaggaac

SEQ ID NO: 290019 - DNA, 403 bp, Glycine max
  unsure (1)..(403): unsure at all n locations
agcttatgatattttttaatgttntcttactaattggggttatttgatttttgtattaatttcttttataataaactcacccctctcaattttttgtaccgtgtggttggtacttgtgatgatcgtgaaccattgttcgtgggagcagaatgacagcagtagtggacgagaagtgagattctttcgtgatgacgttgggattatttggggagagacttgtgttttggtaatcaactcctccatagttagttccataattctttttgttgatttgaagatgtaaatcancaaattaattatatgtatgaacaaatttactttccattatgtgtatgatgagtactgagttactnatcttatatatatatatatatatatatatatatatatatatatattccct

SEQ ID NO: 290020 - DNA, 439 bp, Glycine max
tgctaaagttgagaagaccaagaatttgattcaacccaattatatgcgatagggctcaaaaatgcatcaggaataccaaaggaactgaccaaggcaagtgcgtgtggtcgaagttcagcacagagttttggcacttctttcctcactgcagaagcattctctgttgacaagtatccatatcgaagaaaggcagaatcttcatccacacatatcacagcatacaacgatctcaatagacccaagacattctacagaggagataaataaaagcaaagaaatcaataaatggatctgcttcacattttgaccctacaaggagagtgctaacaacactctttaacatgagaaattattaagtagtctgaaactattatagtccccactaactaatatatttacataaaacaaaattgagtgttattaattcttttcttgtaaa

SEQ ID NO: 290021 - DNA, 436 bp, Glycine max
  unsure (1)..(436): unsure at all n locations
ggcaattcagctcgtacccgggatccttaagtcacctgcgtttgcaactttgtggcttantgaagatgaagaggtaaaagtgactcaacaggttgaggtgtgtctcaccattgggagatataatgacaaggtgctgtgtgatgtggtcccaatggaagcgacccatgtgctgttaggaagatcgtggcagtatgataccaaggcagtgcatgatggcttcaccaacaacatctctttcaagcaagctgacaagaagattgttctcaaaccgttatctcctcaagaggtttgtgaggatcagataaaaatgagagaaaagaaaaagagtgagacacttgagaggaaaaagagtgagacacttgagaaggaaaagtgaggaaagactaagagtgatacacttgagagggaaaagagagatnatcaaaagagtgaaaca

SEQ ID NO: 290022 - DNA, 438 bp, Glycine max
tcgtttggaccttgaacaagcaactaacttctctttcagtaccatgctatgtgctcgtgactggtccctctcttcccttcgcagcttgagttcactattgctaccccatagagctccgcgaaatttattccggccatactcttccttgcgagccctcttggtctcttgttcaagggctcttgcggtaattgcattctcttcccgtaacccggcacactccttccgaatgtgtgttgcggccaacttgaacttctccttggcaagtttcgcctttcctaactcgcttttgagagcttggacttcttcgtcctcttccggtgcttcaaaactctcttcgctgacgacttttaacttggcgagccaatctaaaccttgtatatgaactttcagccattcatggcagccaccaatgatgccattacgaatgcctctaagttc

SEQ ID NO: 290023 - DNA, 402 bp, Glycine max
agctttgtgactattaaactatataacagcaccaaggttctagtttagagggctcttcgatttattcgtttttagttttagtctctctctctctctctctcttcttctctctcctattttcgtttttagttttaggcttttcttagacacttttttgttttgcaattccagttttgacttttcattttagcaataaaatttcgttcttcaatctataatttccttctctattgattaatggaaggctagattttctggtgttgttccttttgaggacgaagcccaactctctttgaggtttcgcttgcaatgtggtttcctggcagttttcccttcaccagttatcccaatttcgtgaatattaatcagtgcacgcttcgtgttcgattaattgcctctgag

SEQ ID NO: 290024 - DNA, 412 bp, Glycine max
  unsure (1)..(412): unsure at all n locations
tataagaacaaaattgccttaatcatttcttaatatgcatgtgaattanggcgcatcaacaagaatcatgccaaggctattgtgcaagcaatcaatggggcaaaacacaccaaatgattataatgatggatggctcaaattctcacaaaggtaaaatcatcactttcaaattgagctttcaaaactatcatgacatgtagagaagaatcaaggatttcaagtcacaaaatgtcaagaacttttattttcaaaacaattacccatttcttgaacatatcctataattcanagaaaaacatgcaaagtcgtacgtgcacacaaaattgacccaaaatattaaactgaaaatccgacgaaactaacaacattaacaaattaacacaactaacaaattaacaaaaccaacaaaact

SEQ ID NO: 290025 - DNA, 392 bp, Glycine max
  unsure (1)..(392): unsure at all n locations
ttcacttgaggagggatgtttngacctttngaagaattntactgatgtaaccactattttcttctaactntttagcgtatttgatcacctatttaagggacgactaccttctatatggggatttatcattgagtattagtaattgggcccacttgacgaattaggtgctctcaagtcaaattcctgataattataaccaattgggctgatcctaagtggacttgggtcgacaagacggcttatatacaatacgcctaatttcatttgatcgcgttcacggtttatgtaagattcttaattcatcttaaacccacactatgttatcctggccagtggacttgagtgaaccttatcaacactcctttgatacatgcaggagtgcatatctctcn

SEQ ID NO: 290026 - DNA, 421 bp, Glycine max
tgttgaaatatctttgacttgatttgttaaatccataactctatattcaatttttggattatgcttaatgagttttgtatatttgacatgtgaatcaagattctaatatatactttagattattattattatatcataccttatataatatatggtgattgcaatgaaagtaaaaataatatatctcgatcatcgtgtgatattggatttggtgtacatgtgaggtattgatatatatatatatatatatatatatatatatatatatatatatatatatatatttgtttattatatattggatatataaatagtagattatttttttcacatattaaaatgttatacacatatagattaaatatgtgaattataagatgttaagggaatatctattagatgtaacatattttgaatagca

SEQ ID NO: 290027 - DNA, 391 bp, Glycine max
  unsure (1)..(391): unsure at all n locations
tagcttcttggtgaatcaaaggtgattcaaaggtgttttgatgataacaatgatgataacaaaagatgatgacaaaggtgatgacaaaaagctcaaagaacaactcaagtgactcaaagatcaatcaaagaacaactcaagtgaatcagagatcaatcaaagaacaactcaagtaaatcaaagatcaatcaaagaacaactcaagtaaatcaagaagaattcaagaatcaagattcaaggttcaagatctcaagaatcaagatcaaggttcaagactcatgattcaagaatcagagaatgctcaatcaagataagtatgataagtttgtctcaaaaattgaatagcacgtgatntttctataacatgtntaccaaagagttttactctctg

SEQ ID NO: 290028 - DNA, 435 bp, Glycine max
  unsure (1)..(435): unsure at all n locations
ntagtcaaacataataatccaaaaatgtcaaagaattgtgtgttgaaaaagcataacaagactttctgtgattggtttaaagatacaatctttgcatgtgagaatgcttcagaaacattaagaaagctagcagataggcctaaaagaaatgttataacttggcaaggatacgacataaacaagtattcattttacacaaaagcacatgatgagaaaagtacaatgcagaacagcggggtcaccctaagggctgaatctcaacacttcgcaagtgtgaatgacaccaatccctgtgtagcttccatcccttactttgggttcattgatgaaatttgggagcttaactatgtgaaatttactgtatgtattttcaaatgtaaatgggttgatagcaacaccggtgcgcacaccgatgatataggatttacattggta

SEQ ID NO: 290029 - DNA, 336 bp, Glycine max
ttagcttttcttcttacagacagcgaaaaataatggttatacggatcaccactcgagtatttccgccagtcagcgtgactcaaatgtcagtatgacagatcttgtgagcgcggaagatgacgtaaatctacgcgtgtcaacgggcttgtcggccgtgattgacgaagggagcagaagactacggtagtctttgcgtgccatcaagcttttcgtcttacagacagcaaaaaataatgggtatacggatcaccactcgagtatttccgccagtcagcgtgactcaaatgtgagtatgacagatcttgtgagcgcggaagatgacgtaaatctccgcgt

SEQ ID NO: 290030 - DNA, 400 bp, Glycine max
tctacttatgtggcagggcgggctttcttcactttcttgtctccaacgcgagctttgaccactgttcttccttcccgcgatgcttcttttcatatccgcctgagtgggcttatagcctaaaccatacttcccacggtttccttgagtatttatcaggctagttatgccgccgttgtctttgcctaaacccatcccgggttcataaccgttccccaacataactcgggccatcattaccgctgcatcggacagacaaggctgcccaaagagggagtccacggaggaaatgctgaccacctcaaaagactggaaagcggtttctaacgattcttctgcggcttccacataaggcatggaggatgggcagcttaccaagatgtctttctcgcctgacacgatg

SEQ ID NO: 290031 - DNA, 377 bp, Glycine max
  unsure (1)..(377): unsure at all n locations
agcttcttgcggatcatctacgtcaactacggatcaaatatagcttttgcagatcaacaaaaacctatgtggatcacgtcatagcatacgcggatcaagctgaatgagctgggtgcacaaaaatattttaaaaatacacggggtatttttgccttttcacgtagggtgctgggtgcacctagcaacacccctcgaccatggaaggccatgaaaggagagatgtacagaaaccttatcagagcttaacttcccatccaaaaaagaagattggttattattacaagggactcacataattagaattaaagtgggtctcaaccaattttcatgctgattttgaggattttttncaattttcggttgttcataaaccacac

SEQ ID NO: 290032 - DNA, 419 bp, Glycine max
tctttgagaaaacttccttgagaagctagagcttagctacattcacccctctcataactaagctcacctccttgagaagcttccttaagaagattcctaaagaagctagagcttagctacacatacctttctaatagctaagctcacctccttgagatgagaagctagaacttagctacacacccctataatagctaagctcacccccatgacaaaatacatgaaaatacaaaaaaaaaatccctactacaaagactactcaaaatgcctcgaaatacaaggctaaaaccctatactactagaatggccaaaatacaaggcccaaaggaaggaaaaatctattctaatatttacaaagataagcgggctcatacttagcccatgggctcgaaatctaccctaaggctcatgagaaccct

SEQ ID NO: 290033 - DNA, 385 bp, Glycine max
agcttggaactaagcttcttttctctaaaacttgtcatccataaactgatggacaaacagaggtagtgaataggtctctatccacccttttaagggctcttttgaaaggcaaccataagtcttgggatgagtatcttcctcatgtagaatttgcctacaataggggggttcatagaaccactaagcaatccccttttgaggttgtctatgggttcaatcctctaacacccttagacctaattcccctcccacttaacacttcttttatacataaagaaggggaatctatgtcaaagtttgtaaagaagtagcatgagagggttaggaaccaaataaagaaccagacaaaggtgtatgcaactaaaggcaatagaggaagaaatga

SEQ ID NO: 290034 - DNA, 431 bp, Glycine max
cgtagaattatggggtacccatcacatgtggtactaggtggtggtcgggcgatggtgcacaacaagctttccacatccacaatgcgcgcataaacccaccatcccctggtgcccacctccaactgagctcacgtactcccacatagcccatctcctcgtttctctcaacaccgggtccccatcaatcctctcaagcttgcacaacatccaagcagaacagcgttcatacagcacatgctataacagccgatcacaacatagcacatgcagagaactctgctgagcacatcaaccacaatcacagctgttctcacgtatagaccacagtaacaattccttcgatccaattcgataaccgttggatcgactccaaaattttactggaagtctatagtgtataagcctgcattgtgaccgttgggatatactag

SEQ ID NO: 290035 - DNA, 371 bp, Glycine max
cgcttgtatgaccaatttggtggcatgatccccttttttacaaacctctctactattcatccttaccctaaatcaaatcctcaaaacatcttatttgttcgttagcaagtataaccaagtgaatctagtgtgagaatcaacaaaggtcacataatacttaaaaattgaactagaagaaaatgttgtaaggccccaaagatcattaaaagaagttcaaaatgtatagaatatatagtaacaaaaggagaaggaagacaatgagacttgccatgatacgatgtgtacataaatcagaaaaaaaaaaattttaccatatgaagattataaagactgaacacaatactcatggcaacactaggatgagcaagtct

SEQ ID NO: 290036 - DNA, 424 bp, Glycine max
tgagccctgtgtgaaattccttccttggttgaatcttggcgtttctcattggttgtagccttagaatccgtgatgattctgagctcccatgtagttcacctgcttagaagaatttacttgggttatgcattgctctggctcgcgtgctccaccgtacatgtggcatccccctatttgcatgattgaagagtgagaggaacttaccgcttatagttttttagggagcttgttgaggatctctgtgagggcctctatctgtcggaccaatagcttgttttgggccaatgttgcatcttgggttgtgagttccagaaggctcctctttgctggcatgtatgctcgaccatgaaggatggcgtgatcattggccaccatgttctctatcagctccattgcctactccagtgtcttcagcttgaatttc

SEQ ID NO: 290037 - DNA, 379 bp, Glycine max
cgcttgtcgaacaatctgttaattaacctatctatgcatgcatagcctatatccattatcacaaagactacctaccagcaaatcattgaaattcactcccagcaccacaggcttgcttgtcattaacaaaataaccgaatattataaatcttatgtacaggatcttttattcattcaacctgctaggataacataaagaagctgtgacattatggcattggactgcaacgacactacatcaagatgctatgaccacataacaaacactagagagatcctacagttaagcgcaattagagattaaagatctagcgatgttatttagaactagcatgtctagtaagagtcaatactgattaaaccaatactaaccttacat

SEQ ID NO: 290038 - DNA, 432 bp, Glycine max
tccatcaagcaaaatcatcaaaaaggtcatttgacattagcgtaaatcattaatccaagaaactatcaaagcttaaccaccaagcagaaactatacctcaaagtttaaccactcgataaaagcaacgaggcttaaccattaagagcagaaacaaaacaacgattcaatgcttaaccatccatgtcaaaaacttaaacaatgtttaatcaccgcggacagaagcttaccaggacttttcacaaacattttgtgaatcaacaataatcaaagcttaatcactcatgatagaagctaacaaatgaacaatgcttaaccaccacacatgacagaagctaaaatcatcagaacaagtcgaaaaactttagaagtatttaatcaaacaccttgtagacaaacaaaatctgaacactagacatgaagaaacttacacaa

SEQ ID NO: 290039 - DNA, 363 bp, Glycine max
agcttgcttctacaccatgaacataaaataaccatcatacggttatggacacaaattcaaacattacattaacttctacataggggaaagaaatataatttgcatgaaatactacaactaagtaatgctaattttgtgacaaggacacgtcgtcttccatttccattaaatgtttactaaaaacaactaagatttctattgacccaaattttttccagtagttagactgcactaacacctttagcacgtcatcgttggttttcagttcaataattctgaatttgataattttatctgaatactcatagtggcttggttgtcgaaaaaacaatcgccttaccgtttgtgtctcatgaataccat

SEQ ID NO: 290040 - DNA, 287 bp, Glycine max
  unsure (1)..(287): unsure at all n locations
tgcacttgaggacccanaatatgaagcacagttcgctgatctggccacagagcacaacaagcgggccacatacgcaatgcgcgcataatcccaccatacgctggagctcacctacacataccctactgatctcccacatatcccatctactaggaaatgttaaaactgagcccccacccctataatagctaagctcacccccatgacataatacatgaaaacaccaaaaaaaaatccctactaccaagactactcaaaatgccctcgaatacgaggctcaaacccta

SEQ ID NO: 290041 - DNA, 372 bp, Glycine max
agcttcataagcactatttgagccttatgtgaatctcaacccctaagacccaatgtctcaacagctgcacactacgacttttcacacagctttgctggtcaacgccttcgtcattagcccttttcaagacattggcaaccaactttgataggccgtaattaaagcagggccaaggatgactgcaattaaggtagctttccaacaaacaacatctatatcaaggaatcatgcaccatcacaaattcaaatggctcttaacatactttctgcatcatcataagaaataaactctctaaaagaggtgtaacattcatcataatatcatcccatataaaattcagccacacaaaacacataatagtttcataccat

SEQ ID NO: 290042 - DNA, 425 bp, Glycine max
  unsure (1)..(425): unsure at all n locations
ttatggnggcttangtgtcagagactagcggttgatttatgtttcgcttcttgggaaattaatctaggacttgcttcaatcacccctgaagtcgtgggttcaggttatcaaagcaagatacttgaatcacttctccgtcctaatgatacctccaagtaaaggggcctcgtatgtttggcataatatattaaaagctcgggatcatctttgtagtggctttatgcctcatttgggtgatgaaagctcacccctatggaactcaaattgatcaggtttgggtgcactgagccagtttgtgttgtacgtccacatcatggacaaccattgtactgtctttgacttatgacagaatgtaacttggcaatttactaaccgacgcactgaaataccaacgtaaattgttgcttggattagtgagattgatt

SEQ ID NO: 290043 - DNA, 377 bp, Glycine max
  unsure (1)..(377): unsure at all n locations
agcttgtaatcgattacacatatactgtaatcgattacctgagcagattttcagaaaatattctcaacagtcacatctttttatgtggttcttgaatggctatcaaaggcctatatatatgtgacttgagacacgaatttgcgaagagtttttcaaaacaaaaaagtcttatcctcttataaagcaaaattgttttatcctcttacaaattccttggccaaattacttgtgattcaataaggaatttttgagtgctcaaattgttcaatctatctctttcaagagagatttcttcttttcttcttcttcattctgaanagggattaagagaccgagggtctcttggtgtgaaagaattctaaacacaaagtgatgtg

SEQ ID NO: 290044 - DNA, 424 bp, Glycine max
  unsure (1)..(424): unsure at all n locations
tattgctttagcactaattttcagctcgcctgtgcgtgctgcaactgccccaaagtgaccctttgcctataaatagccatcctacgggtgttttaaggggttccaaggttcagaaggtgagggaattttgaaaagagagaaagaagaggaaacaaagtcgaggcattgccgaattgcaaccgcgatcattccctatttcgttttcttgttctgtgttcttcgtgcaaccgtcagttagtttattttttttgtaattgaatgtgatctatgtacccttaggggtgcccccccccccttgttattttgtgcatattcatttcctccatctatcattgacgatctcattnttctttataaagttcaatcttaaccgatcactagtgttgtaaagttgtctttaaagagattgaaagttaataaacaa

SEQ ID NO: 290045 - DNA, 368 bp, Glycine max
agctttatcttcacataagggtcagatgcaccaagaagatctttcttctttaacttcattgcttgcagaacctttacatgtaaaattccaacaggcctcttcaaggctctaagattcccaaaaacattcacaagaaaaaacagaaaagagtcaaggtaatataccattatattttgacaaacatttatagaaacgaagtaacatactttgacatatctaacacttgaacttccaaggttttgggccatagatacatgtttgcaacctgatctttgataagctcctgaaaacaacactctttaagttagtttaaaagtgatgaatacttcaacaaaccaaaaccaaaaccaatacaagtttggtacaac

SEQ ID NO: 290046 - DNA, 426 bp, Glycine max
  unsure (1)..(426): unsure at all n locations
tcataaatgaacaccaacatatgaacgtacattttatttgattaaatcttttcgctgttgccctaatactaatactggtgaccaaatattttggcagtgtgtcacattcacattcacattttgatgatatcctacgttgccataaagatatctttacatgattaccagtcacgtacgtaccgactctgacaaacgtacactgcaatttgtaccgtctagatattgatctttgactgctttctgatgctgattctcttgtcagcctttttctagaacaatcaacaatattttacttctcagatttttaataatcgaatattctttttggactgttaagtgttaaccgatgctcatacatactattgcctctagattaaatattcattntttccaagattacggctgtgttgcatatctccttactag

SEQ ID NO: 290047 - DNA, 393 bp, Glycine max
tgcatgctagctttgagccaaaatcctgactcaccataaaccttgacccagggtgagaatgccaatccttaccctcggaagcaaaaaaaaggagagagagagagagagaagagaaggaaaatttccgatcaaaggaaaaaggagaaggaaaatttccaatcaaaggataaaggaaaggaaattcccaatcaaagagtgggggaaagcaaaaagaaaagaaagaaaattcccaatcaaagaatgggagaaagaaaaaaagagagaagtcaaaaagaagaaatctcctggtcagagaaaccagaagatatgtgccgagaggtccttggaccagacaatatctgaacaatacagaattgtcaccaaatgaataaaatagaatgaaaggaaaccacg

SEQ ID NO: 290048 - DNA, 400 bp, Glycine max
tcaagttgctcattgactccagattgctacaaataattacagagatttgtatggtgatccacagaagaacatagaccacagactcttgcagcaggtgtagatttctgattcatggcaagctgggttactaggttgaccaaggcattaagttttccctcaagctttttatttttagtagatgaagatgaatctgtggccacctcatggactcctctaaggataatagcatcatttcttgcactgaattgttgggagttggaagccatcttctcaatcaaattcctagcttcagcaggggtcatatcaccaagagctccaccattggcagcatcaatcatattcctatccatgttgttaagtccctcatagaaatattgaagaacgagttgctcagaaatct

SEQ ID NO: 290049 - DNA, 356 bp, Glycine max
agctttaacctcatcgtccctcacagtctttagatttgggagccaatccaatccttgtgttcggactctcagccacttatgatagccaccgatgatcccattactgcttcccctaagctctctgtcctttcttcacgccgcatcccatgccttgcaaactccttggagtaccctcgcattgtggtcactaaaaccccgtgcgatgaaaggcgtgatgctgtcgtctaatggcgctcctctcatggggtagccaagctgtcttatggcgagaacgggattataattaatacgaccccttgttcccatcaagggaacatgtggacatccttcgcatgaagatagaatcttgattcttc

SEQ ID NO: 290050 - DNA, 414 bp, Glycine max
gcttatccaaggctcatcttggcggttaagttccttcttccaaggcttattccctagtggatggcgcctcctctctcctcttctcctttgtcttccgcttcatctccatggtgaaaaatcaccatcaaaggacctcattgaagctcaaagatccagcctccatagaagccccacaagcaagcttccatcacaaattccgcaccagcatgattggagtaccgaccttaagtgttaatttgtgattaggtatccctgatgttttcaatgagtttagaaatttaggtgtcagtaatccgaaagtaggattgagtagttcatcttatttatcaatgttatcagtgctacaatactccttttcgtcattgtgtatcaatgataagacaataatctattttgtcaacaatatctttttta

SEQ ID NO: 290051 - DNA, 358 bp, Glycine max
agctttgaaatttggcatctgaagtctgaaagctctaggcagataagtctgcaaaagctggaagtggggctgaagtagaagatgcaaggatgccagctattggtgcaaaggaagagggagcatcagctgctctgatcttggtcttccttgcctctagaaaattaactgtttggtcattcgcattccaacagttccttatgatataagctaagtcaatggctggccttatgttttcataggaggtaagggcatcagatcccactcccctcgatctgcacaaggttgtgattaaagatgggaagcctaagcgagaagagttagattgagccaccatggtcatttgtccagagatcaaacc

SEQ ID NO: 290052 - DNA, 414 bp, Glycine max
  unsure (1)..(414): unsure at all n locations
tgagcttggttcaaccccgtaatccatggtttggaaattctgattgccaatacttcaacaacatctcatagggatgaatgactcgggcatactttaagcttatgcacggaaaatgtaattatgaaattgagatgcccgaagaaacaccatttcctagttaaccatgcattaggtaccatgttcaattattttgttttgttgttgtgtgttttttttttagaaatgggtttatgatcccaacatggttggctcatggtgcctaacacatgcaactaagaatgtagtgtgaagtttcacgcttccccttttttgtttttgttttgtagaggaaaacgcaaggatgagcaaacatgaaaacaaatggtatgcaattntgcagatcaaacagtttgttgaacgcatatgcatgatgat

SEQ ID NO: 290053 - DNA, 372 bp, Glycine max
atcttcacaaaatatgttactatcaagcttctaatcaagtatttttttcaagaaccagattcgttttaaactgattcccctctctgaatgtatgctttggctaataaaatcttcttgtactacttcatttcgtggttcgaaagcagacgggccacaagaccttccaacttttggcaattcagattcccttattagctacaacccactaccctgagcaatatataagcatagcaccagctgcatattcttacagaacctttcccttcaactaaaaaaaataactccttgttcttctgtcccttatcattaatctttctcttccttatctagctagcaaagtgcaacattacaatccttcttaagctcttagta

SEQ ID NO: 290054 - DNA, 430 bp, Glycine max
tgaggtaccattgttgaatgttgaaactccgaaactatgtgtcacagggataccaatcttctattcgatcccacagaggttaatggttctgtttctcgaagcccattggatctccttgttgtcctttttgggccatctgtggtatggcccgttttgttgctaaacttaatcaagaagaataaaaaataataaaagaattattttattccttaataactttttggagaaaaaaaaaagcacagttaaaatttttatatatgtaaacctttcattcgatcttacattttttgttttaaaatgagtccatgatattaatttttttttcatttgttttcagtaaatgccacttatatatatatatatatatatatatatatatatatatatatatatatagatatatatatattagtccctctaaaggttggac

SEQ ID NO: 290055 - DNA, 373 bp, Glycine max
  unsure (1)..(373): unsure at all n locations
agcttgttgaaattgtcatgttggatgagttaaacatacccattctgttttagggtttttgtgatgatgtttgtgatgtttatatgcggaaattgctgatggaaaactgttagagatgaagggtagaactaacctagggttagaaagtgagaatgtgatgttatgagtggaaaaagagggaggctttgagggttggaaggctaagtctgaattctgtggtaaatggaggttaaagtgagttaatactagcttgaaatgtcatttaggacttgngagaaagcttggactgtgctagagagaaacaaatgaccaaagtgaacaaagagccatttctagggcaatattaggtgttgaagagtcaaattttgattca

SEQ ID NO: 290056 - DNA, 349 bp, Glycine max
  unsure (1)..(349): unsure at all n locations
tggagctccaagtgcaaccaacctctagcaagaaacatccttttcacttctttaatataaggagccttaccaggatgtcctttaataaaaaaggatttgaaaatattgaattattggatatttgattacatactttgatgcaatccttccaaggagatccatcaccagagccatgaccaggagacttcaggaagattggtccanagataggcgagaaggttttgtctaatgcaggagctttaatgtggataccgacccggtggattgagaggacgtgatcttatttttgtccatcctttattacgattacaggaacatttggacatgctatatagggatatataatact

SEQ ID NO: 290057 - DNA, 387 bp, Glycine max
agctttgaatctctttgaacttcttcttcttctttgtaccaaaagctttatgaagttttctggttttccaaaccttgaaaacttgtgctattcatcttttcattctcttctccctttgccgaaaagaattcgccaaggactaaccgcctgaattctttttgtgtctctcttctcccttttccaaaagaacaaaggactaaccgcctgaattcttttgtgtctccattctcccttgtcaaagaattcaaaacgacacagtctgagaattcttttgattcttcccattccctaatacaaaagtgttcagaggactaaccgcctaagaattcttttgtatccccaagcatcacctaagttaatttttataatagaagaaacaccccaatt

SEQ ID NO: 290058 - DNA, 424 bp, Glycine max
tgttgacataaatttgacagtatgcctttaatgttgtgtagtgatcttttgtcatgcatttgtactatgttttgatgaatgcttttccaaattcagtgtattgactatcagctacagtgcaaccatacaataaccaaaatttttactatgctatctgataaagatgattccatttttgaatatgtgcagaaattttgaaattttgatatggtttatttcactttgccttgttatcatcaaatggaattttgttgttaacttttgcttgctggacttttttgttgttaattcacctaaatgatttggcttaaaccagagaggaagcatttggacctgttgcacccagagaggaagctatcagaattactaatgacactaatgcaggtagttcatttggttcttctttatacagccttgaagaatg

SEQ ID NO: 290059 - DNA, 385 bp, Glycine max
agcttcgggctgctcaattgctccaggtttctgcatggaagggcaaaggtctgtatggtggtcagcagaggaacacaaaccacagacccttgcgacaggtacaaatttttggttcaaggccagctgggttaccaagttaaccaatgcatccagtttgccttcaagcttcttagtttcagatgatgcagctgagtttgtagttacctcatgcactcctctaatgactatagcatcatttctggcactaaactgctgggagttggaagccatcttcttaattaaatttttggcttcagcaggagtcatgtctccaagggctccaccactggcagcatctatcatacttctctccatattactgagtccttcataaaaatattggaga

SEQ ID NO: 290060 - DNA, 431 bp, Glycine max
  unsure (1)..(431): unsure at all n locations
taatacccaaaatcacatctataggaccaaggtcttttatatcaaaattactagacaagaaagacttcatatcatttatgaaatgcatattactaccaaatatcaatatgtcatccacatacaaacataaaatgatgcatccactatcatcaaattgtttcacatacacacatttatcactattattgatttgaaaacaatatgaaagaacaacttgatcaaacttttcgtgccattgctttggaggttgtttcaaaccatataaagatttaacaagtttgcaaaatttcttttctttacccggttctacaaaaccttcaggttggctcatataaatttcttcttttaaatcaccatttaaaaaaagctgtttttacatccatttgatgaattntcaaattaaaaacacaaacaagtttaattaaaactct

SEQ ID NO: 290061 - DNA, 334 bp, Glycine max
agcttagccctagaggagatggaccttttcaggtcgtggagaggatcaatagcgatgcctatagttggacctcccagaagagtatagagtcagcaccactttgaacattgctgatttaattccttttgcaagtggagctaatattgaggaggaggaactaacatattcgaggtcgaatactgttaacgggtggaggtgaagagccctttctccgtgacaagggactagtaactatagctatgatcaggatgcgtggagaggactggtcgaacattgttgaagaatgccctatggttctgatgaacggcacggcacactgttaagcccatgggcc

SEQ ID NO: 290062 - DNA, 432 bp, Glycine max
tcgtctacagatccctcatgtgagactaggcctaaactatactgcattattgtaacaacataattaagaccaaaacttaacccgcagatccctcatgtaaggctaagtttcaatcgtgcttcaatcaagttctaaggcaacagtacatttcccaatgctaaagtcacctaactatgaacacaaatgggtgatcagaccaaaagcatacaaacattagcattgaaggaagcattgaacacagaaaacataatcaattagatattaggtatttacatcagttgttcattagaaatccccaactagggtgtttagccagccattacaaagaaacccaaacaataaatgagattaaaagcagagaatgatagttccttacataagaagggggattcctcctcctcttcttagcatctcacactcactctctaatta

SEQ ID NO: 290063 - DNA, 374 bp, Glycine max
  unsure (1)..(374): unsure at all n locations
agctttgcttgtacgatctcccattttttgatgatgacaagtgctgaaatgaagatagtagatacaaatatatacaaatactccccattctttaagctctcttgatttctaagttctttaattcttctccccctttggcaacatcaaaaagccaaagtgcggggaaatttaagacatctaactcaagcaatcagtaaacacgaatgtttcaattagctaatcaatctttatttatccaaatcactaacatctaagagacctaattctctcttaatggcaaagaatgtttccttaaggagaagctntgtaaagatatcagcaagctgatgctttgtatcaacaaattctagaacacaatctcccttcagaacatg

SEQ ID NO: 290064 - DNA, 415 bp, Glycine max
tgaagatgttcattgtacagtctatcaatcattgtatttattttgaagaaaaaaatgaacaagtgttgtaacattgtcagtttactggacaaaggaaacttgagctaattgagtgaatcttaactctactaagttagcaagtttcattatattcgagcttactatgtaaaaactcattgagtgattagaatatattttctatcaaacatatattgtttgtcaaagccaggagtggcttggtgacaaagaatacttgggttttaatctcacggggagattaagtgtagtgctaagagtggcctagagagtacttattgtacgctgtaatggcatagagaatacttcgttgtaatcaaagatttgattaatggaacccttcaaggtttaaaggagaactggatgttgttagagataa

SEQ ID NO: 290065 - DNA, 351 bp, Glycine max
agctttgagcaaatttaaatgacaatcaatttatacacggatgtccgggtgagtaccgtaatatatcgagacgctccaaattgactactgaaactctgataaaattcaaacgacaataactttctactggaatgcccgacagagggtctgaattgatcgagggatgctgcaaattgaaaacggaagctcgtaccaaattcaaacgacggtaactgtttactacgatgtctgattgagacccgtaatatatcgagacgcttaaaatttatatccgaagctgtgataaaatagacttgacaataactttatacatggatgtcctgttgagccctgtaatgtatcgagacgctg

SEQ ID NO: 290066 - DNA, 427 bp, Glycine max
  unsure (1)..(427): unsure at all n locations
ntaacctcatcgtctctcacagtctttagatttgggttccaattcaatccttgggtccggactctcagccacttatgatagccgccgatgatcccattactgcttcccctaagctctatgtcctttcttcacaccgcatcacatgccttgcgaactccttggagtacctttgcattggggtcactgaaaccccgtgtaatgaaaggcgtgatgctttcgtctaatggcgctcctctcatggggtagccaagctggcttatggtgaggacaagattataatttatacaaccccttgttcccattaagggaacatttggaaatccttcgcatgaagatagaatcctgattcttccttccttctagtgagggaaccaattaacagacgcccctccatgctagccaagagttggtcccaattcatctttct

SEQ ID NO: 290067 - DNA, 355 bp, Glycine max
agcttgcaacaaagttctacatattttcataatgaatatataaataacaaaggctagtaaaatcttcactatcaatctaaataaatgagctatccgtgggccattaatgctgagcttgtaatgcttgaactcgactcatttaaataattgagcctatttccaagcttcactttgtttatttaattaaacaaatgagcttgattgagcatttaacaagttgagtttgaatagatcaagaatagctaagctcatttacatccctaaatctattctatttcggaatctaaggtgcttatgtggcttagcccaagagcatggtaaatgtacatcatatgtggcactaactttattagtt

SEQ ID NO: 290068 - DNA, 378 bp, Glycine max
attgcaaatactagaaaggcaagactatctcttaccttagaaatgcgtgcatgcatcaagcatgcttgtgtattacacgctctacctgcaagcgatgcgaacgctatcatcaaaccggttcagatccctccgttaatgactactagagagaatggtacgatctcaaacatgcaacccgtcaaaattctcgtgctatcgtttacgaggatgtcacccatgctatactgagatcacatgtaagctctggagcttgtcttaacgcgggagtactaaaacctaatgcagggtaaagcactgctcgtccttcctatcacgacatgctaaaagccgtggttacatccatgcgatgaatgccctatttatcaacacactccagat

SEQ ID NO: 290069 - DNA, 375 bp, Glycine max
  unsure (1)..(375): unsure at all n locations
agcttgtagaattcatcccaattccagtgtcctatgctgacttgctcccatatctacttgataattcaatggtagccataaccctagccaaggttcatcaacctccatttctccgagaatacgactcgaacgcaacgtgtgcttgtcacggagaagccccggggcgttccattgagcatggtagggctctgaagcgtaaagcgcaaggtctaattgatgcgggctggctgaaatttgaggagaattgcgtgtaaatcctgacattgacaagagatgccacacatggggcaatcttgaaagctgntgttaagtgtccctaatgactcatcagggtttccaagtttatgccattattgtaaaccacatctacaatgt

SEQ ID NO: 290070 - DNA, 429 bp, Glycine max
tccacaacatccaagcaaagcaacatgcaaacatgtacttgctattacagccaaacaaaacagggcataggcagaaaactgtgccaaaacaccaaccaaatcacagcttttctcacttaaagaccccagtgacaattctttcgatccaattcggtaaccgttggatcgactccaaaatactactggaggtctatagtacattatgctacattgtgaccgatgggatctactagcgaacatgcagaacgcattttacattactctatccacaaccagcaaatacatggatttttctgcactggtgcaaaattctgctgcgcaatcttacagcaaaatctgcacaaagagcatatttcgaaaaccacagcttccctcatctaatcttgcccaaatcaaatcctacaagtcccaaatcatgtatcaatcatg

SEQ ID NO: 290071 - DNA, 379 bp, Glycine max
tagcttcttagtttcatatgatgcagatgagtgtgtagctacctcatgcactcctctaatgactatggcatcatttctggcactaaactgctgggagtcggaagccatcttctcaatcaagtttctggcttcagcaggagtcatgtctctaagggctccaccactggcagcatctatcatacttctctccatattactgagtccttcataaaaatattggagaagaagctactctgaaatctgatggtgagggcaacttgcacatagttttttaaatctctctcagtattcatataggctctctccactgagtagtctaatacctgagatatccttcctgatggtcgcggtcctggaagcacggaaattattttctaag

SEQ ID NO: 290072 - DNA, 426 bp, Glycine max
  unsure (1)..(426): unsure at all n locations
ntgatacacatgcagggtaagttataaaagtttttattttgcacctttggtttcttaactattgtatttatgcaattttggcacctcatattcaaattatgtgagttaggtcttcttgtattataagtgtgtgttttttctccttcgattagtcagtcataaatatttaatatattttgtcaacgtgatactagatgatcacatataaatctcatgagaattgatgaattacttgacatgtatattgttgtgacttaattacacttttggtctctttgttgttccaatatgaagtaccaaaagaacaaataagctctgttagtatatattagttattgaccagaggataaaccatttgtttgtgtagttataggatgattgtgcattacataatataattctataacaaacaatattcatattttt

SEQ ID NO: 290073 - DNA, 358 bp, Glycine max
agcttgtatcaaatgtgatatttccaagtctctattcctaaacatcttactcaataccttgaaataaatgcttccacatgactggagaagtcatgtaagacttacttcataggataggatttaatgtacatgtgatatttccaagttcattgacccaagacataaaaaatagctattaaatgcttaattatagaaatcgaaccaatttgatccggaccttgtgtcctaagtgtaggatgagaaatataatcaacctcgtttgatcatactggaatgactattaaatacatagttatacaaatcggatcaatttgtttgggacctagtgtcctaagtgattcgattaatgtgaatgata

SEQ ID NO: 290074 - DNA, 371 bp, Glycine max
tcctttaatgaacgcaagtggtttgggagtgtggtttatgacatgggtgacttgcaagtgaacgtgattggggaacggaagaaggtgcacgtgaacgatgtgggagagtggaaagggtttgtggagacaaagagggaatcgtgggatctgttgatggcacactttgttcaggattatgagtcatcacgagggcagagtagtgatattaagatgttggtttcaacacacaggtctgggactgctgctgatcaagtttctgcttttgctgcgcttgtgggggatcatccaattgccaatttgcgttctcttgatgctctttcgggtgagtatagttctcgtgttactgcgtgcgtgcgttgtttcttcctttc

SEQ ID NO: 290075 - DNA, 365 bp, Glycine max
agcttttgtaggtgaaatcaggtgcagccatttcccttagagtcctctcacggggtggaggttgtgccatgttcttagaatgtgcaaaatcagaatgctcaaaattataatgctcaagatcaggatgttcaaaatcaccaataacagaatacacatattcaccagtaatggaatgctcagaatgatcaaaaggtataaaatgatgcctaactaatatatgaaatgtcctatctatctcaggatcaaagggttgtaagtcagatggattgcctctagtcatacactacattcagcatgcacacaactagttgccttatcatgtaaataaaggtgtaagtttgaactacagctacccttaaatgata

SEQ ID NO: 290076 - DNA, 415 bp, Glycine max
tggaattcgaaaatttgagccacaattaatgagacacttactagaaaattgagttctttggaccaatctcaatgttttaaacctatcacaaaaatatacctttttcattaaattggtcttgttttactctagacaaaatttgcaacaactttttcgttggagtccttgtgaaatgaggtcaaattaaggcatatttgtggcatgcaagacgattgccttattttgcaaattaggtctagcagtgtgttttttccttaattttgagtctttatggtgatcttcctaaaatggtgtttacagtttattaaactagagaaaaaatgatttttaaccatgtatattagtaaaattacagaggttatcttcaaactttaaaggggaaggcaaaacagagtgattgctagaaggagctctt

SEQ ID NO: 290077 - DNA, 387 bp, Glycine max
  unsure (1)..(387): unsure at all n locations
agcttagccgaattcttatagaattgaagttggcttagctcatccttggccagcttagcggaatgaatcagcctaagatgaaggggttaggcgctaagcgcttgagactcatggcttagcgcatgaataatgatgcgcttagtgtgagacttgcgcttagcgaaaggagtatttttttataaaatattttctgagttatttttcagtcctttttccaagaaattgaaacccttatgtttaacattcaaagataggctaatatactcctatgtacagattatgcagcaagttcccaatgatctaatgcatgaaaacaaaaactacagaaattaaaactgggttgcctcccangaagcgcttctttaacgtcattagcttggacaattt

SEQ ID NO: 290078 - DNA, 430 bp, Glycine max
tcttattttcagcagatgaagatgaatccgtggccacatcattgacttctctaaggacaataacatcatttcttgcactgaattgttgggagttggaagccatcttctcaattagattcctagcctcagcaggagtcatatcaccaagagctccaccactggcagcatcaatcatactcctctccatgttgctaagtccctcatagaaatattgcagaaggagttgctcagaaatctggtggtgaggacagcttgcacacaatttcttgaatctttcccagtactcatacaagctctttccactaagttgcctgatgcctgaaatgtcttttctgatggcagtggtcctagatgcagggaagaatttctccaagaacacccttttaaggtcatcccaactggtaatggatctgggagcaaggtagtacaa

SEQ ID NO: 290079 - DNA, 381 bp, Glycine max
agctttaggctattctattgcttcagattgttgcacaaaagggcaaaggtctgtgtggtggtcggcagaggagaataaaccacaaagtctggcgacaggtgcagatttttttattcatggctagttgggttaccaggttaaccaagacatctagtttaccttcaagcttcttagtctcacctgatgaatttgtggctacttcatgcattcctctaatgacaatagcatcacttctggcactaaattgttgggagtttgaagccatcttctcgattaaatttctggcttcagcaggggtcatgtctccaagggctccaccactggcagcatctatcatacttctctccatgttgctgagtccttcataaaaatattggagaa

SEQ ID NO: 290080 - DNA, 430 bp, Glycine max
tggcctgaaacttgctaataatatgctgccacacagacctgtttttagagctgacccctacaggaattccaaggtaagaaaagggaaattccagttgactgcagttgagagaaaaagctgcctccctacaccagccttccgatttacccagacacccgaattggctcttattgtagtttatctttagaccagaaaccaattcaaagcatttcaggatacactgtaaaactctaacattatcattagcggcagccccagagaacaaggtggcgaatgcataatactgtatattaacttcctctattttctttcccacttgatagttgctgaagagatcttttgctactgctgatctcatcaacccggtaaggccttccactactatattgaatagcaaaggtgcaaggtgatcaccttgccttaagcctct

SEQ ID NO: 290081 - DNA, 388 bp, Glycine max
agcttctccttcctttttttatacatatttgaaagagggaagaacaaaaatgttcaaccctcctggtatctgagattcacttaaaattagtgagaaaaattgcttccgtgaagaaaatccaagccgaggcgcttccgtaacgatgccgtgggtgatttcgcgaagatttgcaaccgttcttcgtcattcttcgtgcgttcttcatcgttcttcagtcttcaaccggtaagctcctgaaatcgaacttttcaatacatcctatgtacccttagtggtcctcatttgattcacgtgcttttatttccatttcattcactttccgtactcccttgtgacgtgctttagtcattgattgaagtcattttctcgcctaataaaaaataaaata

SEQ ID NO: 290082 - DNA, 426 bp, Glycine max
tccatcagggaaactcgatattagccaagtaattatattggtgcggtggatactgatacatggggttgtaaggggtctgtggggagcttggccatgtgggtactgcagtcccgatgtgggcgtctctctcctttttctttgctccacctgccccaagcctcctattgctagaactcgtcaaagcagcataatcaaattttccccttaggcccacctcgatcctctcgcctgcaaacactagacctgcaaaactcaaaggcatgtatcccaccatcttctcatagtagtacacaggtaatgtgtctactatcattgttaccatttccctttacatgattggggggtactacttaacccaacaaatccctccatctctaggagtattctctgaaagattcctactcccttttacacatgtgtctgcag

SEQ ID NO: 290083 - DNA, 382 bp, Glycine max
agcttgttaaaacatatttaattaagtctcatgatgcacatttataagacactagaagaactattgtaattgaaaactagacatgtattgatgtaaatctaattatgtatgcatgtacatgttatatgatagatgtagcttcataatggaaaaacattttggtggttgatatgttgttcattttcttggtgtaagttgccactattataagaaaaagcggcacaaccactaaacagggaagcatcactttccaatagcatatggcagaaataaaaactccaacaatggaagttgcacaacttgagttgaagtgacctaaatgtgagtacgaaaggtgattgaggaaaggtgaaactcgtagccaaaaaagagattgcatcat

SEQ ID NO: 290084 - DNA, 395 bp, Glycine max
ctaacctcattgtctctcacagtctttagataagggatccttttcaatccttgagtccggactctcagccacttatgatagccgccgatgatcccattactgcttcccctaagctctctgtcctttcttcatgctgcatcccatgccttgcgaactacttggagtacccttgcgtagtagacactgaaaccccgtgcgatgaaaggcgtgatgctttcatctgatggcactcctctcatggggtaaccatgctgtcttatggcgaggacgggattataactaatacaaccgctgtgtcccaacaagggaacattaggacatccttcgcatgaagataaaatcctgattcttgcttccttctagcgagggaaccaattaactgacgcccctccatg

SEQ ID NO: 290085 - DNA, 387 bp, Glycine max
agcttgtttatgaaattgcgcatgcacttattttctgccctgagtcatgaatagttgattggatctaataaaaatatggctgatgacttgctcattcaggttgcagtttatgctttaatgaaagctgcacttgatttggagatattgctttcacatgaacggctaaatgaattttcccctgttaaaaagatgtaagcttttacccttttctcttgcatacttataacataattttgggacattgcttttcttatctatagtaacattgacatatatatgcaagatgtaacgagttaggcttttatcaaccctataattggaagaaatagttgtgcatcatattatattatatttactacttccacttgatccttacaagtaatgact

SEQ ID NO: 290086 - DNA, 398 bp, Glycine max
ttgaattgaaggcaaagaacgatcacacactctccctttctttttcatctattctttccgtgagtttcttcttaaaacccattacaaatttatctacatccaataaattcatagtttactgtcaaaactacttttgtttttatctctagaggatgttttttctctgctgaaatatgtgcatccaaactgttcttcccctttcataatcattgaaagctaaagcatcgtgattcattttatgcttggatttgcgctcttcttgtcctggttttcctatgcagctgttttacaatgctaattgtttgcgtaagtttgaatggcaagtgacgatgatgcagtatacattgcaatgatattacacgctcgggcaagaaacattattcataatgtgaggtgca

SEQ ID NO: 290087 - DNA, 374 bp, Glycine max
ttgcatgcaagctttgatgcaacatatggagaggttaatgaaacaacgagatgatgcgctccatgagaggctggatcaaatggagaatagagatcatactgaagaacaaaggacgagaagagggaatgatggtgttcctagacaaaaccgaattgatggtattaaactcaacattcctccatttaaaggaaagaatgatccggaggcctacttggagtgggagatgaaaatagagcatgttttctcatgccacagctatgacgaggaccagaacgtgaagcttgccgccacggagttttccgactatgctcttgtgtggcggaacaagctacaaatagagagagcaagaatgaagagccttggttgatcatgga

SEQ ID NO: 290088 - DNA, 402 bp, Glycine max
  unsure (1)..(402): unsure at all n locations
tttcgattcattctatgtacccgtagtggtccacnatttgtttcgtgcatgactattctcgttttgtttactttttataccccctgttgacgtgcttaagccattttacttaagtcctttctcgcttaacttaaaaataaaataaatttccaccgaacgtttgaattgtattatccattaacttcggttaaaataaattccgaccgttcggtcgtgccgtaaccacgttggaaatcaaaaagaggtaaaaaaaataatataataataatcaaaaaacatcctttagtaaaataaagcggaaaatcaatcggacattttttctttgggatttctcattcttaatcgaattgattaataactaaagtgaaactaaggctaaaatcaactcgcctagtcaagctc

SEQ ID NO: 290089 - DNA, 368 bp, Glycine max
  unsure (1)..(368): unsure at all n locations
agctttaacctcattgtctctcacagtctttagattggggagccaatccaatccttgtgtccggactctcatccacttatgatagcgaccgatgatcccattactgcttcccctaagctctctgtcctttcttcatgccgcatcccgtgccttgcgaactccttggagtaccttagcattggggtcactgaaaccccgtgtaatgaaaggcgtgatgctttcgtctaatggcgctcctcgtatggggtagccaagctgtcttatggcgaggacgggattataatgaatacaaccccatgttcccatccagggaacattnggatatccttcgcatgaagatacaatcctgattcttccttcttctagcg

SEQ ID NO: 290090 - DNA, 429 bp, Glycine max
  unsure (1)..(429): unsure at all n locations
tgcttgtggagcttctatggaggctggatctttgagtttcaatgaggtcctttaatggtggttttccaccatggagatgcagcggaagacaaaggagaagaggggagaggaggcgccatccactagggaataagccatggaagaaggagcttcaccaccaagatgagccttggataagaagcttggaaggatgcttcaatggaggaaaagaaagagggagagaaagagagaggggggagcacgaaattgaaggaataaaggagggagagaagtggaactttgaaagatgtctcacaagactctcattcatcatagttacaacaagtgttacacatgcttctatttatagactangtagcttccttgagaagctntcttgagaaaacttccttgagaagcttctttgagaaaacttccttaagaagctag

SEQ ID NO: 290091 - DNA, 371 bp, Glycine max
agctatagccaattcaaacgacaataactttttactcggatgtctgattgagactcgtaatataacgagatgctcgaagttaaatgtttaagctctgagccaattcaaacgacaataactttttactcggatgtctgattgagtcctgtcatatatcgagacactcgaaattgaatgttgaagctctgagccaattcaaacgacaataactttttactcggatgtgtgattgagtcccgtcatatatcgagacgctcaaaattgaatgttgaagctctgagccaattcaaacgacaataactttttactcggatgtctgattgagtcttgtaatatatcgagacgctcgaaattgaatgttgaacctctga

SEQ ID NO: 290092 - DNA, 425 bp, Glycine max
taaacattcaacttcgagcgtctcgatatatttcgattctcaatcaaacatccgagaaaaaagttattgtcgtttgaatttgctcagaggttcaacattcaattttgagcgtctcgatatatgacgggactcaatcagacatccgagtagaaagttattgtcgtttgaattagctcagagcttcaacattcaatttcgagcgtctcgatatgtgacgggactgaatcagacatccgagtacaaagttattgtcgtttgaatttgctcagaggttcaacattcaatttcgagcgtctcgttatatcacgggactcaatcagacatccgagtataaagttattgtcgtttgaattgtctcagaccttcaacattcaattttgagcgtctcgatatatgacgggactcaatcttacatccgagtaaaa

SEQ ID NO: 290093 - DNA, 377 bp, Glycine max
  unsure (1)..(377): unsure at all n locations
agcttgacaaagaaatataaattgtttgagctagatgtccatctgcgcaaaaattacactatgcattgagtcccaatgtaatttgtctatgtgtgagtgaactctctacaaggttcactcttagtacacatatcccaagggagtttagcacactaatctagaaagttatcatactaatctagaagatcagaataagatttaccagttttagcaaaaacagtttttatcattttttggaaaaatttgactntatccttttatagttagttttggaaaagtgtaagaagtcatataaggcatggctgagcttgtggagagcacctcaagggatatccaagctatcaattagtcatattaatggttattcaaagtgctta

SEQ ID NO: 290094 - DNA, 424 bp, Glycine max
  unsure (1)..(424): unsure at all n locations
ttntgatgggtttcaggcctctgttggaggtgtcgtttcgcggatctatgtcaaattcactgcccatgttggcttggtagacgattagggctcggatttgtgacccttcgtccacgtttatgacttgagttccttcaactgctgtggggtgaggcatggcaggctcccggatgggaggatacggtgctaccttcaggctctctatatagaattatcgtgcttgcttttggttagccttgacagttacaatctcccttgtcagtgtagggaatttcattttcaaatggggtgtggagactatggcttcaagcttgtcaagtgtctttctgttgattaaggcaaagtatgatgtgtctgcgttaaccagtagatatctgaagctcctagaaaacttaccctgatcgaaggtggtcatcaagtccac

SEQ ID NO: 290095 - DNA, 376 bp, Glycine max
  unsure (1)..(376): unsure at all n locations
ttgcttgtagaatggctagacatgatacatgtcagggtttggtttggctcaaggataaaagggatgccccacattatttccatgacacaaatgcaaaaatgatgatttggaaattttatgcaaaactggtcatgcatgcacctatgtggacactcaagtgtcaaatttttatggtcatgtgatgctagggctcangattcatttcctctattttaaatcaacccaatgtttccaaaatatgttcttttatcaatttgtgcattcatccgagtccatttcgggcgtccggggaaaacttcacagcattcacccttcaggtgtatacacattcttttcaaaaactagttatgatcaatgaattcttttcaaagaaaag

SEQ ID NO: 290096 - DNA, 427 bp, Glycine max
  unsure (1)..(427): unsure at all n locations
tctaaactttgtacaagaatgaagctctgatacctcttgttagacaagtggcctcagatatcttaagaagggggggttgaattaagatattccaaactgtttcccctaattaaaaatctatttttctttttacttaagttatgaattcccttaatgacaatcttcttaaatattaattcaaatgaagcaacttgaatatgaatataaagcaataataaataaaggagattaagggaagagaaaatgcaaactcagttttatactggttcggccacacccttgtgcctacgtccagtccccaagcaacccgcttgagagttacactaactngtaaattccttttacaagttctaaacacacaaggacaacccttcctttgtgtttagagatcttttacaacaagagactcacagtctcttaatccctt

SEQ ID NO: 290097 - DNA, 342 bp, Glycine max
agcttgagatgaggaagtgttgaagggtgaaacttcctgcttttattgttgaccacagagtggtacctggagatatgtcgcgggggtcaggagaccttggggacgtcaggtggggtgctattgcccaaaaccaagcttgaccaatcccgacccaacccgggcatagtcggtcagtgagaacctgtgatgtacctaatcatgcgagctcctggcagtcaacagataaaaggaaaacaagaccacaaagcaaggaggcttgtggtggctggccagctgtgaattctgtataatatgtggattgtggcctctggtaatcgattactgagggtgggtaatcgatta

SEQ ID NO: 290098 - DNA, 417 bp, Glycine max
  unsure (1)..(417): unsure at all n locations
tgcttctacagccttaattgtcaaattaattatgtatttttatcattagggcctacttgactaattttgtgtttttaatttaattttaggagaattttaagcaattgggcttgaatctggaattgggcttgaacttgaagagagcagacaattttattttatcaaatcttatcttatctagattttatttcatccaatcttatcttatcttgtccagattttatttcatccaatcttatcttatcttgtccagattttattttatttcgtttatgggcttggacttaaaacagatttgtaagctttggggctgagaacctatataacagcaccaaggttntagttttagggagttttcgaagaggagaataattctaggattttagaattccagttgttactgttcatgcgcactgt

SEQ ID NO: 290099 - DNA, 375 bp, Glycine max
ttcatgcaagcttatgcaacctcgataatgaaaaaagtagtgttttttttgtttctatgacaaaagccataaatactacatatgaaatgtggattattatatctatctatcttttaaaaaatttaaattatttaattaaatttgattttagaaggtactatcgaaataaaatagttccgggtagttagcattatcttggcaaatcatcaatgatgatgctttttatgtcactctcataaacgaaccactttggctacttggctacttggccacttagccaatagccatcactgaattcaaaagattgatgtcagcaatcgtacagctttgaaatgcatatgctcgtcttaatcttaaaactgaatacaaagcctc

SEQ ID NO: 290100 - DNA, 394 bp, Glycine max
tcgaggaatcccatgtattttaaccaccatgtcgactatcaaggatgccaccatatgagcagtgtgagacgttggtaacattcccagatgaatccccttcgaaaaacggtccaccaccacgagaattgtggtttttcgtgatacgccggcaggccgacaatgaaatctaacgagaggtcctcccaaggtcgatggggcaccggtaaggggcataatagtcctgcgacgcgttgtgtctggtacttagtgacctgacaatccatgcaatttgccacaaattgcttgacatcttctctgagaccggtccaagtgaagttctctgaaattcgagctaatgtctttgtgattccggcgtgaccccctgttggagtcgtgtggtattcctgaagtaatg

SEQ ID NO: 290101 - DNA, 361 bp, Glycine max
agctttggagaaatttaaatggtcattacttttcactcggacatccgattcaggcgtataatatatcgagacgctcaaaattgaacagtggaagctattgagcaattcaaatggtcataactgttcactcggatgtccgattcaggcacataatatatcgagacgcccgaaattgaacaacggaagcttttgagaaattcaaatggtcatttctttacactcggaggtccgatcaggcgcatcacatatagagacgctcgaaattgaacaacggaagctcttgagaaattcaaatgggcattacttttcacttggaggtgcgaattatgcgtataatatatcgagacgctcgaaattgata

SEQ ID NO: 290102 - DNA, 431 bp, Glycine max
tcaacctagaggagacggaccattccaagtgttggagaagatcaacgacaatgcctacaagattgacttgcctagtgagtataatgtaagtgccactttcaatgtgtctggtctatctctttttgatgcagatggaggagccttggatttgaggacaaatccttttcaagaaggagggagtgatgaggacatttgataaaatttggtgagagtttctctctgggttccttgttgaaccaattatcagacttatcaaggtaatccttgtggcgtctacccagacttatcttccttcattggaagtggcgtctacccggacttatcttccttcaccggaagtggcgtctacccagacttatcttccttcactggaagtggcgtctaccctgacttatcttccttcactggaagtggcgtcatccaaatcttcg

SEQ ID NO: 290103 - DNA, 386 bp, Glycine max
  unsure (1)..(386): unsure at all n locations
agcttgaaactggactgcaagtcatgatccagcaagcaaataaatactgcaaaatcattcatatatgcgcagtgataaaaatgaacatcagatacgcttatcacagagtcgttcccaagaagttactggtctgactttatgtttgtgtttttccccggataatttctgattgcagcagaaacacaacaaagataccaacggaattaatcacatcagaatcacctctacacaaatatataatcccagcagaaacaaaatccgtagctgttatattgtttgagcccctaaacaagttagcttaaagtagtttaaatattttgctggctttatttgtgtaattntaatttaattctacatggcactgtggcatttgatttctcccttgc

SEQ ID NO: 290104 - DNA, 430 bp, Glycine max
  unsure (1)..(430): unsure at all n locations
ntaacaagcaatagatacataatcaagtcatagcagttgtgtatgatatgacatttaatataaaactgattttgtgtatatgccattatgaataataactttctgaagacaatcaaacaaaaagcaactctgaatgtaaactagagaaactagagagtttaggcattaccatggaaggaagcgcatcatgatgtcaccatccccagttgcacaacatgcaccaacttcatcaatggcatatgctgaggatccagcaatgggaccatctcctactctgtaatcaatgaaaaagattcaaagaaaacctaattataaaatgcatcaatagaacatacaaaggatgattgatagatgctgcattaacaatgtgtggtgtatatctgagcatatgtacttgggaattgataaggcaatttgtgaacggctaaat

SEQ ID NO: 290105 - DNA, 389 bp, Glycine max
agcttttgttttcaatttcgaccatctttatatattaccagactcatccggacttccgtatataaacttattgtcaattaaattttctcagagctttggatcaaaattttgagcgtctcgatatattacgggattcattcagacatccgagtaaaaaattattgtcgttagaatttgatacgagcttccgttttcaatttggagcatctctcgctaaattgcgataggctatcgggcatccgagaaaaaagttattgacgtttcatatttctaagagttgacgctttcaatttggagcgtctcaatatattacgggactcaaccggacatccgagtataaaggtattgtcatttcaatttgctcagagcttctagtctcaaatgtgagc

SEQ ID NO: 290106 - DNA, 403 bp, Glycine max
  unsure (1)..(403): unsure at all n locations
ntgagcaaattgaaacgacaataactttatacacggatgtcttgttgatttccgtaatatatcgagatgctcaaaattgagactagaagctctgagcaaatttaaatgacaataactttatacacagatatccggttgagtcccgtaagatatcgagacgctcaaaatttagatccgaagctctgagaaaattgaattgacaataactttatacacggatgtccggatgagtcctgtaatatatcgagacgctgcaaattgaaaacggaagctcgtaggaaattcaaacgacaataactctttactcggatgtgcgattgaatcgggtaatatatcgagacgatctaaattgagactagaagctctgagcacatggagatgacaataactttatacacggatg

SEQ ID NO: 290107 - DNA, 383 bp, Glycine max
  unsure (1)..(383): unsure at all n locations
agcttgcttgtggggcttctatggaggctggatctttgaacttgaatggggtcctttaatggtgactttccaccatggagatgcatcggaagacaaaggaaaggacgtgggaggaggcaccatccattaaggaataagccatggaagaaggagcttgaccaccaagataagccttggataacaagcttggagaggatgcttcaatggaggataagaaagagggagagaaagagggaggggggagcacaaaattgaaggaagaaaaagggagagaagttgaactttgagttgtgtctcacaagactctcattcatccaagttacaacaagtgttacacatgcttgtatttatagactangtagcttccttgagaagattcttga

SEQ ID NO: 290108 - DNA, 428 bp, Glycine max
tctaacctgcgaaattcttttcaagcgttgttggctctggattatgaagagacagtgcaaggattcatagataaattcgagaagtgagttgaaatggtgaaggggttggaggagccatttctgatgaaagtgttcctcaaggggttaaaggaagagattagcactgaggtaaagcttcatgaaccaaagaacttgattaaagcaatggttaaggctcatagagtggaggataagaacagagttttagggaagttacccttgagtaatagccaggggtataatctgcagaaacctagttattccggtcaaaaatttgtaagggagtgacgaccaacaaatagtaaggtagttgatcctactaatgctgctaaaacaagatccgatggatggcaaggtagaagaaccttccataatttgtcacccgcgga

SEQ ID NO: 290109 - DNA, 386 bp, Glycine max
agcttctacttatgtggtagggcgggcttccttcactttcttgtctccaacgcgagctctaaccactgttcttccttcccacgatgcttcttttcatgtccgcctgagtgggcttatagcctaagccatacttcccacgatttccttgggtttttatcaagctagttatgtcgccgttgtctttgcctaaacccatcccgggttcataaccgttccccaacataactcgggccatcattaccgctgcatcggacagacaaggctgcccaaagagggagtccacggaggaaatgctgaccacctcaaaagactggaaagcagtttctaacgattcttctgtggcttccacataaggcatggaggatgggcagcttaccaagatatct

SEQ ID NO: 290110 - DNA, 360 bp, Glycine max
  unsure (1)..(360): unsure at all n locations
ttctcattacatcttgggacaccttacctaaacaagaccaacatgctcttgattcctaacgtgtagatgaaacaatcattcagatgcttcctccccgacagagaatggtttatccttggggcataatcatttggaaaagtagagaaactgtatatgctcatacacctttctctactcccttagatttactatagttgatgggtcttctatgtacatccaatgttgttcttcattgngatcactctaagtctgacgtgtgaaaatgcaagtaacccactaaaagggggagaggggttgaataatgtgtatatcanagataacaactttttgcgatacaagaatagtatggataatacaaag

SEQ ID NO: 290111 - DNA, 326 bp, Glycine max
agcttgtgcaaatcaaatcactcctacattttatctctagcatgcattgtatgttagtctcgtcctttgtcacgggaagccggaaggtccatatcaccttcttaattgtacacatggggcactgcgcccccaaatgcgcgagtaagaagagataattttccgggctctcgtgtccgtaaaatgcattcatatcatgcatcgcataagcatctcttcataacatcataatggacatatcctgcatttgtccgttatcatattccagcctcaccttttgcatgagtcatggcatcatcatgcatatgcgtccaacaaactttttgatc

SEQ ID NO: 290112 - DNA, 427 bp, Glycine max
tgtctcagcgtctatgcgagacagagaccaacatgtttgctatcatcgccaagtacgaagaagagttaggtctagccacggcccacgagcatagaatcgcggatgagtatgctcaagtatatgcggaaaaagaggctagaggaagggtgatcgactctttacaccaagaggcaaccatgtggatggagcggtttgctcttaccttgaacgggagtcaagaacttccccgattgttagccaaggccaaggcgatggcagacacctactccacccccgaagagattcacgggcttctcggctattgtcagcatatgatagacttaatggcccacataattagaaatcgttaggaaacttgtatggtctctcagaccttgactagatatgacttcctttctgaaataaaatgagttggtcccaggtttct

SEQ ID NO: 290113 - DNA, 195 bp, Glycine max
  unsure (1)..(195): unsure at all n locations
acctgtttgcatgcatgcttgcatggaagtttgcgatcccnggggatatgacagtggggatcgttgtaggcagaagcaccaaccgcggcgttgactacttgacgcaaatgagacgacgcgttacctgagggatgcacgttcactttaggccacgcacaagcagaagctagaatagggcaaatgcgcctcattatc

SEQ ID NO: 290114 - DNA, 394 bp, Glycine max
  unsure (1)..(394): unsure at all n locations
tgtaagttaggtttcaaggctgggtgtagaccattcttttggttttttatggnncgattttaaagggttattatgggggacaactactagctgcagttggacaagatgcaaacaaccataactactgtattgcttatgcaattgtggatgctgagaataaagacaactggagatgatttctcacactactgaggcaagatttgggagactgtaggcagcatgggtggaatcttatgagtgacatgcagaaggcacgtgccctagttcattgtactattatgagtctttatatgttctttgaaggaccatactgacagtaagtgaaatctttcaaggactaatcgttgctgttcatgaagtattcccaaatgcacctcatacgtactgagctatg

SEQ ID NO: 290115 - DNA, 373 bp, Glycine max
  unsure (1)..(373): unsure at all n locations
agcttctcggctcatgctgggaacgcctctagttcaacacccgtgcagcctanagcacccacccagagggaagctccccaagttccaactccgaacatgactcgaccggccggtaattccaacacgacaaggaacttccctccgaggccattgccggaattcaccccgctcccaatgacgtacgaagatcttctaccatccctcatcgccaatcatttggccgtggtaactcccggaagggtcctcgaaccccctttcccgaagtggtatgaccctaatgcaacttgcaagtaccatgggggtgtcccggngcattctgtcgaanaatgcttggcccttaaatacaagggtccaacattaatggatgccggat

SEQ ID NO: 290116 - DNA, 419 bp, Glycine max
ttgacttgagtcatcaagagattataaatatgtgactttggcatgaatttaattaataatttatctttcaatcttttttcatcatctctcaacatctttgaactctttctacagaattttctgattcatttctcttcatctttcttaaagtttttgttcaatactttttctttgaagaaaagttctttgatcaaaaacttgtgttattcatctttttcattctcttctccctttgccaaaagaacagaaggactaaccgcctaaattcttttgtgtctctcttctcccttttccaaaagaatagaaggactaaccacctgaattcttttgtgtctctcttctcccttacaaaagattcacaggactaaccgcctaagaattcttttgattcttccctttcccttaagcaaaagatttca

SEQ ID NO: 290117 - DNA, 334 bp, Glycine max
agctttgctgatttttttttcatccgcgacagaatcgaactgggtataagaagaggcaaatttgataatgctgattgcatgaatgggaagcctgtggcatatggagagaatgagaagaaggaggaacccatgctatgactatcattcccacatggccaaatttcccaccatatcagcaataccgatactcagccaatattaacccttctcattacccaccaccctatcagccaagaacacccaatcgtccacaaaggccacccctaaatcagccactaagcctgcctgacacacatctaataccaaacgccacctttaacacaaaccataacac

SEQ ID NO: 290118 - DNA, 423 bp, Glycine max
  unsure (1)..(423): unsure at all n locations
tttcgcaaagcttacggtaaaatctgggatctagccttggtattagtcttcacataggccattgcctccctcacccagtattatgatcagccgtagaggtgcttcacctttggggacttctagctatcacccatggaggaagaatttgaagagatcctaggatgccctctaggggggaggaaaccatacctcttcacagggttctatcccttattagctagaatttccaagatagtccaaatctcagcgcaggaattagagcacaggaagcaagtcgaaaatggggtggttggaataccgagaaaatatttggaggcaaaagcaagaatcttggcaggtaaaggcgagtgggccccgttcatagatattctcgcactgttgattntcggaggagtcctctntctgaatgtggatgggttggtg

SEQ ID NO: 290119 - DNA, 228 bp, Glycine max
tatcttgcatgtggaatttctaaagccccactccatcataaagagtagtacctgacatcttgcacaaacgaatttaacgttacttgacaattatagctgctgtgtgaataccttacccactcaagagtatgacacaatgatggctgctctctaatgaaacactcttgccttttaccactctaattgcccttgagttcttatgcaattcacgagagtatggacacatca

SEQ ID NO: 290120 - DNA, 425 bp, Glycine max
  unsure (1)..(425): unsure at all n locations
ntacagcagattntagtaatgacccactaacctagttttaaaataacttaatgccattaacctagggaattaaaaaaaacttaatggctgagtgtaactgaaattgtggcaaccaaaagtcacccccaacagccaacaagtcagccaccatttggtctcccaaaaggctgatgcctaggttgccaattgggcccttattacaacttgaactaaacctaactaaagcccttttagttgattaacccaaaacatatttttggtcagccaactttacaaggattgggccattatttagacaaactaaacactctaaaattgagacaaagtggtgtcatttagtcctcctccatttgggccatgatacaactcacaaccttggactcttctccttgaaacttgggcttgtattcaaatagtatggacag

SEQ ID NO: 290121 - DNA, 366 bp, Glycine max
  unsure (1)..(366): unsure at all n locations
agtctttccaaccaaatttattaatacattctcaattgataaaagcttattgaacaagtgctgagttaaactattttacccaaatgtgcttagtcttttagttgtggttttcactttcactttagcacacacacaaaaagaagcaagaataggccaataatgtctcattatcttgttcaattcgtgcaataagaggttaaattcatcttaagatgcaaatctaacctcaggtagcatgactttgtcgacatatatcatatatcaacagattcaattacagtggaaattttcaggcaatattntatgatattaaatntatggtcttgcctgaactacaaatattgtcccatctttaaccactctttc

SEQ ID NO: 290122 - DNA, 422 bp, Glycine max
taaaatttgatatctaacaagcttcatacttaaaactttttttatctattaaaccaacatttaatcatttccttagaattacaagtaaaaaccctaatagaaaaactctgtaacacactatattccaccaggactcaattatcgaataataattaaataatatctgcaaaataagtttaaaattataaaaataattattaacaaaaagcatctaaagttaatacaaataaaataattataattgaccaatgccagtgttctttgttttcttgtttagcaagaaaaaatgataggatgggttatttttcaggaagcatagtccaacttacgttaagccagtccctgatatatcaaattccaaatgtatgcaagaacggtcagactcgggtttgtgaagctccctttgtacagcaacattcacc

SEQ ID NO: 290123 - DNA, 363 bp, Glycine max
  unsure (1)..(363): unsure at all n locations
agcttgcttaagcatggcatcgcttaaacgagctaagtcaatgagtagctatgggattattggaggtactcgcttaagcgtcatattttgtgcgcttaagtgaggagagtccgcaactgagaaatttaggactagtggacctcgcttaagtgagcttttactcatgcttaagcgagctaggtagtcacgttaggcccaagcccacatcaaaatataaaaactagggcgccataaatgaggggattcagagcgttttggaaaacaactttctctgtgagagagaaccatttttagggctcttagctntaaatctttatatacnttttatgtttgggtttgattattataatcaagcaactaatc

SEQ ID NO: 290124 - DNA, 418 bp, Glycine max
ttgttgaatctccatgggatggttcaggttatgcctctctctcacactgttgaatgtgagagagttaattgaagggtgtcatcggagttctaataacattatattgggggtttgtgaatttgagttgatggggttacgaaaatttggtgatagtattttgggattttaggtgtgactgaaatgatgatttggtgttgcagttgcagggaagggtgtgggagtgagtgtgtgagagagaggtttgattcctttgcttttagaaaatctgcccaattggaaaggggttaaagggaaagttgaggactacattgagcactacattagcctgtcaatataactaatgatggttaagaataatgtttgtttgtttttttttttaacttataaaattaaactacattagcctgacaatagacaa

SEQ ID NO: 290125 - DNA, 283 bp, Glycine max
ctctttaaccaacggttgatggaccatttcaagaccttgaaagaatcacatgacgatgcttacaaagctgatcggaccgggctgaataatgctattttcacctaaagtgcctatgatttaactgtggttgatacatacggtgtatcccactcgcggacagatccttattaagagggagagagtgaagaatacttgttcatgagcgcgggcagagagccacttgatcgactgatgcgaaccatgactcaggctacatcaatgtgtgcccatgtatcttatatac

SEQ ID NO: 290126 - DNA, 388 bp, Glycine max
tctggaggaagcctcttaatgaagcttctcgagaattctacttgcagcttttctcagcaaaatcgctgcccatccttcgtttaccgagggatcttctcgaaatccggatagcaacttcacaatacactcgatcatgatctgaccgttgggatctttgagaagatgtctggagtgtgctaaatgcttccgataccgagagcatctcttattcaagcatgcctactctgtgctttcgagtagcttaagaataacggaactacgccttcgttctttgttgccatgccattcctgaagtaacgataagatggtccattatccacgaacgccattacacctcacgaaccgtcggtgcttgacacatcgaaaggaacccgtctgccgtagcgga

SEQ ID NO: 290127 - DNA, 384 bp, Glycine max
agcttttcttggtgggttgatgtactctatcacataggatagcatgatcactaacagacatattttcaatcaattcagtttcctcttcaggggttttcagctttatcttccctcctgctgaagcatctaacaactgcttggtttgcggtctcagcccatctataaacatgttcaattgaattggctcaaagaatccatgagtgggagtctttcttaacaaaccccgaaatctctccaatgcttcactcaatgactcatcagggaactggtggaatgatgaaataacaacattcccttctgcagtctttgactcgaggaagtatttcttcataaatttctcaacaacttcctcccatgtcttaagactgttgcctttgaatgaat

SEQ ID NO: 290128 - DNA, 426 bp, Glycine max
ttgtgtaaccgattacattgatttggtaatcgattattagtgattgtttctgaataaaatcaaaagatgtaactcttcaaatagtttttgactttttcaaattggtttttaagtttttctaaaagtcataactcttctaatggttgtcttgaccagacatgaagagtctataaaagcaaggctttgtttttcatttcaagtatcttgaacacttattcatacaatcctttacaagccttgaatctctttgaacttcttcttcttctttgtaccaaaagctttccaaagttttctggttttctaaaccttgaaaacttgtgctattcatcttttcattcccttctccctctgccaaaaagaattcgctaaggactaaccgcctgaattctttctgtgtctctcttatcccttttccaaaagaacaaa

SEQ ID NO: 290129 - DNA, 368 bp, Glycine max
cagcatcttttgtttcacttagcatcgccatcctagctatatgcttgtgtcgctgcatatcatcggatgccttatcacaagcgccaaattagtgccctcaggtttcgagagttcaagcctgttaaatctttggacttgccatcactatcaagctgacatttacttatgctgacacaagctgagccttcttgcttagacgaatccgacgaagagttatcactattagggggccgcaatggatgggaaacagaacgttctacataacacctttccctatgagagaaaaccgtgacctgcctcttatattataattctgatatacattctacgttaggctaagatcttctaattaatgcactattatcctt

SEQ ID NO: 290130 - DNA, 329 bp, Glycine max
ctgtgcctaaactacatgtgagaactcctcttgagtgcatgccttggatttgagtaacataatatgcttaggattatattacaagcagaactgaatggatgatatattgaaccactgacaagtcttttacactgatctaatcatgcgttagacacatattgtaaaatgagatcgactatgataacaactactggaatactgtgataagaacatgatgtaatgggtagatagaaaagccgtagactgacaaatgatcaacattgaactgaacttaattcctggcttagagggcatgtggtgatgattcattcatctatgcaagggccata

SEQ ID NO: 290131 - DNA, 367 bp, Glycine max
agcttaagcctgaacgttatgcgacatcttattcgtggctaagcgggatctattgtcgccaagcgcaattccttacggccttaattgaggtccatgacgctaagcgccagtcatggcagctaagcgagattctttgcagcaatatgagcgctaagcgagtacctctcagctaagcgcgtgctcctctgtacttaagatgcatcattttagctacattggctagggccaggcttagcgagagttgcagcttttctaatctgcaagtctcgctaagcggacgtactcttgtgctatgccgagtttctgttcaaaaaaaaaattcaaatttgaaacgtcggctaagcgcacgtgttcgctaagtgagcct

SEQ ID NO: 290132 - DNA, 428 bp, Glycine max
  unsure (1)..(428): unsure at all n locations
ntagtggaataaaatgagaaatctatggtgtctaagatactttcatgaagaggtctggaaatagatgcaaccttcatttttttgcgtcttcggctagaagcaccagcctatttctcccagaaattctattagaaataaagattgacaataaagaagtagaacaaaatgacaaggtagatattaatacctaagttaaaggaagattatggacaaaggattttttagcagccacatatttgttagctctcttgaaagttaaagtttgctctggagaagggtcctcttctatattttccaagtcaatcgtctcaactcgatgtttagccatcaaggaaaatgttagtagaataacaacgggtaaataagataccaaaagataaagctctacagaggaacttgtttgaggagttggagaattactggtgatt

SEQ ID NO: 290133 - DNA, 371 bp, Glycine max
agcttatttttgacaaaattgaatttctttttcttatctttgtagggactactcacaaaatccatttacatttctttagtgtcctataggccatgcacaaggtagataagtcaaggaaacacataaatccaaaaataagccacaattgtcaattaagctcaatcatttgcctaagaccaaaactaaattaaagtgagaaaataagagacaaaaagaggtctaatcagataagaagaatagaaaaatactaaactacagatgctcaatctctcccttcctttccctctcaaatcgttcgatatccaccgagttaacttagtttgttaaggtactctccctctatacctcgattacacattttcttttgtctg

SEQ ID NO: 290134 - DNA, 393 bp, Glycine max
  unsure (1)..(393): unsure at all n locations
tgggtgatgttgcgcgtactgatgggtaccatgaggtgttttctggggtttgacccatgcgggtgttgaagagatggcatgggcatctccttccttcctttttgcccctgttgccccgattcttttggcgtttacgtttgtggaggaaacgtaatcaaactttcctctcttcaatccaacctcgattctttccctggcaaacaccagatccgcaaagctggacggcatgtaacccactagcttctcatagtagaacactggcagagtgtctaccatcatggtgatcatctctctctcaaccatgggaggagctacttgtgccgccaaatccctccatcgctgcgcatattctttaaagggttcaccctctntcttgaacatattctgcagctg

SEQ ID NO: 290135 - DNA, 320 bp, Glycine max
agcttattactcctccatttggatgtatcttgctgctcatgctcgaagctcgtccaagtccttgggttgcttctggcaaaggttgtcggcgaatggccccattttgagtgctatgatcatagaatgcaatccaacactagggtcaaggtctttcattttaagagagatggtgacgtacctctccgtgaaggatgataatgactaatcattagcttggtgtaggttgaccaaagcagtggatgttgtgtggtgagggctgctggttgcatattgcgcttcaaaatgttagactaatgaggagaaggagttgtcgcaacatg

SEQ ID NO: 290136 - DNA, 426 bp, Glycine max
taccatgtgtatgaatgaattattatttgcatttaatttgagctgaaagtatgtatgattgattgaaccttgagcctgcacaatttatctcctactaccttatcttaggttgtaggagagcgtcattcatagaaagaatcttggttcaaggcaaatttgtcccaaatttgggggagttactgggtgaaagtgtgaaatggtaagaaaatatcagcacacagttcaaaaaaaactaattataaaataaaagtgtgtgtgtgtgctgccatttaataaaaagaaagttgagtgtaaaaagggggcaagtaatacggttgggaataaaaataaaaaggttgatctatggatgaatgctctcctagaatctaagctactgcgtcctagaaaagccatgaattatttgcagcctagcctcattacaagcct

SEQ ID NO: 290137 - DNA, 324 bp, Glycine max
agctttaacctcattgtctctcacagtctttagattcgggagccaatccaatccttgtgtccggactctcatccacttatgatagcgaccgatgatcccattactgcttcccctaagctctctgtcctttcttcatgccgcatcccgtgccttgcgaactccttggagtacctttgcattggggtcactgaaaccccgtgtaatgaaaggcgtgatgctttcgtctaatggcgctcctctcatggggtagccaagctgtcttatggcgaggacgggattataattaatacaaccccatgttcccatccagggaacatttggata

SEQ ID NO: 290138 - DNA, 422 bp, Glycine max
tgcttgtggagcttctatggaggctggatctttgagcttcaatgaggtcctttaatggtggttttccaccatggagatgcaacggaagacaaaggagaagaggggagaggaggcgccatccactacggaataagccatggaagaaggagcttcaccaccaagatgagccttggataagaagcttggaaggatgcttcaatggaggaaaagaaagagggagagaaagagagaggggggagcacgaaattgaaggaataaaggagggagagaagtggaactttgaaagatgtctcacaagactctcattcatcaaagtgacaacaagtgttacacatgcttctatttatagactatgtagcttccttgagaagctatcttgagaaaacttccttgagaagcttctttgagaaaacttccttaag

SEQ ID NO: 290139 - DNA, 67 bp, Glycine max
  unsure (1)..(67): unsure at all n locations
tttgtcatgcaagcttttctaacactttctctcaatatgaaatccacatnngaaccnnnactcatcc

SEQ ID NO: 290140 - DNA, 438 bp, Glycine max
  unsure (1)..(438): unsure at all n locations
gacctatgaaactcagcttatatttgggaaaccaaggtggtaggctaatgcttttcacacttgttctttgtgcttcttgataagtcctatttctttacaagcaaaccattagtagaaaaagtctaatagactaaaaatctacttcttaaaaatttgttgtcattaaaacattaatttcataaatattattatgttgagatcatgagatttacattcatatgagtttttggtgagttgtttacaagaattcaaggtgttggaatatcttgctatgcatattgaattatctgtgggttcatgagtgtgatgaacgtataaatggtgaatctatgatgttataacctctgttgagattagtgaatgaatntgtgatgacatatggtattaatttgaatgatcataacatacatgcattgatgaatgacattatatgtgagt

SEQ ID NO: 290141 - DNA, 376 bp, Glycine max
agctttgcagatttggtcttcgccagtgaaaggatcaatgtgggtccgaaaagaggcaaatttgatcatcctactaggacgactgagaaaactggggcaaataaagagggtgaggatgaaggagaaacccatgctgtgattgccattcctgtacggccaagtttcccaccaaacccaacaatgtcattactcagtcaataacaaacctcctccttacccaccacccagttatgcacaaaggccatccctaaatcaaccactaagcctgtctatcgcacttccaatgacgaacaccacctttagcacataccaaaatcaccaaccaagaagtgaatcttgcagcgagaaagcctgtagaattcaccccaattccagt

SEQ ID NO: 290142 - DNA, 426 bp, Glycine max
ttgagccaaaatcctgactcaccataaaccttgacctgtgtgataatgccaatccttaccctcggaagcaaaaaaaggaaagaaggaaaggaaatttccaatcaaagagaaagcaaaaaaggaaggaaaggaaattcccaatcaaagagaaagcaaaaaaggaaggaaaggaaattcccaatcaaagagtgggagaaagagaaaaaagaaaagaaaggaaattcccaatcaaagagtgggagaaagaaaaaagaaaagaaagaaaattcccaaccaaagaatgggagaaagtaaaaaagaaggaagctcctggtcaaagaaaccagaagaaatgtgccgagaggtccttggaccagacgatatctgaacaatacagaattgcaccaaatgaacaaaagaaagataaggaaaccatgacctataagt

SEQ ID NO: 290143 - DNA, 381 bp, Glycine max
tagcttgattaagaggtcttctctaaaagcttcctcgtggcttctttgagaagcttcctcgtggcttctttgagaagctgtctcaacaggcttctttgagaagctagatccttatctatccacacccctttattaactaaattaactcccttaaaaataattacggatgaaaataacgcaactaataatcaaacatcatacataattactaataatatatagatatatatatcagggtgttacactaaccctttttgaaaccctacaagatatcccttatataggcccaaagagagagagaacccacaaaatcgcacaacatctctcttttgtccttcctttgtaaaacatgacttgttaggtgagcacagctcactagga

SEQ ID NO: 290144 - DNA, 421 bp, Glycine max
  unsure (1)..(421): unsure at all n locations
tcttcttccatggcttattccctagtggatggcacctcctctcacctcttctcctttatcttccgctgcaactccatggctgaaaatcaccattgaaagacctcattgaagcttaaagattcagcttccacaaaagtttcttaagcaagcttccatcaagtagtaatcaaagcacaagagcttcaagtaggtgctccttaaacctccattaatttttagctttaccttctcctccattgttgtttcttcatttttatccatgtatctccttacatgtcttgtgctaaatgttgttaacatgattttttagaatttccacaaattaaacttgctatagaagctagatttgattttctatggttcanatctcttgttcttgttcttgaaccatgaattgtgttgagtttaagttcctttgagt

SEQ ID NO: 290145 - DNA, 363 bp, Glycine max
  unsure (1)..(363): unsure at all n locations
agcttcaataaatggaccattttaactttggcaacttctttcataattaaaagaccagaaaaatacataataaagaaggggagatggctctaatacaaagccataattatgactatgtgctgtttctttttcatcctttatttttctttcttttttctataataaaatgtgttattggcattgattaaaaaaaaaagaaaaagaatatccacttgaactgttcacaattatttctataaaaaaggagttgaaataagataatagattgttcatcatcctctgggcattctcacacgtttcgagtgtgaattaataactctctgaattttgaaatactaaatcnaatttgatactattgatatt

SEQ ID NO: 290146 - DNA, 416 bp, Glycine max
  unsure (1)..(416): unsure at all n locations
ntaagcacccatgagtgtttcagcaccctagtaccattagtgtatgtagggttctcttcgagccacacttccaagagcagtgtagggggttttgtgggttcgagcgaggggtttccggcactattgaaaataatgtgggacaatgtggatgtcgagggagcggttttcggaagatttcaggcgggaggaaaaagacaagagcgatttcaagaaggaggacaaagagaagagggagggcaaggttttcgagcgcgcgggttgtgaaatgtcaagttttaacttataaacataacaacatcgtttttttaaggataaccgatgttaactgaatatagttaacatcggttttggaaaagccgatgttaacatcaaatagattacatcggttntttaaaaaaaccgatgttaagatcaac

SEQ ID NO: 290147 - DNA, 365 bp, Glycine max
agcttgccacccagctcgcccaggcgagcagggttgcttcctccagaagcaacagccttctggaggaatcttctggagggcccaagtgggcctggttgctatttgcacccccatttttactaaatacacccccctgctttttttttgtgattcttttttggtaaagttatggaaacatacgaattttgtaacgatacttgttttctttccgtaatgttacggaaccttgcggatcacataatcatcccctttctgacttacggaatgttacggaacctcactaattgtgcaacgatgcttgcatttgatctccggtgtgtcacggaaccttacgaattgtgcatcaatattgtcttttgttttcc

SEQ ID NO: 290148 - DNA, 421 bp, Glycine max
  unsure (1)..(421): unsure at all n locations
ttgagccaaaatcttgactcaccataaaccttaccctctgaagcaaaaaaggaaggaaggaaaggaaattcccaatcaaagagaaagaaaaaaaggaaggaaaggaaattcccaatcaaagagaaagcaaaaaaggaaggaaaggaaattcccaatcaaagagtgggagaaagagaaaaaaaagaaacgaaaggaaattcccaatcaaagaagtgggagaaagaaaaaagaaaagaaagaaaattcccaaccaaagaatgggagaaagtaaaaaagaaggaaaccatgacctanaagtggtcttctccctttgattaccaaccaaaatcctgtgcgctagcgactntntcgccccgcgctaaacaaaaacagaaaaggaaaaaagccaaccaaaaatcaaaagccaaaaacacacaaaagc

SEQ ID NO: 290149 - DNA, 382 bp, Glycine max
  unsure (1)..(382): unsure at all n locations
agcttcctttacccctttttcttccccaagctattctaagcacaccaagctacgggatccatgagtctagcagcccccaagcctccattgttggatttttgctctcccttttgcgtttttgttcacttcctacaagtaagtgcactatcccttgattctttggctctccatcgatgtattttagtgctctaattatctatgtttggcaaatttcgtgaggcaattcatgtttgatttgttgaattanggggttgtagggatggccatgagcctatctttgattctgagatgaatgggcatgacacattatccctattccccattttttttcatgtctaaacatgcgcccaccaagtgttcagtgaaatgcctcaattcaaga

SEQ ID NO: 290150 - DNA, 424 bp, Glycine max
agtcctaaatgacatttcaagctaggattatctttctttaacctccatttaccacagaattcagacttaaccttccaactctcaaagcctcattctttttccactcataacatcacattctcactttctaaccctaggttaaactctaccattcatctctaacagttttccataagcaatttcaacatataaacatcacaaacatcatcacaaaaaccctaaaacagagtgggtatgtctaactcatccaaacatggcaatttcaacaagctttcaacaaatgtcttcacaaataatcatcacacagcagaaacctagcaagactacccatcatatctcccaaaaccccatacccacgaaatttaagagagaaagaagtccacccaaacctgaattttcgaagacccactcgtagccacgcact

SEQ ID NO: 290151 - DNA, 389 bp, Glycine max
agcttcaagagaaagatgtcctcagcaaattccttatttccagaagggaattctatcaatagacctccaatctttaatggagagggttaccactactggaaaacccgaatgcaaattttcatcgaggcaatagatctaaatatctgggaagccatagaaatagggccttatatacccaccacagtagaaagagtttcaatagatggtagttcatcaagtgaaagcataaccatagaaaaacctagagatagatggtctgaagaggatagaaaacgagtacaatacaacttataagccaaaaacataataacatctgccctaagaatggatgagtatttcagggcttcaaattgtaagagtgctaaggaaatgtgggacactcttcgatt

SEQ ID NO: 290152 - DNA, 419 bp, Glycine max
tgcttgagaagcttctatggaggttggatctttgagcttcattggggttcttcaatggtgatttttagccatggagttgtagtggaagataaaaggagaagaagtgagaagaggcaccatccactacggaataagccatggaagaagaaacttcaccaccaagagagtgtcttggataagaagcttaaagaggaagcttcaatggaggaagagaatgagagagaaagagaaagagaaaaagtggcatgggaatgaaggaaaaacagggagagaagttgaactttgaagtttgtctctcaagattctcattcatcaaagttgccacaagtgttacacgtgcttctatttatagcctatgtagcttccttgagaagcttccttgagaagctagtgttacacccctccaatagctaagctca

SEQ ID NO: 290153 - DNA, 354 bp, Glycine max
cgcttcgatggcaagctagtaacacggcatgcaaggtacaaaggcggagatgatgatgttaatggtattaacggcaaccacaaatgtatattatgactcaatgactgttatatagatttatatgaaatacctatacaaggactagtatccactttgttaaaatctcaagtgataatatattatggtctagtgatgcttcggcactagattaaaattcttataattaaagcgaccgatcgtttacaacatatgctcctgtatcagactcgcatttatcctgaggcattacatgcgacttggagacatgtgtcaaccctccacgttgagacaccctgtaccccccacatatatgta

SEQ ID NO: 290154 - DNA, 208 bp, Glycine max
gctatcagagatacagtctgagctgatgagcactctgctagcatgaggccatatgcgaggagggtgctaatttgatagaaagatctcagactagctccccacagcttgtgcaccggaacgagtggcttacttgactgaaactgagatacctgcacaacgtatgaacttgtagagccaatgatgctaattgcatttactgtgactacca

SEQ ID NO: 290155 - DNA, 378 bp, Glycine max
  unsure (1)..(378): unsure at all n locations
agcttgtctctggaaactctgctggcaccgacactgcctattatgtaagttcttcctttaactttattactattatattattgtagaataataaaaatactaataacccattaatggggtttactttcttttatccctttattataaacactgtcattcaaagttaataatagaaaacatgccttttgtttgcatttgcatttgcagttatcttcaaaaggatcaacttgggatgaaatagactatgaatttcttggaaatctgagtggtgatccatacatccttcacacaaacgttttcagccaaggcaaggaggacagggaacaacaattctatctatggttngacccaactgctgatttccacacttactccatc

SEQ ID NO: 290156 - DNA, 407 bp, Glycine max
ggaacctgaatgtcacaaaacacgtccttaatatggataagaaattttaaatgtaactaaatttcagattaagtaataatctcgcaaccaactcaaaagattgaaatttattaaaatacataatgatcttgtcatagatacaaactctaactacattgattaaaggaatactttaatattgctgtaaaaaaaaactttaatatatcgttgttaacttaaaataataaacatcatcatggtgatttttttggttattgggatccaaaaatatcatggtgcttgaaaggtttttcgacccatcctgatatgctgagtggttgtctttagattcagccgggtaatgggccttggtagcaaactccatatttttatttggcaaataaaatgcagcaaccctcatgtccacc

SEQ ID NO: 290157 - DNA, 368 bp, Glycine max
agcttgcttctacaattactagtatgggactcatgcgtatgcacgagtcgctccgctatatttttttgttttggtattaaaattgtgcctacacacgggtaagccgtgagaattgacaatataattatatttgtgtcattataacactagacaatattatgatgtataactaattgagaacaaaaatgaatatggttaaaaaaattatgattaacacatagtaaaataactattatataagaaactgttaattaacaaagtcataatgttcaagagattgtttttagcaaaaacatgcccacaaaataaagtgttaatttacaaatattaacaaaagtcagaataatattaaacttaattcattaaca

SEQ ID NO: 290158 - DNA, 416 bp, Glycine max
  unsure (1)..(416): unsure at all n locations
gcatccaataccctgatgaggatgtcccatatgttcttaagactggactgattcatttgcttgcaaagtttcatggccttgcaggtgaagacccgcacaaacatttgaaagaatttcacattgtctgctctaccatgaaacccccagatgtccaagaggatcacatatttctgaaggcttttcctcattcattacagggagtggcaaaggactggctgtattaccttgctccaaggtccatcacgagctgggatgaccttaagagagtattcttagaaaaaattttccctgcttccaggaccacagccatcaggaaggatatctcaggtattagacaactcagtggagagagcctgtatgagtactgngagagatataagaaactatgtgccagttgcccncaccatcagatttca

SEQ ID NO: 290159 - DNA, 378 bp, Glycine max
agcttataagaacaaaattgcctcaatcatttccaaatatgcatgtgaattaggaagcatcaacaagaatcaagccaaggctattgtgcaagcaatcaatggggcaaaacacaccaaatgattatgatgatggatggctcaaattctcacaaaggtaaactcatcactttcaaattgagctttcaaaaatatcatgacatgtagagaagaatcaagaatttcaagtcacaaaatgtcaagaacttttattttcaaaacaattacccatttcttgaacatatcctataattcaaagaaaaacatgcaaagtcgtacatgcacacaaaattaacccataatattaaactaacaaaccgacgaaactaccaacattaacaa

SEQ ID NO: 290160 - DNA, 429 bp, Glycine max
cccttatgctgcaaatatttacaatagacctcctcaacctttcagctaaatcaaccacagcagaacaattatgacctttccagcaacagatacaaccctggatggaggaatcaccctaacctcagatggtctagccctcagcaacaacagcagcctgctccttccttccaaaatgctgctggcccaagcagaccatacattcctccaccaatccaacaacagcaacaaccccagaaacagccaacagttgaggcccctccacaaccttccctcgaagaacttgtgaggcaaatgactatgcagaacatgcagtttcagcaagagaccagagcctccattcagagcttaaccaatcagatgggacaattggctacccaattgaatcaacaacagtcccagaattctgacaagctgccttctcaagctgtc

SEQ ID NO: 290161 - DNA, 372 bp, Glycine max
  unsure (1)..(372): unsure at all n locations
agcttgtcaaangtcattctatgcttgaaactttatattttagttcattntggtagtaaatacatttaccaatggaaaatattacggatattgtgttttttgcattcttatggtggtattcatgatgcagaccttccaggagtcaatagttgcagccggtgctggattagccttagttgactcagtggtgatctcttaacctggcatgtccatctcttggtaataatctgtgtgtgtgttttggggaggggtaagtgagtggatatggatatgtacatatctacttcttctggtgacttcatactgganaggactatttgtgtgtgtgtaccttntttgtatctttaagcttgtagttggtagagggggtta

SEQ ID NO: 290162 - DNA, 382 bp, Glycine max
  unsure (1)..(382): unsure at all n locations
cagcacccttttgaaggtggaatccttgttggcagtgccaagcaactgagaagacaaatagagagaagtggaggtgccattggccattccaatcccaaccatgaccacagccatgcgtttgcactgcttggattggatttcagggaggagaagcacagattgtagtacttggtgttcttgcaggttttttctatcaaactgtcatctcctttcacaaaagcgtgtggttgaaagagtgatattgctagcaagaggagagatagatagaagatcttagaagccattgagatagcaaaagaagaataaccaacaccgataatttaagggactgcgtatntcanaaaggtttttagagatttcctatttctgtttttgacgtgga

SEQ ID NO: 290163 - DNA, 367 bp, Glycine max
  unsure (1)..(367): unsure at all n locations
agcttgtagaatggctagacatgatacatgtcagggtttggtttggttcaaggataaaagggatgccccacattatttccatgacacaaatgcaaagatgatgatttggaaattttatgcaaaactggtcatgcatgcacctatgtggacgctcaagtgtcaaatttttatggtcatgtgatgctagggctcangattcatttcctctattttaaatcaacccaatgtttccaaaatatgctcttttatcaatttatgcatttatcctagttcatttcgtgcgtccggngaaattttcacagcattcacccttcaggtgtagacacgttttttcttcaaaaatcggttatgatctatgaattgtttt

SEQ ID NO: 290164 - DNA, 420 bp, Glycine max
  unsure (1)..(420): unsure at all n locations
taatctgcagaaaaatattntctatttctgcattgctttcctaagtctgctgcacttagctcctgagtaaaattttataaggtgcgctaaacgcccagtcaaaatttagtgttattttttctgtttttgttgaaaataacctatgctaatctcttgtgttttatcttatattttgcaaatggcatctaagaaaaggaaggctccttctacacctttccaagtcagatatgatcggtctcggttcacatctcaagaagcttaagagaggtacaccgatattgtggtgcctaggaaactactaccagagaggaatgtggtagtttatttcactgagttcgatgagttcaaggaggaactcaagagaagacactgggatgaagagttgacttattntactgatggcagcatagatgtcaccat

SEQ ID NO: 290165 - DNA, 346 bp, Glycine max
ggaaaactccctgaataaaccctacctctaatagtgaaaatcacgacaaattgaaagacatacaacactcctgcgaccaccggaaagatatcgataaaatactctggctccgaacccagactgttcagaaccatcctttacacatgtgcgaagaacaatacaatcgagctcataatgtgcgaaccaacataataatcccacatatagttcttctctacctacccactatagcaatctacgtccattcagacaccatacgcacacctcacttcatcatatgagcaaccattccacccttctcaaaagactccaacactatctccttcacacctttataaacaccata

SEQ ID NO: 290166 - DNA, 402 bp, Glycine max
  unsure (1)..(402): unsure at all n locations
tgacttanacctagtatttttttgtcctaccattaatancaacttgatttgttggaagatcgcacactaactaaaatatgtgattgtcttacaaatagatatatcactcaaaactttttagttttttctctcaaggtatacaaggtattttcagagcttagtatctttacaagaatttatagaaatctttacaagaaataatgaaagaataattcatctaaatgatatgtgtcttgtttcttccaagtattaggggtggataaacggacccaggtccatggactggcccgcggttcgcgcgggtaacataccaattntttaatacagttcatggttatgtcatatttttgggcctgccccgcttaacccgcagattatgtgggtttggcccacgggatccgc

SEQ ID NO: 290167 - DNA, 360 bp, Glycine max
  unsure (1)..(360): unsure at all n locations
agcttggaacatatgacatttatgctccagcttgagagggagtgttaaagatgagatttaattcattgtatataggggaagttagaaactgtatagcagatccgtatggatctgattttgattcttattctgtatctgtaattactttctctaaaaataaataaatccatcatgtgtgttcttagacacggactctctaaatcttatagctatatcataattgaaacacttaatagaagtgccaaaataagaagtggtgcatggaggtcacctanggctagtggctgccttggatggtggctgcacaacaggatgactggattcttgactcttgatcatgcccactggacatacgctcct

SEQ ID NO: 290168 - DNA, 402 bp, Glycine max
  unsure (1)..(402): unsure at all n locations
ntgaatgctctattcaatggagttgacagtttatcttcagactgatcaacacttgcacagtggccaaggctgcatgggagatcctgaaaaccactcatgaaggaacctctaaagtgaagatgtccagattgcaactattggccacaaaattcgaaaatctgaagatgaaggaggaagagtgtattcatgacttccacatgaacattcttgaaattgccaatgcttgcactgccttgggagaaagaatgacagatgaaaagctggtgagaaagatcctcagatccttgcctaagagatttgacatgaaagtcactgcaatagaggaggcccaagacatttgcaacatgagagtggatgaactcattggttcccttcacacctttgagctaggactctcggata

SEQ ID NO: 290169 - DNA, 365 bp, Glycine max
  unsure (1)..(365): unsure at all n locations
tgtcgaggctatggcctgagcaaatgccatattggcggcacggaattctctcacatgacctacacgctataatggtgaggggtacctcttctgcaaaacccgtcagccaatcttcattgatgcacgctatcgagatatatgggaatccacatgtatagggccgtatatacactccttagtacaattagtcttcatcccagtgagtccatacaatgaacgcatatccatatgagcacctctagaatacatgccgacgaggatagaacacgagatcaatactactcattaggcaaacacatagtaacatctgtcctangaatggaagaatacttcaaggtttcatattgttagagagctaaagaaag

SEQ ID NO: 290170 - DNA, 397 bp, Glycine max
tcattaagaggcttcctccagatgcttccttttggcttcattgagaagctttctcacgaggcttctttgtgaatctagagccttatctatccacacccctctattaactaaattaacctccttaaaaataattacgaatgaaaataacgcagcaaataatcaaacatcagacataggtagtaataatatatagagatatatatcagggtgttacagctgctactaagactgcgacgccttttgaaaactgatattggaaaagtggagatataaaaacttcagcactgtagatggaacagataaaataataaaaaatacactgacactccatattggatcgaatggccacggactaattaagaaaggcggttgagatgattatgaacgtgtcttgact

SEQ ID NO: 290171 - DNA, 384 bp, Glycine max
agctttacaagctctatatccagtaggatggtaaaacttttcattttaagaaaaggaaagaagttgatatttaaattattttgagcttcttttcatttttcaatattattgattgaagtttgagagtttattttgcataactttagtctacaactttgactggttacattacctataacttgctttttgttctttttaggtttaaagttaaactctagatctatgaacttagtttatggtgtaaaccaaggctagtacactacactttgaggaagttcaaagccagctaaaagtcaattcaaactttgatacaaatgtacccagaataaggactgaaactccttctgtaactgcctatatcagtaaatattacaaacatcaact

SEQ ID NO: 290172 - DNA, 410 bp, Glycine max
tagcttcgaaccaaaaaaacaacacatttctattttgtgagtgtatgaattacatactgaaaattttacaaggataaattccgaacattttgatatttataagaacaaaaaatatattttagccttgtttttattgttaaaaaaaaaaaagagagaaatgctactaacattttctttaacacactccttcatacacactttctcttatgtgttaaaatgtatttagttgaagaacaagttccacaaaatcttgaacctaccaagtgtgatggttgggattggtatgagcgcgaacatttgccttacacatttgacgtgactgtcactgcaatggaagatgcccaacacattcgcaatatgaaagtggatgaactcattgggtcccttcatacctttgagctacgactctc

SEQ ID NO: 290173 - DNA, 379 bp, Glycine max
  unsure (1)..(379): unsure at all n locations
agcttgtagaatggctatacatgatacatgtcagggcttggtttggttcaaggataaaagggatgccccacattatttccatgacacaaatgcaaaaatgatgatttggaaattttatgcaaaactggtcatgcatgcacctatgcggacgctcaagtgtcaaatttttatggtcatgtgatgctagggctcaagattcatttcctctattttaaatcaacccaatgtttccaaaatatgttcttttatcaatttgtgcattcctccaagtccatttcgggcgtccggagaaattntcacagcattcacccttcaggtgtagacacgttttttttcttcaaaaatcggttatgatcaatgaatttttttttttttttaa

SEQ ID NO: 290174 - DNA, 418 bp, Glycine max
  unsure (1)..(418): unsure at all n locations
ntggaaagtgttatttttcaccttctcgctaagccaatatgctggcttagcgagcatccgctaagcgcaacactcctggctaagcgcgaggaagaatccagaagaagatgagttgtacagattcgctaaccgcaccacttcatctctctaagtgcaccgctttagttcattcgctaagtgagaaaggcgccctaagccaaaaatcactaacatgcgctaagcggtccatacgtgcgctaagtgcacgagcacaaacaaggccacctatttaagccttaaattagattttgtgaggggagtgtggactgggattcagagctttacatgtctagggtttctagagagagaaagatccaagttccagagagttntgagagattntgttgtgtgaagatntgcagagaccggagctcgaagc

SEQ ID NO: 290175 - DNA, 386 bp, Glycine max
  unsure (1)..(386): unsure at all n locations
agctttgagccaaaattctgactcaccataaaccttgacccagggtgagaatgtcaatccttaccctcggaagcaaaaaagaaaagaaggaaaatttccaatcaaagagaaagcaaaaagaaaagaaggaaaatttccaatcaaagagaaagcaaaaagaaaagaaagaaaattcccaatcaaagaatgggagaaagtaaaaaaggaagaagaagaaggaaagaaagctcctgatcaaggatcgaaagaaaacagaagaaatgtgcagaaaggtctttggaccggacaatatatgaacaatacagaattgtcaccaaatgaacgaatagaaggaaatgaaaccatgacctanagtggtcttctccctttaattgccaaccaaaatc

SEQ ID NO: 290176 - DNA, 425 bp, Glycine max
tagccatggaactaaggcagaaggaatgtaccgagccattcaagctgattaaagttatatggagtccacccttgtccctcccaccatcgaagccatcggacctcaatttgcatgcatcggacctcagttgagttttaagaggagtgtattgttaggatataaggagaagaagagttagttaatatagttaaactactaatgagttagttagttagagagatttattagatataaatagaggaagaaggataggagagaaggggatcttatcatttgtagattgagcattagctctttgtgaaaggagaaatcctttgtgaaagggaaacccttggaggagagttttctctcctattttctgttcttttcttactagtcaataaaatcttttattttctttctcatttcaattcttggttcttaac

SEQ ID NO: 290177 - DNA, 378 bp, Glycine max
agctttatgttagttaaaggaacttctatacgtcatggttcgagcacagaaggagcactttaattttaagcatggtctttcacgatggaaaggcaattcagatttccaaatattataatttgtagtattaaatatgcatggtgaattgtcatgtttatatatgaaactcattttttgacttttgaagagcttacattcaactttagatgaattgacactcgactaaattgcctacttaatgtttttatgttatagaatgattattataatataaaataaataaatgatgcaaaataaaaaattcaaatatatataagtttaattttgatgtaccataagtgtaaaaaaaattatattattaaccaaattatatattat

SEQ ID NO: 290178 - DNA, 333 bp, Glycine max
aaactctgccgtgaccgcagtttcggcccccatagtcatggccctccctcttccttcatcccttatgcggtgcctgaagatgaggtaaaccaatcgcatctctctctttcactcctcgtttcacttatcaaaggaaatccgaatctaatgatgcgtctgctctaagctgagacagccagagatttggatgagatatttccgattattgatccgaaagcttaggcgaccagcaagcacaatatctttgtcagtgtcttgaggaagcggctccaccatcctgggtagacatttcaatctggaagattctgggacattgcattaatacttatctct

SEQ ID NO: 290179 - DNA, 121 bp, Glycine max
accgggcaggcctataggagtcgaatatgaataccgtgacgctttgcagatctgtcacgtgaccttacaagattccatctcctaataccgaggccaaaatgaactcctgcttacatcatgt

SEQ ID NO: 290180 - DNA, 422 bp, Glycine max
tttggttcatatttcgacgaccaatccttcctattgtacttctttgttgaagaaattttttctgtgattctttacataaagattcataaaatactggatctccaccaacacaagcaaatggtcgataaaactccaaaatggcattttctttcgaccctattatttttttatccttatcatttaggaaagaaacgaaaatatcaggataacaaacattctctagaatttcgcttaaattcgaacccatagctgatgataaaactagaatagatattttctgtttcctactcacacgagcccatatccttgcttttctatcaatctctaattctaatctacccccccagtctgatattatggtgccagtatagaccgaaattccgctaaggtccaattctgaacggtaataaataccaaggctt

SEQ ID NO: 290181 - DNA, 374 bp, Glycine max
  unsure (1)..(374): unsure at all n locations
agcttgcgtgtctgaattcgtagcaaagcacgtttaattttgagaaaatgagaaattttttccaaaaacagttgaaaaccgctaaaccatcagttttcacggttttacaccggtttaacggtttcctgtccggattgttaattgccagtttcagagattatccggaccaaatgacaggccgattttcggttcaaccgatagaactcggttctgtccaattttcaaaactttgatgaaatgttaatacattataaaatgaactangcatgcactntaaacggacatccatttatgatctattatcatatatgtttgtgaaattctataataattattntaaaaagagatattaaggatgatttatgaatgtaagt

SEQ ID NO: 290182 - DNA, 427 bp, Glycine max
  unsure (1)..(427): unsure at all n locations
tttgccatagtgaaacaagacccttgattaatttgaatttntgaagatttgctagggaactagtcatgaccccttaagtgataaaatcacttgtcacacaaaataattagacagcataacgaatgcaattatagctatctaaataaacataacaaacaatttgctaggggtcaaacacccccaaacccaaaccacaacgcgtatagataaaaatggcaatatgcagagatatatataatagaaaataaattttcatgccacaaatataatttccagagttcacactctgtctgtcttatcattcaacaacaataaaaataaatatgtgtataaaattatatgtgcgtgcatgcatatcaataattntatcatgagagaatcatcacaatttcaaaacatgcagctcaacaatataataacaaataaa

SEQ ID NO: 290183 - DNA, 377 bp, Glycine max
  unsure (1)..(377): unsure at all n locations
agcttgccgccacggagttttccgactatgctcttgtgtggtggaacaagctacaaaaggagagagcaagatatgaagagccaatggttgatacatggacggagatgaaaaagatcatgaggaagcggtatgtgccggctagttactcaagggacttgaaattcaagctccaaaaactaacccaaggcaacaagggggttgaggagtatttcaaggaaatggatgtgctcatgattcaagcaaatattgaagaagatgaggaggtaactatggctcgatttcttaatggtttgactaatgatatccgtgatattgttgagctgcangacgttgttgaaatggatgatttgcttcacaaagcaatccaagtggagcaa

SEQ ID NO: 290184 - DNA, 426 bp, Glycine max
taggctaaattaagctaaactttcgtaagctacttgtgctgagtctagtcttacatgagggatctgcagacaaatagctgttatttttgttttggtagctatagttgttatttttggctgaatgtttttgtggtcactttttttgatccatattttgtgggaaaaatagttggagcccttagtttggtcagatttgaaagttccaaaaaagtagcaaatttgatttttgtcaaaacttcaaacgaccataacttttgctccggttatcagaatcacaattattatatatgtatttggggtaaaaaaaaatttcccatgccgtggcagcctgccataggctggctgaggtctccttcttccaaaaattgcgattctgtcaaaaattatttattttccaagtattattctcttatttttcttaactta

SEQ ID NO: 290185 - DNA, 272 bp, Glycine max
  unsure (1)..(272): unsure at all n locations
agctttctcaatatttgtggatngatgctcttaagacgactgcgtatatatggcaccgagttccaaccaacgctgacgcatagacacctcttgagttatgcaaaggatggaaaccaagtgtgctacatatactcgttaggggatgcccgactgaagcaagaatccataatgcacgcgatatgagactagaccctaatactatgactaggcatttcatcggatatgcggaaaggtctaatgggtatatggtctattggccatcccacaacact

SEQ ID NO: 290186 - DNA, 391 bp, Glycine max
  unsure (1)..(391): unsure at all n locations
tatatataagagttttctaataaatctcatttgctataatgatgtaaataataatttctagtattttaaatcatgatccagttatagaagcagttactagaaggtagatcagttacaattttcaccggtcaggcaaatttccattacattttgtgtgactccagatgatattgattgtccctatgctcgatccttgatcagcttacaggttatgactcataacctgattttagtggtcatactcatatcattatcattacatgctaattcctcatggttcatgatgaagtctgtatataaaaatactacatgcatgtatgtgtacattgtggaaaaatactgccaacaccttatngtgggggaaaagtcttgaaaattatgaccaggcctt

SEQ ID NO: 290187 - DNA, 360 bp, Glycine max
  unsure (1)..(360): unsure at all n locations
agctttataagcgcgggttcgggagacaaaggtcaagcgttcgcgatatgcgaagatgatattccgagtactttggatttggtacgaccatgccctcctgatttccagctgggaaattggcgagtggaggaacgccccggcatttacgcaacaagcataatgtaaacctttacggttttaaaagctctatagttgggcctaggctttagagtttttccttttgttaaggctttgtgtcttttgtttttgaatttataatacaaggatctttcttcatctgttcctggtctctacccattctcattcacttgcatgtttacttctttntctgaaacggcagatccgatgacgagtcccccg

SEQ ID NO: 290188 - DNA, 408 bp, Glycine max
  unsure (1)..(408): unsure at all n locations
tgcatttggagaggttccatcaaccgccctaattccttgatgctggtggtatctaggcctttaaccttgacttggtaaaacctcttgccggtttgattagtccccatgcttactaaagtgagacaaaaagctggtgcaaatcaaaactccgatatctcatgggtgggatggatgaatgcatgaaggaatgcatatgacacagctgtattttaagaatgcgggtgcccgggacattgtctcctttttagacacaacgtctaggggtagcaaagtgccccaatgtatgtatttaaaacggtgacccggaccctccattgattntgtctatagaggggatcaagacagaacccctatgcaatgcatatgcaaaaggcgcaatagcatgaaaatattcactgaacataagca

SEQ ID NO: 290189 - DNA, 368 bp, Glycine max
  unsure (1)..(368): unsure at all n locations
agctttactagctagatagatatttgtcaaattcctaatggtcaaacatcattctttagcacgaatgcatattcaattcttgtgttcgtgttcatatatatattacactggcatacaatgcatgtttattttctttaagatgctgccatctgtccaatttgtttgctatatatgagattcattaaatgtttgggtaaggcaattataccgttcccgcgagtcataccatttgtcattggtcatatgcatagattaattcataaagttttttttagccaaatcattntatagtttgtgttgcagattatataatgttttagaaaaaaagtaaatattntaaaatatatattattttactaaattaatat

SEQ ID NO: 290190 - DNA, 345 bp, Glycine max
  unsure (1)..(345): unsure at all n locations
ntgggccattaaccaaaaaaatgtatgtttgaagtattatttgattgcctttctaaacacaatatgtttgaactttgaagtacacaaaaggatgtgaaagtgatgcaaacatatagcattgaagcataccaagtaagtaaaaacgtactccaatatgaccagctccagaagaaagaaatagctccattaacttggttagaagacattgtctgcatgtgtcatagaaacactgttattaatgaaaccattgcacatatagttcttcaattaaccacaattcttttcaacttttaataatataaagttccaaaaaccttcctttcaaaggaaaaggggggggggggg

SEQ ID NO: 290191 - DNA, 388 bp, Glycine max
agcttaatgtcatagttttcatggtgctagtgataacaataatgataatattagtaatgatgatagtatagtgacaataatgataagatgatcatgatataatagtgataatggtgacaaaaatagcaatagtaatagagatgatgataataatgataatagtaataatgatgacaataacgatgataatcgcgaaagtattaagtatacctttattttattttaggtttcattacttatttgatgtcactatttattattgcattcaatttggtctttacttatttaaaaaacaagtaattcattaggtcttttttgttcaaaactatttatttatttatactggtttaagttaaatcaacattattttttttataattaatgcttg

SEQ ID NO: 290192 - DNA, 421 bp, Glycine max
tcaccaccaagaaagtgccttggataagaagcttagataggaagcttcaatggaggaacaaaatgagagagagtgacatggaaattgaaggagaatagggagagaagttgaactttgaagtgtgtctcacaaatttcttattcttcaaagttgtgacaagtgttacacatgtttctatttatagcctacgtcactaactaaatgaaattcacttaatttcatgtgaatctaaaagaaatattccaagaatatgtcaaaggaatcttagcatattccctttagatgccacaagcatgggaggtgtgactctagcacatgggaaacttcattgagaagcaaggaagaaagcttccttgagaagctagaggttagctactgacacccctcttatagctaagctcactcccttgccaaaatggac

SEQ ID NO: 290193 - DNA, 385 bp, Glycine max
  unsure (1)..(385): unsure at all n locations
agcttctcctgcaattctgcaaatgatcaactgggatcccaatcgctctctcgccctcgccaggtctttgattcttctttccttatttcatgccaccacaccaatcctattctgttcttttccttcatatatcttattttcttttgctttctctgttattctacttgctcaatcctctttgcgtctttaatttatgttttacaactttttcatgccattccccgtagacggtgaaaaccatgccattcgttacaacgatagaggaggatgtcaacctccaattggactgaagggactctaaccaaaccgtaatattccgaggtgataaagntctcattctatatattatatgacattcttgttatataattganataatagaaca

SEQ ID NO: 290194 - DNA, 428 bp, Glycine max
tgcatgatttacatctccccctttctcaagcaaattcttcttgatatcatcaaaatcttcatgatttacattctcccccattttgatgatgacaaccacctgtaggttagtagcaacaacaaagaaaatatctatttgcatatagtttactcccccttggttttacaatgattgcttatatgagacaattgaagatttcatatttttcatatataaaaagttgtctcataaaacaatagataatttttcttactattttatcttttatctttctctccccctttgtcaacatcaaaaacaaatcatgaatagcgaggagaaagatgtttgttgcaatgtatgagaatcaagtgataccaaaaggtattaaatcaatcattcaatattaatcaagcaaaaacaagtgcaataacacatcaatcacacac

SEQ ID NO: 290195 - DNA, 371 bp, Glycine max
cgctttgcacgcacgtttactagcattttctagcacgaaaccgtgatacctcatgccgtactggaggcctctgactccttacacaagcggtggggggggtctaagttcagagacctatgatgctcgcagtgtgtcataaagaattctactaaactagtcatgagggacaactgtgcacataactgggactttatatgatgctctattcaagacatttaagaacgttatctttgttgatgagagatactacttcgcattgcacctgtccacttgcatgcatctactttggctccatgacgagatcacgcgtcatgagtgggaggctacagactatgatgaatgatattaagtgatagcttaacctaaccact

SEQ ID NO: 290196 - DNA, 414 bp, Glycine max
tgtatgctatgcaatgattggatgtgcaccaaagactctattatatgatattaatgctacccttagctatgttggaggtggaacaagaaatgggatgaaatatatatgcaaatgacaatattaccctgatgctagatactaattatcatatatattccatcacttagatgatctacttattatactaatttatagactgaagaagcacacgatattatggagatttccatatatagtgagatgctctctggatgcttccgctatacatcaccactttgtgaaaatgtgatactggacgtcagtgacatgaccaaggaaataatatgctgtaaccttactacatctcttgagagtacaatcattctatgagttgtcatagcactatgtgcgagactctgagcatatcatacccat

SEQ ID NO: 290197 - DNA, 389 bp, Glycine max
agcttgtgctcccatgttacgggctagtagtttgcttttatcagttcttgggccaccccctgatattggagggcgaccaactgtgcaagtacaaccagaggaggaggcaggtctccagcttcgacgaggaggctatcgcatagctactatgcataccagggcaagatttcgctcagaccgctgcaaggagacgagtacggatctgcataccaccacaactctgatctcctcctgccgaagagttagctggtttatgccatcatgacataggtaagtatgcacgtggctcaattgatttctaatgtcatttattgtttgcagggattgcacccacaagacactcagtgggcccggagaagtccaacagggtcctggggtttccagctctg

SEQ ID NO: 290198 - DNA, 400 bp, Glycine max
tctcccccaatttcctataaatagggggagaagtgaagtggtttagggttcagccccttatgcacttctttctctttcgaatttgctttgaaaaattgtttccgtgaagaaaatccaagccgaggcgctttcgtaacgtttccgtgaggaatttcgcgaaggttttcgaccgttcttcgacgttcttcattcgttcttcagcgatcttcagtcttcaacgagtaagtacctcaaaccaagcttttcaattcattctatgtacccgtggtggtccacattgggttgcatgtattcttattctcgtttcatttactttctatacccccttttgacgtgcttaagccattttatttaagtcatttctcgcttaacctcaaactaaaataaatctccaccgatc

SEQ ID NO: 290199 - DNA, 373 bp, Glycine max
agctttcaaaaccggtcgattgaatcctccctccccaacactctcgccatcgcattgtaagttgccccatcttgcttaaacatcccactctcctccaaccaccggaaaaatatcaatgccttcgctggctccgaagccaaactctccaaaaccatcttaacgacatcaccggagaaccctacattcaagtccttaatctgcctctcaacatcatcatcccacacattgttcctcacaatcctacacactatagcaatattcttctcattcaagttatcatacaaacccttcaacttcgccacatcagcaaccattccacccttctcaaaagactccaacactatctccttcacacctttagaaacaccatacc

SEQ ID NO: 290200 - DNA, 412 bp, Glycine max
  unsure (1)..(412): unsure at all n locations
tgngaatggcttataccactaaggtgcccctgcacacaaaataactttggccttgaaggttggacagagctaacctttaattagtagaatagacatgggtaggatgaaactccttcctaccagaggagcagcccatgagctaaaaaactaggtagaacaaagagctgaaaaatatctttcaggaattggcaaaaatgatgcatcaatattacattcacccatattagtgtttaagtgaagaatgatagcaggggggaaagatagtaagaagtgtactagtcagataaagcaaggagagaagtagtagatttcatactagagcactagtgtaaaagccacgatccccacataattaggtatagagatactttggatttgaaaactttacacgtatgcatatatgccaagttga

SEQ ID NO: 290201 - DNA, 370 bp, Glycine max
  unsure (1)..(370): unsure at all n locations
agcttaacaattccaactacctcctttggtgtcaacaggctgaacctgttctcaaaggacatcacctttttcatcttctcactaaactgcagattccgactcgatatctcaccattgctgattgtgatgctggtgttacttcgcctgagttcttgctttgggagcaacaggatcagctccttctattgtggcttcaatctactgtttccggcgaggtgcttccgcggcttgttggttacaaaactgtgtggcatctttgggacaagctccacacacactnttactccattgttcgtgtganaaaacggcaactccacaatgatttacgtaacattntttctaaacaatagttcaatttctggctatttgt

SEQ ID NO: 290202 - DNA, 414 bp, Glycine max
  unsure (1)..(414): unsure at all n locations
tgactaggcgagttgattttagccttagtttcactttagttattaatcaattcgattaagaatgagaaatcccaaagagaaaacgtccgattgattttccgctttattttactaaaagatgtttttcgattatttatattattttttacctctttttgatttccatcgtggttacggcacgaccgaacggtcggaatttattttaaccgaagttaatggataatacaattcaaacgttcggtggaaatttattttatttttaagttaagcgagaaatgacttaagtaaaatggcttaagcacgtcaacagggggtataaaaagtaaacaaaacgagaataaaaatgcacgaaacacaatgtggaccactacgggtacatagaatgaatcgaanagcttggttcgaggtacttac

SEQ ID NO: 290203 - DNA, 379 bp, Glycine max
agcttggagaggatgcttcaatggaggaaaagaaagagggagagaaagagaaagggggggagcacgaaattgaaggaagaaaaagggagagaagttgaactttgagttgtgtctcacaagactctcattcatcaaagttacaacaagtgttacacatgcttctatttatagactaggtagcttcattgagaagctttcttgagaaaacttccttgagaagcttctttgagaaaacttccttgagaagctagagcttagctacacacacccctctcataactaagctcacctccttgaaaagcttccttaagaagattcctaaagaagccagagcttagctacgcatacctctctaatagctaagctcacctccttgaga

SEQ ID NO: 290204 - DNA, 421 bp, Glycine max
tcaagaattaatggcctcatcaaactacttgttcccttaggcaattcaattaataggcctcctatttttaatggagtgggttaccactattggaaaacccgcacgcaaatcttcatagaggctatagatttaaacatttgggaagccatagaaatagggctttatattcccaccatggttgctggaaatacaacaatagaaaagcctagggaagattggagtgaggaagaaagaagactagtacaatataacttaaaagccaaaaacataattacatctgccctaggaatggatgaatactttagggtatcaaactgtaaaagtgcaaaggatatgtgggataccctcaagtaacacatgaaggcacaacaaatgttaaaagatctaggataaacacacattaactcatgaatatgaacta

SEQ ID NO: 290205 - DNA, 88 bp, Glycine max
agcttctaaactttatacaagaatgaagctctgataccacttgttggacaagtggcctcagatatcttaagaaagggggggggggggg

SEQ ID NO: 290206 - DNA, 428 bp, Glycine max
gcttctcaaggaagttttcttaagaaatcttctcaaggattctacctagtctataaatagaagcatgtgtaacacttgttgtaactttgatgaatgagagtcttgtgagacacaactcaaagttcaacttctctccctttttctccttcaatttcgtgctcccccctctctctttctctccctctttcttttcctccattgaagcatcctctccaagcttcttatccaaggctcatcttggtggtgaagctccttcttccatggcttattccctagtggatggcgcctccactcacctcttctcctttgtcttccgctacatctccatggtggaaaatcaccattaaaggacctcattgaagctcaaagatccagcctccatagaagccgcacaagcaaccttccatcaagacttacaactcttctag

SEQ ID NO: 290207 - DNA, 331 bp, Glycine max
cgcttgtcgaggatgttttcatggttgaaaagaaattgagaacgggggatcactatattgggagaatacacgagcgcattatatgcaactctgaatggtatctcatagcactttccttgatcacaggtacagcattggcatcacatgcttcgatgtatatactaaggaactttcctgagaagctttcataataatacttacttgacaagcttctttgagcaaaagtccttgagaagactgagtttagctacactcactcatgtatacactacgctcacctccttgagacacttgcttgttaagctagagcttagctacacacacccctcta

SEQ ID NO: 290208 - DNA, 421 bp, Glycine max
tctcaaagggtatgcaaaaaaaaataatccaagcagttgccaaattactacaagagtctcttagaagccctccaaaacctaacaaatcaagatttctaagtcattaaaatttcgagtaaataagcaatttagtccctgactttgtacccctgttgcatattagtccctaacttaatgaaaaatccaaaatagtccctatctttgcataagtgttgcaaaatagtcattgtcgttacattcaaaggtaacgtcgttaatgaggtgtccacgtaatgctaggtagactaatatgcatctcatgctgcttacacttctctctctctctccgctgctcattctcagcctcttatcaccaatcatgccgcttccacatggaagaaccccaacccaagccaattctacagaaaccccctagttaccg

SEQ ID NO: 290209 - DNA, 357 bp, Glycine max
agctttgagcaaattcaaacgacaataaatttttactcagatgtccgattgtgtcctgtagtttatcgagacgctcgtgattgaaaatggaagttcgtcgcaaattcaaaagacaataaatatttacttggatgtccgcctgagtcccataatatatcgaggcactcgcaattgaaaacggaagctcgttggaaattcaaaagacaatatatttttactcggatgtgctattgagtcccattatatatcgcgacgctcataattgattacggaagctcgctggagattcaaccataataactttttactcggatgctcgattcattccttaagtatatcgagacgctcggaaatcac

SEQ ID NO: 290210 - DNA, 392 bp, Glycine max
  unsure (1)..(392): unsure at all n locations
ttgagcaaattcaaacgaaaataaattntaactcggtatgtccgattgtgtgttgtactatatcgagacgctcgtaattgaaaacggaagctcgtcgcaaattcaaacaacaataaatttttacacggatgtcggattgagtcccataatatatcgagatgctcgtaattgaaaacggaagctcattataaattcgaaccgtaataactttttactcggatgttcgattgtgtcccgaagtatatcgagacgctcaaaattctgaatagaggctcttagtaaattcaaatgacactaactntttactcggatgtccgaatgaatcccgtaatatatcgagatgctcgaaattgaaaacacaagctcgtagcaaatgcaaaccacaataacct

SEQ ID NO: 290211 - DNA, 365 bp, Glycine max
tttcatgcaagctttagctttaaaagattctacatgtttttattatttctctttttactacattttattatttttttatatgactattattatagtaatattatattgttgatagtgcaataggcatgataatagctactagctagaaatagtgccgaaaataggtatggggaagcatgttacaataacatcaatacaaaaggcaagtacgaagaagtgggtggcaacaatgccagtccaaaaaaaacacaaataaactacgggttatcaattttgttaaaaaccatttgaacaactttcataagtttaaatgaataattgatccaattacaggcttataatgacaagttatcgatttctaattc

SEQ ID NO: 290212 - DNA, 416 bp, Glycine max
  unsure (1)..(416): unsure at all n locations
ttgagccacaatcctgactcaccataaaccttgacccatggtgagaatgtcaatccttaccctcggaagcaaaaaagaatacaagggaaatttccaatcacagaaaagagatagaagatttccaatgaaagatgaaaaagaacagaaaggaaattcccaatcaaagagcgggagaaggaaaaaagaacaggaataaaattccctaccaaagaatgggagaaagtaaaaaaggaaagaagctcctggtcacagaaaccacaagaaatgtgcagagaggtctttggaccagacgatatctgaacagtacagaattgtcactaaatgaacagataggaaggataggaaaccacgacctcaaatggtcctctccctttaattaccaaccangatcccgtgcgctagcgacccttttttct

SEQ ID NO: 290213 - DNA, 343 bp, Glycine max
agcttatcaaacttagaaatcaagtgatcatgtattccgaaatatagggggagtaaacgcatgcacattttatcaatatacaattgtttgttgcttgcttgaatcttgatttcaggtattgtattgtcatcatcaaaaagggggagattgtagatgcaattggctttgatgttttgatgatgatcatgatgatgtgttgcaattgatgcaaatgggcttttcaagattaaaattcaagacaatacttcaagattacaagtcacaacatcaagatgatcactagaatattaggaagggaattcctaattgaattagcaaaggtttggccaagtgatttaaaatg

SEQ ID NO: 290214 - DNA, 419 bp, Glycine max
  unsure (1)..(419): unsure at all n locations
tcaacatcagaccacttccagggtgctggatctacttcacatggatttgatggggcctatgcaagttgaaagccttggaggaaagaggtatgcctatgttgttgtggatgatttctccagatttacctgngtcaactttatcagagagaaatcagaaacctttgaagtattcaaggagttgagtctaagacttcaaagagaaaaagactgtgtaatcaagagaatcaggagtgaccatggcagagaatttgaaaacagcaggttcactgaattctgcacatctgaaggcatcactcatgagttctctgcagccattacaccacaacagaatggcatagttgagaggaaaaacaggaccttgcaagaagctgctagggtcatgctccatgccaaagaacttccctataatctctgggctg

SEQ ID NO: 290215 - DNA, 325 bp, Glycine max
  unsure (1)..(325): unsure at all n locations
ccccacccccacaatagaggcgcaaccaaannnnnnnaagagggatgatctcagcacagnaangccgcgggaccaaccacgacatttttacaacagaaggggggggccacccacgcaccgcagagacacacacacacaccgacaaaanagaaaaagaacaaaaaagccccccccaccaacccccacacacagaccaagcaccaacacaaccccacccacccagcccaacgccacaccccccgcgagcccacacacccccgaaaacacacccccagacaccaaccccacccaacagcaaaaccccaacccgcccccacgccagcgc

SEQ ID NO: 290216 - DNA, 392 bp, Glycine max
  unsure (1)..(392): unsure at all n locations
gcaaccgaaaagaagaacgaagcagaaccgacacaccanccacccgcgagcnatgaccctgaacccgaaacccaaccccagacgggcgaaaaccgccgcgcaaaatatcgaggccccggaggccgagcaggaagngcgcaccgcgccaaaccaagcaaagaaaggcgaccgcgcgggcggaccagcccccgccgacgctcaaacgcggacaaccaaaagcacaacagacggaacagggcacgaacacgaaaaccccccagaacacggaaaaacaaacacacaaccgccgcccaagcggacacaaaacaagcgacaaaaaagacccacccaaacccccaaaacaaaaccccgaaaaaagcagcaggcgaaaaccagaccaacaacccgcaacg

SEQ ID NO: 290217 - DNA, 407 bp, Glycine max
  unsure (1)..(407): unsure at all n locations
agcttccttattanagaacctcctgtgctgagatcttcacattagcaacccagataacatcttttccagtaggccaccttaagggaattttgtaattcactggtggcagaactaaacaattctgcctaagctcacggccgcattgccggtcaacttcattgccatcggaaactcccaattccacattctcagaaacattgtagcaaggaacaaagttttcaaactcctcagaacagaattccgactccttcaacctcaacggaccacgagaaaactcgccaatatccaaaaggtctgagacaagcttctcttgaagccttctataaccatggtaaatgtgacctcttgatgaggatgaaatcgacaaagtccaccataaagatccagtaagagccataacaactata

SEQ ID NO: 290218 - DNA, 179 bp, Glycine max
ggaatggtgatgcaaaaatcaactgagcttggaatgaaaatgcaaaaatgatatttggttgggattttttgttataccgtgcagaagctttctagcctcgtggacgtgacctcataagtctggagatgtagagctaggtaccgaatgagtggtttttaaattggaattaaaaaaaaaag

SEQ ID NO: 290219 - DNA, 404 bp, Glycine max
agcttgcattttatatgtttcgaacaaatctgataggtgaaataaatatttttttttaagttcgtatcttgctcaccaaatctactaaaaaacacactcgtccccgtacctaaataatgatgtgaaaaaatattttttgaagaataaaaaatgtataaaattagaagattttttctttcatattttaagctaaaatatatcacactaaaatatatcaacttttataatagtattaaacaataaatattaaagtgttaatactaaaatatactaacatttataatagtctcaatattaaaagcatcaaaatgtcttacatactggtttatatcggtaatccgcaagtcggtagataaagtccactaggctaaactaaaaaatttaatatagttatccagattttt

SEQ ID NO: 290220 - DNA, 278 bp, Glycine max
atgaatcgatacaaaacaatcgcatgttaagaagatcaatcctcactcgtaaaacagctggttgagtcctatcatcatgagccttacagaaaaatgctgtgaggcataattttgctaattgtatcacaaagtcaaatatctactctcaagctggcgacctccttgatcattacttgatatacatagcctctcatcttgagcccaaaataagtgcctgaggtaagactggttcttgtgacacagccacaattagatcatttataaactatacaccctgt

SEQ ID NO: 290221 - DNA, 409 bp, Glycine max
agcttgtctatagaggtccaggaaggacaaggcggccgaaggaactagttccgctccggagtacgacagtcaccgctttaggagcgctgtacaccagcagcgcttcgaagccattaagggatggtcgtttctccgggagcgacgcgtccagctcagggacgacgagtatactgattttcaggaggaaatagggcgccggcggtgggcaccactggttactcctatggccaagtttgatccagaaatagtccttgaattttatgccaatgcttggccaacagaggagggcgtgcgtgatatgagatcctgtgttaggggtcagtggatcccgttcgatgccgacgctatcagccagctcctgagatatccgatggtgatggaagagggccaggaatgcgagtatggccag

SEQ ID NO: 290222 - DNA, 386 bp, Glycine max
tcctcggggccattcctgcgaaggcaaacatttggattgtagttttttagaaatataacaatcattacaaacaagggccaaacaacacttctcatggcacgagtgtcaacatgcactttataaaataatcatattggggtcgtgctattttatgacacatacgtatttgcacacataaaaattttgtgtgaaacattttacaacacctatccatgtacatatttttttgacaaaccttttcaatgctacatcctatatatatacacacattttttggaaggcttcttttgttacctactcacaaatacacatattttgaaaaacacttttacgctacccatccaacactgtgtaaggcacttcatgctatatatattcatattatg

SEQ ID NO: 290223 - DNA, 407 bp, Glycine max
agcttttctactaagttgcctgatgcctgaaatgtcttttctgatggcagtggtcctagatgcagggaagattttctccaagaacaccctcttaaggtcatcccagctgaaaacggacctgtgagcaaggtagtatagccaatcttttgtcactccctccagagaatgaggaaaagcctttagaaagatatgatcttcttggacatcagggggcttcatggtggaacaaaaaatatggaactccttaagatgcttatgaggatcttcacctgcaagaccatgaaactttggcagcaaatgtattagtccagtcttgagaacatatgaaacaccctcatcaggatattgaatgcacaagctttcataagtgaaatcaggtgtagccatctccctaagagtcctcttac

SEQ ID NO: 290224 - DNA, 434 bp, Glycine max
  unsure (1)..(434): unsure at all n locations
aactttagcttgcctcacagatgtccaggaaggacaaggcggccgatttaactagttttcttccggagtactacagttaccgctttaggagcgctgtacaccaacagcgcttctaagccatcaagggatggtcgtttctccgggagcgacgcgtccagctcatggacgacgagtatactgatttccaagaggaaataaggcgccggcggtgggcatcactggttactcccatggccaagttcgacccagaaatagtccttgagttttatgccaatgctntgccaacagaggagggcgtgcgtgacatgagatcctgtgtaaggggtcagtggatccccgttgatgccgacgctatcggccaactcctgggatatccgttggtgttggaagaaggccaggaatgtgagtatggtcagaggaggaaccggtctgat

SEQ ID NO: 290225 - DNA, 403 bp, Glycine max
ttgctatctcaatccaagaatcatatatcttgatttcaatttgtgcccaatattctgaccgttagattgtacaattagaagaaagaattagtgaaaatttagctatagggtggtccaatttcagtttggtcccaaaacccttcttagggtaagagctactatagagttgcaacccttgtgcctgtactaagggggaaacttttggggccagggccatgtgaattccaaatggttctgccgaaaaaagtttcaatccaaagacttttgataattattttttaaaaaaataatataacgtgcctatcggaggaagattattgtagcaaacaagttctacatcatcaaatggggttcctttcattaattttaggttgactaccaatagtgtgcgtataatatatga

SEQ ID NO: 290226 - DNA, 528 bp, Glycine max
  unsure (1)..(528): unsure at all n locations
tgagcatcnctttgatccatgataccttgcantacgaacctatgaaactcaactaaacggaatgcgcacctgaggggattttcgctactttattgcgactnnggcagagagtgactgctgaaatatgatcacttgagacactagtagatcgacaaccatgcgatacatttggataatctctcggtggggtcatgctatatcttgcaatcaccgtggccaagtatacttcctcactttatgagtacgttagcataatagcgtcgtagacgaagaaataggctagagttgactctactgaatcaggattctaaacttgctttggacctactcacttggagaaatatcaacatgtttcatcaatatttccctaccatcatgctgatccattcattgaagctaagattgattgtgaggcgacctctttgcacgtgatccgtgaagggaacaaatgtgcaaaatgccttgaaatacaagaaactcttcttcacaggatttgatattctcgagctatatcctctgcctataccg

SEQ ID NO: 290227 - DNA, 397 bp, Glycine max
  unsure (1)..(397): unsure at all n locations
tagcttttctttaacaatgggcgntgtctctaaatggacatatatttattcacatgcgtatgaattntatagccattggacgtttaatatttgcattcaatgcagatacttcttcatgttagaaaattactcttgttaactttcatgtagaacacttcaacagaaaatcacttcctttgcgtcagagcaggtttgtcatagtagggcgtgtcttttgatacttttgatcttcaaagtgttgaacattcctttgtgcttcttacgattcaacaaaccctangagaatactatactgtctaagaaagttcctgcaaaacaaatttcaaacacacaatattaaatgaagctcttacatgcactttttaatgctatatcagatcatggagtgtctctgcta

SEQ ID NO: 290228 - DNA, 337 bp, Glycine max
  unsure (1)..(337): unsure at all n locations
cgtggctatacgagacatctttccaaacaaagtcaggttagcgataactcgcctgtgctttttcttccatgctatatgtagcaaagtcattgatccagtcaagtttgatgagttggaaaatgaggccgcaattatactgtgccagttggagatgtattttcaccctgctttctttgacatcatgattcacttgattgtgcatctggtcagagaaatcaaatgttgtggtcctgtntatctacggtggatgtacccggttgagcgatacatgaagatcttaanagggtatacaaagaatctatatagtctggaagcatctattgttgagaggtacatt

SEQ ID NO: 290229 - DNA, 406 bp, Glycine max
  unsure (1)..(406): unsure at all n locations
tactttgcatggaatgncaagcttaagcctcgaaaaagtcatgctcaagccccacgtgatgtgtagttcttcaagattttcttgctttggtcccaccattagctattgcttaagttctcttgcttctttattcgaaataaacaaaaaattaagatgagaaattaccaaaacatgcatgttaaggctattctaatttatttacatcataaatgttaaaaagggcaaataaagtttagaagccctaaaatactaagataattgcctcaaaatcactcaaacaaggttcactaggtaattatcaattgtttaagatggaagaagccaaatctattaatgagatgttcagtaaacttacaatgatcataatatatgtattactccctcagataaattttttgtctagtca

SEQ ID NO: 290230 - DNA, 296 bp, Glycine max
gggaagctgtatagttgcatgcttattaatgcaatgtggatgcaacattttggagtcaaggttactcagttggttgggggatatgtattacagatcataaaggtcaatttgtgccaactaagactatattttccgtcgttggtcttgatcttatctacggtgaagctttgggccttctacaatgctttatcgtgggtagtacaattaagccttccttccgtcatctttgaaatggattgcaaatccatatataatcggtgcttaatgaagtagcaatgtattgagtgggcttattc

SEQ ID NO: 290231 - DNA, 407 bp, Glycine max
  unsure (1)..(407): unsure at all n locations
ttgctttacatggagctacgttaagactgaagagggaagagagccttctagtagcaacccttgactcgttcatgggggatccgcagctacgacaacaaatttgtgtcagttggtgtcgtggatgagagagattgaaaactgcaccattgccacgaatgagagagatcgacaaccgctacatcatcacgaacgaggttttttcaatcctgaactctttcgctcaattgtcgtcaacacaccacatcaaatcctagccaccaccatcaaaagcctactatgaacgagggagactgcaactgctccatgaccacaatctacggagaagggttntgaactttgattattataaaatcaaattaaaaattattggtgttttaaaaccatcagtatgtgacaactagtaaaag

SEQ ID NO: 290232 - DNA, 381 bp, Glycine max
  unsure (1)..(381): unsure at all n locations
ntggcactagagtcactcaaagaagaagagatcattgtatggatttcagacacaattttaggcttcctatcacattcacttgagtttttcaacgacaatgtgaattctgagaagtactctcaagaatacaaggtgaaattcaataaagtgttgaagagccagtggggaatagatccattatttttaggctcatatagtcatatggcagttggatcaagtggtgatgatttaaatacaatggcatcatatatgagggttaacattntgttgtttgtgtatcccaaagcacaaaggaggttaacatagttctgagaggtggcatcatatatgagaccaggatcaagtgttctattatgttcaatctcaccagctcccatagca

SEQ ID NO: 290233 - DNA, 410 bp, Glycine max
tatctttctaaggctatgagaggctaaaccccttttgttgggagcctgtcatgccgaactttttaatgtaatttttttccattatctatttaatgcaatgttgtttttgatcattcatataatgtttatagggtaatgcattgaaaaatggttattttctaaaaaattatggaaaggtatctaaataaattcattggtagaaatagatagatatttgttttgccaatttttgcatctttaatcttaatgcggtttataatttctatctctacaaacaatattgggagaaaggaataaataatttacgttattcgtgtggtataccaaagatccacgtctttatatatgtgggtggatatagggatgtcatgagatagagaatatattcaccattgcattacaagtaattt

SEQ ID NO: 290234 - DNA, 302 bp, Glycine max
  unsure (1)..(302): unsure at all n locations
ctccgctgcttcctcgcaaagaatnctagtttttcctgtttggacccaaccgccaatcctaaaggaagactgcttgtggctatacaccctgaaaataggaccgatggactgagtactgcacatggcgctgctatcactagaagatatgaccttctgtttattccccagtaatacgtaatatctttctgcgcatacacttccttttactactaatattggagcatatactgcttatattctagaatcattatctgactatccttaagcataaatgcatgactgattatcatatgcaggccctg

SEQ ID NO: 290235 - DNA, 406 bp, Glycine max
tctgtttgcaagttttgcatcatcttggggtaacttcttaatgctcttaaatcaaacaactatcatttggaaagtagaaagtatggcatgagaaaagctaagggcatagtgtgatacgtttgtcaccctgctaatcgttcctaagccactaaagacaccagtgactttattttgttctcacgctatggttgaaaatgttttggacaacaaaagtgttaattaacttgaattctatatcgtcaaggttgtaagcattttttttttaacttctaaaccttatctttggattttattttgacgggtctgagatcgatgggctctgctaacacaacggagcgattgcggataaaggggccgaaaagatgacaggaaatgccattgcttcgtgtacctcatatattgctta

SEQ ID NO: 290236 - DNA, 287 bp, Glycine max
aattctagtcaacaaagcaaaaattcttgtgtttaacacttttattttacctaattgacattattattgtatacagctagacttgtgatggttttaagcttgcttttctttttgattaatgacagattactgcactggtcacaacaaacctgaacaaagtaattgatgttaattactacccagttgaaaatgcaaaacggtctaacttgcggcacagaccaattggtattggagtacagggtcttgctgatactttcatacctccttgcatggcatttgattcacca

SEQ ID NO: 290237 - DNA, 394 bp, Glycine max
agctttctctaccggtgaaaaaacattgtcggccagcgcttgtaaaaaaattgcgcaatgtcggctgaaaaacatcagttggggctgtttaactaccgatgctggctactgttttttctattccacccctgaataatacttggacgatgtcgatttggaaatgttcgatcggagtcatccggtcatgcttctttttaagacctcgatctgtcatcttttcctggccgacgtcagctagcatttttttcgatcaatatcggtgaatcatgctttttgccaaggtgggctaacgttttcgtggctcatgaaatgagagcatgccagtgtctgccgaaacacaatctcgcacgaaaaaccctagccgacctacattgtacattttgtaggcaatacc

SEQ ID NO: 290238 - DNA, 346 bp, Glycine max
ttgcagcagattttattaatgtttcactaacctagaattaaaataacttaatgccattaacctagggaattaaaaaaaacttaatggctgagtgtaactgacattgtggcaaccaaaaatcacccccaacagccaacaagtcagccaccatttggtctcccaaaaggctgatgcctacgttgccaattgggcccttattacaacttgaactaaacctaactaaagcccttttagttgattaacccaaaacatatttttggtcagtcaactttacaacgattgggccattatttaaacaaacactctataattgatacaggtggtgtcattaatcctcctcattggg

SEQ ID NO: 290239 - DNA, 411 bp, Glycine max
  unsure (1)..(411): unsure at all n locations
agcttatgttcgttggctgcatgaggtagatgatattgggagtacatcancattctttgcttgaggttgccctgccactcgcaacctaataaagcctcatgcagttccttctcacttttgggatgtaaatttgaaccctggaaagtgttttttttgtgtgtgtgtaattgtgaaagaagaaaggatgataataggtatcatagcctacctagtttttgtttaatgatatttatatctgtgtggttgtgcaagaagaaaaaatgagaatagattgagctttctatcaggaaaaagtaaccgtttgtattgagacaaatattggaatggcatcaattccgtagcctgaaagactgcattttatcttccccggaacataatacatttggagacataaactatccaggctcaatc

SEQ ID NO: 290240 - DNA, 418 bp, Glycine max
  unsure (1)..(418): unsure at all n locations
tgtaacctattatgactntgatgaagagcaacgcatatttcttggcctctgaanttttttccttatcttccagtgctgcctttactcttaggccttggccaaaagaatgagtatcatatttatatgtttgataataataataatatttttattttttttcttgatacatgtaaaagacaacaacataacataagttaaaaagatttaatttcagttgattgagttggatatatgagttattataagttttttaattttcacggataaaaaaaaaaaagagaactaacacaaacttttatatatgcatatcaaattgaaacggtaacataatgactccttttcctttaatttgcttctttcaggagagatcatcatcaattgacatggaatcatgtgtgcctccaggatttagatttca

SEQ ID NO: 290241 - DNA, 410 bp, Glycine max
agcattgattgaggattgtattgttcatccggtgtctgaaaatcccacccaaggttatcaaattcgagagtttacaaaaactcgtaagagtttcatagactcgactcgtaaactcaactcatagactcgtaagagtctacttcatataaaaataataacaaaatatctataaataacatactaattaaacatttcaaccatataataaagcaaaatagtaaatcataaagttcagaatatttaaataatcaagtctagtaataatacatgactactaaacaataacttgtaaaggttatagtagtggtagatcattctcattgagggtttgatgttattagagaacaagagtttgatattattagaggtaagaattttatatttgagaataacacgctacatgaaggtat

SEQ ID NO: 290242 - DNA, 434 bp, Glycine max
  unsure (1)..(434): unsure at all n locations
tctatgtggttntaagaatgatgaagatgagaagagttttgagaatgtatcgaaagctctcttttgtgcgattattttggatcctctttagaaatgtacaaccatctttttctttcttgtcagttggcataggatctttggaattgggtcagtaacttgttgcaatgtcgcataaacctcacgtcccagttatccatcctgcatggtcatcagaataatagcaagcaagttcaagatgtttatgttgcaactattttaaatgttgtttggtatatctagatcaatagaaataactctagattcaaattaaacatggcgtttaaagaacaagattattgcggatgttgctcgcgcangtaattatagtttggaataaatatctacgcccaagatccaatccatcatgttatcaattntaataaagaaattgtctt

SEQ ID NO: 290243 - DNA, 406 bp, Glycine max
  unsure (1)..(406): unsure at all n locations
agcatgatgtttttgccatgttaggatgagttagacatacccattctgntttagggtttttgtgatgatgtttgtgatgtttatatgctgaaattgcttatggaaaactgttagagatgaatggttgagttaacctagggttagaaagtgagaatgtgatgttatgagtggaaaaagagtgaggctttgagagttggaaggttaagtctgaattctgtggtaaatggaggttaaagtgagttaatcctagcttgaaatgtcatttaggacttatgagaaagcttggactgtgctagagagataaacatatgaccaaagtgaacatagagtcatttctagggcaaatttgggtgttgaagagtcaaattttgattcggtgagattttacgtgtaaatccatttgaac

SEQ ID NO: 290244 - DNA, 418 bp, Glycine max
  unsure (1)..(418): unsure at all n locations
ggcaacaatggtggatgagaganaagaagattttgctgcgtgttagagagggagagcttctgaattttcttttggctgagtgaggagagagaacagcttttggctttaaaaagggttttctcttttcctattattttatttaagctatgccacatgtccccatttgagtggagcaaaaagggcccactttctcttttgattgtgacccatacttagtcacaaaaagtgagaaaaatctgacctttgaaacgctaaaatcctgcctcggtttgcgtgtcgtttctctggttccagttcctcgcgtttctctgcgtccgtcggggccagttttcgaaagtaggcaatatatatatcaaaacgctcaaaataaaaccccaagcgttgttcagaagttggtttcgttaaattttaagtcgca

SEQ ID NO: 290245 - DNA, 410 bp, Glycine max
agctttcctttggtttcttaccttcccagaaatagcgtcccccaatagaaaccaaagcattgtgccatacatacgtaactctctctctctctctctctctctctcactctttatattaaagctttccatttcttagtttcaaaaaattttctttttctctccacagacccctctcatggcatcttcttctggtagtttagacacctctgcaagtgcaaactccttcaccaacttcaccttctccacacaccctttcatgaccacttctttctctgacctccttgcttctcccttggacaacaacaagccaccacagggtggtttgtctgagagaactggctctggtgttcccaaattcaagtccacaccaccaccttctctgcctctctctccccctcccatttctcctt

SEQ ID NO: 290246 - DNA, 422 bp, Glycine max
  unsure (1)..(422): unsure at all n locations
ctttgcttccaagcagctgatgggggagagtgtgcttgcgcctttgaagttttgcaccggcgagaggggggatggatttaatgaggctgttcaaagagttgaggcagtctgtggccaatgattggggaggttacacgccttccgttgtggaggaggataaggagtttttggagaagaaggaaaagattcaggagcttgagcagcagatcactggtgcatctcaacaggtgctatttggtttttatgttttcggtgaatcacagttggattctatttcagatcattagtctgtgtgtatgtagctgtttaacttgtgttacattcttttactgagcttatgaccaatgttntaaatngtgatcatggttgcattatttgtgcaatgtaatattgtcacaatactttacattgcgtgcaaatgt

SEQ ID NO: 290247 - DNA, 420 bp, Glycine max
  unsure (1)..(420): unsure at all n locations
agcttttgtgtacaaagaataagaagtttcaaagagattcaaggcttgtaaaggatttttttagattgattggattgatttaaaatgcaaaacaaagccttgctttcatagactctccatgtctggtcaagaggaccatttagaagagttatgacttttagaaaaacttaaaaccaatctgaaaaagtcaaaaaccatttgaagggttacatcttttgatttattcagaaataatcactggtaatcgattaccaaatcagtgtaatcgattacacaaagcttnttgtaaaaagaatgtgactcttcacatttgaatttgaatttcaacgttcaagtacactagtaatcgattaccanaacattgtaatcgattacaactttttgaaatcaattggaacgttgtaaattcagttgaaagct

SEQ ID NO: 290248 - DNA, 420 bp, Glycine max
tctatggaggctggatctttgagcttcaatgatgtcctttaatggtcattttccaccatggagatgcagcggaagacaaaggagaagaggtgagaggaggcgccatccactaaggaataagccatggaagaaggagcttcaccaccaagatgagccttggataagaagcttggagacgatgcttcaatggaggaaaagaaaaaagggagagaaagagagataggggagcacgaaattgaaggaagaaaaagggagagaagttgaactttgagttgtgtctcacaagactctcattcatcaaagttacaataagtgttacacatgcttctatttatagacttggtagcttccttgagaagctttcttaagaaaacttccttgagaagcttctttgagaaaacttccttgagaagctagagc

SEQ ID NO: 290249 - DNA, 400 bp, Glycine max
ttacttacgttgttcattctgaacgtacatcttcttgtattgtttaacaagggcatttttaggttcaacaaggacctgtgtctcacacggtattgtaaaaaacagtggagttcagagagctggtagaaggataaaaataaaaaatgatgaactttacatctcattttcagaaacatttggatgtgcaaccccaaactaacagaaatggaaaaaaaaaaagaaaaaataagaggaacgtgataaaaaaggcacggtaggcttgaaacatctaatgcatgtcataatcctccagaaataagattgaattttcatctttcatttcacccgtagtgagggttgaacgtttgttcaaactaacagaaataacatagcagaatgttatcaccagaatgatgcttgt

SEQ ID NO: 290250 - DNA, 358 bp, Glycine max
agctggcgtgaaatggctttatgtgattctggcacaatctaacgttaaccatgttcaatgaaagtaaaatacttaaattattactctaaacatacttttttttttacagataatctaaagatacttggggtattgaacgggtctaaaaaatctagacatcaatattaaatggatcctttaaagagatgccaacaaggtgagtctagactgagttatggagaaagattgagtcggatgtccttttaaaggatctggctatgtcgttctaacttctttgcctttgttcgagtttcccatgtactcaaccaaaaaaaaaacagttcttgacatcaattctatttcttatatatataataag

SEQ ID NO: 290251 - DNA, 387 bp, Glycine max
ttagctttgtctcattgaggtccaggaaggacaaggcggtcgaaggaactagttccgctccggagtacgacagtcaccgctttaggagcgctgtacaccagcagcgctttgaagccatcaagggatggtcgtttctccgggagcgacgcgtccagctcagggacgacgagtatactgattttcatgaggaaatagggcgccggcggtgggcaccactggttactcctatggtcaagtttgatccagaaatagtccttgagttttatgccaatgcttggccaacagaggagggcgtgcgtgacatgaggtcctgcgttaggggtcagtggatcccgttcgatgccgacgctatcagccagctcctgtgatatccgatggtgttggaag

SEQ ID NO: 290252 - DNA, 413 bp, Glycine max
  unsure (1)..(413): unsure at all n locations
gtgaagatttggtctttgccagtgaattgatcgatgttggtatgaaaaaaggcaaatttagncatgctgcttggacgaatgagaaaactggggcaaatgaagagggtgagaaagagggagaaacccatgctgtgactgccattcctatacggccaagtttcccaccaaacccaacaatgtcattactcaatcaataacaaacctcctccttacccaccacccagttatccacaaaggccatccctaaatcaaccacaaagcctgtctaccgcacttccaatgacgaagaccacctttagcacaaaccaaaaaaaacaccaaccaagaaatgaattntgcagcgaaaagccctgaggattcaccccaaattccggtgtcatatgctaacttgctcccatatctacttgataacg

SEQ ID NO: 290253 - DNA, 406 bp, Glycine max
tcttctttgttctttttataaaatgagaaattctgaactcatcacgttatctaaaaaaccttggggtggatccaagtgctccgatcattcattttcatattcatgttttggtggcatgctcaccgttgtttgtttctttagggaattcaccataactaagaaagcacaaaggcacccctataacactcgatccagaaaaatggataatgaagagggcgtgcaagagcagatgaaggccgatctattggccttaaaagatcaaatggcttctatcacggaggccatgctaaaactgcagaaaactctagaggataatgccatggcaaccgcctccaatgcagttagggaagcggaaccagtgctacagcccacgataaacttgggccgagatagaaacccgacggtg

SEQ ID NO: 290254 - DNA, 398 bp, Glycine max
tctaaacggatctcatctagctcattttgttgcaactttctttcctctccagcctgatcaatagagaagttgcaggtctttacagcccagtaggctttgtgctctatctctacaggaagatgacatgccttgccaaagacaacccgataaggagacattcctatgggtgctttgtaggcagtcctatgcgcccaaagagcatcatctagcctggtgctccaatcctttctgttcggctgcacaatcttctcctagatcctttttatctccctgcttgaaatctcagtctgcccattggtttgggggtggtatggtgtgtgtcgcaacctaccctttggcgggcgagcgaggtgagggctcacgggtgcgtcttccataggaggaaaatgcgcggagtc

SEQ ID NO: 290255 - DNA, 409 bp, Glycine max
tagcattatactatatatatatagtatttttttataaaatattaatgttcgagggtatagttatcgtccttcgtccttaattaataaaagcgaattagttaagagaattagagaaacacatggaggttgaattgataggaaaaagacaaataatttgcaaattaacatggtgcgaactgggaataacaaaaaaaacacatcacctatatcattatctctgtaaaaataagataattattcatttattgggattggggatgagaccggatatttatatctaattttttgttaaaataaatgtaagtatgaatactataatatccatatggtcccacacatgtatatcatatatattaaatattaatgtaattaaaatatttttcttaagtaaataattatattatacata

SEQ ID NO: 290256 - DNA, 381 bp, Glycine max
  unsure (1)..(381): unsure at all n locations
accttagaaactccgcttcaatattaggggcataattgattttaatntaattctcttattncttttgtatttgactaaatagtaaataccaacatcatacgataattgttagccttatcttgatttcaaactactaacgtccgtagtcttctcgtccattttattgatacttgattcaaggaattggtttattcttttgcatgcgattaaagatctcccggacgcccagaaagtcactgacagaagtggcgaagttgatggtgtacctcaagaatgactacatccttagtgtgtattgaatttcatttttattaaatattaattatttataatgaactaattatctgttgtgatatttttcttttggctgctggataccca

SEQ ID NO: 290257 - DNA, 408 bp, Glycine max
  unsure (1)..(408): unsure at all n locations
ttgcttctaatttatntattnttaaattgtattctcattatcttattgaaatttctcatttatcttttaaaagtctcactctctttcgcttgtaattatttctaactcaaacaaaattatctttgtgagactcatccattcattttgttaaatacaccctcacaagaagttttattattttgaatttttttacacaatttcattactacaactatgcgtgcgtgaatgtatcaatttttagtcctcgggtttgatcttcttttcactaatttcaaaaatctaataaaacccttttaattaagtataattttatttgaagtagacattatcgtattgtgactaacaattggtttaaataatttactctacatataaatacaaataggtatcttaaacagaacatttcta

SEQ ID NO: 290258 - DNA, 394 bp, Glycine max
  unsure (1)..(394): unsure at all n locations
cttcagattagttgtttatttttaaatgaattatctgatcagtaaaaaaggagtcgaatagtagtatttataagcctaatatcaattgtttaaaatttataagttaatataacactaatgtatctaaaggaaaattaaaaaaaagaaccaaaataatataatacattttaaaaatataaaaaatcagaatgaaaattttaaaatttaatgtatatataaagtgaaaaattgcataacataagtgccattaagtcttttttattatatatgagaagagtgaaaaaaaaaagaatgggatattttcatgcttcgatttaatacataacaaatcttttgaaaaattaggatntgtgttgttgaatattttactacaaaagatctaaatcttcctact

SEQ ID NO: 290259 - DNA, 388 bp, Glycine max
tggcttgcaagctttgaccatttgaatggctcaagcgcttccattgttcaatatcgagcgtctcgatctattatgcgcttgaatcggacctccgagtgaaaagttaagaccatttgaattgctcaagagcttccattaaccaatttcgagggtctcgatattttatgttcctaaatcagacctccgagttaaaagttatgtccatttgaatatctcgagagcttccgttgcttaatttcgagcgtctctatatgtgatgctcctgaatcggacctccgagtgaaaagatatgaccatttgaatatctcgagagcatccgcttttcaatttcgagcgttcctatatgtgatgcgcttggatccgacctccgagttagaagtaatgacca

SEQ ID NO: 290260 - DNA, 264 bp, Glycine max
aggcttgcctgagctgaatgactcaaccagttgaaaccggaagaatttgattttaaaaattgggaaggggttggggaaacccccataacaaaaaggggcaaggacacctggaaatagagaagggcgtcccaaaatagacatgaaaaaggaaaagaaaacgaggataaaagcgcaacaaaaagggaaagcaaaacgattgaagggaaaagaaaagggaccacatgaaatggagcagacaagagacaaaggcactagacgagcacc

SEQ ID NO: 290261 - DNA, 406 bp, Glycine max
tggcttgcaagcttggttcgaggtacttacccgttgaagatcgaagaacgatgaagaacgaatgaagaacgtcgaagaacggttgaaatctttgcgaaattcctcacggaaaacgttacggaaacgtttcggaagcgcctcggcttagattttcttcacggaaacaatttttccaagcaaattcgaaagagagagaagtgccaaaggggctgaaccccttccttcttcacttcctcccctatttatagcaaaataggggaggtggttgccgcccagctcgcccaggcgagctcagctcgcctaggcgagccaggttgcttcctccagaagcaacagccttctggaggaatcttctggagggccaagtgggcctgggtgctatttgcacccccatttctactaagta

SEQ ID NO: 290262 - DNA, 402 bp, Glycine max
gcttgaggattatggggtacccattacatgtggtactatgtggcggtcgggcgatggtgcacaacaagttttccacatccacaatgcgcgcataaacccaccatcccctgttgcccacctccaactgagctcacgtactcccacgtagcccatatcctcgtttctctcaacaccgggtccccatcaatcctcccaagcttccacaacatccaagcaaaacaacattcacacagcacaagctatcacagccaagcaaaacaaagcaaaggcagaaaactctgccaaaacaccaaccaaaaatcacagcttttcccactcaaagaccccagtaacaattccttcgattccaattgttaaccgttggatcgactccaaaattttactggaagtctatagtgcata

SEQ ID NO: 290263 - DNA, 412 bp, Glycine max
  unsure (1)..(412): unsure at all n locations
agcttcggtagaaagtgatgaggtacaagccctaaaggcagagcttgaaagagcccgggtagtcgaagagaagttcaagtccatagccatcaaagtctgaaaagagtatgatgaactaagggacgtcaatatggccaccgctgaagctttggaacgagaaaccaagaaggcctgaaaggaagaacacgaccaaagcaaagttttgaggggctttatatggcagaaatagtgagctcaagctccgaagaggtgagaggaatcatcatgggtcaaaggcatgatcttgaaggacgagctaaaggcttgccttangtcgaaaagaaatttgtcccaacagttaagcgagactgaagggaatatgtgggccgtcatcgatgagtgcaaagagaaactaaatctagcggcgactcac

SEQ ID NO: 290264 - DNA, 443 bp, Glycine max
  unsure (1)..(443): unsure at all n locations
actcacgcttcaatatgttctcagtttaaacttgataatgcaggaggcttgaatgtgtaangagaagcagacagctgggaccttggagtaggtatgtcacatgagaccaatatatttgggccttaaataaggctgggtcttaattgaaccctgngcgcgactttgtggggctcggggatggggccttagttttagtcttgcagattgtttgccttatgaggatgttgaatttcttgaaattgtcatttagatatggtatattagaatcataatggatgttctgttttatcttctacccttgtttttgtgactcagtggctaaactttcattntatatactgcttatacacttagtaatgaaaatttgtgcatatatttgcttaanaaaatatttgtgcatatagaagtacaattntcattacccaattctatatttgtgtaag

SEQ ID NO: 290265 - DNA, 405 bp, Glycine max
  unsure (1)..(405): unsure at all n locations
agctttagttactacgtgaccacaaaattttatattgagtgtccacgtggatatgttctacgattggttttgcatgaatttctaattgtcataacatatgattcatggatgtgatctgggcattctttatttctaagccattggccaaacagctgtcccaatgtacattattttctgccatttgcaatccttttgagccaaacatttgatttttaccagaatcctgacctangatgaaagtttcctaccttactctaggataggagagcaggggtgtttttcaagggagatttctatcatcttttggctagacatggatttttaaagggagttaaatattcatcaaacaaaaacaaaagagaagataacaagaaaggaaaagaaaatcaatcaaagatggaaaat

SEQ ID NO: 290266 - DNA, 404 bp, Glycine max
  unsure (1)..(404): unsure at all n locations
tgcttgtggggcttctatggaggctggatctttgagtttcaatgatgttctttaatggngattttgcaccatggagatgcagcggaagacaaaggagaagaggtgagaggaggcgccatccactagggaataagccatggaagaaggagcttcaccaccaagatgagccttggataagaagcttggaaggatgcttcaatggaggaaaagaaagagggagagaaagagaaaggggggagcacgaaattgaaggaataaaaaagggagagaagttgaactttgagttgtgtctcacaagactctcattcatcaaagttacaacaagtgttacacatgtttctatttatagactacgtagcttccttgagaagatttcttgagaaaacttccttgagaagcttctt

SEQ ID NO: 290267 - DNA, 412 bp, Glycine max
agcttcttattttcagataatgcagttgagtttgtagctacctcatgcactcctctaatgactatagcatcatttctggcgctaaactgctgggagttggaagccatcttctcaattaaatttctggcttcagcaggagtcatgtctccaagggctccaccactggcagcatctatcatacttctctccatatttcggagtccttcataaaaatattggagaagcagctgctctgaaatctgatggtgagggcaactggcacatagttttttaaatctctcccagtattcatacaggctctctccactgagttgtctaatacctgagatatccttcctgatggttgtggtcctagaagcagggaaaaaattttctaagaatactctcttaaggtcatcccagctcgtgatgg

SEQ ID NO: 290268 - DNA, 408 bp, Glycine max
ctgggcccatgataaataaaagtatgtgttagacatttttattaagataacttgagagagttgactgttagcaaatcacacgtgatggttgtgtaacttatgtgtgaacttgtgcaagaattttgtttggatattttggaatggattgttggacctttaggtcatatttgtttgctagttcatgcgggagaatagagactcacctatacacccaacatttttcaaataaacttatagatgtagttcgtttatcaaagaagaaatggatttcactacatcaatcactaccagtgtagatggacttgttcgtgaaagaaagacctttcaaggataccgttagacattggatgacccaaccatcttttagagttttgatgaaaacaaagatataaatatgtgttaatcaat

SEQ ID NO: 290269 - DNA, 411 bp, Glycine max
agcttatcttccataaattcctattttacatttaacaacaatcaaaatttgactatggttcaattatacattttatacgcgtctttatttcacttttacaaattgagctcagatccattatgataactattacataggcccagaaaaaatggggatcatttaagaaaaagggagataaaagaaaataatagcaaatcgtgtatggtacctaatagagcttcttccttcatcaaactcttcttccatatacaaattattctcaaaattatgtcaccaaaaaattcatttccttcttttctctttcaaatcaatttttaaaagtatataatgtaaagaaaaaatgggcactcatttggaaaaaagggtgagcaaagaaaataataacaaggaaattcatgttatgaacatgta

SEQ ID NO: 290270 - DNA, 361 bp, Glycine max
  unsure (1)..(361): unsure at all n locations
acttaaccctggcatttatcaagaaatttagggtctattatatttatactgaagacagttgcaagtctgtactttgttcacatttcaaactcagtagatcttcacttcanaagactttggttagagatataaaactatttttgtacatttcatttatccagaaatttagggtaatattatactaaagacagtcgcaagccagtaggttcatatttcaaactcagcagatcgtaattntttagaagttcacactgagaaaacaaaatgaacaaggccgcctaacttaaggatattttcctcaagataaaatccatcacatcttgtaagaactcagcccaactaggtggaaatgcaagctcac

SEQ ID NO: 290271 - DNA, 392 bp, Glycine max
agcttgcttgtacaatctatggcttggtgatgatgacaacgtctgatgtcatgaatcacacacacacacacgctgtttgatagtcgagcactcgcatatatgtccattctcccacttagtctttgaatttatgctcctcttaagagtaagttgattactcatgtgagttatggagttaatccctatatctatccccctttggcatcaacacaaaaccaaagtgcatgactagtacgaagcattcaaagacgactaatcatccacacaacatgcatggaacaatataaaccaaatcatgaggcatgaaccatgaatagatcatatatatagcagccacatatgtaaataacataattaattttggttcacacataccatgccaataaagaaat

SEQ ID NO: 290272 - DNA, 304 bp, Glycine max
tagccctagaggtgatggacctcgacaagatctggagtggatcaataacaatgcctataggtcggacctcccatataagtgtggagtcagccccactcttaacattactgagatacttacttatgcacgtgtacatgatctggatgaggaggaactaacagatttgacgtcccatcctctgccatgagcaaggcatgatgcaatccttcctatgacgggaccagccactatagccatgagccatacgctccaagaggattgggctagagcacctgatgacagccctaaggatctcatgaacctc

SEQ ID NO: 290273 - DNA, 406 bp, Glycine max
agctttgcagatttggccttcgccagtgaaaggatcaatgtgggtccgaaaagaggcaaatttgatcatcctactaggacgactgagaaaactggggcaaataaagagggtgaggatgaaggagaaacccatgctgtgattgccattcctgtacggccaagtttcccaccaaacccaacaatgtcattactcagtcaataacaaacctcctccttacccaccacccagttatccacaaaggccatccctaaatcaaccacaaagcctgtctatcgcacttccaatgacgaacaccacctttagcacaaaccataaacaccaaccaagaagtgaattttgcagcgagaaagcctgtagaattcaccccaattccagtatcctatgctgacttgctcccatatctact

SEQ ID NO: 290274 - DNA, 403 bp, Glycine max
  unsure (1)..(403): unsure at all n locations
ntgagccaaaatcctgactcaccatatatctcttgacctttgtgagaatgccaatccttaccctcggaagcaaaaaaaggaaagaaggaaaggaaatttccaatcaaagagaaagcaaaaaaggaaggaaaggaaattcccaatcaaagagaaagcaaaaaaggaaggaaaggaaattcccaatcaaagagtgggagaaagagaaaaaagaaaagaaaggaaattcccaatcaaagagtgggagaaagaaaaaagaaaagaaagaaaattcccaaccaaagaatgggagaaagtaaaaaagaaggaagctcctggtcaaagaaaccagaagaaatgtgccgagaggtccttggaccagacgatatctgaacaatacagaattgtcaccaaatgaacaaaagaa

SEQ ID NO: 290275 - DNA, 124 bp, Glycine max
gataaaggcctgcatgggtcctgcaagcaaaaggacatatcctaactgtgatcatctctcttaagactcagaccatgtgcactgggagctgggataagactcacaaggagggcctgtgagcctg

SEQ ID NO: 290276 - DNA, 265 bp, Glycine max
gactatcaccttgaggaccatgtgatttcccaacggccgcgggaagatagggactacaccatatgacattaattagacgcacataagagatcattcagcataggtgcataatatggaaaagccccaaacgagagtaatgaggccagcttaccttccagactatgcgtaaggagagaaaatggattagagggatactgccgatataacatgggacaagcttaacggtattgattctgtgatattcctgttgcaccacatagataat

SEQ ID NO: 290277 - DNA, 407 bp, Glycine max
tagcttctcaaagtataaacctttgcagtatagttagcaagtttttcacctagatgataagaaactacctagatgaaactctctttacataaccagctaactgagatcacaaatagatcaagaagaatgagatagaagaatgaagatgatgagagagatctagaaatctagattgagggataaactttctttggaagagagtggttgaagaggaagatgtgaatgatttcctttgaccaataaagaatattccaaaggtgtggttttggtagattttatgatcatgctcttggatttgaggtgaacaagtggttcaagttgcttgctggctttttgttgagagtgatgctggaccgatttgagacgcgtacctccgtagggtgccatcacatggaaagtaaataaaa

SEQ ID NO: 290278 - DNA, 412 bp, Glycine max
  unsure (1)..(412): unsure at all n locations
ttataagaacaaaattgccttaatcattttcaaatatgtttgtgaattangacgcatcaacaagaatcaagccaaggctattgtgcaagcaatcaatggggcaaaacacaccaaatgattataatgatggatggctcaaattctcacaaaggtaaaatcatcactttcaaattgagctttcaaaactatcatgacatgtagagaagaatcaaggatttcaagtcacaaaatgtcaagaacttttattttcaaaacaattacccatttcttgaacatatcctataattcanagaaaaacatgcaaagtcgtacgtgcacacgaaaaatgacccaaatattaaactgaaaatccgacgaaactaacaacattaacaaattaacacaactaacaaattacaaaaccaacaaaact

SEQ ID NO: 290279 - DNA, 393 bp, Glycine max
tatcttgaaccataaccggtgagagtgtgatcttaaacggtgagtgaacgactagctttgagtaatagtctttgcatcaatctctgaaatttagaatggaatgtatgaatgaggacatgatgaaggccataattgtgtatatacaagccaagtgaccaaaaagcttaccttgaatgataattgtatcctttgcaccctttgtgagctgaatgacattttcaaaattgaaccctgaacataaatgattatctccagatagcttgtttagattctagcagagcagatagctcaaggaaaattaccccaaatttgggggagttgattgggatgtaaagtaaaaggtaaagcatcggcacacataacatataagttgtgtgttaaaaaaaagaggag

SEQ ID NO: 290280 - DNA, 407 bp, Glycine max
tccatcacattgataccttcctaaagaggtataacatgtaaacttagaagtgactatttgccaataggaattggagtcactctaaatatggaggattttcgtaaaactcatgaagtgagagagtacataactagagtatcatatgctagcatagtaggagctattgtatatgacacgattttcacatgttctaatatcatttatgcactaggtgtaacaagttgatatcaagaaagtcttggaggagggcattgaaagtgggtaagactattcttaatacttaagaagaactaaagactatgcctcatttatggagacacaaaattaaaaactaaaagtagtttgatgagcataagttggaattagtaatggaatacatgagtgatgggctctagcgcaagtggaag

SEQ ID NO: 290281 - DNA, 323 bp, Glycine max
ttgcttttttcaactttctatcacctggcttcacccatgttggaaacccttctttgtaacttggttcttggtatggaaccttgttaagggccaaggtgtagctcagcaacttagtaacattgttggacatcaaagggagaacgtagtcttgaacaccaagctcatacaacccggctttgcatgtctcaaggttagtgagagctgcgctgagccatgtttgggcatcaacttgtgagagcttggtgttatgctttatggtttggctgagattgcgaatagtttgctcataaagctcaacacaatcagcccatgcaactctttac

SEQ ID NO: 290282 - DNA, 391 bp, Glycine max
  unsure (1)..(391): unsure at all n locations
ttatatcaacgcaagngaatnttgntccccttacatatattcaaggggttcacctctcaaaaaaataaaaatattcaaggggttcaagacccattacatcttgataacttctaattaacaaagcccattgacacaagcttctcttataagaattagggtatattttaagtcatctgcaaactcatccaatacacaatattttataatttataattattttaacagttaattatgagtaataattcttttaagttaatacattttgcataatgcaccctcttgctttgatagctgaccttgaactttcagtctagccttatcctcttaaggacagtattctcatttaggccatctgtattatgagccacttaagtcatatacgcctcgggta

SEQ ID NO: 290283 - DNA, 387 bp, Glycine max
  unsure (1)..(387): unsure at all n locations
gaagaggnatgatgctcatgacgcctgagacccggcattngaaccgccaggggacctcagancaactttgttgcagctatataaccagcggccttgaggggctacaaccatagatgacagccaccctgaggcctaccaaagagatgaatggagaggtagtgtagaaacaggcgtgagcccatgcggggacacacacctagctatcgccctagataccctgagactaaatataacccactacagcaaacggcttgtgaaatatcccagacccagttacgaagcttctgatggacaacaacccagagaacaatggaaaccagctaggttgtcatgaccagaacgggacgtgcggcaaaacatctaggtcctaacaggagaaaagccgct

SEQ ID NO: 290284 - DNA, 296 bp, Glycine max
ccatagctgaactgactgaactgaaaccccaagatatacgcgaagaatactcttttagaacctttggagcgaggagtccaccagagcaaccaagccgtcacacaaagcaacgcaaacaggggaaaaaattagcggccaggggcacgggaaagcaaacagcatatgagctaggaatggagagaccaaaggacactaacagacacgccggaagcaaaccttggggaggagcttcacaaaagacaaaatgccaagaaagcgcgaaaaggcgctagcgaactatgacaaatggcaaggag

SEQ ID NO: 290285 - DNA, 395 bp, Glycine max
agctttggccagaggtaaacctttcatcaggtcttcttatggaattaaagtcccccaaaatacaccacaaccccccaaccattgactgtctcaaatgctttactgtatcccacaggattcttttactatttatatcacatggtgagtaaatagtaacaattgtgactatttgtgcttcctggacccattccccaaccattaaaataaagccagtaccactgattttcctctgcaatctaaaagaattatcaccccacaaacaaagaatgccacctgctgaatttatagctggcagcatttcccaatttatctctacatgtccccataaagcctgacacatggctttgtccaccaactctatctttgtctcttgaagacaaatcatgtccacaccc

SEQ ID NO: 290286 - DNA, 396 bp, Glycine max
  unsure (1)..(396): unsure at all n locations
tcacttggttcaggcctaatgtgtttcgtcaagagcagacttgacagattcctagtgtcagatcaatggctagtcatatggcctgacacatcccaacatgttcttcacagagattactctgaccattgcccggtaattttgaaaactaaactggttgattggggtcctaagccctttagggtgctggacttatggctcaatcaaaaaggatatcaaaagctggtgcaagagtcttggtctaaggaccagcagggtggatggnggggcattgtccttaaaaacaagctgagaaatcttaaaaataccatcaaacaatggagtaaagctaatgctgatatcaatgctaatagaatccagaagttgagacagaagcttaatgacttggaaactacagct

SEQ ID NO: 290287 - DNA, 411 bp, Glycine max
  unsure (1)..(411): unsure at all n locations
agcttgcataatagactccctccacaaattgtttgaaaagagaccgtttagagaataagtttgtaaaaataaccctacctggtcattttgccaaaaaaaaacttttatcaacaatatatttgtgattcagtggaaagcaagatctaaggttgtatatatcctaaactcattgttgtgataatattgatgttaatattcattttgatttcacttactattagcatctttcattgaagaagtatgcttatacacgaatgaatttggagcatatacaaatcaaatgatcgaactatacacaaatgaatttgggatgtcactcggtttcttgaaacatgtgcaggagcgtcgtgaaaaacattctggcatcttgtgcatgcacttcttcctttcaatntgccaacgatcaacaaa

SEQ ID NO: 290288 - DNA, 431 bp, Glycine max
  unsure (1)..(431): unsure at all n locations
ccggtcggaactgctctgccgacgctggagagaggttcttcgctgctcatcactacctccggcagaggagagaccttggcgccgatgaggattaactacgttagggttaaggtcgcggatgtgattcgcaacgtgaagatcgtggtgcatagtgtgtatttgccgtttccacatattaatcctgtggctgcggcttatgacagtatcttangcggtggtgaaggagcgtcggaaggagcggggaatattgcagattctgcagatcagacgacgcaagggacgtgttctgtcgttgacgggcgtggaagttgcgtcttgcctacgatgcctgatcaggttcaggtcaagccaatggtggagatcgaagaccaccatggcctgtgaataatgccatatattcatccacgattatcttttctgaagtgaaactt

SEQ ID NO: 290289 - DNA, 409 bp, Glycine max
agcttcccatatatggagagctaaatcctctattggttcttccttataggtacttgatgtaaatacctatatatctatttaatgatgttttatgtgttctctgtgctatcagtacatcatttcagtgtgcttttgccttgatcacgtagatgcatgctttgttaggatcattcaacagttgaaactggtctgattcttagaatttgataggatagggctagtttatcgtattatcacgagggatcagggtatggtaacctagttgtttgtatgtttgtcttaatgcagttctagtcgagtttagtccaacaagaggaatttgaggataatgcttgatcaggattaggctagactatcacgagggatcgaggtttagcattttaggagacaccatagaacacatgagcat

SEQ ID NO: 290290 - DNA, 424 bp, Glycine max
  unsure (1)..(424): unsure at all n locations
tcattcttgtacaaagatgttgttaaatttgtcccttttccctcctttatcctcccaagccaaccctaatctatcacatgatcttctaacactgttaaaatcacttatcacacaccatacttttgtattacttgtcttatttctcctcctaagctccccccacactcttcttttttgtccattgccgaaaggaatatagacattgccaatggtaatagccaccccattctctttccaacatcccttaaaagcaatgcattcttgtcccataagtgatatgaaatttccaagaaggccggaccccataaacacaagagagctattgcttaatttaaagccggagaagccaaactatgtttaagcataaaactgaaccccttccttcgtcactatgtttcagatagatntccacttcaccctacta

SEQ ID NO: 290291 - DNA, 409 bp, Glycine max
  unsure (1)..(409): unsure at all n locations
agcttcctctaccggtgataaaacattgtcggccagcgcttgtaaaaaaattgcgcaatgtcggctgaaaaacatcagttggggctgtttaactaccgatgctggctactgttttttctattccacccctgaataatacttggacgatgtcgatttggaaatgttcgatcggagtcatccggtcatgcttctttttaagacctcgatctgtcatcttttcctggccgacgtcggctagcatttttttcgatcaatatcggtgaatcatgctttttgccaaggtgggctaacgttttcgtggctcatgaaatgagagcatgccagtgtcggccganacacaatctcgcacgaaaaaccctagccgacctacattgtaatttttgtaggcaataccgaacagcaaaacttc

SEQ ID NO: 290292 - DNA, 428 bp, Glycine max
  unsure (1)..(428): unsure at all n locations
ntgcagcagaatttagtaatgacccactaacctagaattaaaataatttattgccattaacctagggaattaaaaaaaacttaatggctgagtgtaactgaaattgtggcaaccaaaaatcacccccaacagccaacaagtcagccaccatttggtctcccaaaaggctgatgcctaggttgccaattgggcccttattacaacttgaactaaacctaactaaagcccttttagttgattaacccaaaacatatttttggtcagccaactttacaaggattgggccattatttagacaaacactctaaaattgagacaaggtggtgtcatttagtcctcctccatttgggccatgatacaactcacaaccttggactnttctccttgaaacttgggcttgtattcaaatagtatggacaacacttgtt

SEQ ID NO: 290293 - DNA, 412 bp, Glycine max
agcttgtatgattatggggtacccatcacatgtggtactaggtggcggtcgggcaatggtgcacaacaagttttccacatccacaaatcgcgcataaacccaccatcccctgttgcccacctccaactgagctcacgtactcccacgtagcccatatcctcgtttctctcaacaccgggtccccatcaatcctcccaatctttccccaacatccaagtaactcaacattcaaacaacacaaaccatcacagccaagaaaacagggcaaaggcagaaaattctgcccaaaacaccaaccaaaatcacagcttttctcacttaaaggccccagtaacaattccttcgttccaattctttaaccgttggatcgactccaaacttttactggaagtctctagtacataagcctaca

SEQ ID NO: 290294 - DNA, 425 bp, Glycine max
  unsure (1)..(425): unsure at all n locations
ntntggagtagaaacatgggaccaactcattttatttcaaaaaggaattcgtatctagtcaaggtctgagagaccatacaagtttcctaacgatttctaattatgtgggccattaagtctatcatatgctgacaatagccgagaagcccatgaatctcttcgggggcggagtaagtgtccgccactgctttggccttggctagcaatcggggaagttcttgactcctgttcaaagtaagagcaaatcggtccgtccacattgttgcctcttggtgccatgaatcaattaccctctcccttgcttcgctttctgctgatatcttggcgtactcatcctctagcctttgctcgtgagtcgccgctagatatagcttctctttgcactcatcgatgacggcccacatattcccttcagtctcgcttaa

SEQ ID NO: 290295 - DNA, 387 bp, Glycine max
tagcttgctacattgccatttctgtaagttggtatctgtctttatttcgcacatgcttatgtgtgtatgtgaatgatcaaacatttttactttatgtatcagcatcatgcataattcttatttacatggttatttcattttagttaacatggctaatggctaagatagcatattactaattaagaattacagggtgtttaaaaaaaactcttggctaaatgagacagttttgttgtcatcatgacttctattatctttcatatcagagggctttttttaatggtataaaacagtgtctattgcttaacatagagattcttattggaaccaggttgcaagtgttttgaacattttggatgatgagttgatcaagaatgttggagacta

SEQ ID NO: 290296 - DNA, 392 bp, Glycine max
  unsure (1)..(392): unsure at all n locations
tgttagaattgttggtcaataccatcatttacgcttttattaaccaatgacatacttacaaagaagtgaaagaactatagctagttcagagatggtgaagatcgaactaaacaagttttgattaacagtggctgtttttgttttaatagtattagagatatagattagttcagttaattacaagttaattattaagttagttaattagttacaaattagttatttttgtaaccaattatgtaacattactagcattagttatataaggatgaatgtattcatataaaaactgatttactcatttntagcattatccaaattaatattcangttttcttttctcttttcatctttctatcttaactttatcaaatagtgattggaacacatgc

SEQ ID NO: 290297 - DNA, 406 bp, Glycine max
agcttatctaaacctagaattagctaatccaaaagatattgttaaagtgaaataggtattgtatattattaaactatctgtagcattgcatccattaatttttaattgtacaaaaaataagatgaaaagattataaaatagaaaaagaaattgctttgtatttgttttaaattattaaaaaaatagaactattttttcgtacaagtttgaaagcaaagaagaggtattccccacagtactcacaattgaagtggctgcattctaataatttcatacagatgttccttaaatattgtgtatcatttataggaatcttcaccactcatatgttatttatggacttataaattaacataatagagttaatggactatgtctaacaaacttttgttcagagactaaaatc

SEQ ID NO: 290298 - DNA, 343 bp, Glycine max
tagggattacggatactttactaagtatgatctactattatttgacaacttaatgtttagggtttaggggtatttgacaaatgacgatttttatgtagtttagcacttagggtttagttttacctgactaattcgggttaaaggttatttgacctattaaggtcacttgcctaattacggattaggtatattcgaaaaattaaggttacttgactaattatgatttatatgtgtctaactgattaaggatatgaatacatgactgagtagggtttatatgtacttgaccaactatgggtgagggttatattacctatttgtttacagatacatgactaattat

SEQ ID NO: 290299 - DNA, 396 bp, Glycine max
  unsure (1)..(396): unsure at all n locations
tagcttgttatcctaggctcatcttggtggtgaagctccttcttccatggcttattccctagtggatgacgcctcctttcacctcttctcctttgtcttccactgcatctccatggtggaaaatcaccattaaaggacctaattgaagctcaaagatccagcctccatagaagccccacaagcaagcttccatcaagtggtaatcagagcacaagagcttcaagtaggtgcttcttaaacctccattaattttttgctttaccttctcttccattgttgtttcttcatttttctccatgtatctcctcacatttcttgtcctaaatgttgttaacatgattctttagagtttccaccgattaaacttgctataaaagctagatntgattttctatg

SEQ ID NO: 290300 - DNA, 403 bp, Glycine max
tagctacacacacctctctaatagctaagttcacctctttgagatgagaagctagagcttagctacacaccccctataatagctaagctcacccccatgagaaaaaacatgaaaatacaaaaaaaaaagtcgttactacaaagactactcaaaatgccccgaaatacaaggctaaaaccctatactactagaatttccaaaatacaaggcccaaacgaagaaaaaacctattctaatatttacaaagaagagtggatccaaccttgaaccatggactcaaaaatctaccctaaggttcatgagaaccctagggccttctttagtagctctagcccaagcctcttggagtcttctatctaataccccttgggggtaggattgcatcatcccctccacctggaaa

SEQ ID NO: 290301 - DNA, 408 bp, Glycine max
  unsure (1)..(408): unsure at all n locations
tttgcttgtgcttttatgaaaaggttcatcgagtcaagttgaagtatggaagtaaccatcttgcaaaanattggggcaaaagatggatcgtgtgacatcgctccttcgtctacggccaaacacatttagggctgttgatatccctgttacttccagtttcaccttgacggagatgtcatggaccatgttgaaaatctaaattgattcaaccccatatactgtgtaaaaattcacaatacttcaattgtgcatcattcgcatacatccatgttgttcattggttgcattgctcattgcattctttccttgaaaagaaaaagagaacctaatcattgttataaanaagaaaaaaaaaggcatgctttacggtgccctcaccgaacctatgctagagctagagtaatgggt

SEQ ID NO: 290302 - DNA, 379 bp, Glycine max
  unsure (1)..(379): unsure at all n locations
tagccctagaagggatggacctttccatgttttggagatgatcaataacaatgcctataggttggacctcccagaagagtatggagtcagcatcacttttaacatttctgattcaattccttttgtaggtggagctgatattgaggaggaagaactaacagatttgaggtcaaatcctcttcaaggggaaagggatgatgcaatcctccttaggaagggaccattcactagaaccatgagcaagaggctccaaaaagattgggctaaagctgctgaagaaagccctanggttctcatgaacctcaaggtagaattttgagcccatgggccaaggttgggtccaattatcttttgacatattagactangatgtcattat

SEQ ID NO: 290303 - DNA, 410 bp, Glycine max
tagcttatgggtgcttcaggtgagggacattttcatcgatttgaatttttatattgtcaaacagtagctttttgtgcatgcttttgcttcatcaccatcgacttgcccgtaaattattttataatgcgtgtttaacattattgcttcatgattgtttccttttcttttgtgtgtgcagaaaatatacatgtacttccgggggcataagtgagactgttctcttctggattttgatccgacggcttttataatgtcaatcacttcacaatgtggcttagcatattctttttgtctatcctcattttctcatacaatatcttggtgtgatattggtcttgttctttgtagttaccagggtttagtttgtatcagggtttacgttgtttgtaccatactgtgtaatgaattct

SEQ ID NO: 290304 - DNA, 427 bp, Glycine max
  unsure (1)..(427): unsure at all n locations
actcagcttaaccccttcttctcctatctcaaaatttgtgaggctattcttcaaagcaattatgataataatgtcccattcccacttgctgctcatatggttgtcctgtgttattttgcaaattaaagtattattatatttttaaaaagaataaaatgtcgagaaattagatcatattatgtatgttacaaagttacgtaagtgaatattatatgatcaatgatattggtttcaccttccatggaactcagaaactgttgtgctgaaattgaagatttgtgcaactctttaccaatcagtttctcccacatttgcacaacctctctctgggataatatgttttcaggtggccttatgtaaactgtcttgttccgtgttctngggtcatctatggttttgatagtggacatagctatatcatcttcat

SEQ ID NO: 290305 - DNA, 362 bp, Glycine max
  unsure (1)..(362): unsure at all n locations
agcttaggcccagccataggattcttanaactcatggtttacattatgtttgccgaggaaacctcgggccattccatgacttgccagtttcccagctggaaacctcgggacancctttgagggggattcnatcgtgcaccacagtcacttcctcttcgaacctaaagcttgcgctaacaaagctctcgatgaggtgacagggaggggcctccttcacatgtgcccttagctgtgggccagtgccccgatttctcttttcctagctgtttttccttatgttggcctgcgtaggcttatatcctaaaccaaacctttcggagttctctttgacatccaccaagtcggacctgccgtcattgttc

SEQ ID NO: 290306 - DNA, 348 bp, Glycine max
tattgtggagttctaaacggattatacaacaacaacttggctccagatgtgggccgagtaagcatatgcaaagtggccaggaaactcttcaacttagaacaaatcgctttgcactgttgatcctaatgaaattcggttggctgtttcagcagttggaaaaatgatttcgccttcttggccattctcagtagaaatcaagatagagccaccagtctatcgatcaacttctatacttccttcatgttttgtgggctgcacatggcagttcctacttcgtacttgtttgggttggcctcgatccccctgcaggtgattcatgaaccaaggaacttaccccctccaaccctg

SEQ ID NO: 290307 - DNA, 401 bp, Glycine max
agcttctcatttgatccagcagaggagaagcatacaacctatttcactcaagtcacacccacggaactctagcacaagagacttggtcatcgtcatcttgaaagaatgctaaacatgaaaaaaatgaaatatgcaaaagaaaatttgaagaagtttcaaacggaggaatgcaaatctgttagtacacaaatgaatcaaaaggagaagttcagcaaggaagaaggcgttgataacattgatgaaggatattatgggaacttgattggatgtctaatgtatctcactacaacgagaccaaacattctattttctcaaaagaacaaaactggaatttttgtgacaatcaagtagtcattgctattgcaaacaatcccgtgtgtcatggaaagactaaacatttc

SEQ ID NO: 290308 - DNA, 383 bp, Glycine max
  unsure (1)..(383): unsure at all n locations
tcaccctcgttgtaaggcaacgacaaagggatctcatatagtttcaggcaagcttgccaagcggttctatggacccttccaagtcatagaatgcattgggctcgttgcatataagttacaattgccagaggaagttaaaatacaccccgtattccactgttccaagatgaagtcttttcgcggttcaccgaanaatatggcgggaattacctggcacaaggagttactcaacgaccaacccctcgtgtttccattagctatcttggattaccgtagagcatccaccgaggatccctgngaggtgttcatgcaatggaatggtatctcacctgatgatacctcgtgggaagactggaatcagctgtgtgaaaactaccaccttg

SEQ ID NO: 290309 - DNA, 402 bp, Glycine max
  unsure (1)..(402): unsure at all n locations
agcttgcttctacagcttgnggattggatgtaggcacgggttgttgccgaaccagtataaaattcttgtgtttgtcttcttcttccctacactctttattttccgctgtgcacttttaattatcgcttttacttttggttaagtttcaattactgttctttactttcttaacttagtagtaaaagcctaattaaatctagtaacattaaaaaggataagttttaattattcaaggtacaataataattaattcaacccccccttcttaattattctgaggccacttgatccaacacctctggcatcaactgaagtttctactcctatcgttgctgcagatgttgtccgtcctactgatgatgttgtattacttctgctcctccacctccttctactatgcct

SEQ ID NO: 290310 - DNA, 430 bp, Glycine max
  unsure (1)..(430): unsure at all n locations
tgtggtggtcattctctacgccattttcatcgctgccgcatgtaaattgacggtcaaggctcttaagacagcaatgtaaagatgtagggtatgataatagcaaggcaaattgaaatagaatatgtatattgttatttcattgatcctttgcatgatatatataatacatgtacaagaatgttctataccaattctaaggcatgacagacgtgatccataatcagtggcatctgatttattctatgcattataaggtaaataaatatagaatcaaggtaacataggaaagtaaatatatacacagcatatttgcaatcatgtagaagatatttcctaatactccccctcaagttggtgagtgaatatcgtgaagtcccaacttgttgcgcaatgtcacaaattgatctntttccaaagcttttgtaaacac

SEQ ID NO: 290311 - DNA, 405 bp, Glycine max
  unsure (1)..(405): unsure at all n locations
agcttgntattttaaaaaaaccaaaaagcaattatagttaatttgtcaaaatgagagtagttttcttttcaaacacagagctatataattacagctgatgaatagaagttcaatagacatgcttaatttggcaacctcagcaagtgattttattctccttttggaaacatactatatgatggtttataggtcaaatgagttatttgatctttcattttatttgttaggtttattttgattttttatcttttaaaaaattcattttaatcttttatatatttatttaaattgatttaaaatgatcttttcatctatataaaattgatgacgctaatgaaataaaaatattaataactaaaaattatcacaaaatgtaattttcttctttatcttgtgcttggtgtg

SEQ ID NO: 290312 - DNA, 423 bp, Glycine max
tcttccggtttcatcctctatgcaactcgcagatatcttcaccaatgttttatctccttctatttttcaacacctttgtaccaagctgggaatgatgaatatccattcccagcttgagggggggatcttaacagcatcttgttagagttagttatgatagttatttctgttgtaaccactctcgtgcttgtacatatataagccctcacgtgcatttaataagatgagttgcagttttgatcatcaagagccaagcgtagcttttcactgcaccacctgatatttttcttctcagaaacatgagtttcacgtttttcttccagcttagttcaatatttgttttcaacagtaagttagcatcaacaaatatataaaatgcttggcagagtgtacattactatactacctacgtgcttatctatt

SEQ ID NO: 290313 - DNA, 372 bp, Glycine max
agcttggaacaccaaattgtagaatgcataaaaataatggcacagccataggcaagctgaaaatcaaaagatcctagccagacgtatatgcttccccattacatcaaccaactggtggggcaggactacattaaatatctcatagccttgggaaaaaggaaactgtccatcagctcaccctttttagcaatttcagctaacttgtcctatgatcctatccaattctcgtatacaaagattgatcaagcttatatttctggattttatttcttcatttcaatgcccaatcagtgtaacagaccttaccacaaacattctaggtgtcccatatttgtaaaaaaaaaaataaaaaaaaaaaaacttcgtacccca

SEQ ID NO: 290314 - DNA, 375 bp, Glycine max
  unsure (1)..(375): unsure at all n locations
gtggatcccgatagtattattgctgcagctctaatggatatgtatcaaagtatgggagatgctcttgcccagcaatacggtggctctgctgctcacaatactgtatgacattttgggggaatctaaatntatgtaatctgccgacaaatatctaactgcttatttgcatcttcttctgcagctgttgtgatatatgtaacatatattttggtgaatgacaggtgtttccagagaggcatggaaagtggaaagcaacaacacaatccagagagtttttaaaatccataaaacgatactatagcaatgcttacacagatggtgaanaacaagatgcaatanacttgtattattccttccacctcatttatctcaata

SEQ ID NO: 290315 - DNA, 394 bp, Glycine max
  unsure (1)..(394): unsure at all n locations
agctttatattgaatcttctaaaccttttcccttgataaaaacatcagggactaaattatgccaattcctctttcaaggacacattgtcatccctctgatctatatgctccaatgctcctctatccacaaaatttaccattctgtgaggcacaaaagccttaagtaaaatgagttgcttcttaattaaaactcctattcttctcgtagtgcttcttctggggaaagtactccagacttatctatacatgtggcatgacaagtaccaatgatcaatgagagtaagttattccaagattttttcaccagttgaaaaaagattaaataccacagttccaaccaaatacaacccaactgaaaccttgaaaacatcatcccaggagcctgaanatagtc

SEQ ID NO: 290316 - DNA, 382 bp, Glycine max
  unsure (1)..(382): unsure at all n locations
tgtatactgaattgagtatggcacacacattgcatgtctgatatgccttttagaggctngaaaagtgcgagaaaacgagttttgttttctgcattctctggaaaacgtgatgaactcgctaaccgagaatactgcgctaagcgagttcatcaatactcattgtatataagatttatctgaagaaccagctaagcacacttattgcgctaagcgagttcatcctttgagaatgaacattcatcctcttgctgaactacctgtggctaagcgaggctaaatcgctaagcctaggtaacttaaccattntttttttgtgatagccacgcgctaagctgagcattcttgagccaagcacaggttgtggcatccgctgtgagttcac

SEQ ID NO: 290317 - DNA, 397 bp, Glycine max
agcttgttctaaatttacattgatgtttgtatgggaggaggttacatgccatttttgctttaagagtaatgtcccactaaaactaactttccaaatgtttgccttcgcaggaatggcaccgaggaagcttgcctcaaagaggtccaggaaagacaaggcggccgaaggaactagttccgccccggagtacgacagtcaccgctttaggagcgttgtacaccagcagcgtttcgaagccatcaagggatggtcgtttctccgagagcgacgcgtccagctcagggaggacgagtatactgatttccaggaggaaatagggcgccggcggtgggcaccactggttactcccatggccaagtttgatccagaaatagtccttgagttttacgccaatgct

SEQ ID NO: 290318 - DNA, 236 bp, Glycine max
atatcaccttcttaattgtacacatggagcactgcgcccccaaatgcgcgagttagaaaagaaaatatttcgggctctcgtgtccgtataatgcattcatatcatgcatcgcataagcatctcttcataacatcataatggacatatcctgcatttgtccgttatatatttcagcctcaccttttgcatgagtcatggcatcatcatgcatatgcgttcaacaaactctttgatct

SEQ ID NO: 290319 - DNA, 409 bp, Glycine max
  unsure (1)..(409): unsure at all n locations
ttagtttaatcttaaacttaaaaggaattgaaacgtatatcaattgaattattctcgattatttaacaactttggatggagaaaacctactaaaatgatcaatcagattnttggatggaaaatagctgaataaacttcaacaaaattgattaatactttacacttttaataagaaaaaaataattgtacaactatgtgatttaaaatgaagataagcatctgtatacctttcacaatttggtttatatattttgttcgcacaacttgcatgaattacattaacaaaaagttaacagacaattaattaatttattattatacattaaatgagtttttattttgaaaaacacaataatttctttacattctttatttatattttttgcatgcacatctcttctttattttt

SEQ ID NO: 290320 - DNA, 398 bp, Glycine max
ctccgctataccttctagtgatcttgagcgcttttgcattttctctagaagctatcggacttgttactttccctgtatatgatgagagattgcttaagaactgttctatttgctgtgatgacaagccagtgccaattatgattaccttaaaatgttctcacacattcttgtcacattgcttgagggcctatgctgatggtaaagtacaatcttgtcaagtccctataagatgccctcaaccaggatgcaagtattgcacatctgtaactgagtgcaagtcttttcttccattcacctcctttgaatctctggagaaatccctgtctgaagcgaatatatgctgtccacatagaatttatctgccatatccaaatcgctctggtctccttgatcctcat

SEQ ID NO: 290321 - DNA, 387 bp, Glycine max
ttagcttcttaagttccttaagcaatgtcttttcagtaaccacaaaatcctcaggatctgggagtttcttcaccatcatatatggtttcaattggataaagccaaattcacaagagaaaagttgaggctgataaggataaaagctacatctttgatattgagactgtcgcaacgtgcccttcgcaggcgagcgagggcgaggctcacgggtgcgctttccaaaggaggaaagatgcgcggagtcgccaccaacgtttattcgtggaaaacgtcgggaaaaccgaacgaaagcggtcaaaatgaaaattctaagtccgggagttgtatttacgctcgaggaaggtattatcacctctcacgtttgtctcagaggacaacagcctattt

SEQ ID NO: 290322 - DNA, 419 bp, Glycine max
tctccttccttttcctataaataggggtttgagggattatcaaaaatattcattcctcttggtatctgagaatcacttaaaattagtgagaaaaattgtttccatgaagaaaatccaagccgaggcgcttccgtaacgcttccgagacgtttccgtgggtgatttcgcgaagatttcaaccgttcttcgccgttctttgtttgttcttcgtcgttcttcggtcttcaaccggtaagttcccaaaatcgaacttttcaatccattctatgtacccttagtggtccccacttgtttcgcatgcttttattttcatttcatttactttccgtacccccttttgatgtgcttcagtcatttatttaagtcattttctcgcctaatccaaaataagataaatttccaccgatcattcgtattat

SEQ ID NO: 290323 - DNA, 396 bp, Glycine max
  unsure (1)..(396): unsure at all n locations
ttagctttgaccaccgctcttccttcccgcaatgcttctcttcatatctgcctgagtgggcttatagcctaaaccatacttcccacgatttcctttggcatttatcaggctagttatgnccgccgttgtctttgcccaaacccattccgggttcgtaaccgttccccaacataactcgggccatcattactgctgcatcggacaggcaagcttgcccagagaaggagtccacggaggaaatgcttaccacctcaaaagactggaaaaaggtctctaatgactcctctacggcttcgacataaggcatagaggatgggcagctcaccaagatgtcctcctcgcctgatacgataaccagatgcccttccactacgaatntcaacttttggtggagtg

SEQ ID NO: 290324 - DNA, 353 bp, Glycine max
  unsure (1)..(353): unsure at all n locations
tgactcacaccaaacatgacaaggtgatcatgctntttcaaataccttcacaaataacttccataaggcataaacctagtaaaactacccatcatatctcccaaacatccaatacccacgaaattatgtgagaaagaagtctacccaaacctggaatttgaagtcccacaacgtagatatgcgcttcccgactccgaaaatggcttcctttcacgatttggagcagaaatggtgtgcaaaggttggagctttgatggagcttcaatggtgaggaaaaagaagagaatagcaacgtgagggagagagggagaaaagcttctgaacttttgggctgagtgaggagagagaaacat

SEQ ID NO: 290325 - DNA, 407 bp, Glycine max
tctgcttcatgatgatgaatcaagttgattcaagtagttttgatgatgacaaagatgatgacaaaaagcccaagataatgatttcaagattgagtcaacaagttcaagatcaagattaatttcaagtttcatgagaagaaatcaagaagattcaagaatcaagagaagttgatttcaagattcaagagaagatgaattcaagattcaagagaagaaatcaagaagacttcacaagggaagtattgaaaagatttttcaaaaaacaaacatagcacaattttgtttttcagaagagtttttctcaaaattttccaagttaccagagttttttttactctctggtaatcgattaccaattacttgtaatcgataccagtggcaaagtttaatttcaaagcttctaactg

SEQ ID NO: 290326 - DNA, 380 bp, Glycine max
tgttgtgcaccatcgcccgaccgccacttagtaccacttgtgatgggtaccttataatcctacaagcttgagatgaggaagtgttgaagggtgaaacttcctgcttttattgttgaccacagagtggtacctggagatatgtcgcaggggtcaggagaccttggggacgtcaggtggggtgctattgcccaaaaccaagcttgaccaatcccgacccaacccgggcatagtcggtcagtgagaacctgtgatgtacctaagcaggcgagctcctggcagtcaacagataaaaggaaaacaagaccacaaagcaaggaggcttgtggtggctggccagctgtgaattttgtgtaatatgtggattgtggcctctggtaatc

SEQ ID NO: 290327 - DNA, 407 bp, Glycine max
  unsure (1)..(407): unsure at all n locations
aaacaatggatttgtcttcaacttcaaatcctagaggttgcaccatgtaaactatttcatctaanaggccattgaggaaagcattattcacatccaactgaaataactctcaattattagtaagggcaagagtaatgataagcctaatagtgataggtttaacaacaagagaaaacgtctcatgaaagtcaaaaccatggacttggtgaaagcctttggccactaatcgagttttgtacttgttgatggacccattcgcattttcttttattcgaaaaacccatttacaccctactgcctttctattggagggcaagggaactaaatcccaggtgtgattctttagtaaggcagcatattcaagtntcatagcagaaagccaatttgaatcagtgagagcctgttag

SEQ ID NO: 290328 - DNA, 390 bp, Glycine max
ctttttaaatatacttggccttcatttaactggctttgggcttggcggccacgctcaacaaagtactttcgacacctactgtacgttgatttcaccaatgctgttatgggaatgttgcgacaatcctttaaaaccttattgatacattctgagaggtttgttgtcatgtggtcatatcgacgtccttctctatcgtaagccatcgtccatttttcctttgagatgcgatcaatccatgttgctatggctggactcagttcacgaaatttttctaaattttgatcaaaaatgtgcttgcaaggagtgtaggctgcataaaattagttatgaataacaattttaagtataaatgaaagtaaaataaatgtgaccatcaaatatgacatctta

SEQ ID NO: 290329 - DNA, 388 bp, Glycine max
  unsure (1)..(388): unsure at all n locations
agcttctatgtttccattctatcatggttagttaaagttaagtgaaggagaagccaaaagaaggttatttcttttaagtttgactgctttcaagtcacattggtctataccaaacaattaaatccctaaggttttgatgtcaacaaagtataaattttatgtattaaaatttcatgcttaagctacatgttcatatatatatatatatatatatatatatatatatatatatatatgttggacaagtggcctcaataacttaagagagaggtgaattaagtttcaaaatttttccactaacaaattttaaacccctcttanatgcaaactcaatctatactggtttggccactttctgtgcctacattcagtcctcangcaacccact

SEQ ID NO: 290330 - DNA, 375 bp, Glycine max
  unsure (1)..(375): unsure at all n locations
ttttttccttccatttatatccttactattttaatatacttttaccctctgctcttcaaattgttcatatgtaactattttttaattacttttttctttttattaatttttgggttatttatttcataatattataatatttactttaacaacactatttaattagtttttaattaaatatgtttttgtctacaaaacaagaatagaattcacataaaacagttatacaatatgtttattattntatatttaccaactatttcaataattttacaaaacgctttaatttaataagcaagcttataaactnttaagctttagctggtagcttataaactttagagcatcttattagtcagttttggcgaaaacata

SEQ ID NO: 290331 - DNA, 396 bp, Glycine max
  unsure (1)..(396): unsure at all n locations
agctttatgcatggtttagacattganaacattgaaacgcaatatttacgtactgaaatggatgtcacaaaatgttgggagaaatatttatgttccaatactgtatgagagacctatatgttaacggtaatgtgaatgtaattttattttttttgttataatgtgaatgaacgaatattattttaatggcctggaacgagattaataaaacaattatgaattattaatagtaataagtatgtataggtcgaatatttatttaaaattaagtatatgatagatttgttagtcattaaagtgaccaaatttataacgttatctaatntaaaattaatgattatgttaattactcatttgataatagatgctcaattatatgattattgggttatggat

SEQ ID NO: 290332 - DNA, 389 bp, Glycine max
  unsure (1)..(389): unsure at all n locations
tagcattnttttttctgaaatgatagatgtaatttcttaaatagtcacagaaagtacaagtccagggaagtactgaattataacatgtatagggaggaagttactaatgattaatatgagaaataagaacaataattatttactattaaatcatatttgaatgtttgagattgaaagataaatgcacaatacctttttaagtagtcatgtgactactaactaacttttaatcttgatatgatcgaaatttataatgctcacattcttaaaatgagattgttctagttatatatatccctcggattgggatgggaaggagtaaaagcatttttcaccacaatcaaagtctttaacagggataacctgtctttttttttatatcaattaat

SEQ ID NO: 290333 - DNA, 412 bp, Glycine max
  unsure (1)..(412): unsure at all n locations
agctttataattntcatatgataataagcttcacatagaaggtaataagaggtataatatttcacaatgcaaagaatctaagaataaaacttgttaagttctttaataaagaatctcacacaaaaatatatatactaaaagaaatcatcattgaaaagaaaaatccaaaataataacttgctaatattaatttatttaagtccttccccttcctttttggtcatcatcattaactctagttcatcaagaataaattaacaattttaagaattttattctcatcaagtgatccaaattcatctcctacaatgtcctacattttagtttcctcttgatggtattgtaggaaatttcttgaaaggagacgaagattgttataaacaaatactagatcctttgtccaatgaggtgt

SEQ ID NO: 290334 - DNA, 428 bp, Glycine max
  unsure (1)..(428): unsure at all n locations
tgaagaggatgctttaatggaggaaaagaaagagagattggggcagtatgaaattgaaggaataaaagagggagagaagttgaactttgaagtgtgtctcataagactttcattcatcaaagttaaaacaattgttacacatgcttctatttatagactaggtagcttcctcgagaagctttcttgagaaaacttccttgagaagcttctttgagaaaacttcctggggaagctagagcttagctatacacacccctctaataactaagctcacctccttgagaagtttccttgagaagattcctaaagaagttagagcttagctacacacacctctctaatagctaagctcacctccttgagatgagaagctagagcttagctacaccccctataatagctaagctcaccccatgccanaatacatg

SEQ ID NO: 290335 - DNA, 406 bp, Glycine max
agcttgccttttagagatccaagaaggataaagcagctgaaggaaccagttccgctcctgaatatgacagccatcgttttaggagtgctgagcaccagcagcgcttcgaggccattaagggatggtcatttctccgggagcgacgcgtccagatcagggacgacgagtataccgacttccaggaggagatagttcgccggcggtgggcatcgctggttacccccatggccaagttcgacccagacatagtccttgagttttatgccaatgcttggcctacagtggagggtgtatgagatatgcgatcctgggtgagggggttagtggatcccattcgatgcggatgctctcagccagttcttgggatatcctttagtgctggaggagggccaggagtgcaagtatg

SEQ ID NO: 290336 - DNA, 430 bp, Glycine max
  unsure (1)..(430): unsure at all n locations
tcatgacgatgaatcaagtatgattcaagtagttttcatgatgacattatgcccaaaagaatgatgtcaatattgagtcaacaagttcaagaaatcaagaagattcaagattcaagagaagttgatttcaagattcaagattcaagagaagttgatttcaagattcaagaaaagacatcaagaagaatcaagattcaagagaagatgaattcacaagggaagtattgaaaaggatttttcaaaaaccaaacatagcatagttttgttttacaaaaagagttttcttaaatttttctaagttaccagagtatttactctctcgtaatcgattaccagtttcctgtaatcgattactagtgataaaatntgatttcaaaaagctttaactgaatttgcaacattccaaatgattnttaaatggtgtaatcga

SEQ ID NO: 290337 - DNA, 406 bp, Glycine max
  unsure (1)..(406): unsure at all n locations
agcttgtgataaattacaaacaccatatatactagattcgtttattctcttttccaccattgttaatgctagagtatactattgacctctatacattaatagttgcgcatggccaaaaaccaagaacctacagtaaatagttgctagcaagctgtttggcattcattgttttggatgttgtttttgtataggctgtctttgattctttattcttattaattgctactcccactttgctggaaatacatgcgcgttaatggttcaatgaaccaacgtgtgattaatcaatattgagtggccttacctttttttttcttgaattactcattttacctaacgcttggacggttttatttggacaaacattntcaataactttatcgaatgttgatcaaaattcccatac

SEQ ID NO: 290338 - DNA, 392 bp, Glycine max
  unsure (1)..(392): unsure at all n locations
gtgagcatgaactactaccaatatatagtatgttgtttacacaaatgagcacatcttanaagcatactccgcacaatggtggcctcttgggaatgaagtggcaattcctccttctgatgatgcatggacacttatccctgacccaactacaattcgtgcgaaaggtcggccaaaatcaacaaggataaggaatgagatggattggctcaaaccatctaaccaccgacaaaaatgtagtagatgcggagcagaagggcacaataggcgccaatgtccaatgcaatctgaccgtgggagtaattcatttaattgatttatgtatgttagatgagtgacttgtattggttgaggttctattcaatgtatttactntgtggtgttcaatgaaatcg

SEQ ID NO: 290339 - DNA, 413 bp, Glycine max
  unsure (1)..(413): unsure at all n locations
agcttgagttcatgattcanaagaaaacacctcgtaataaagccaatttagttcgacaattggtgaagttggagtataaggatggtcatagtatgattgagcacttgaataattttaaagggctcgtaaatcaattaaccaaaattgagatgaagattgatgatgagttgcaagcccttctactccttagttccttgctggaaagttgggacacactcgtggttacacttagtaactcagctccagaaggaaagctcaccatggatacagtcagtgacagccctctcggtgaagaagcaagaagaatggaacgaggtgagtctatccatcccgaggctaatgttattgagaatcggngtaggaatgagactcgtggatgtaataagagccgagatctgagttttcccaacact

SEQ ID NO: 290340 - DNA, 414 bp, Glycine max
  unsure (1)..(414): unsure at all n locations
acgtgcatttgtgtgcaatacacaatttcttgtacactacaacaaaatggtgtatcagaaatgcgtaatagaactttaatggatatggttagaagtatgttaatcaattagactttacccgtatctttgtggatgtatgccttgaaaactgtcatgtatttgttgaacagggttcctagtaaggcagttccaaagacaccttttgaactatggacaaataggatacctagtataaggcacctgcatgtttagggttgccagacagaaataaggatttataatccgcaagaaagaaaattggatgcaagaacaatcagtgaatatttcattggttatccagaanagtcaaaggggtatatgttntattgtcctaatcatagtatgagaaatgtcgaaactgaaatgcaggttcat

SEQ ID NO: 290341 - DNA, 414 bp, Glycine max
  unsure (1)..(414): unsure at all n locations
agctttcatcaagtggtaatcagagcacaagagcttcaagtaggtgctccttaaacctccattaattttttgctttaccttctattccattgttgtttcttcattttttctccatgtatctcctcacatgtcttgtgataaatgtttttaatatgattctttagagtttccaccaattaaacttgctatagaagctagatttgattttctatggttcaaatttcttgttcttgttcttgaaccatgaattgtgttgagtttaggttcctttgagttntgtcttgttatttttttgtggatgaaacctataccataaaattcttacaaaaatattaaagtagaagaaaacctcaaaaatctagagtgacttgttcacctattgtagttntgtcatagaagtcatgtctagttatg

SEQ ID NO: 290342 - DNA, 394 bp, Glycine max
  unsure (1)..(394): unsure at all n locations
cgctcaaaaactgctggttataattatctccatgtgtaatcaattacacattataaattttgaattcaaatttctagtaactgttataaacattttcagctactggtaatcgattaccagaaagtaaatctcaattttaaatgatttagatagaattttttggccaaaccttttgttttttcaatttggaaacttcttcctaagattctagagatcaacttaatcatatatcttgattttcttggattcttggattcttctcttanacttagaagcacttgatcctttggcatcatcaaaacatcaaaacatcttgcttctacataggattcatttgacttaatccatcaactgaataaatccttcaactatntctcatccttggaaaattctt

SEQ ID NO: 290343 - DNA, 405 bp, Glycine max
  unsure (1)..(405): unsure at all n locations
tagcttttagcaaaggaagaagaagaaagataagtagcanaggtttcaagatttctcanaagttgttcaagaaattctaaaaaattgttctaaaaagttattaaaatgcaagtcaaggtcttgcttttatagactcttcatgtctggtcaagaaaaccattggaagagttataaccttgagaaaaacctgaaaaccattggaagagttacatctcttgactttttattcaaaacttgtcactggtaattgattaccaaaaccatataatcgattacacaaaacattttatgaaaggatgtgactcttcacaattgattttgaatttcaacgttcagatacactggtaatcgattaccaatatattataatcgattacaccatttanaaatcaattggaacgttgc

SEQ ID NO: 290344 - DNA, 380 bp, Glycine max
  unsure (1)..(380): unsure at all n locations
tcttatccaaggctcatcttggtggtgttgctccttcttccatggcttattccttaatggatggcgccttctctcacctcttttccttttcttccgctgcatctccatggtggaaaatcaccattaaaggaccccattgaagctcaaagatccagcctccatagaagcccccacaagcaagtttccatcaatatggataacatatagatatgacaataatcactgaaataaacttcatgaaacaggacctcaacatcgggcaacatgtcgagcacaatgttgatgaaacttaagtcacttgagcatttcagaaccaactgaattttatactttggttggaccttgattntaaaggcaagcacattacccaggaacttatc

SEQ ID NO: 290345 - DNA, 407 bp, Glycine max
  unsure (1)..(407): unsure at all n locations
agctatgtggatttggtcttcgccggcaaaaggatcgaagcgggtctgaaaataggcaaatttgatcatcctactttgatgagtgagaaagctggggcaaatgaagaggatgagaatgagggagaaacccttgatatgactgccattcctacacggtcaaatttcccatcagcccaacaatgtcattactcagccaataacagtctctcacccaatcatccacaaaggccatccctaaatcaaccacaaagtctgtctaccgcacttccaatgatgagcaccacctttagcacaaaccaaaacaccaaccaaaaaggaattntgcagcaaaaagcctgtaggattcaccccaaattccggtatcatatgctaaacttgctcccatatctactcaataattcaatggt

SEQ ID NO: 290346 - DNA, 417 bp, Glycine max
tgaactaaaatcggtaagagtgtgaccttaaactgtgtgtgaacgactagctgtgagtgataatctttgcatgaatctttgaattttagaatgaaatgtataaatgaggacataatgaaggccatgattgtacatacacaagctccctttttgagctgaatgatattgtcaaaaaatttgaaccctgaacttaaataattatctcctgataccttgtttagattttagaagagcatatggttcaaggcaaatttactctaaatttgggggaggaaagtcaattagaatgaaaagaaaaaggttaagcatcagcacacacaacaaataagtgtttgtaaaaaaaaaaattgtgttgttacaataaggtcaaaagcaacttgagaggaaaagatagtgagaaaactacttgtataatac

SEQ ID NO: 290347 - DNA, 403 bp, Glycine max
tttgctatgagcaaattcaaacgacaataaccttttactcggatgtctgattgagtcccgtaatatatcgagacgctcgaaattgaatgttgaagctcagagcaaattcaaacgacaataactattttctcgtatgtttgattgagtcccgtaatatatcgagacgctggaaattgaatgtttaagctttgagcaaattcaaacgacaataactttttactcggatgtctgattgagtccagtaatatatcgagacgctcgaaattgaatgttgaaactctgagccaattcaaacgacaataactttttactcggatgtccgatttagtgacgtaatatatctgggtcgctcgaaattgaatgttgaacctctgagccaatccacacgacaataactttttac

SEQ ID NO: 290348 - DNA, 346 bp, Glycine max
ccgcttaaacattcaatttcgagcgtttcgttatattacggttctccaatcagacatccgagtaaaaagtgattgtcgtatgaattggcttatagcttaaacattcaactttgagcgtctcgatatattacgggactcaatcagacatccgagtaaaaagttattgccgtttgaattggctcaaaggttccaaattcaatttcgagcgtctcgatatattacgggactcaatcagacatccgagtaaaaaagtattgtcgtttgaattggctcacaggttcaacattcatatttgagcgcccccatatattacggcactgaatcggacatccgagtaaaaagttat

SEQ ID NO: 290349 - DNA, 409 bp, Glycine max
  unsure (1)..(409): unsure at all n locations
tagctttactagctagatagatattngtcaaattcctaatggtcaaacatcattctttagcacgaatgcatattcaattcttgtgttcgtgttcatatatatattacactggcatacaatgcatgtttattttctttaagatgctgccatctgtccaatttgtttgctatatatgagattcattaaatgtttgggtaaggcaattataccgttcccgcgagtcataccatttgtcattggtcatatgcatagattaattcataaagttntttttagccaaatcattttatagtttgtgttgcagattatataatgtcttagaaaaaaagtaaatattttaaaatatatattagtttactaaattaatattatcctttacatatttttttagactatctttaattaatac

SEQ ID NO: 290350 - DNA, 346 bp, Glycine max
ttgggccattaaccaaaaaaatgtatgtttgaagtaatatttgattgcctttctaaacacaatatgtttgaactttgaagtacacaaaaggatgtgaaagtgatgcaaacatatagcattgaagcataccaagtaagtaaaaacgtactccaatatgaccagctccagaagaaagaaatagctccattaacttggttagaagacattgtctgcatgtgtcatagaaacactgttattaatgaaaccattgcacatatagttcttcaattaaccacaattcttttcaacttttaataatataaagttccaaaaaccttcctttcaaaggaaaagggggggggggggg

SEQ ID NO: 290351 - DNA, 414 bp, Glycine max
tatcttctaaacacagcaacacagaatctaggtgtccaaaacccctcaattcaatgggttttctaggtttgaaaagtgaaatttagaatgaggtaaatttgaggcaaactctcacctcacaccagtccataacatccatttagacttgttcaaactggatttacacctaaaatctcaccgaatcaaaatttgactcttcaacacccaaatttgccctagcaatggctctttgttcactttggtcatttgtttttctctctagctcagcctaacctttctcacatgtcctaagtgacatttcaagctagtattaactcactttaacctccatttaccacagaattcagacttagcctccaactctcaaagtctcactctttttccactcataacatcacattctgactttataac

SEQ ID NO: 290352 - DNA, 421 bp, Glycine max
  unsure (1)..(421): unsure at all n locations
gactcacgctttgagggtgcgcagcccaccatcttttatattggagtaccgataatgtgtttaccatcacgattatcgtctccctttccattattgggggtaccacctgngccgccagatccctccaccttttgggcatgtttttgaaagatccgtccccctttttgcacatgttctgtagttgcatcctattcagaaccatatcaaaattgtactgatactgcctaacaaaggcaaccattangtccttccaagaatggactcangaaggttccaagttagtgtaccaggtaacagctaccccagtaagactttcttggaaggaatgtatcagcaattcctcatcttttgcgtattcccccatcttctaacaatacacctttagatggttcttgagacaagtagtccccttgtacttgtc

SEQ ID NO: 290353 - DNA, 357 bp, Glycine max
tatgctatgcaagtcttgaaaacgaagtcaggaaactaagggagcctctggtaatcgattaccagcctgtgtaatcgattacatagagggatgggtcactggtaatcgattaccaggtatgtgtaatcgattacacagtgcatttttccatatttcatgtcctgaggctgtgtaattcaagtttagcctctggtaatcgattaccaaggctgtgtaatcgattaccagagatgaaaagccttaagatacccctcttacttgcatgtaatggtttgtagaagtattgtgtgcagcgcagttagattcttgtgaaagagtctacccctctctcttctttcttgtagatcgtgatggcgg

SEQ ID NO: 290354 - DNA, 325 bp, Glycine max
  unsure (1)..(325): unsure at all n locations
ctataaaactccgctntaacctcatcttctctcacattctntagatnngggagccaatccagtccttgtgttcgaactctcagccacttatgatagccgccgatgatcccattactgcttcccctaagctctctgtcctttcttcatgccgcatcccatgccttgcgaactccttggagtaccctcgcgttgtggacactgaaacctcgtgcgacgaaaggcgtgatgctttcatctgatggcactcctctcatgggacatccttctcatgaagataaaatcctgattcttccttccttctagcgagggaaccatttaacagacg

SEQ ID NO: 290355 - DNA, 394 bp, Glycine max
  unsure (1)..(394): unsure at all n locations
agctttgatggttntgagaagaaatcacatgtttgtcatcatcaaaaagggggagaatgtgaatgtatgtatacatgattttgatgatgtcaaaagaagaatcaaacaaggctcattttgcttcaagattaatacaagattgtttcaacaaacaaagccttgattcaagatttcttcaagatcaagccttgcttcacaatgaaaggtttcaagtcattcaaggcacatgtaatcgattaccaatacatgtaatcgattaccaatggtttgaaagtgtgtaatcgattacacatcatatgtaatcgattaccagagactctgaacgttgagaattcanattttaaatgaagggtcacaactgttcaagcanaataattgtgtaatcgattacact

SEQ ID NO: 290356 - DNA, 340 bp, Glycine max
  unsure (1)..(340): unsure at all n locations
tctagtgactgtgaagcacgttattctgttgttttccagatcggttccttcgccaagtatgtgtatatgtgtataactgtattatattcgttgttctggttgttgtttgtattttgttttgtgcagaagaaaaaagaagaagtagagatgagagtcgtcatcgcgaaaagggcaggacggacgaaatcagtgtcctatctttgctttcctcttatctctgatgagaggtaagtaaagaggggcaactgtcataccctaatttcgtccggggattattacttgatgacatgcaatctttggttagccgctttgagatacttggcgtncttngttgcacaat

SEQ ID NO: 290357 - DNA, 411 bp, Glycine max
  unsure (1)..(411): unsure at all n locations
agctttcatcactcattgttagttgaaaatgagtgaatctaagcttcatttatcttgtcatccacttgtatagttataggatgattatattaagcggaatatcatagtcaagttaggagttgagagaatataaatttgaatattcagaataaaagaaaatataattgttgattccagaaaatgtgctgccccttttaagctgtaaagcatgcacaatttttaggtgttggagtgtcacacaacccactccaacaatgacacttccttaaaaattcaattaaaaattattttttactgtgatggatatacttatattaagtagacacgtaagtgattggatattcaacgacccctagctagtattataaaaaaatcacatttctagtattatanaaaaatcacatttttaaa

SEQ ID NO: 290358 - DNA, 429 bp, Glycine max
tgaaggtaaactagatgccttggttaacctggtaacttatctggccatgaataaaaaatatgcacctgtcgccagactctgtggtttatgctcctctgccgaccaccacacggacctttgcccttctgtgcaacaatctgaagcaattgaacagcctgaagcttatgctgcaaacatctacaacaaacatcctcaacctcaacagcaaaatccgccacaacaaaatagttatgacctctccagcaacaggtacaatcccggatggaggaatcatcccaaccttagatggtcaaatccttcacaacagcagcagcaacaacaacaaccttattttcaaaatgttgctggcccaagcagaccatacattccaccaccaatccagcaacaacaacagcaacagccccagaaacaacaaacagttgaggcccc

SEQ ID NO: 290359 - DNA, 409 bp, Glycine max
  unsure (1)..(409): unsure at all n locations
agcttctttgaganaacttccttgagaagctggaccttagctacacacacccctctcataactaagctcacctccttgagaagtttccttaagaagattcctaaagaagctagagattagctacacatacctctctaatagctaagctcacctccttgagatgaaaagctagagcttagctacacacctcctataatagctaagctcacccccatgacaaaaaaaacatgaaaatacaaaaaaaaagtccttactacaaagactactcaaaatgccccgaaatacaaggctaaaaccctatactactagaatggccaaaatacaaggcccaaacgaagganaaacctattctaatatttacaaagataagcgggctcatacttagcccatgggctcaaaatatacccta

SEQ ID NO: 290360 - DNA, 417 bp, Glycine max
tcatgatgaatcaagattgattcaaagagttttgatgtatacaaagatgacgacaaaaagctcaaaagtcaagaacacttaatgataacaaagatgatgatctcaagaataaaagaatgagttcaagattgaatcacatacacttcaaggatcaagaggaaagttgaattcaagaatcaagtttcaagattcaagttccaagaatcaagatcaagattcaagaatcaagagaagactcaatcaagataagtattaaaaagtttttttaaaaattgagtagcacatgaattttttctcaaaaccttttaccaaagagtttttactctctggtaatcgattaccagattattgtaatcgattaccagtagcaaaatggttttcaaaaaaaaaaaaaaactttcaaactgaatttataac

SEQ ID NO: 290361 - DNA, 412 bp, Glycine max
agcatacatatatattttttgacaacatccgtcatgcctgcattaaacatgattcttcttttgtaggaattggccaaaatggtgatagttcaacaacttttcctataataatcagcgttggtgacaccagctgagcagatgtaattttctcgtgaaggtcctttagttcagcaaacacctgcatcatagcaaaataatcagctattggacctagcatccggaaaagttgaattaagaaccagctatatatagattcacacacaattgtatttatttatcagtttttaatatcaaccatgcagaagtacaaaataaaatgtctcatattcacaactacctcctataacaaaacattattaagatcactatattctattagcctcgactttagtgtcaggtacactctcttcac

SEQ ID NO: 290362 - DNA, 329 bp, Glycine max
gaatgaaagtcaaagtctttgaaagggacccaagtaaagttaagaagtatgaatggcaacaaacacatatacgtcatatttgggtctaaatttttcaaatccttaaagaaaaattggcagataacgtcggccatgggaacaacaactacattggctaagttgatatgactaatatgaatgggcaaaataaactgtttacttattgagtataccaacaaattttgaaaaattgacctacgcgcattttttgtattaaagaaacgacattttcttttatatcaaattaactagtatattttcatttttttcttaccatttcattatgaata

SEQ ID NO: 290363 - DNA, 412 bp, Glycine max
agcttgattatggtgctttaatggaggaaaagaaagagggagagaaagagagaggggggagcacaaaattgaaggaaaaaaagggagagaagttgaactttgagttatgtctcacaagactctcattcatcaaagttacaacaagtgttacacatgcttctatttatagactaggtagcttccttgagaagctttcttgagaaaacttcctagagaaacttctttgagaaaacttccttgaaaagctagagcttagctacacacacccatctaaaaactaagctcacctccttgagaagctagagcttagctacacacccctataatagctaagcttacccccatgacaaaatacatgaaaatacaaaaaaaaatcctgctacaaagactactcaaaatgccctgaaataca

SEQ ID NO: 290364 - DNA, 394 bp, Glycine max
  unsure (1)..(394): unsure at all n locations
gcttgcagcttcaatggagaatgaagaagaagattatggcaacgttatggagagagagagctgtctgaaattttgtggggctgagtgaagagagagagagttgttttttggttttaaataaaagggttttctcttttttatgttattttattcaagctctgccacatgtccctatttgagtggagcaagaagggcccactttctctttttgactgtgacccatactcagccacaaaagtgagaaaaatctgacctttgaaacgctaaaatcctgcctcggtttgcgtgtcgtttctctggtttccagangatggaatattttgtgttcgtcggtgccagtttttgaaagtaaccaatatatatatcaaaacgctcagaataaaaccccgagcgt

SEQ ID NO: 290365 - DNA, 358 bp, Glycine max
agcttgctctatatttacattgatgtttgtatttatgggaggaggttatatgccatttttgctttaagagtaacgtcccactggtaaaactaactttccaaatgtttgccttcgcaggaatggccccgaggaagcttgcctcaaagaggtccaggaaggacaaggcggccgaaggaactagttccgccccggagtacgacagtcaccgctttaggagcgttgtacaccagcagcgcttcgaagccatcaagggatggtcgtttctccgggagcgacgcgtccagctcagggacgacgagtatactgatttccaggaggaaatatggcgccggcggtgggcaccattggttactcccat

SEQ ID NO: 290366 - DNA, 416 bp, Glycine max
  unsure (1)..(416): unsure at all n locations
cttgccacccagctcacccaggcgagcagggttgcttcctttataagcttcagccttctggaggaatcttctggagggcccaagtgggcctggttgctatttgcacccccatttttactaaatacaccccccttttctatttttttgtaactatttttctgtaacgttacaaaactttacgaacttcgtaacgatacttattttttcttctgcaaggttacgaacccttacgacttatgtatttactcttttttagctttcaaagaagttacagaaacttacggattgcgcanaaacacctctttttgacttccgccacattacggaagttcacggatcgcacaagcctgcttccttttgatttctgagacatctcgaaacttcatttattgcatgtcatcaagtaataatccccg

SEQ ID NO: 290367 - DNA, 241 bp, Glycine max
  unsure (1)..(241): unsure at all n locations
ttaactgcatcttaatttagaatcctctataataaagtctattacatcaatccttntcattttttggtggcaaggacgagctttagcccatcaatcctttttctatatctatcatattaatgatccggcctcctttgatattttaccagaaaaaatcttattcacctggtattccaattcctaatcccgtgatgtgaccgttttatttcatataaattaaatccttcttttatatgggcac

SEQ ID NO: 290368 - DNA, 339 bp, Glycine max
  unsure (1)..(339): unsure at all n locations
cggaccttgaaactagctgatttgtgccatagagccagatttgatattgttgggcnggaagcagatatatgaagatctaggacttctcatatggctgcagaaagagaattttgagatatgtgaaagcacacttganatggcttcttattctccaaagcaaatcataatcaaggaataacgtaattggttttctaatgcagactnagtgggatgtnaggacacaaagcccctaatatgtttcaatactggatcacaatctgcttgattctaaaacaagaaatgtagatttcacttggagtaaagacatggctatgttcacagctgcaatcacctggtgga

SEQ ID NO: 290369 - DNA, 408 bp, Glycine max
  unsure (1)..(408): unsure at all n locations
tctgcttcttcatcgacattntttctctctcttcatcttttctttacttcatcgacacatgatatgtcttctaaagcgtaggaaggttccaaatgcgttgtggtgggcattgtgttgtgcagtatatgattgcagcgtctgccatccttttccctggacatgtaggcagagttactccacagagtgtaacttatagctttgcaacccttttgcttgacctcctcagtggcaatcatattcctccaagccatgtaagtttctttacttaataaaaagttatgcaaacaacacttattgtgttgtgtcctataatgttgtctatcttagtctaattgagttcttccttttgatcaatttcttcttctgattgttctacctanaatcaagtaagaagtacctgtcaaaaaa

SEQ ID NO: 290370 - DNA, 415 bp, Glycine max
  unsure (1)..(415): unsure at all n locations
actccgcttatattatactttattagtaaaaatgttgcaactttatattggtttggatagattgnttaggagacagagaaatgaaagagtgattaaggatgaaaggttgaatttcactaacttggataaaaggcaaatagtagagaggaagaccaaaaattcatataggctccactttcctctctgttgtgtcgcaaaacagatgagactttgcgcaacactattatttctgtgtgaaaccacaattagttgttgcttactatcttgctaagtatttttttaggcatttatcttcttcttatttaatatggtacagtaatagaaagttgctaaaataaatgaanatgcatataaaataatatgcatctcttacgnaatatatatatatatatatatatatatatatatatatata

SEQ ID NO: 290371 - DNA, 402 bp, Glycine max
  unsure (1)..(402): unsure at all n locations
tctgctttaacctcatcgtccctcacagtctttagatttgggagccaatccaatccttgtgttcggactctcagccacttatgatagccaccgatgatcccattactgcttcccctaagctctctgtcctttcttcacgccgcatcccatgccttgcaaactccttggagtaccctcgcattgtggtcactaaaaccccgtgcgatgaaaggcgtgatgctttcgtctaatggcgctcctctcatggggtagccaagctgtcttatggcgagaacgggattataattaatacaaccccttgttcccatcaagggaacatttggacatccttcgcatgaagatagaatcttgattcttccttccttctagcgagggaaccaattaacagacgcccncccatgc

SEQ ID NO: 290372 - DNA, 405 bp, Glycine max
  unsure (1)..(405): unsure at all n locations
tcttatccaaggctcatcttggtggtgaagctccttcttccaagcttattccctagtggatggcgcctcctctctcctcttctcctttgtcttccgcttcatctccatggtgaaaaatcaccatcaaaggacctcattgaagctcaaagatccagcctccatagaagccccacaagcaagcttccatcacaaattccgcaccagcatgattggagtaccgaccttaagtgttaatttgtgattaggtatccctgatgttttcaatgagtttagaaatttaggtgtcagtaatccgaaagtaggattgagtagttcatcttatttatcaatgttatcagtgctacaatactccttttcgtcattgggtatcaatgataagacnaataatnntatttgtcaacaata

SEQ ID NO: 290373 - DNA, 402 bp, Glycine max
  unsure (1)..(402): unsure at all n locations
agcttgccacccagctcgcccaggcgagcagggttgcttcctccagaagcaacagccttctggaggaatcttctggagggcccaagtgggcctggttgctatttgcacccccatttttactaaatacacccccctgctttttttttgtgattcttttttggtaaagttatggaaacatacgaattttgtaacgatacttgttttctttccgtaatgttacggaaccttgcggatcacataatcatcccctttttgacttacggaatgttacggaacctcactaattgtgcaacgatgcttccatttgatctccggtgtgtcacggaaccttacgaattgtgcatcaatattttctttngttttccggcacgttccggaatttcacaaattgcctaatgatgg

SEQ ID NO: 290374 - DNA, 413 bp, Glycine max
  unsure (1)..(413): unsure at all n locations
ttgagccaaaatcttgactcaccataaaccttacccttgtaagcaaaaaaggaaggaaggaaaggaaattcccaatcaaagagaaagaaaaaaaggaaggaaaggaaattcccaatcaaagagaaagcaaaaaaggaaggaaaggaaattcccaatcaaagagtgggagaaagagaaaaaaaagaaacgaaaggaaattcccaatcaaagaagtgggagaaagaaaaaagaaaagaaagaaaattcccaaccaaagaatgggagaaagtaaaaaagaaggaaaccatgacctanaagtggtcttctccctttgattaccaaccaaaatcctgtgcgctagcgactttttcgccccgcgctaaacaaaaacagaaaaggaaaaagccaaccaaaaatcaaagccaaaacacaca

SEQ ID NO: 290375 - DNA, 398 bp, Glycine max
ttgcttgcaagcttgagctacaattactctgatagagtaggtcttcttcatatcattaataatgccattcaaccatacttttttagttgtcaataacttgccatcaacttttttagtcaatcattttgaatttgtagtcttgttattgaagaccctcccacacgtgtgcttccgttcaaatgtcttcattatgaatgttgtgttgttttccacttggcttaccaaaactttaaatgaacaaccttttgacttacacataactctaactctaattttgtcattttttgggaacctaacctccattctaataagaatcaaatactctctcattgcatccttatagtcaactaaagagttaaacttcatttccaactgaaatttgaagttctttctaattc

SEQ ID NO: 290376 - DNA, 395 bp, Glycine max
  unsure (1)..(395): unsure at all n locations
tccttcagtctatctacaatgtttatgaagccatcagagtcaaaataacaaagatctcccgtcttcagccacccttctgaatccaatgtttcagctgtcgccttctcatctcctacataacctgcaccggcaccataatcaccattcatggaacatattacataagcaagaccataaaaaattaagtatatttcgctagtgatatgaagtacgtttggtaaaaaacacgaatcatattcatcttgtatggcttaacctgaaattggtatcatttattangaatcatgatgataacagatcttagaattttatgcactnntttaatcgatggttggtttataagcttttcttcactacctaaatcctcctcttgtctcagttataaggaaaaaaca

SEQ ID NO: 290377 - DNA, 387 bp, Glycine max
agcttataaaagtcttgtgaaaaagttgtttgattaacgtgtgctgttgtcttgaagattcatgattgactgcaaacccaccgcgcatatacttatatgatatatcctctagcaagcaaaaggcagtgactaaataatactactatctatggaacacacaatgctgactttttacagttatacgagactactattatctgatatctgaaattacttttaaccagctttctcatttgattgcgtcaccttgtgctcgggactttggcatctacacactccatctcagaaggacaggaccccatatagtatcagaactattagacgaaaacatgacagaatcctctgcgtgctatatccctcattatagtacaagactgtgacgagtct

SEQ ID NO: 290378 - DNA, 337 bp, Glycine max
  unsure (1)..(337): unsure at all n locations
tgttacaaactacaanttnctanttttnagcnttttttccactgcttcaactcgatctgaggctgaaactatcatatatataaataaccaattaactaatatctctccacaaagaaacattattcgacatggggcactgcttcagcaaacccagcacaaacgaaataccattcaactatgattattcaccaccccctcatcattatcagccacgcccgcactcacactcagactcaaggagaacacaacaacctcaacttcaacctcaacctgtgtaccccaatcgaactccaaaatcagacccatctccatcatcatcatcatttggtgatcaaga

SEQ ID NO: 290379 - DNA, 379 bp, Glycine max
  unsure (1)..(379): unsure at all n locations
agcttaagctccttcaactgcacaaggttcttaatatttgaagagtatccttgtggaaccttcacccgacgaagacactgacaaaaacttatcttttccttcttggacaaagcatggcaggctgggggcaagtaaattttcttcccatcagaccttggatgcaactgtgatcgtatacccatatcaactagatcttgacgggtattcaagccatccttcgtcttgccttgaatgttaaggagtgtgccaatcacactgtcacaaacattnttctccacatgcataacatcaatacaatgtctaacgtcaagatcacaccagtacggaagatcaaagaaatggatctcttctttcatatgccactctgacttttatcctt

SEQ ID NO: 290380 - DNA, 366 bp, Glycine max
  unsure (1)..(366): unsure at all n locations
tggttcgaggttcttacccgttgtttatcgaagaacgttgaagaacgaatgaagaacgtcgaagaacggttcaaacctttgcgagattcctcacggaaaacgttacggaaacgtttcggaagcgcctcggcttaaattttcttcacggaaacaatttttccaagcaaattcgaaagagagagaagtgcctaacgggctggaccccttccttcttcatttcctcccctatntatagcagaataggggaagtggttgtcgcccagctcgcccaggcgagctcaactcgcccaggcgagcagggttgctttctccagaagcacccgccttctgaggaatcttctggagggccaaatgggcctggtgcta

SEQ ID NO: 290381 - DNA, 412 bp, Glycine max
agcttagcccacactactggcttaggatgcaaaaagcccacggcgaagcccaaatgtgtgcttaacggcttacgctaagagcgaatttagtgtgaaaattaagttacctgaaggctatataaggaggaagaagtagaagggaaagacacacggagtcttagagctatccaaagcctcagtctatcccttaggggaaacccctctctgtttttttatccatttccctttttcttgctattagtcatccagccctttctttcattagctcccgaagtgtaaagcctctaatgactatgagaggccaaacccctttttgttgggagccaggaggccgaactcttgtaatgtaattcttccctactatctatttaatgcaattatgtttctattattcttctttgtgcttttatgt

SEQ ID NO: 290382 - DNA, 425 bp, Glycine max
  unsure (1)..(425): unsure at all n locations
tgccgttggagttgacccatcaactgtcctaattctctcagactagctactcataggctcttgatcttgacttgatagaacctctttttaagcaaaggcatctaacttgatcccatgttttactagagtgggaaaaaaagtcttgtttgaatcaatacttcgacatctaccatgggtgaaatggatgaatgcatgaagaaatgcttatgtgatgcatgatacagacgcattttacagacatgagagcccggaagattatctcttcttaattacaacatttggcagcacagtgccccacgcatgtacttaagaaggtgacacgaaccttccggcttctcgtgataaatgaacggaccanaatacaatgcaagtgcgatgacgtgacgcagacgcgcgaaagcacaacaaggtgatgtacacagtat

SEQ ID NO: 290383 - DNA, 394 bp, Glycine max
  unsure (1)..(394): unsure at all n locations
agcttggcctttatataaatagtttacacttatagattcaagtaaaacatttttattctactcaataaaggcttctttttactattttaaaaggtgaaatatattagttttatgatttggcatcaaatatgttcgtgacattgtgaaccaaaaactacattaaggaatgagcttagactttgttgttgcttgtaatttatcttgacacaggtaaagttagaggaaaattgtgaaggggtttggatgagaaattttattcgaggggggaaagttcaaaatttaaagagttttaaaaatttggggagggaatgacccctgaggcatccaaaagagccacctttttccccgagagaagctcgatttgtatatttgtttggttttccttanattcttt

SEQ ID NO: 290384 - DNA, 427 bp, Glycine max
tactatatttaacagctagcagacccgacatcacctatgcagtaggtgtttgtgcaagatatcaagccaatcccaagataagtcacttgaatcaagtaaagagaattctgaaatatgtaaatggcaccagtgactatgggattatgtactgtcattgttcaaattcaatgctggttgggtcttgtgatgctgattgggctggaagtgcagatgacagaaaaagcacttctggtggatgcttctatctgggcaacaatcttatttcatggttcagcaagaagcagaactgtgtgtccctatctactgcagaagccgagtatattgtagcaggaagcagctgttcacaactagtttggatgaagcagatgctcaaggagtacaatgtcgaacaagatgtcatgacattatactgtgacaacctgagtgc

SEQ ID NO: 290385 - DNA, 416 bp, Glycine max
agcttgggaaaggttgcaagagattattaagagctatccacataatggcattactcaacaaaagctagctcgtattttttatgttggagtgtcctcaattaatagggtgagtttggatgttgcttgtaggggcaacctcatgttaaaaccccatgttggtgaaatcaaaatcattgaagacatgtgttctatgaaataacaacaatcacactagaagaggggttgaatagtgtgtcaatcaaagatcaaatatattttttgttcaactgtaatatcatagattcatatatatatatatacatatatatacacacacacactagaattgtaaaaaaaaaaaacaagtttaatagtccaataaatatatgaagtaagaagtttaaaagggttttcaaatagacaccaaacacgctaaa

SEQ ID NO: 290386 - DNA, 427 bp, Glycine max
tatttcgaggatagtttattatcatgcatagcttgcattagttggctcataacagaccaatcatacctatggagcattttcttgagcaagtagcctggcctgaagctcaacttccattggtgagacccaacgaagttgctccgcctgagcccacacctgtgcaggtttatctaaagccaactgacccataatctcaagtggtgaatccaccttcttctcttgagcttaaattagtgtccccatctccacctctgattgtcatcttcgacgcatcatcagatgaagcggctacccctcctgattaaccagttggagaaacaattgatccccttgcttccccggttggaggaattgccgatctttctgtttcgtcatctggagaaagctgtgctctcactgattccccagtttagacactggtgacatt

SEQ ID NO: 290387 - DNA, 409 bp, Glycine max
  unsure (1)..(409): unsure at all n locations
agcttgtgttcacaatcgtgctaagccatattctgcccctcccgggaaatatggaaaccattctggaggacagaggaccagtggaggacttcaaccagttggtgggagttctcagccaattaacagggtgtctcagtctgcgggtagaggtagtggtggtagtggtgctcctgctattgctactacaccactcaggtgtgggaagtgtggtcggcttgggcatattgcacgtgagtgcacagatagagaggtgacttgttttaactgccaatgtaagggccacctcagtaccagttgcacatatacgaggagggagaataggagtggaagtctgaataatcagagtggacgaccaatgaccacagggagagtgtttctcttatgntgctgatgcccacagtctgatgaa

SEQ ID NO: 290388 - DNA, 389 bp, Glycine max
  unsure (1)..(389): unsure at all n locations
cttgagatcaggaagtgtanaagggtgaacttcctgtttattcgttttctacagagcggtacctggagatatgtcgcangggtcaagagaccttggggacgtcaagtggggtgctattgcccanaaccaagcttgaccaatcccgacccaacccgggcatagtcggtcagtgagaacctgtgatgtacctaagcaagcgagctcctggcagtcaacagataaaaggaacaaagaccacaaagcatggaggcttgtggtggctggccagctgtgaatcttgtgtgatatgtggattatggcctctggtaatcgattaccaagggtgggtaatcgattacaaggcttaaaaatgaagacaagaggctaagatggtctctggtaatggatta

SEQ ID NO: 290389 - DNA, 393 bp, Glycine max
agcttccaaattagtgtaccacactaccgcaactccggccaagctatcctgaaagaagtgtattaatagcttttcatctttagagtgggcgcccatcttacggcagtacatcttgagatggtttttgggacaagtcgtccctttatacttgtcgaagtccggtactttgaacttcgggggaataacaacatcgggtactaagcaaagattcgtcatgtctgcgaacggataatccccaaatccttcgacggccctcagtctttcctcaaggagatcgagcttcctcctttcttcagttgctggaggcggcccttccgtggacaaaactattggtggtgctgcgatgttgggttgaggcaacgtgcctggtgccggcccttcgggatcggggat

SEQ ID NO: 290390 - DNA, 408 bp, Glycine max
  unsure (1)..(408): unsure at all n locations
tcttttggaccttgaacaagcatttaactcctcttttataaccatgctatgtgctcgcgactggtctctttcttcccttcgcaacttgagttcactattgctaccccatagagctccgcgaaatttgttccggccatactcttccttgcgagccctcttggtctcttgttcaagggctcttgcagtaattgcattctcttcccgtaacccggcacactccttccgaacgtgtgtagcggccaacttgaacttctccttggcaagttttgcctttcctaactcgcttttgagagtttggacttcttcgtcctcttccggtgcttcaaaactctcttcgctgacgactnttaacttggcgagccaatctaaacctcgtatatgaactntcatccattcgtggtacccaca

SEQ ID NO: 290391 - DNA, 403 bp, Glycine max
ttcctctagctgttctgataaggtttccaaacgttagagaaggagaagagattgaagccttcattctactgcctgcatgcaatgaatatttctccctaacaagatcaattttcaaatcgcaacggtgaaaatatgcagaaatgaatttcgaaccaggtgtcccaatttcacaatgatccaacggttaatgagtctgggattatagttttactaggacaggttttgggtctctgcaagaaaagaaaaagttaagatgagaagggaatttctctcacctccaactctgattcgcaatttccatcggtgagaatacttgaatatgagctgcaaacttggtgctcaaatttcacaacaatccaacgattaacgagtccaagatcattgttttactgagacagatttg

SEQ ID NO: 290392 - DNA, 356 bp, Glycine max
ttagattagtgatcacatgaaagagtgtataatatagtatatgcattgagtttgaaatgcgatagatatcaaagtgtgaatacatcctaaaatacatataatggaaattgatgattgaatgttcaagcaaaatgtctaaaaactaagcctacccatacatatacgaaagagagagaacacactagtctcaaagcagtcaccactaaacccaaacccatggcaaggaactacacaaacgtgttgagataagagctcaacaattagaagagcccccataatgggactcctgcgaggaaacatcacacatgacctcatcaagatcctctacaggaccctcatcattgctctccttaatg

SEQ ID NO: 290393 - DNA, 409 bp, Glycine max
  unsure (1)..(409): unsure at all n locations
tttcttccatatgataagagcttatcaaataagcatgatttagctgtttacacaaacacaccatttatgtattaaatctaacttgatagcttaagattaaaaaaaggaaaaaaaggtttgtcatgcctcaaataaaactggctttttcttttacactggcatcgtgggtgggtacacattctggtaacaaataattacaattattcctacaaaataatccagaccaccccatttgtgtgcagcactagcgctactagatggatgataaaatgggaggctttaatagatgtatgtttcttgtggattgttataagaaccaactntgttcacccaaaggttaactagttcatcacgttgatactacaacaaaatagaatacatccttttaaaaacaaaagttgttcaccac

SEQ ID NO: 290394 - DNA, 378 bp, Glycine max
  unsure (1)..(378): unsure at all n locations
tgcaccaacttctcattntatgcataatatacaagtttatattttaatttaatgtttagtaacacgactaaaatccgtagtaagatgaaaaataaattttcaatttaatacttattagcgtatatttaaaagaaagctgttagaaattagtaattattgattatttttgggacatgtaagaaagacattatgtgtgctttttttagcgagacaatgttatttggtttaatagactaataatgtaatttaacatattgaaacatcaaattataaatattctgtacaaaattaatggtatatagatgctggatgtatttattcagcataaaaaggttcctggatgtattttattttttgagactggccgtctctatcttc

SEQ ID NO: 290395 - DNA, 409 bp, Glycine max
tagcttcttttggaccttgaacaagcaactaactcctctttcagaaccatgctatgtgctcgtgactggtccctctcttcccttcgcagcttgagttcactattgctaccccatagagctccgcgaaatttattccggccatactcttccttgcgagccctcttggtctcttgttcaagggctcttgcggtaattgcattctcttcccgtaacccggcacactccttccgaatgtgtgttgcggccaacttgaacttctccttggcaagtttcgcctttcctaactcgcttttgagagcttggacttcttcgtcctcttccggtgcttcaaaactctcttcgctgacgacttttaacttggcgagccaatctaaaccttgtatatgaactttcagccattcatggtagc

SEQ ID NO: 290396 - DNA, 377 bp, Glycine max
  unsure (1)..(377): unsure at all n locations
tgcattnggaattgcgaaagccccactctatcattattattagtacctgacatctcaaacaaacaaatcaaacgtaacaagacaattatagttgctgtttgaatacctcacccactcaagtgtatcacacaattatggcttttctctaatgaaacactcttgccttttaccactctaattccccttgagttcttaggcaattcaagagattatggccacaacaaagaacaattcaccaatatgtgtaaggtaaggctagagagacaaggaaaaggttaaccaagaaaaaggctaacaatgtttttaggcacaaatgaaggaaataaaattcagaatttatgaattcaagtaacaatccttcatgcaaccaatatatt

SEQ ID NO: 290397 - DNA, 408 bp, Glycine max
  unsure (1)..(408): unsure at all n locations
agcttgcatacatggctaaccaattgtcattgtgttaccttggtaggaagtgtttgggttcgtaagcattgttggattaggagaacctttgtctaaggcctatagacttgtgagtgcctttttccttatccacttgatttctggattaaaccttcatgttttttttttgcacagcaaaaatcagataatattataaatgattcagtactaagtgtactgaagataagctgaaatagataccaaggcagagaactgccgaacccaactacataggataaaagcacagtagttggagggttaagtcgatagaataattctgctgagtactcacttggttnttntttttgctcatcaaanatagataatatatattgatagagtaccagtggtacgaanatacaaggtact

SEQ ID NO: 290398 - DNA, 403 bp, Glycine max
tgaaggtgtgtagtccaccatcttttatattagaatattggtaatgtgtctactattattgtcatcattttttttccgtcattgaggtgccacttgagctgccaggttctccacctttgggcgtattctttgaaagatccgtgccccctttttgcacatgttctgtagttacatcctatccgaagccattatactgacacagcctaacgaaggcaaccattatgtccttccaagaatggactcgggaaggttccaagttagtgtaccaggtaacagctaccccagtaagactttcttggaaggaatgtatcagcaattcctcatcttttccgtatgcccccatcctccgacaatacatctttagatggttcttggggcaagtagtccccttgtactcgtaaaa

SEQ ID NO: 290399 - DNA, 412 bp, Glycine max
  unsure (1)..(412): unsure at all n locations
ttgcttgcaagcttgaggatgttggattgcactaactcacgaatgaagtgataatcaatatcaatgtattttggtcgttcatggtgagctggattggatgctagatctatgacagatttgctatcacagaaaaacatgatagaaggaatagtaatctcaaagtgcagtaaaagtcttcttagccaaatcacttcactagatattgaggagagtgcccgatattctgcctcaacagaagacttagacagaatgggttgttttttttatttccatgatattaaggtatctcctaaaacacacaagaaccagatgttgatctgcgtgtgtccaagcactttcccaatcagcatctgcttatgcagacaaattgcatgaattgtttgatgaatatgacaccctgacctgcagaccn

SEQ ID NO: 290400 - DNA, 377 bp, Glycine max
  unsure (1)..(377): unsure at all n locations
tcctactcttagtttgctttactctttgnntctttgtgccttttgttgctgttaactcggtatagttatgccttagattaacagtggtcatgccgttaagctatgacttcagtgttattgataaaactgagttaagttttgagtactttttcactattagtagaagtacgcaaaaaaaaaaaaaacttttattttttgtgctatgtccaaggttaattacagtcgtggttgtggtttgttgcgatccttgacattgccggaaattgtgggcaaatgcaattgcaattgtggtcgcgatgtggttgtggcaagcctcaaaaccttgatattgcagctgaagctgtgtactcttatatagtgcacttagctttataatt

SEQ ID NO: 290401 - DNA, 372 bp, Glycine max
agcttgttacagaacttaggaaaaatcaagaacaagcttgttcgcacatcgttcgcgtgtatgatatccactcgacaaggtttgaagtagaggagaccttcaatcctataatgcaacgtggcggacaaaagtgggcagttaacttgaatggccattattgtcaatgcggaaggtattctgcgcttcactatccatgttcacacattattgcagcttgtgattacgtgagcatgaactactatcaatatatagatgttgtttacaccaatgagcacatcttaaaagcatactccgcacagtggtggcctcttgggaatgaagcggcaattcctccttctgatgaggcatgggcactaatccctgacccaacta

SEQ ID NO: 290402 - DNA, 381 bp, Glycine max
tgtaggattatggggtacccatcacatgtggtactatgtggcggtcgggcgatggtgcacaacaagtttttccacatccacaatgcgcgcataaacccaccatcccctgtagcccacctccaactgagctcacgtactcccatgtagcccatatcctcgtttctctcaacaccgggtccccatcaatcctcccaagcttccccaacatcaaagtaatacaacattcaaacagcacaaactatcacagccaagaaaacagagcagaggcagaaaactctgccaaaacaccaaccaaaatcacagcttttctcacttaaagaccccagtaacaattccttcgttccaattcgttaaccgttggatcgactccaaatttttact

SEQ ID NO: 290403 - DNA, 389 bp, Glycine max
  unsure (1)..(389): unsure at all n locations
agcttttagaanaagaaatcaattgaaaatgatgagcaatttatgaaaagtgacatttatttttttgcaagcttaattaataatgaaaggaatggagagaaaaaatggaaaaggttaaatccgtgcacaaattataatcgtcgttaaaaatttaatataactgtcgttaaaaaagtattttctagtagtggtaaagttcactttattgattgagtcataacttaataattcaatcttatgcagtcacaaagaaagttgaaatttgaacacaaaanagaaataaagatgaagatttactagattgtcatatttttttttaaanaaaaacattattatacatgtatatattattataatcatgttaatggtacatatatcatcatatttaa

SEQ ID NO: 290404 - DNA, 409 bp, Glycine max
  unsure (1)..(409): unsure at all n locations
tgcatgtaagatactgcaacttcttgctgatcacgaatatcttgcagtatttcccttggtttgtattgtggattatctcgaatgcgtgcttcaacagatcttgcaacccaacctactgatgcctgctgatgatgaaggttctgaactccctcgcaagtatgctctccgtgtagagttcttacagtaaaagttggaacaccgggacactttgctacatggacccgccatgggcacccttctttggagcattntgctataaaacgactgcgatctgacttaactatcctaagatcaaaatgcatagcaatggcaatatctttcagtgttcttcggcagggtttcacatctgcaaactcttgcccaatgactaacggctgctctgctacagtaacagtactaacagatgtgt

SEQ ID NO: 290405 - DNA, 379 bp, Glycine max
gttctgtgccatcattggaccactttgtacacgactttctatcggctccaccttctatgtcctgatccctctgctcttataatcaaccctctaagatatagccaatgtaagaatctaaatggaaaaatgtctaagaagttatgggaatacacatatatacaatatgtaaagcatagtacacttaattaaaatataaaaacataaatttacatgtgtatcgcagagatatgattgctatgactttatctgtgatcatatcccagtttagacacgtagcgtacgtggtacaaaaatttgcaagtgtatatgcacagcagtgcttgatgacaattaacaaaaggttaattgacatgataaaaagggtatcaaaaaatataaa

SEQ ID NO: 290406 - DNA, 377 bp, Glycine max
agcttgctgtgattttattctgtgaaggactcaatttcagcaatgctggctatagagttggtgggcctcaaaagaattattgatggcattgaggaatgactctatttcctcatgaagctcatcaactactatatcattgaatctaaaagcctcaatgatttcttgctgaagctttcctttgtagtatggattcgaaagagtgtcttcaaggttctgatcaaaaacaagtttttcgaaaggagccacaacctcattgaaatgggtaaaaggcatgttgttactcgatgtggaggcttttgaaggcatagaatctgaagaccaagcatcaatgaaagtgaaagggtatgcatccattggattcacatctacctgaggag

SEQ ID NO: 290407 - DNA, 467 bp, Glycine max
  unsure (1)..(467): unsure at all n locations
agaatgtttagtgagtcttgactgaanccttgaanacagtgaagtcttataanacccatttgaccagatagatcatgttgtctaccactaaatttctctatttgtagcgacatagatcgcgaacctactggacatcttctggctcacccttcatgattaattggaaactcgtcaaggagttatattactgtgtggcttgaaaagtcttattggaaaatctgatatccctcctaataggccacacatgaatcttactgttaatatttaaattaagatatatgagcaggggtgctcctataccttgacgactcaaaacgggcagcgcggctatggtctttttgaaagttacgaaggcttgcacataagtcttgttccatgagaatggctgacccttttgtagcactctgttaatgcttcatctttctcgcgatctatggcacgtacctggacaacgatgctatcctacc

SEQ ID NO: 290408 - DNA, 383 bp, Glycine max
agcttgtaataatcttatatagaagtatgagattaagttcctgagtggaattttgatgcaatcctcccatggagggggcccatcaccagagtcatggttaagagactccaggaagattgggccagggatgcaagagaatgccttagggttctcatgagccttagggtagcttttgggcccatgggttaagtatgtgcccacttatctttgttcatattagattatggtttcattatttttttgggccttgatttagggcaccacagtgtagggagggtaccccataagtttagggtaccctagtaatgtaggatttttcagcccttgtattttagggctcacagactagtttttgtatcagggatagttttgtaatttcacat

SEQ ID NO: 290409 - DNA, 407 bp, Glycine max
  unsure (1)..(407): unsure at all n locations
acatttgctactggaatcgatacaataatctggtaatctattaccttagagtaaaatctcttttgtaaaaggttttgagaaaaattcatgtgctactcagtttttgaaaaaactttttaatacttatcttgattgagtcttctcttgattcttgaatcttgatcttgattcttggaacttgaatcttgaaacttgattcttgattcttgaaatcatcatctttgttaacatgaagtgttcttgagttttgagctttttgtcatcatccttgttatcataaaaaatccttgaatcaatcttgattcatcatgaagcttgcttctacatgaaagcatttgaaaataaagcaacaattaggcaatatatgtatatacatcaagcatggccaanatacatcatcaagcatg

SEQ ID NO: 290410 - DNA, 377 bp, Glycine max
agcttcaagagatcatcctctctacaacattattggtgatatctcaaaaggggtaacaactagacattctcttaaagatttatgcaataatatggcttttgtatctatgattgaacctaaaaatataaaagaagtcatattagatgataactggatcattgccatgcaataagaactgaaccaatttgaaagaaacaatgcgtggaaattagtagaaaaacctgaaaattatcctgtcataggaacaaaatgggcctttagaaataaattatatgaacatggtataattattagaaataaagccaggttagtagcaatagggtataatcaagaagaaggactagactatgaagaaacatatgctcctgttgcaagat

SEQ ID NO: 290411 - DNA, 481 bp, Glycine max
  unsure (1)..(481): unsure at all n locations
agagagtgganatttgatacgtagcattggacgcactcgatataactactaagcttatcaattggattacgcttatatatatatatatatatatatatatatatatatatatatatatatatatatatatatatatatatatatatatatataggtggaagcccacgctcgacattccaatttttattcccattacattatattggaaaattctgtaatatctgaatccggtacgattttcaaccaacaattaaaaaggagtcaaagtgtttcttctgtataaagaaaggacacatatagaaggactgccccatatttaaaagttggtgtgtgaagataggtacaccatatactatcgtttgttatgaatctaatatgattaatgtacatcataatacatggtggatagactctggctctacaatccatgtggctaataactcgcagggtatggaaagtctatagaagccagctggttgtg

SEQ ID NO: 290412 - DNA, 297 bp, Glycine max
ccaaactgaaatgagatgccatgatgccatataccccctaaggatttttatttaaaaagggatcgaagcaataatcagtatgctgctgaagaatgcaaacaccaaataaggggaagatttgttgaaatgagagacgtgtaacatccaaagtgtgggctacgttaacatgccgtttgttggagttaaacacaatggttgaggatgaaacctttgacataaatctgttagaaataccccatatcctcgttagaccacttttcataaattcgtctatactgtacaagtcaatatgatctt

SEQ ID NO: 290413 - DNA, 374 bp, Glycine max
agtttttacacttagggactaatgtgaatgaaagaaggggttggatgactagaagaaagaaataggggaatgactaaaaaggaaggtttcccctaagggatagactcaggctttagatttcttcactagagagctttgagactcggtgtgttttttccttcaacttcctattccttttataagcctaaggtagcttacttttcacgctgacaacatgcacttctagtagcaagaatggcggtttaatcacgcgcttagcgcagtgttcgcactaagcgcgaccctatgccttctttgcactaagcgcgagctggccgctgagcgagcatgcatgctgggctcgtctcgtgtgctaagcaagctgtccacttctt

SEQ ID NO: 290414 - DNA, 399 bp, Glycine max
ctccgcttgaccttcttagttgttctttgctaaaattttcttattgtttgcaaataaattgtcaaaatactgaacatctttagggtgagtatcacatgtaaaattaaaaatatgttaaagatttttattattgtttttagtgataaatcttattttaaaatcttagatcattcttaataggtctcacatgaatcttatcttttaatatttaaatatttttttctttttattttctttcttttacttctcatttctcagccgtcatgctctctcaatccttcttttttttttcccaatgttcacactttcttatttttcttttccttccctgccactcccgttcccctccacttcatgctgactcacccttaccctccccctcccctctgtaacttcctc

SEQ ID NO: 290415 - DNA, 283 bp, Glycine max
aatcttattgcaaccacgagattcagctcctgagaggaatgtacgtgctataactaccatggatggggcgccatcaccaaagtcatggttgacagactccaggaagatcgagccaaggatgcaagagaatgccataaggccctcatgagccatatggtatcgtatagtgcccatgggttaaacatgcgcccactgatcattgtgcatattatatcatggtaacactatttggtggagcctcgactcatggcacgacattgtatgcagggatccacataatgtt

SEQ ID NO: 290416 - DNA, 408 bp, Glycine max
  unsure (1)..(408): unsure at all n locations
aactaagcnttaagaattagaattatgatttttgaggcatgttttataaatgttgattctgatagcgcgtatttgaaatttcattgatttgtttgcacatcctatgtataacactataaaatgggataaatacattggtctttagatttcaccttaataaacaaagctgatgcttcacatggatattgatatttgaaccatctctgcagctacttcctacaacaaacaacacaaattaataaacattacaaaaaacaattgtatggcttatgtaaatgaatgtatcaaaatcaaatatataaatacaaaattacatctgacaatgttaattaattctccttcatcatgatcattacgattagcatgaacgtcgaaggcttttttttcttcgacaacattatgagtgat

SEQ ID NO: 290417 - DNA, 264 bp, Glycine max
tgtctgcaagcttgtggcttgttcacccatttgtgtgtaaggttaggagatttatcataggaaaatgtactgcatcattagaactggataggacaaggctcggttatcgaactaccagacatggagagcggtattttaatttttatcatgctgtaattgtaatgctaggcggataggctaatttcaacaagagacatctggatgcaaagtttaatttgaattatgccaaactcgccagacatcggtgttaggtatctgtgcctt

SEQ ID NO: 290418 - DNA, 414 bp, Glycine max
tcgagccaaaatcccaagtcactataaaccttgacttatagtgagaatgcccatccttgccctcagaagaaaacaaaacaaaaaaagaaagttcccgatcaaggattggaagaaagcaaaagaagaaaattcccaatcaaagattgggagaaagcaaaaagaaagaaattcctgatcaaagatcataagaaaacagaagaaatatgcagaaaggtctttggactagacaatatatgaacaatacagaattgtcaccaccaaataaggaaagaaaggaaaccacgatatgaagtggtcctctccctttgataagaaaggtgacttttctgtctcgcactaaacaaaaacagaaaatgaaaaggccaaaacactcagagccaaatttcccaccaaaaacaccattcccgataaagt

SEQ ID NO: 290419 - DNA, 356 bp, Glycine max
atctgtatatgtatcatataactattagcattatgcttctaagtttcttggaaaacatagaaggtatagagttaggtcttcattaagaactgtctgaccgacaaaacaaacagctagttcatcagcatgtaacttgatgccatgcaagtgtattcagtaaaaggctttgtacttttgactctttgatggccgtgatgcgagattgtgacttgttggcatagaatctctaagatataccaaacagtgaggttttggctcttgaaatggtggtttgaatgccggaaggatcttgtggtgctagaaagaatgcttgagcagctgatcttgccaatgccaaaaggagaatctagacttgt

SEQ ID NO: 290420 - DNA, 308 bp, Glycine max
tggtgatagcttgtgatgttgcttgagcattgagttttatttatttttctgtggagattcacgtcacattggaaagttgaatcaaaacccaatcgaaaggactcacgattcatattaaaacactaagaaatgagtgagttatatcctatgctagttggccttgttgcttataaaaagttgaataaattatgttgcatgatttgcattctcaaaattttatggacatgggatctgaatgagttcgattatatataaaattaacacattctgagctttctttaaatgtaaaaatatgctcattttcataa

SEQ ID NO: 290421 - DNA, 417 bp, Glycine max
ctataaaactcagcttctaaacttgtacttaatgaagctcttataccatttgttaaacaagtggcctcagatatcttaagaaggggggttgaattaagatatcacagactattccccaactaaatattctacttttaatttgatccaacaacccaaaattccctttaaaaatgaactcctaaataataatgcaaattaattcttactgaatagaaataataagcaataaacaataaaggagtttaagggaagagaaaatgcaaactcagatttatactggttcggccacacccttgtgcctacgttcagtccccaagcaacccgcttgagagttccactatcttgcaaaatccctttacaagttctgaaccacacaaggacaacccttcctttgtgttcaaatttctttacaacaag

SEQ ID NO: 290422 - DNA, 323 bp, Glycine max
agtttttatgatgtcattatatacactctgacaattaatagcattttaggttaaattcctataaataaaagcaacaatgatgcgcatacgataactctaattctaaaacatatcatgacctatatttattacaagaatttaatttatagaaatttaaagccttttcttctattttccattatataaataataccatcataggaatcttttttatattattatctaatgatgtggaaaaacatatcaatatccatatgcacatgtgcatggaggacaaaaagcaaatatgcatatttgaatcatccagccatagatgacatgga

SEQ ID NO: 290423 - DNA, 236 bp, Glycine max
cccatgcgggcacatataatggcgtaacatatggggcgagaaccttggatgctcttccaatcatttgctacatgatcaatatcgttttgcaagataacaaagcatactcttatgtttcagcccctatctctatccgtaactacgattgaatgcgtctcgctttcatgatgacgtaccgggtcactgacggacttagagtgcttgccttgccgccatgctaacttattatacgtgat

SEQ ID NO: 290424 - DNA, 373 bp, Glycine max
agctttgacttgagtcatcaagagattataaatatgtgaccatggcatgagtttcaaaaatgatcaatcatctttgaatcatctatctttcaatctttcttcaatatcatatctcaaacatctttcaatcaatctttcaatatcattctacaaaattttctgattcatttctcttcatctttctaaaagttttttatcaacactttctcttccaagaaaagttctttgttcaaaaacttgtgctattcatctttttcattctcctcttcctttgccaaaagaacaaaggactaaccgcctgaattcttttgtgtctctcttctcccttacaaaagattcaaaggactaaccgcctgagaattcttttgattct

SEQ ID NO: 290425 - DNA, 424 bp, Glycine max
agctacaagagcgtgggaaagttagatagaaagtatgttctactgatatgtatagcattgtagattgttttcattgctgaaaaagttgcatctttatttatccaagatgtgtataattttaggttttgtcatttttttatgggtacagcttctttctttaaattcttctgccaattatcttcacttgcttgtattaatttgtttagaagctatactaaaaattagttatggacttgcgggagttggttcatgagtcctaaaactcttgccacgaaactaatattacttggctagagcaaaactaatattactcttgacaaattttcctactgggtagacaagtatccagaggttataagtagtatatactggtttaagttcgacaaatttccttataatatgtcttcaaaattccaaattaact

SEQ ID NO: 290426 - DNA, 383 bp, Glycine max
agcttgtatataattatcatttgttttggctaataacaaactgaacgttacattgttaacattagatagtgaatatctatcgactagtgaatagaatgaaatcttattttagttcgttatctaattttacctttctcaataattaaagcttataatcttctaactcccgtttcgtctttaaaatgtatctttaaaatttatgagtttaataaccattttagtatataaaaatttacatggtcaattatcaatcaattaaaagtcataaaatcattctcattataatttttaaaatagttatattataaaaataataaatttatcatatgagatgctttgtcattgatctgtgattgaataattaggtgtgttatacttattct

SEQ ID NO: 290427 - DNA, 345 bp, Glycine max
agcttgtgtctctagttcctcccgaataaatctttgtgttttagtgttaaattatctatttaatcaatcgtttaaaaaaatattgttagaatataaaatcaattagacattttgctttgtgttaataaaaacacggaaaaaataaaatatgacagatagaaaaggccgaagaaattaaaaaaagaacaaaaaatggaaaagaagtgaactcaatcctatcttactctttttagtgtggcatggtgtgatgaccttgctctctgccatttaccattttcatcatagcaattcatctttacagcacatcatgtacgtaccttatggctctatgcgaatggattaatt

SEQ ID NO: 290428 - DNA, 373 bp, Glycine max
agctttataagtgcgggttctgttgacaaaggtcaagcgttcgcgatatgcgaagatgatattccgagtactttggatttggtacgaccatgctctcctgatttccagctgggaaattggcgagtggaggaacgccccggcatttacgcaacaagcataatgtaaacctttacggttttaaaagctctatagttgggcctaggctttagagctttcattttgttaaggctttgtgtcttttgtttttgaatttataatacaaggatctttcttcatctgttcctggtctctacccattctcattcatttgcatgtttacttctttttctaaaacggcagattcgatgacgagtcccccgaaggtactaatacc

SEQ ID NO: 290429 - DNA, 409 bp, Glycine max
  unsure (1)..(409): unsure at all n locations
tagaatggctagacatgatacatgtcanggtttggtttggttcaaagctctgagaatggctagacatgatacatgtcagggtttggtttggttcaaggataaaagggatgccccacattatttccatgacacaaatgcaaaaatgatgatttggaaacttcatgcaaaactggtcatgcatgcacctatgtggacactcaagtgtcaaatttttatggtcatgtgatgctaggactcaagattcatttcctctattttaaatcaacccaatgtttccaaaatatgttcttttatcaatttgtgcattcatccaagtccatttcgggcgtccggtgaaatttcacagcattcacccttcaggtgtagacacatttttcaaaaattggttatgatcaatgaattctttttc

SEQ ID NO: 290430 - DNA, 364 bp, Glycine max
agcttttctaatttattcaataagatgcatgaataatttaatcataaatcataaattccatacatgatgtaattattcatgtatcttattgaatatatagatcttatggttatttcatataattagttaattaactggtgattattttctgaccaagcctggtgattatttcatacgtttagttaattaattgattttgttttatattttatttattaatttttcataatggagatgaattctagacaattcatgtttgaaacacaggatgcattgtttagtagcatttactttgtgatctgtgtctcagtttgtgttggaaagactagctgtactcagtctactgtgatttgttttacttcat

SEQ ID NO: 290431 - DNA, 404 bp, Glycine max
ctcttcacatttgaatttgaatttcaacgttcaaaggcactggtaatcgattaccaaaacattgtaatcgattacaactttttgaaatcagttggaacgttgtaaattcatttgaaaactttttcaaatccattttgctactggtaatcgattacaacaatctggtaatcgattaccagagagtaaaaactctttggtaaacatgttttgagaaaaatccatgtgctactcaatttttgagaaaaaccttttcatacttatcttgattaagccttctcttgattcttgaatctcgagtcttgaatcttgatctcttgaatcttgattcttgaaatcttggtctcttgactcttgattcttgaaatcaaacttccttttgaatcttgaagagttcttgaatctat

SEQ ID NO: 290432 - DNA, 382 bp, Glycine max
agcttgcttgtggagcttttatggaggctggatctttgaggtgagaggaggcgccatccactatggaataagccatggaagaaggagcttcgccaccaagagagtgccttggataaaaagcttggagagggtgcttcaatggaggaaaagaaagagagagagaaagagagaggggggagcatgaaattgaaggaagaaaagaggaagagaagttgaactttgaagtttgtctcacaagactctcatgcatcaaagttacaacaagtgttacacatgcttctatttatagcctaggtagcttccttgagaagcttctttgagaagcttccttgagaagctagagcttagctacacacaccattctaataactaagctcacctc

SEQ ID NO: 290433 - DNA, 424 bp, Glycine max
aaccgatacactaagtaagttaccaactcaattgtatgctagtcaaccgttaccttcatttgttttgcaggttacaggttgcacactttgtggtggagctcatgggccaggcttgtgtattcccactgaagaaacatctcatgaagttaattacatgggaaaccagcctagacaaaactttaatgtagttggattttctggatttcaacatggccaaccttaccagcagcataatcaatggagaactcaccctagtaatcagttcaataaagaccagggtgggccacctaataggccacaacaacaagggcctagcttatatgagagaacaaaaaagctggaagaaactcttgctcagtttatgcaggtgtcattgactaatcataagagcacatagtcagccataaaaaatctagaggtccag

SEQ ID NO: 290434 - DNA, 371 bp, Glycine max
  unsure (1)..(371): unsure at all n locations
ttatgcaagcttactctcacataaagctatatcagaaccagacattactaatgaaaattaccaatcatcctttcctttgtggaactttaaatcattcaaaatctcaatggaagcataacaattattcacagaaaagttcattgctaagtcaaaacaagaattcatcaggataaatttaggacaagatatagctaaaaattaaacaagctatcaaaatgaggctagtactatagcacatgcctctttgngtagaatgtacaaactaaggttacaaccaaagtcactacctcaaatgggttaatccatgtgcatacacaaaattaagaagatagtcccctttaggtagacatatccttaacttagtatgttcc

SEQ ID NO: 290435 - DNA, 409 bp, Glycine max
  unsure (1)..(409): unsure at all n locations
tattagaaatttcatgtggtcatgtgataaagaccttaggaagctaattattgtctcccggaagaagatttacagacttcttcaggaagggggttgggttgtagatcaatcaaatcgattaaccgagcatccattcttgcacatacttgaagcatgatgaccaatgatcttgggctaagcaaataaaagccagccagagttttcaacgataactaccgcatgcggggttatattaagtcttttatatggttggtttgaagcttttttggaactcggttagccaaaacaccttttggatgcttggcaatggcaaaagaatcaattntttatgcgataattggattcaacaaaatattgcttcaaccttgaatattctagaatcttatcaacaacatcttcaagccttagt

SEQ ID NO: 290436 - DNA, 375 bp, Glycine max
  unsure (1)..(375): unsure at all n locations
agctttggtcctattcaaatagccataacttttgacatgggggtacgattgaggcccatgatatatcgagaggctcgaaattgaaaaatggaagttctcgagaaattcaaatggtcataacttttaacttggatgtccgattcacgcacataatatatcgagacacacaaaattgaaaaatggaattctcgagaaattcaaatgttcataacttttgcctcgaatgtcagatttaggcacataatatatcgagacgctcgaaattaaacaagaaagctctggtccaattcaaacggccataacttttgacatgagtgtatgattgacgcccatgatatatagagacgctcgaaatngaataatggaagttctcga

SEQ ID NO: 290437 - DNA, 412 bp, Glycine max
tcattgcctaacaagccaacttacaacagcaagccttatgagactcatcataaggatgcacaggtcaaagttgagtatgtgaaaagattgtatgaccaagtgaaggtgcaaattgcaaagaagaatgaaagttatactaagcaagccaacaagaaaaggaaggaagtggtacttgaacccggtgatgatcctggacatttgaggacaaatgttttccaagaaggagggaatgatgagaatcatgaaacaggccaaatacagtctaaaggcccaagtggagaaggacaaagcccccgagtggagaaggatgaatgcccaagtggagaaggatgaaggcccagaggcagagacactatcaagactattaattgttgctgaaggcccaaactaatttgaaggcccaagttaaata

SEQ ID NO: 290438 - DNA, 247 bp, Glycine max
aaggaccccgagacagcggaggggaccaaacggcacaccgagggcagggaaacaagcgaaggcggagaccgggcaaacacgaaacgacaggcaacgggacacctaaagcacaaaaggggccacgaacgagaaaagaagccaagcagggcgacaagcaaacaccacagacaagaaggccccagggccagacccaccaggacaagcggacgaacggccaacaaaacgccaacacgacagcccccaagac

SEQ ID NO: 290439 - DNA, 540 bp, Glycine max
  unsure (1)..(540): unsure at all n locations
gagatgcatccacacgaatcgaggaatgtaatgacacgaaccgcatctnttaaatataaagagcagtaagatgaacccctgactgacgcgctcgatacactgggaagctcagaanacacaagccactcaccgcggggagcggaatatgtaaatggaagtgttttgcgaaacgctaggcactcaacgaagaattggaaaagaatcacaacaaggaaaaagcggtaggaacagctaacaacgaagccaccacagctataaagacgatctggggacaccaatgcaagacacgccgagcaagcaacagacgtgggagacacaacgccaagattagccgaccacgctatgaacagacacaagagcgagcacccctatgtgaaaataaccgccccgcgcataaggcccatcgcagcagacgctgcaagcaacttaaacaatgaacaccgtggaggagaaactcgagattccatggcccagcacctagaacacggcgccaccaatcccctttgcaccgaagaataccgatggatgaacacggggacg

SEQ ID NO: 290440 - DNA, 542 bp, Glycine max
  unsure (1)..(542): unsure at all n locations
aaagaatggnnnaccagcccaccacnccgacgcgnnangangnggaagagggagaaacaagacgcaacanaacagcacccgagnnaantttgagccctgtgaagccctgacaactcnaggcgaacccagcgcagccccggagaccctctgcaggcaagcaggctgtctgcaatcatgcccaaaagatgcatgaaggacttcaataacagatcaagacgtgcatacaggacggaacgactcacgtacatcaagaagcaacagaacacatggggagaaaacagaaagcgaaaaagaacaggtgaccatgaggtgaccgagccaggtgaacatagacaacgacggagacaacaacctgaaccagataagtacctgcactagccaatgcgcgagacggagacgaatgagcaacaataccaggatgggccgcaggagacacggcctaccagcgaagcacgggcgagcagagcaaaaacagagcaataaaacaaccggacagaacgataggcgggaacaggataagcaatgcgcagatagacggtcgg

SEQ ID NO: 290441 - DNA, 126 bp, Glycine max
tgttcagaattctaaagtaatctctaatcactaatgtcacgtgacattctaagttgagtagtgattaacactttgatttattggattgattatagaactaatttcttttaatctcagattcaatca

SEQ ID NO: 290442 - DNA, 374 bp, Glycine max
agcttgttgagaaaaggttcaagaagaattaccatcctgcttgggctgctgcttacattcttgacccgctttacttagtgagggacactagtgggaagtaccttccgccgtttaagtacttgacaccagaacaggagaaggatgtcgataggctcataactagactcgttgcaagagatgaagcgcatattgctctgatggagctcatgaagtggaggacagaagggcttgacccggtttacgctcaagctgttcagatgaaggagagggatccggtcaccgggaagatgaggattgtcaatccacagagcagtaggcttgtgtgggaaacttatttgactgaattcaagtccttggggaaagttgcagtgagg

SEQ ID NO: 290443 - DNA, 411 bp, Glycine max
tagaagacacattcatgaataatgaccaattggtgtttaagttccaagacttggtggaaaataaaagtcatacattcactagattttgtgatgtgttattgcattagaatcatttttttcacaagatgcttatggactatatagtcttttgaaaattttgaaagtacctgtaagagaaccaaacaatgataagttagtacttttctaatcaaattggacatatcactcttgtaagcatatactgataaattgagaggaggtccaattatttttaaatagtcttaatggtggcataaggtgagttgatgatgatagtagacacttataaacattaatgtttaagtgaattataactcaagtagagttttaatacttagtgacaaatgtgttcttgtgggaggtgcttacttc

SEQ ID NO: 290444 - DNA, 403 bp, Glycine max
ttagacaaaatggatgagttggagagatgttcatgttatgttgattgaagagtttcaatgttgtttatatttacatattcatctgattcaaagtctgatccttttgatgtagtgtttgccattagaaaaaggttggctttttcttcttcttcttcgatttcctcatcgaatgatgtgtcatcttggtcttcccaagtgctcattagtactttgttgtcctttggcttgaagtaccttttcttgtggtatgtcttttcaagatctggatattctgacttgaagtgtcctggtttcttacacttatagcatatgatggaacttttatccctatctttcctttctttatatggattcttggatcccttccactttgattcgttccctttcttccacatgttcctta

SEQ ID NO: 290445 - DNA, 361 bp, Glycine max
agcttgtataatggctagacatgatacatgtcatggtctggtattggtcaaggataaaagggataccccacattatttccatgacacaaatgcagaaatgaagatttggaaattttatgcaaaactggtcatgcatgcacctacatggtcgctcaagtgtcaaatttttatggtcatgtgatgctagggcttatgattcattttctctatattaaatcaacccatatgttccaaaatatgttcctttatcaatttgtgcattcatcctagtccattttcggcgcccggggaaatttcacagcattcacccttcaagtgtagacacattgttcagaaattgcgtatgatcaatgaaattttc

SEQ ID NO: 290446 - DNA, 386 bp, Glycine max
gtgctttatgcttaaaagccacacactgttcaatggagtgtcatgggacaccaccatgataggcgaatgtaatgataggcgcatgtaatgttgggattataccatcggggaactagaggttcatagatctttcctgggcttactattgctatttggttatcaagaaagtatggtagtaggttaatgtatgacattggaattggggcaaataggactggtttcttttctgggaaatctcttctgggttagtgtttaggataggattgggagtagtgtttggtctatgttgtataaggggtggattctgtgggtgattttggggtggtctatgagggtgattgggaactcttggtccaacgtggactgggcatggggagggttaatat

SEQ ID NO: 290447 - DNA, 384 bp, Glycine max
agcttttaccttttttattgcctgactgttacaacttacaagttgcaacccatttcttatagttgttccccctcttattatgttgtttgttttgagaatgtttcttggtttggctccttagaattaattctctctctctctctctcaatcttggatcacttatctactttgaactatttttcttgtatgcactgagacagcataacttatgcttgtatctcatgcttcagtctgagttcagtacaagttccatatctttttcattttataattcgcttttgggatgtgcactacagggctctcagtctcagagctaaatgtagcacaggcaaattttgataaagatgagcgtgtgtactgtgtgcgatgtttctcacttttttt

SEQ ID NO: 290448 - DNA, 425 bp, Glycine max
agctgtaagagtttaacagattgaaaagcccccaagttatttctagttagagtgtatttgttttaaatagtttagtagcttacaagccagttaacatttgaccaaaaataagttattaaaagtgtttggttagaaagtttttcttgaaaaaactacaccaagttaaaaattttaatttgataagttaataaagtagcgtatgacttataagagtgctatattttactcttgttaacttctttttttaaaaaaatgacaacttatttactaaatattttcatttcatgcagtctgtactctgtacattcatgggcaacctcgtagtacagttgagacgcgtgttgtaagatattaaaactctgtgaaagtggcttgccatatttcatttttaagcatatatatgtggatgaagcttgatatcttta

SEQ ID NO: 290449 - DNA, 290 bp, Glycine max
ggtaatgactgtgcctgaaaccagctatgcctctgcgatgaaatttaagctttctcctgtggcacttgttattttactaggtaactattcacctttacttggagtgtcccaacatagtgccttcaacgccgggcgctccatgacctctacccgcctagtttccgtcagacaaaagggggtgtattctgcagaggagtcctgcaaacccgcggacgtgcaacccatcgaataatgcccttgagtgcctcttacatgcgtccaatacttctcactgattcacattgacatcc

SEQ ID NO: 290450 - DNA, 380 bp, Glycine max
agcttggaagattccactacgattaaagggttcctctcggtgtggggtttcaacggagagctacggcggcttatggcggccaccggtggttgtgggtggtggagaagaagcttgggacgttggaaatggttttggggaagaggaagagaaaggaaagactgtttttccaaggctacacgaaaaataaggcttgcaacactcaagtgtttctgctctcgggaaaggaagcgtcttgaacacaccagaattcatatcgcaaatcgcaacagtcagatcgtggaaagctgtcctatgaacctccagaccaagtttggagatgatccaactggtaacaaatgcagaacggtgtttttaccgagagagcttcacacagcttcctt

SEQ ID NO: 290451 - DNA, 179 bp, Glycine max
tatggacttaccttgaattaattcctttgttaacccttttgagccttgtttccctttccttgatttgaagctcactacaagccttaagtgaaaaaccatgatatcaccatatccttaaggaattttggagctttggaattgttttgggaataagtgtgtgtgtgtgtgggggggggggg

SEQ ID NO: 290452 - DNA, 382 bp, Glycine max
agcttaaacaggtttagcttgatggatagtattagaagatatgaaaatatctaattatattttaaagtattttctattatgctttggtattaagtggtatcctatttccccgttttctcttaggattggttacatttccttatcccatgatttagtacctagtagcccattcttgaccacaagggatgactccaaatactctttaatacttaagcaaactccaaaataaatattagacaaacaaataagaacaaacaagtcttaatcaaaggagtatacttccatcatccttaacatcatagccttaaaagcctattaccccaaccacaaaggaacatagagacaaactaactagacctctccattcccgtttacattatca

SEQ ID NO: 290453 - DNA, 380 bp, Glycine max
ttataagcgcgggtctgggaaattggtacgaccatgccctcctgattttcagcttggatttggtacgaccatgccctcctgatttccagctgggaaattggcgagtggaggaacgctccggcatttacgcgacgagcataatgtaaacctttacggttttaaaagctctatagttgggcctaggctttagagtttttccttttgttaaggctttgtgtcttttgtttttgaatttataatacaaggatctttcttcatctgttcctggtctctacccattctcattcatttgcatgtttacttctttttctgaaacggcagattcgatgacgagtcccccgaaggtactaatacctgggacccgcttatcgacttcgagc

SEQ ID NO: 290454 - DNA, 366 bp, Glycine max
agctttaacctcatcgtctctcacagtctttagatttgggagccaatccaatccttgtgtccggactctcagccacttatgatagccgccgatgctcccattactgcttcccctaagctctttgtcctttcttcacaccgcatcacatgccttgtgaattccttagagtaccctcgcattggggtcactgaaaccccgtgtgatgaaaggcgtgatgctttcgtctgatgtcactcctctcatggggtagccaagctgtcttatggcgaggacgggattataattaatacaaccccttgttcccatcaagggaacatttggacatccttcgcatgaagatagaatcctgattcttccttcgttcta

SEQ ID NO: 290455 - DNA, 424 bp, Glycine max
  unsure (1)..(424): unsure at all n locations
catctccagcataatggttaattgtgaaaaagtctcatgagttgagggaaaatgctgtagaaaacaagaatataattacaatttcaactattatataatcaattaaaaatgcgacccacaaaagcatatggattatggtaaacagaagatttcaaaaataactaaagaagtaagaagataatacacaatgctatattaactgtaattgtcaatcatattatattcggaataaaagccattaaccacaggaatgcttttcaaaacaaaaaataaaacaaaagaatgtttggaggtcacagtcacagtaatgtagaacctgcacagatcgaaccaagcatacgaattctaaatctaagaacaaaaaggaagaaaactacacattctcaagcttacatctncagcataatggttaattgtgaaaaag

SEQ ID NO: 290456 - DNA, 380 bp, Glycine max
agcttattaaaatgaacttacaaacttataaaaatattacaaaccgcttttataagttaaaataaactctaccaagatttttatatatttcaagccaaaagaaagtataatttgcaaaagcattttcccttattaaggggccatgctaaagagtcaatttatataatactggaagcatagaagcagtaccacataaacaaaccctatacaagtttgctttcataattgacttaatctgtcatgcggctgagtggtcgccgtttagcataagattttgacagaatcaacatcatccaaacctaataaggtagggttagttacatagattcaattccattttgtgttatactcttatattccaattatatgtatgaaaaaga

SEQ ID NO: 290457 - DNA, 409 bp, Glycine max
tgtccatatatagagtcattacttgcatgactttgtattacgttcacgaaatatttaagcatgtataattaagtatctccttgaaaagtattgaagatttggtccaaaataataagaacgcatgttttggcgtatgcatgatattcttaatggtacaaggtttgtaaaagtggcacttatgtggtcaaaataaacttgtagaagaagaaagttacgaccagtgatgattggcatctttaatcaagtgtgcacaataggtttatttcaattagtgctgctttttgtgtatcaattatgcacttaattggctttaagattctccgtccaaggaaatattgtgggcgcgtcattgtgcaagtgaatgagacagaaaatgattggagagcaagaatgaataacacatgcaata

SEQ ID NO: 290458 - DNA, 320 bp, Glycine max
agcttgaataaaataatggaaaaaagggaaaaccctttgtatttttaaaaccaaaaagcttttctctctcctcactcagccaaagcagaaattcagaagccttttctctccctctctcacgtagctttcttcttcttcattctccattgaagcttcaagcaaagcttcaacctttggccaccatttctgccccaaatcgtgaaaggagagcatatttggagtcgtgaagtgcgtggctacgagtgggacttcgaaatttcagggttgggtggacttctatcccttttgattttcgtgggtatgggggtttgcgagatatg

SEQ ID NO: 290459 - DNA, 402 bp, Glycine max
  unsure (1)..(402): unsure at all n locations
ngagcgtagtggaagaaaagttcttgatatagatttttcctccttctagatatatcagtgcaaagtcagatgtttccactttcaagttaaaaccagatgaacccatctgtgaagtctggaagtgattcaaatcattgttgagaaaatgtcccaatcatggttttgatgatgttacccatctaagcatattttgcaatggtctaaggcctaaaactaagatgattctggatgcagtcgctagtggaacaattatgtttgtagatgttgaacaagccacaaggataattgatgcctttgcttcaactgatcaccaatctcagcataacagacaatcgatacataaaagaggagtgttggatctcattctcaagggtctttcaatggaagtgtataaacattttg

SEQ ID NO: 290460 - DNA, 331 bp, Glycine max
atgataacgaagaatatgacgaatagctcataagtcacgaacacttcatgataacaaaagctgacaatctcaagaatcaaagaatgagcttaaaattgaatcatgtacacttcaacgatcaagaggaaagctgaattcaagaatcatgtttcaagatccaagttccaagatccaagatcaagactcaagactcacgattcaggaattaagagaagactccatcgagataagttctaaaagttttttttaaaaaaaaaactctgaatagcacatgaatctttctcaaaccttttaccaaaagttctactctctggaatcgataccagatatt

SEQ ID NO: 290461 - DNA, 716 bp, Glycine max
  unsure (1)..(716): unsure at all n locations
ggagactggacctgagactgtacctttgantcccntnaantctanatactcagctaaatgcgctagtgatgatcgtttcgtacacanattttacctaggtggagctggatttgttccagaggctaagtgcaaagcctttagatgcaataaacccggtcgatactatactaggcctgtacgcattatctcgctgcgggagaccaatggtaatcgggatcaagagtggctcattcgatgagtgaggtggagcctgaactatgcatcattctgtctacttggttcacatgtcaattatagcaattctgtgattcatacactcacatagtgcgttcccacactagcatagtcggtcgtcgatgtgatctcttacacgacagtgacagctgcctctctacgttatgtactctgtcattctcttgtgatcaatatgcatagatatctgcagacgtaatacctgttcngctatgtatcatcacacagatgcatgccggtagncgtatcgtaacgactctactcatcgcgcttagactcgacacatcatgcatgtataggcgatacatcatcagctctacatgtctgagtaaaatcacccatacaccgcttaatgttgacgcaagatgacgtcataactgctcctaacccgtacagcatgcgacagtagcagtcgtcgtacggttgaacgggtcatctacttgacgtggcgtacgtaatctcgc

SEQ ID NO: 290462 - DNA, 321 bp, Glycine max
agcttgccgccatggaagtttccgactatgctcttgtgtggtggaacaagctacaaaaggagagagcaagaaatgaagagccaatggttgatacatggacggagatgaaaaagatcatgaagaagcggtatgttccggctagttactcaagggacttgaaattcaagctccaaaaactaacccaaggcaacaagggggttgatgagtatttaaggaaaaggatgtgctcatgatttaagcaaatattgatgaatatgaggagggaactatggctcgacttcttaatggtctgactaatgatatccgtgatcttgttgagct

SEQ ID NO: 290463 - DNA, 310 bp, Glycine max
atttctcatgagtttccgttgttcttttcgagcgtgtagatgacgtatgtccccgaatcggacatctgtgtgaaaagttatgaccattcgatcttctcgagagcttccgttgttcaatttctagcgtctcgatatattatgtccccgaatcggacatccgtgtgaaaacgtatgaccattccattttctcgagagcttctcgtgttcaatttcgagcgtctagatgagttatgtccccgaatcgaacattcgagtgaaaacttatgaccatgcgaatctctcgagagcttgcgttgtttaatttcgagcg

SEQ ID NO: 290464 - DNA, 360 bp, Glycine max
tttttgcaagcttaatgataccaaaacaagatgattattatacacccatctcactacattaatattaacgatgacataatataattctaagcatgtacatagaacacactgtaacatgaatctatctttacgtcaataccacaacaatctataactggaagtcctagtgctgcttatgatagattaacacttatcatcacaactacatagcaataagggcactatcaaccacattcacaactgacctgtaatgaaggtcctgctccctgtgcttacacaaataaatgggacagaattatccactgcagctgcaataagccttaccagcacagtcgaatctaatctgagaacaccaccctg

SEQ ID NO: 290465 - DNA, 402 bp, Glycine max
atgaccgatcgtttacaaaatatcttttcaacgtgttattctccttgctaaggaccaatgcataggagttgggattggcttggagaagatctttatcaagatcaattgagatcagccctgcactgtggcccatcccaccaaggttgtagctctttatatctccccgcagcttgcaatgattgacaatcattgccgaaagtgatggagtatggttgaacagactacactttacaatcagaattccaatgtctttatgctttacagacggtttagctaatagtgcatcaatggcaccaaacatcacagcctcggcttcttttctaacttctttcattgaatggttgggaggaatgttgaggacatcctcatgatggtaagtgctctccccaatgtcagatctct

SEQ ID NO: 290466 - DNA, 298 bp, Glycine max
atgccaatctccccctgcaaaagtatcggttggtctgtgacgttccgacatgggtaagtatgcatatagttcaactgatttctgataccatctattgtttgcagggatcgcacccacaagacacccagtggacccgataaagttcaacagggccctgaggtttccagctctggttacgggcctctatcagtcctacaaggtgcccgtacccccccggcaaggtcacgtcatcatatgtaagtatgcacatcgctcaactgatttctgatttcatctaattgttgcagggatcgcgcct

SEQ ID NO: 290467 - DNA, 404 bp, Glycine max
tctacttatgtggcatggcaggcttccttcactttcttgtctccaacgcgagctttgaccactgttcttccttcccgcgatgcttcttttcatgtccgcctgagtgggcttatagcctaaaccatacttcccacgatttccttgggtatctatcaggctagttatgccgccgttgtttttgcctaaacccatcccgggttcataaccgttccccaacataactcgggccatcattaccgctgcatcggacagacaaggctgcccaaagagggagtccacggaggaaatgctgaccacctcaaaagactggaaagcagtttctaacgattcttctgcggcttccacataaggcatggaagatgggcagcttaccaagatatcttcctcgcctgacacgatgacta

SEQ ID NO: 290468 - DNA, 532 bp, Glycine max
  unsure (1)..(532): unsure at all n locations
gattgtatgcgnnnnacatcgtccncctcncgcactcaanannananttgnagagtaaagtatcatatgtaataacntancagtacacaacagacattggagcctattgaagccttggatgccatcgaacactcaaggcgaattcgactcgcacccgagatcctataagtcttctgcagcatgcagcttttatattataaacagaaacttctaagaaataagaaaaataaaggggaaataagtaccgggacaccccattaaggctaaagataaaaggagcttataacgcctgcccatatattgcaatacctataaagacttgaacgcttatatcctacactaataattaaattatctacatttacaatataattgaaacctaagacgctaagctccctctatgatgaaaagactaaactaaagccatatacacaattctcttaatccgtgattaaacagcaacgctttactttcacgccacaacgaaaacaacaaactctggcaataacgagcatatatcgcaggaccagag

SEQ ID NO: 290469 - DNA, 266 bp, Glycine max
accaacactactaatcgcgatcatatatatcacactttacccacactttagtggaatttagtgaacataaagtttattaagataatctatgagaatgtgaaactaaaagggtgtcaagaatacatcatccaataatttataataaaacacgcatccttggctattttctccaatacactatgcaaataaaagtggcggaaaaatgtacaaggtgagaatgccaaagcttctcttttactatgtttaacctaattacacatgacttg

SEQ ID NO: 290470 - DNA, 386 bp, Glycine max
  unsure (1)..(386): unsure at all n locations
agcttgactttggtttagacatgattgatacatgatttgggacttgtagaaattgatttgggcaagattggatgaggggaagtgtggttttcgaaatatgctctttgtgcagattttgctgtaaaattgtgcagcagaattttgcacaagtgcagaaaaatctatgtatttgctggttgtggaaagagtaatgtaaaatgagttctggatgttttctagtagatcccaacggtcacaatgtaggcgtatgcactatagacttccagtaaaattttggagtcgatccaacggttaacgaattggatcgaaggaattgttactggngtctttgagtgagaaaagctgtaattttggttggtgtgttgagcagagttttctgcctttgc

SEQ ID NO: 290471 - DNA, 412 bp, Glycine max
gagagcctaattggaaaatcatatgcacaaaactatgtgaatttcgctcacgtttagatccgcacggtcttgcaattcgtcatgcttttccttcggtggctttggcttctccatctgtgcaattggtggattctccgctctctggcggtggccgcgctattttcgccggagcctcttctttcgtttcatcttattcttcaggtttattctcatcttctgtaattatattttttgtaagagatgtaaataagttgaaatgataatacaattttcttccatttttgctttattatggattcctcactgataagtatctaatggctgcattacaaatacactttgaatcctcagccacgaacattatgacaatgaaaatgcaacaaacgtttccacaatctaaagggcaggacaa

SEQ ID NO: 290472 - DNA, 71 bp, Glycine max
  unsure (1)..(71): unsure at all n locations
agcttgcacttgaggtncganncaagctcccgagacatgaatgcaacaaagatcggaatgatcttaccatc

SEQ ID NO: 290473 - DNA, 419 bp, Glycine max
tgtggtggtcattctctacgccattttcatcgctgtctgcatgtaaaatgacggtcaaggctcttaagacagcaatgtaaagatgtagggtatgataatagcaaggcaaattgaaatagaatatgtatattgttatttcattgatcctttgcatgatatatataatacatgtacaagaatgtactataccaattctaaggcatgacagacgtgatccataatcagtggcatctgatttattctatgcattataaggtaaataaatatagaatcaaggtaacataggaaagtaaatatatacacagcatatttgcaatcatgtagaagatatttcctaatactccccctcaagttggtgagtgaatatcgtgaagtcccaacttgttgcgcaatgtcacaaatagatcttttcccatagc

SEQ ID NO: 290474 - DNA, 387 bp, Glycine max
agctttcagccaaaatcctaactcaccataaaaaagagaatgaaatttccaatcaaagagaatgcaaaaaaaaaaaaaagagaaggaaaatttccaatcaaaggaaaaaggagaggaaaggaaattcccaatcaaagagtgggagaaagaaaaaaaaaagaaagaatattcccaaccaaagaatgggagaaagtaaaaaaaaaagaaagctcctggtcaaagaaaccagaagaaatgtgcagagaggtctttggaccagacaatatctgaacaatacagaattgtcaccaaatgaacaaaagaaagaaaaggaaaccataacctacaagtggtcttctccctttgattaccagccaaaatcctgtgcgtcggtgacttgctcgcctc

SEQ ID NO: 290475 - DNA, 431 bp, Glycine max
  unsure (1)..(431): unsure at all n locations
tcaagcttgaagaaagagtcatagatgctngtataaaatctattttttatagtttgttatcgcaatatgtattattgagctcatcacctcacgaacgaattctattaattattttaatacggttaattctttggacataaaacataataacttgcattttacatgcatttgaaggatcaaatcagtataaagtaaaataaaggaggtaaataaggagaaattgtttatctttgaaggacataatgagaaattgttaagaaaataatcaaatactactgcccagttagatactttgacttggtgcccaacagcaattagagtgcatcaacaatttctattttgacttagtgtgcatgtgcaacagcaattatagctttcaacggtcaaagttctcactgccacattaactattgttgcccaagtggcactta

SEQ ID NO: 290476 - DNA, 312 bp, Glycine max
agctttgttcaggatttagaaatttccaccatgtttactcatcaccagaaaattgtagtcgtggatggtgaattgccgagtggagattctaataagagaagaattgtgagttttgtggggggtattgatctctgtgatggaagatatgacactcaattccattcacttttcagaaccctggacacagcacatcatgatgactttcatcagcctaactttggtggttcttcaataaaaaaaggtggtccaagggaaccttggcacgacatccattctcgacttgaaggccctattgcttgggatgttttgttc

SEQ ID NO: 290477 - DNA, 414 bp, Glycine max
tgaattgaacatcggattgaagaagagcgcgagtgatgtcgttgaggcaatcgatgagcaccttctcgtcgattactgtcgcattgctcatcagctggagagcacgcgaaatgctcccacctaactccgccagaaccatcttgatcttcttcccttcaacaattcaatttccaaattaaggtttggatatgcaacaccaacacggaggtttcagattcagattattggtctatctctcttccaccgccggtaaaatgagcggtgcattattgggagggaaaaaaagttaaactgtaaccactacatactaatgggccttggctcggattgagccttcatattgtaacccatgtcatgtgttgatccgtacgtaactgtattacatgaagaagcttgttatgtggtgatggaaaa

SEQ ID NO: 290478 - DNA, 384 bp, Glycine max
  unsure (1)..(384): unsure at all n locations
agcttataagaacaaaattgccttaatcatttccaaatatgcatgtgaattacgacgcatcaacaagaatcaagccaaggctattgtgcaagcaatcaatggggcaaaacacaccaaatgattataatgatggatggctcaaattctcacaaaggtaaaatcatcactttcaaattgagctttcaaaactatcatgacatgtagagaagaatcaaggatttcaagtcacaaaatgtcaagaacttttattttcaaaacaattacccatttcttgaacatatcctataattcatagaaaaacatgcaaagtcgtacgtgcacacgatattgacccanaatattaaactgaaaattcgatgaaactaacaacattaacaaattaac

SEQ ID NO: 290479 - DNA, 417 bp, Glycine max
atttaaattcaaatttccaaaagctgttacatacaattttaacttctagtaatcgattacatactgtgtgtaattgattacaacattttaaaatcaaattcaaaatttgtaaaagtgttccagaaatcaatttagccactggtaatcgattacatcctttggtaatcgattaccagagagaaaatatcatatttttgaaatttcaaaaagcttttgtaaaatatcctttacccaaacctatgcagcatcaattaaggaattctttctaagatcctaggaactaagtacatcattcttcttgaatttctggattcttgacttgaatcgcgctcatatttggcatcatcaaaactttatatcatatatgcttctacaatctcccccttttttatgatgacaataatttgaaatcaagat

SEQ ID NO: 290480 - DNA, 380 bp, Glycine max
  unsure (1)..(380): unsure at all n locations
tttatgcaagcttatactcagagcatcctttgctatacacaaaaaagggggaaaaagtatcctcttgcctaacccctcatttgcaaagaaaaaacccatgtgcctagaaattaacaacaagtgaaagaagattagatcttacaccgaaagcatgcaacaccttaaaaaggaactaccaatccaacgtgtcgaaggcttttttgatatctgactttactgccattttacctcaaattcttgtaatgcaacatatttatagcttctaatgtagtgcanatgtagttggttatacttttgcccttaataaaccctagttgttcctctaaaatcttaggggttatagaagaaagcttgaaggagatttggtgatgattttgaat

SEQ ID NO: 290481 - DNA, 408 bp, Glycine max
tgcaaagttatgtctcgtatcgttttaatcaatttctaccttctcataatcgattacataattttttttgagtcaatgactgattcattcaggagtctctgctttaatcgattaccatgtgatataatcaattacttctttttctataagtagttcagaagtgaacaagaacactttaattgattactttgagtatctaatcgattacattgttcttgagttgttttcaggttttaggaagaacactttgatcgattaacaagataatctaatcgattatttcattgaattaatcaattatcttgtagatttaatcaattacaagtggttataattattttctctataaataactagtttgtgttctcttcaaaatactacacaattaacactataagcctctgaatg

SEQ ID NO: 290482 - DNA, 369 bp, Glycine max
  unsure (1)..(369): unsure at all n locations
agctttttgatttatgtgatactttcttgatttttcaattggccttggtgaataatatttccagaattttataagtagaagctctatgcacaatcattttcagtttctaatttggacaatctcaacttttgagtcaagatgggcaagtacagtgctttatttcttctgtcaattgtttcctatttggtcacatttatcaccaggagaatacctgtgcagacatcttagcgtctcgtgctacctcatgattntttgtggagtatgatttttttgtggtgggactcataccccagttntattcagaggaatgttgtaaatgataganatgctagacctaactntagaattaggtagagttttttcttggat

SEQ ID NO: 290483 - DNA, 389 bp, Glycine max
gggaaattgtctcccaaattgtattagatgtatatatgtagtataattggtgctttgattataattcacttgtaagcatcaatattttaaaaggtccctcatttcgttaaatttcttacatggggttgatggcgatgttattaatcattttacctatctaacataccaattttaagtatttttttatcacactggttgtctggctaagttctttgttttgctacacttatctcttgtgtattcatacatagataatatgtcatttgatagtatggttttggtgtggttggggtagaaatacttgcagctgactaaagagtattggagttactatatccattggctaaaatcaaggttatcaaactagacagcttacgtaaactcgtgag

SEQ ID NO: 290484 - DNA, 346 bp, Glycine max
ggtacccggcatatgtggtactaagtggcgaacgggcgatggtgcaagtcgactcttcacatccacaaatcacacattaatccaccatgcccagttgcccaccttcaactgagctcacgtacttccacgtagcctctatactcgttcctttcaacaccgggtgcccaatcattccttcaagcttccacaacattcaagcaattccacattcaaacattatgaactatcaaaaccaagatacagggcatatgcataaaactctcctctaacacaaaccaaaccacagctttcttactcaataccccagtacattcttttcgttccaatcgttcaccgtggatcactc

SEQ ID NO: 290485 - DNA, 402 bp, Glycine max
gctgctctaattacattgatgtttttatttatgggatgagattgtatgtcatttttgttttaagaatagtatcccactggtaaaactaactttccaaatgtttgccttcgcaggaaatggccccgaggaagcttgcctcaaagaggtccaagaaggacaaggcatcagaaggaactagttccgctccggagtatgatagtcaccgctttaggagcgcggtacaccagcaacgcttcgaaaccatcaaggggtggtcgtttctccgggagcgacgcgtccagctcagggacgacgagtatactgatttccaggaggaaatagggcgccggcggtgggcaccactggttactcccatggccaagtttgatctagaaatagtccttgagttttatgccaatgctt

SEQ ID NO: 290486 - DNA, 377 bp, Glycine max
  unsure (1)..(377): unsure at all n locations
tgttgcaagcttctcccccaattttctataaatagggggagaagtgaagtagaaatgggttcagcccctttggcacttctctctctttcgaatttgcttaggaaaattatttccgtgaagaaaatccaagccgaggtgcttccgtaacccttccgagatgtntccgtaagcaaatccgtgaaggttttcgtccgttctttaccgttcttcatctgttcttcgttcttcaatgggtaagttttcgaatccgagactttcaattcatttcttgtttttttaagctttcatctttatttcgttcattttctatttcttttctttcatctgtaacgcgcttttaccgtttatttaagccattntctcacctaataaatgat

SEQ ID NO: 290487 - DNA, 410 bp, Glycine max
tgcctaattaacctgaaattgagagaaaatgattattaaacactcttaataaaaatactaagtatttattacctatacttaacagaaaatacttataaccttacaaaataaccataaattgggagagtttgatacaatttatataagttttatacacaaaagttagtcattttcaccaactaacagttgccccaaatttacagttttgcttgtcctcaagcaaaaagagaacaactcacttgtcctcaagtgacaatgacatgcagtgattatgtacgaaggtgtatgctacaaagtgactaattgcatgataagagaatggagtaaaatgccctcaacacttgtctttacaacagttatctaaagacaagaataaaatgtaacctgaacagatagatgaagttaggcat

SEQ ID NO: 290488 - DNA, 374 bp, Glycine max
agcttgaccaatcccgacccaacccgggcatagtcggtcagtgagaacctgtgatgtacctaagcaggcgagctcctggcagtcaacagataaaaggaaaacaagaccacaaagcaaggaggcttgtggtggctggccagctatgaattttgtgtaatatgtggattgtggcctctggtaatcgattaccaagggtgggtaatcgattacaaggcttaaaattgaggacaggaggctaagatggtctctggtaatcgattaccaaggggtggaatcgattaccaggcttgaaaacgaagtcaggaaacttagggagcctctggtaatcgattaccagcctgtgtaatcgattacacagaggaatgggtcactgg

SEQ ID NO: 290489 - DNA, 414 bp, Glycine max
taatgcggatcaagttgattcgcaagttttgtgcgtatcaacttgatctgcagttggtagggttctctgaggctgaatgtggatcaagttgatctgagagattcatggtttagcatatggatcaagtacaaggtatatgattcacaggagtattttcgatgaagttccttcatgcggatcaagttgatccgcatgaatgtatttaaatttttaaaaataaaaattagtttattatttattaaaatgctattaaattaaggtttagggttaattatgaggctgccttgtcatgtgcctaaaaaggattataaccacaagaataattatttccttggaaaagataaattttagtgacccctatataacactcctcccatgagttagaatcagaaccacaagatcgtgggcttatgt

SEQ ID NO: 290490 - DNA, 385 bp, Glycine max
gcttagagctaggtttgccccatgttaaattcttactattcgcttgttcttgcctaagtgattggctatatgttggcacaaattctggcaaaaaattgacttgttggtctttactgtataatgcctatggcttttcctccatgccaagatatcaccatgtgccatgtgacggagctaggtttgctccatgctaagtcattgagaggttgtccttcagtggcgttattggcaagacatttcacatttgtgctaaaaaattgacaccttggtattggttgattttgtccatggcttggttccccatgctgagatatcatcaacccatgccaagtttagaagcttggttttccctgtgccatggctttgacttgttcccattttccgc

SEQ ID NO: 290491 - DNA, 110 bp, Glycine max
aaaaaattatgccccagccttgcactcttggaggactgttgtaattaattagcattctgccgaatggtgagcatctctatcggctgatgatcctaatcgcatcggcatcg

SEQ ID NO: 290492 - DNA, 777 bp, Glycine max
  unsure (1)..(777): unsure at all n locations
gatgctactgcnananacctangatgancgtttangcannnttgacgnngatttcttgatgnnaaccttttgcannnanancnannannnnnannaannnnnanannnntnancnacnagngcgacacnacgnanacatttgtgttatgtatnacncgaagntgtctatgccacgcctgcacaacgngagacgaaacnaactgccgatgacagacgcgcgcgncatatattctacgaccagcanacacattaactanacttcnatcctctctagcaatagaattagacgacattatatactgcngtgcgttgattcgatgtacatgcgaatgtatatgtatcgtgtcgtcacgatcactagcctacgatctgtacggtatcttctcctgtaccaatcatatagcattgtgattgttactcgtaaggatcacgtatgctccgtggncgctatctgttctctacatctcatcaccatgtgatctactcatacgtgcacgtctacgtgcatcnataagtgtagtacaatcgtactcgccgctcgtatgtagntagtatgtactaatctgagtgcatctgactctctaagtaatatggttgtactcatgcatctcatggtaacataatatatgatactcggctctcactcgcgttacttgctgttatgatactgtgctgcatcataatgtatcgagtgactctgtcgcgtagantatgtgttatggacgtctctgttatcgtcactgctntatgtgaatacaagntntatatatctcgccg

SEQ ID NO: 290493 - DNA, 382 bp, Glycine max
agcttgcatgcctaattaaatggatggtctcaaacttttgaataatattagaaaggtccagttacttcatttaattatttattgttcaaacaacttaattttagtggttaataaaatttctttaatgggcagataaaagactaatttccacattttattagtggataaatcagaatactaatgcaaaactaaagaaagaacataaattaatagaaaaagataaatccattatacattttcaaatatttcaatcattttcatcctttatcacacaacttcaaacgtgtgcctagttgaatatcactcaaccacttaacatgtaacattctaattaaaattgtttttagacaacctttaccgtgggaaagtaaagttttttttc

SEQ ID NO: 290494 - DNA, 477 bp, Glycine max
  unsure (1)..(477): unsure at all n locations
gagtgtggancctgacacgtagctatgtccgcgctctatacaatactcaagcttagaattatacaataacattttttgcccaaccatgatgtccttcttaattatcatgctatcatggaacttcttggtcttttctttgtagaacttggcattctcgtaggcttctaggcggatctcatctaactcactcagttgcaactttccttcctcaccagcttgatccatagagaagttgcaggtcttcactgcctagtatgctttgtgctcaatctccactggaagatgacatgcctttccaaagacaacccgataaggtgacattcctatgggtgctttgtaggcagtcctatgtgcccaaagagcatcatctagcctagtactccaatctttcctgcttggctacacaatcttctctaaaattctcttgatctccctgttagaaatctctgcatgtccattggtttgaggatggtatgg

SEQ ID NO: 290495 - DNA, 386 bp, Glycine max
agcttgaacctacttagtactttgaaagaagacaaaatatgtgttttttttaacccttttttcgcttctcaagtattcaatttattttggttgatatatgttcattcaaaatagtcaaatactcatgtttacaaataagttgttagtttcaatgatattgattttgattttttcaagaggtctccgttcaaatttcataaatgaaaaaaatatgattaaaaaaaaattttcattaaaaatgatccgttaagttcaaaaaagtaattaaaatttatgtgaatgtataaaaaaaatattgtaccaaacaaaaactaatcatggtcaaatagcttgtaaattgtaatatagccaaattgattatacattaggtttctatcttcacaaaa

SEQ ID NO: 290496 - DNA, 426 bp, Glycine max
ctaagcttatctttttaataagtcatattttctttatgaatgtgcaaaaaatttaacttatgcttaaaaaatttaattatttatcaactttattggaccttatttgttatgtaaacacttgttgtttcatgattgttctaccaaaaacatactccaatgaccatttcttaataagaatcaatgtttaataagttttcaccatatgaacaccttgtttgagatgccattagacacaaataaataattcgtcccacatagctcatctttaataataaaaaaagtctaatgccgatatttattgttcagtgaagtgatataattaagttagttattttaatgattaatatatttcgataattcaaagaatttattgtcaattaaccaagttaataaccatcactcccgtcatgggaaaaaaaataaagt

SEQ ID NO: 290497 - DNA, 361 bp, Glycine max
agcttgcattaggaattgcgtattccccactccatcattaggatcacttcctgacatctcaaacaaaccaatcaaacgtatcaagaccgaaatagtggctgatagaatacctcacacacataagtgcattacacaattatggcttaactataatgaaacactctagcctttgaccactctaattacccttgagctcttacgcaattcaagagattatggccacaacaaagaacaattcaccaacaagtgtaaggtaaggctagacaaggaaaaggtgaaccaagaaaaaggctaacaatggttttacgcacaaatgaaggaaataaaattcagaatctaacgacatcaagaaacaatccat

SEQ ID NO: 290498 - DNA, 488 bp, Glycine max
  unsure (1)..(488): unsure at all n locations
gcgcatgaaacctgatactttgaattgacgccctcgatagactacgtaagctcgngaggatngatggggactcggtgtatanaagaacttctgttacgggccttatggattctcgcaggcaccaactggaggtgggcgacaggacgatcgcgggcttatgcgctcattagtggatgtggcaaaacttgtcgacacccattgatccaccggcaacgaatactacaagatgatggggccccccatgatcctacaagctcgacatgacgaaaacgtcgaagggtgaaactctactgcttttatcgttgaccacagtgtggatcccggagagatgttgccggggccaagaaatctttgggacatcatgggggggcgacactgccccaaactcatgtagtataattctcaactcatcactggcatataccgttcgtgacaacccgtgacgaccaccatcggccagctcctgggctgctacaattataaggacg

SEQ ID NO: 290499 - DNA, 382 bp, Glycine max
  unsure (1)..(382): unsure at all n locations
atcccaccnnnacatcccccccgccccccgatangtatatgatgaataaaaaaagagaggaagctgagcttgaacttgaacaccggaccggacccagaagaccgagctcagcttgtgggttcaccatcatgacgggcaaacacacactacttctctcatacaataaaccagagaagggcataaaggagcgaacaaaaggcatgcatgctaatgataaagtgtaacaaccaaaataacgctacaaattatgattacctactcagacgtatgcacaccatataccccaaggtctattcaacagtcaactataactttaacttaaggatacgagactaggagacatatacaagatccctttaaaatcagaaaaacaggtgaaacg

SEQ ID NO: 290500 - DNA, 338 bp, Glycine max
ctaagctataagtgacagagtgactctcacctagaattttatttaacgttttaggcactggggagcgatatcaaacaatttatctgttcagcctctgaaaaaagtggaacgttgtaattcatgttgaattcatttctaactcatttgctctggtattgattccacaatgtggtattgtttacatataaaataaactttggaaaatgtttcgtcaaactcacgtatattcaagtttgaaaaacttatatacttatcttgatggagtctggtctacattctcgaatctagtgtcttgaatcttgatactgattcatgggatatttgaaacttgtatcctg

SEQ ID NO: 290501 - DNA, 334 bp, Glycine max
acccacgaacctaacgaggccgaatggcgcaccgacatcggaaaaggaccccaggccgacaagaacctcgaccaaatcggcaccctctacggacccaagagccacgcagaaagcctccctgcgcacctcgggatcaacaagcactaccacgctgcctactccgacgcgccgcgggcctccacgcactcaaagtaggagacaacggatcgacgcgaccacggtcagcagcggggacagagcaaccgcaacgacaaagcggacaacgacaccacgcggaacccggcgaaagaccacagaggacacaagaccggactaacggcgtacgggcgcaccg

SEQ ID NO: 290502 - DNA, 378 bp, Glycine max
taagcttctacatgatggttgtgaagagtaaatattacttttatctaattaaagttcttgtcaaccattgcggtggtagtttgtcttgtggaaactagacctttgactgaggtcatcgtggttcttaaagagtgagctgaccataggggtgcgttgggttttgtaagagtatgtaccaaggatggaccttgggttttcataccaaaggaggaccttgggttttttatgtacctaatgacttgtattccttcatatatagaagttaaggattagaaatattgtctaaggtttaccttgcgtaccttgagttcttgtgagcgaatcttacctaaatagtgggctactaaaggcagaacttgggtttaacgtatcttgtac

SEQ ID NO: 290503 - DNA, 523 bp, Glycine max
  unsure (1)..(523): unsure at all n locations
aaagatagcnnnacgagccacccgcaccnccccnncgccgggangganggaaagagagngaanacacagccagagtnagtttgagcctgtgaagcatggaaatcaaggcgaacccgcgatccccggagacctcgagagcaaccagcattttagccagctattaacatcgcgagaggacgaagttgcgaatgcaagaaagcggaggggacctctcaaaggacataagcccgtgacatccgcgaagaactaggcctaataaatgccaagcccatgggaccaacaatggagccaagtgccaagatatcgacagagaacggggaaccaggctaacacccagaaagaaaaaagaacagaacgtgaataagaactaactcacagtaaaaatgaccggaaaagcccatagaaggatcacagaatacggaatcgaacacaacatgccgtatcaacggaaagcagacatgcccaaacagaaagcaataggaatatacccgaaagagacacattaggaagaaacggacaaccg

SEQ ID NO: 290504 - DNA, 393 bp, Glycine max
ttgcgaaagcttttctccatcatttttactagtgcctgatgtctctaactagctattcattcgtatcgtgacacatttgtttggtgatcgtaagccgttcccactcaagtgcattcaactacaatcgcttttctctattgaaaacactcaagccttgtaccactctaattactgatgagtactacaagtgagctccatagattctggccacatgtaaagtaacatctcaccacatatgctgaatgcgtaatgcatagagagactacggattgccgttaactcattaaacaaggctaacagatgtatttaagcacaatagacggatgtataatatatatcttaagatttcaggtctcattgcttactaccaccgataattaaccttactgagat

SEQ ID NO: 290505 - DNA, 362 bp, Glycine max
  unsure (1)..(362): unsure at all n locations
tttcttgcaagttttntagagtatcttaccacactctttacttctgattcttgcgatatttgagttgaggaaacaatgcttagtgtcccagtcccactatatgtgtgggttttatgttttaattcgaactttgtcttcaaatctttcaaacatttaaaaaattaagaatcaatatctactcagatttctaaatttaacaatcctacttgagagaccatttgtttgtgacaatttggctttttttttttttaatctttttctgatcttattattctgcagtcagttgcaactttcttcagtcaagttatggctaataatggtggaaacactgctggcccaggtacataataaacttcaatgaa

SEQ ID NO: 290506 - DNA, 395 bp, Glycine max
  unsure (1)..(395): unsure at all n locations
tccaggatntgaagaggtcatctttgngctatgtcctgtatctctaaacaggttggatgatgctgcatgacttgtgaagaacgggattctcaagcctcatgacttcagattctttgttggatatgctggatggcaactggatcacctgagagatgagattgagccagattattggtatgtagctgcatgtagctcatgtttgcttatgggggctttatcagattcttcatacagcttgagggacgagattttgcagctaatgggtggtcattactcagaattgtgccggatgccaaggcatgacatgtagctactcatgtatggcttcaaattcagagtcaaatgaatgaacaacctgtattcacggtgctacaaagtcaacctgtctgatggtc

SEQ ID NO: 290507 - DNA, 565 bp, Glycine max
  unsure (1)..(565): unsure at all n locations
atcacgcnnnnccatgccccccccccaccaanngtngaaaantaataacattgatgatcanaaccagcgcgatcagacttgatcctgtgatgccttgataaccacaggcgaatccgagctcagnacccggagatcacctagagacgaccagcctttatgcaagcttgcatgcacaacgcacgcgcagatgaagtccactccacaacgcttgaagtacaggagaacttctaccctataacgcaacatggcggacaaaagagggcagcaaacttgaatggtcgtccatggccatgcgaaaggtatacgcgctacctatacatgttcacacatgattgcaactttgtggttacattgagcatagaaccacctaccagcaatatagcaagctggtggactacaaatcgagacacatactgtacaagctatacgtccgcacaaatggtaggccctcttcaggcatacgaaacaggctattcccatcattctgatgacgacacggacaccttataccctgaacccaactcacaatatagtgcgaaaatgcccgcccataatctaaccaggg

SEQ ID NO: 290508 - DNA, 352 bp, Glycine max
tacaagaacactatctaatctttcctaaaaaagatatctatgtctatgctaaaaattctatctatgtaaatcatcattactgatacacatgtaattcaatcactcatgcttgatttccacattaacacactaatcagacacaatcaaaagtctatgatcaaataaaatctatcaatcattaaccataaatattttcatcaaccatccaatccttatgtatccaaattcactaatatctaagaggcctaattctcttataaaggtaaagaatgtttctttggggagatgattcgtgaagatatcatcaacctgactctttgtatcaacaaattctagcatgcattctcccttc

SEQ ID NO: 290509 - DNA, 368 bp, Glycine max
agcttgtattgtcgctcagatcttgactagttataactttctgaataaaatgagtatttcctatgtttttactccaaaagttagtgcgaatcaaatcactcccacattttatctctagcatgcattcattattctttacctacacctcacgtttggttctttaggaaatacaccataactaaacgcgccccaaggcatccctatcgcaccagatccaaatctataacgatgggtgatcaagaggagacacaggaacagatgatagccgacatgtcggctttgaaagaacatatggtttccatgatggatgccatgttaagaatgagacaactcatggagaaaaatgtggccaccgctgttgctgttag

SEQ ID NO: 290510 - DNA, 406 bp, Glycine max
tttgtttatttattaaatcatatattacatgaagttgttgggtgcaaataagtctttctaaattacaatttctattattttatatacttaataattgactgattatagtaaaaaaaacaataataattgactcataatcatacctccctagccggcttgtgtgcaatcaacaaaagctatctttcgttttatagactctataatctctttttgtctttgagagtgactctatataatttcataattgcatattaggtattaatatatttaaagaggcttgctagctagcgtacattcgtttattttataattggaatacgttagtaagttttaactaaatattatcttcaaatatattcacaatgtagctggctaatatacaccaattgaacaacaagttaatgta

SEQ ID NO: 290511 - DNA, 372 bp, Glycine max
agcttgctctatatttacattgatgtttgtatttatgggaggaggttgtatgccatttttgttttaagagtagtgtcccactggtaaaactaactttccaaatttttgccttcgcaggaaatggccccgaggaagcttgcctcaaagaggtccaggaaggacaaggcagccgaaggaactagttccgctccggagtatgacagtcaccgctttaggagcgctgtacaccagcagcgcttcgaggccatcaagggatggtcgtttctccgggagcgacgcgtccagctcatggacgacgagtatactgatttccaggatgaaatatggcgccggcggtggacatcactggttactcccatggccaagtttgat

SEQ ID NO: 290512 - DNA, 346 bp, Glycine max
  unsure (1)..(346): unsure at all n locations
ntgaaaaacactttttattttatatcacttggccattctctttgcttattcaattaggaattcccttcctaatattctagtgatcatcttgatgttgtgacttgtaatcttgaagtattgtcttgaattttaatcttgaaaagcccatttgcatcaattgcaacacatcatcatgatcatcatcaaaacatcaaagccaattgcatctacacatgtgtcctccaccttcgagattggagctatgtttcacgattgcctaagtgcggaccctcaaggcaatccgccattcttcctttttttatcggaaacccatgaatgttattgcctagcgctattcatgtgccct

SEQ ID NO: 290513 - DNA, 423 bp, Glycine max
ctgatcctttgaaccttgaaccctgaaatcccggcgattcagctcgcacccgggagcctcacagtcttccgcagctgccagctttactatgcgcgaaatatagtgtgcgaggaacataggctttttgcgacttgtacatcgcttattcatgctcattaatcgaaaagaaaagaatatgaacttttgaaaaaatatagtagttagatgatgcgtggtctatattcttcccttctttctaagagaaaactgatctaattaccacaacccgtatatagaaaaggctttgtctatatcaagaatacaataaagagcttgaaaggtgagtttctatctatatcgctgctttttggcgccatctccgatgtgctgtggatctacctcctttaaggaccaaaactttattttaataaacaggtgccgaac

SEQ ID NO: 290514 - DNA, 408 bp, Glycine max
ctatgaaactccgcttgatgcagatagttgtcgctgcgacttatgcttcttatacaaacaaagaacaagctgatcaccgaaattaatcccagtaacagattgaatagaccgcataactgactcaacaagtgtgttctcattgcaatccaactcaaaagagtgtccattctcagcaatatgaacaagcaactggccctgatggactatacttccagtcacgctggaactcatcttattcaccaatcaatacatgaatcacaacctcttcttccacccaaaaagggaaccaatcaaatagcaaacatagagttcaaaacaaaccctaaccaatagctgaaacacaaaacaccaccaaagcaaatccaacaccctttttttcaccacacaatatattacttcaccccaaaa

SEQ ID NO: 290515 - DNA, 364 bp, Glycine max
agcttatcatctcagttcttcttatcaagtagatagatcatttttaaggtccaacgccttaaaatgatcacctttcaagtaaaaaagaattgcttgattcactcttataaaagaactacgtatgtttgatttcctcttcgatggagggtacgtaagagcaaaagccccgcttttgtcgacctcaaataataaaaaagaaataaagttaaaggtaacccaattttcacatttctaaaaaataggttgctgtcttttgagacaaacgtgagaggtgctaataccttcctcaaacgtaaatacaacttccgaacttagaattttcgtttcgaccggtttccttcggtttttccgacgttttccacaa

SEQ ID NO: 290516 - DNA, 407 bp, Glycine max
tgtaggattatggggttcccgtcatatgtggtactatgtgcaagtcgactctccacatccacaaatcccacgtaaatccaccatccccagttgcccaccttcaactgagctcacgtactcccacgtagcccatatgcttattcctctcaacaccgggtccccatcaatccctccaagcttccacatacattcaagaaattcaacatccaacatcatgaactatcaaaaaccaagaaaacagggcagaggcagaaaactctgcccaaaacacaaaccaataccacaaccttccttactcaaataccccaataacattctcttcgttccaatctaatcaccgttggatcgactcaaaaaatttactggaggtccctaatcataaatctacattttgaccattgtgatct

SEQ ID NO: 290517 - DNA, 446 bp, Glycine max
  unsure (1)..(446): unsure at all n locations
ggtaatctgacctgattgcnacctagaacnctgngacccaataatntntnncnnccctcgaggggacggctctactgccgaagtttgaacgttaaccccgggaacttgcctttgtcgagcccaaatactcatttgttgggctgaggtacatgtcatatctgcttagctctttgaagacttattcattgactgtcgcgtgttgaggtatgccctgaaacatgaagaccatgttattaaaatagaccacaatgtctcgcccccttgacacttgcaatacaggtacaccaaaacatggtctgtcccaccgccctccttatggcgcacgcatgaacctccccataatgtagcctcccccccgtgatcgttttcctccctatttccacccggcgccggaacaaacgtcaagatactccactaacaccccgacgccggatcccctgacaacc

SEQ ID NO: 290518 - DNA, 383 bp, Glycine max
ggaagagaaactgaggcctgaactgaaacctcgaaaatcagtgacaccatagacactgaagctgcgaaaaaacagagaggacatttagtagcgaattttgacgataaggcgcgaacgggatggaaaaaaccacaaaagtcaagccatagggaagggcaagccaaacgaaagagaaagcaaacaacttgaagaaacgggaacagaaaagaaagcaactgtgaccaggaagacaaaacgaagataggacaagaaaaagacagaggcctaataacggagagaaaacaccacggaaaggaggagaaaacagacagggaaccagagaagtgcacaacaacaaaggggaccacaacaaggaaggaaaacaaacacatggaaaccaatcg

SEQ ID NO: 290519 - DNA, 439 bp, Glycine max
cgtagtgtctgatctctgacctgaaacctaaatacaccgaagaaacgttttcacaatttcgcttgacgggcgactcctacatgtataaataatcaccacccaatgccttctcacagagcgccggtcgacattatcccatgcgcctgcaggagacggggctcatcacttcgttgagattccgaagcttgaaacaacccgttccaccagtggaacgtcgctccaacccgtgcaatcatgtctaagcattgactctctctcgcccaatcatacacatatgcacacgtcattcataggctgtgactaacaccatatagattgatctaccagtcgcactgtatatcatttcattgcgaaacgtcttacaaagtacatacttctggtgaggtgcacaaccaatatatgtacgcgacagtcatcgtcgtgacacgacgtgatgacc

SEQ ID NO: 290520 - DNA, 384 bp, Glycine max
agcttatggttgagactgagcatccctagaaatatattctattttctactactaaagtaaaaatggttaaaataaattaaaatatgattgttaaggtaaaaaaaaaaaaaaggatataacaaaaattattaacaaccaaaactattgcccgcattagaagtgaactatattttattttctaccttcatgcacttttttcaatctaagcaaggattaaaaaaagggtttgacaccatgatttcggccacaatatcaaggtttctggagtgtccctaacaagagtggccaacgcattggtcacacttgtctgcaattttctacatatcactattacataatgtcctagtttcaatatattagagttaaccatgtttactaaatatt

SEQ ID NO: 290521 - DNA, 421 bp, Glycine max
tgacggactataccaagctctaggaaccagggacgtagaaagatcttatataggcttactaagggtagagagaggaagactacagatttggatcacgtaaagtgtgttaaggatgaagaaggcaaagtcttaatgcatgaaaaagatatcaaggaaaggtggaaggtgtatttccacaacttatttaatgatggatatggatatgactctagcagtctagacacaagagaagaggaccggaactataagtattatcgtcggattcagaaacaggaagtaaaggaagcgttgaaaagaatgagtaacggtaatgcggtggggccagactacatacctattgaagtgtggaaaactcttggagatataagtcttgagtggctcaccaaactctttaatgaaattatgatgtcaaaacgcatgc

SEQ ID NO: 290522 - DNA, 381 bp, Glycine max
agcttgtacctatattacaatgattgtagataatggtattgtaataatgttatccaaaactaacttttattctggagaaacaaaaaattcttaaagcacaaacactacaacttgaataccatccccatcacctattcattatttaatttccatgctattttttcccaatgcaggtgacactatcattgtgaaggaaagacaagtagatcatggaaaaggaattaagacaggaatatgtactctggaatttcctcagctgttgttgttgcaacaatagcagcactgatgtttttgctaaatttcacatgctttttcttcccaaggtaacttcttggtgacaaaacattgagaaaaggactagctgcatgagaaatgataagt

SEQ ID NO: 290523 - DNA, 418 bp, Glycine max
ctgaaattcttcactggttatcgattacaggtttctggtaatcggttacatagttatattttgaagggtcatgacttttcaaattgaatttcaggagttccattactagtaatcgattacacatcaatggtaatcgattacaacttttaaattcaaatttcaaaacccttcttaaagctgattttcaaaattgtcttctggtaatcgattacactgcctagtaatcaattaccagagccttggatgttggaaacaaagtgttttgaggaaaaagcttgatcgaccaatgagattgtttgaggccttatctttttcttgatcttgaattaatcttgaagcaatgcttaacctcaaaatgtttgttgaagcaaccttgtttgattctactttggcatcatcaaaaccctatattcataca

SEQ ID NO: 290524 - DNA, 374 bp, Glycine max
agcttgatccttgaatcttgattcttgatccttgaaattaactttcctcttgaatcttgaagtgttcttcaactttcctcttgaatcttgaactcattctttgattgacctttgagctttttgtcatcacctttgtcatcatcttctgttatcatcaaaacatctttgaatcactcttgattcaccatgaagctttgcttctacaatgttgacacaaacagataaagtcaaacataaaccaaaacacaacaatacttttacaaaaacaacagcctgaatcataaaatctttaatcactctatgaaattggaaacccttgtaaccaactggcaatcctactttcctgccaataaaatcaaatcattacaggtatt

SEQ ID NO: 290525 - DNA, 409 bp, Glycine max
  unsure (1)..(409): unsure at all n locations
tgcatttgtggngattggcttttattccctaatgtatgatcataaagcccaggaacttgcctttgtcgaccccaaaagttcattttttcggttgaggcacatgtcgtatttgcaaagctctttgaagacttcttctaggtctgccacgtgttgagttatgctctgaaacttgatgaccatgtcatcgacatagacctcaatgttttgtccaatctactacttgaaaatctggtccatcaatctatggtatgtagcacctgcattttttagggcaaagggcatgaccctatagcagaagttggcatcctcagtgatgaatgtcattttctcctcatttggagcgtgcatccggagtagatgtctaggaagcttagtacttcgaacctggacgctcgatcaaatagcttat

SEQ ID NO: 290526 - DNA, 372 bp, Glycine max
  unsure (1)..(372): unsure at all n locations
agcttctcccccaattntctataaatagggggagaagtgaagtgaaaaagggttgagccccttangcacttctctctctttcgaatttgcttagaaaaattgtttccgtgaagaaaattcaagccgaggcgcttccgtaacgtttccgtaacgtttccgtgagtgatttcgcgaaggttttcgaccgttcttcaacgttcttcattcgttcttcatcgttcttcggtcttcaacgggtaagtacctcgaaccaagcttttcgattcattctatgtacccgtggtggtccacattgtgtttcgtgcattattcttctcgttatcatttactttccgtaccccttttgacgtgcttaagccattttatttaagt

SEQ ID NO: 290527 - DNA, 415 bp, Glycine max
ctaagcttctagataacatagtgcatagtctgtttgtgcatttatctgttagtggatttagttggtttgacaaaatctacttaatgtcatgtttatattgtaaatggagtttagaaacgatgaatgaagatcaacagaacttgaagaaaatggctaacataataatgaagattaacaaaaaagcagaggaaatgttcaacactgtttatattatggattaggttagaaatttcaggactgttctaaaataaacatgacatgatataacacatttacttatattattttgcttgttaaatatagccttatggtgaactcagtaggtcatttgcttatattacaaccaagatttggtgagcccagctttactagttggatggatagaactcaaagatttctatgggatcaccggaaa

SEQ ID NO: 290528 - DNA, 352 bp, Glycine max
cacataagtcgcggccgggacggggagaacaaaaccatagccggcactgatgaatggcgagaagcccaaatgcaggtacgcggaaaccaagtttgtcccttcgctatccaagcgactccgacccactagccgataatcaaccaaagtccgtcgcagccaacagacatgcgtggaggcccagccacgaaataacgcgaagggcgggatcatacccacaagcctctatccgccgccatcgactgaacatatcagaaggccccaataccgacaacaacgaggctggactcctcatacatcaaccaataacagaagcctatcctccctaaggaccaagagggcggaaagaaacccc

SEQ ID NO: 290529 - DNA, 412 bp, Glycine max
taactaaattgtttccattgactttatgagaatgtctctctgaacaaactaagtagtgagaccacattggccctagttttggttgattccaccccaaaattttaatcactaaaaacaaattgcatgagttgaagtctaactatccgaagccaatgatgtcgtgtaccttatggcgtcgggagcgatacacaacttttggtcataagtcttgactattgttcgttcaagcattacacgtgccgttacgataaaaaaataaatagcaatgatgtcaataactctatctaaactagattccagttgtgacaaaaccaagatttcagtttaatggagaaaaatagttattgtatgaaaatatgaatctcgatatggctcaacaaatatatcatacgttgttatttgaatcaatgaa

SEQ ID NO: 290530 - DNA, 371 bp, Glycine max
agcttgtagattttataggtgggcgaatccctagataggttatggtctttgcaagcctaaccaaggtaagccattattcacacttatccattttttataaaattgcactttcttcgcaagattaatttgagactccccaaatggtcaaagaagtgaccatgttaaggaatgtacttgggtatgtaattgggttaatagctcaaaaagtgaaatccccttgagtaaagtgtcaacatggcatatcatgatacttagatatgtgcactcacatttatgactagagaataatgtgttacttgatgagtttgtgttagtacattgatattgaaagtgtgaattttatatatatatatatacatatatatatatat

SEQ ID NO: 290531 - DNA, 409 bp, Glycine max
tactcagctactccgcaaatggtggcctctagggaatgaagctgttattctttcttctgaggacccatggacactaatccctgacccaacaaaaattcgtgcaaagggtaggccaaatccaccagggttatggatggaataaaatggcttggaacatctgagcaccgccaaaaatgtggttgatgtggagcaaaatgggtataaggcgttgatgcccacagcgatttgagcgcgggagttgttcatttaattgatttatgtatgctacacgagtgacttgtattggtttaagctgtcttgaatgtatatactttgtggtcttcaatgaaatcgctagttagaaatattacttattttggtttgtgcagtttagttattctctttaacattacttattttggaatgtact

SEQ ID NO: 290532 - DNA, 310 bp, Glycine max
tttcttgcaagcttgtctactactgaccgacatgcgtcaagcaaggctgatcagcactgctaattcctacttcaccctcaaacatactctctgaggtaagctggttacgctattcttctcttgagcttgtgttctttatgcaccttagctactgcttgctcccatgagtctgctgtgtgaaccgctcccttatcactcaccttctcattattttagttacaatcacaccaacagatcatatatcatgcaacaaataccacttccagactaagataaaagaactaatagagagatcttctatgatgccata

SEQ ID NO: 290533 - DNA, 413 bp, Glycine max
tttgtgttattctaggatgtgttgtccgttgaaaatttggtaattttaggaaagtcaaaccaaaaaaaaaaactataaatgatatgaaagacatcaaagaaaagtcgcaacagaaagctgagagtgctgaaaagtagaagaacgcaaatcaacttgtctctgatgattgataaaatgccttacaatttgttgatacataagtttaaattaaaagataattcccatttaggccttgaaacaaagataccaaacctgcacgattttttacaaccaaagaacatatgaacaagcgtctcagcaccatttttgacatgctctacattaaattattaaaaaaatgacattaaaatttttaatataaacaatattaaaattatattaaaaaaatataaataatactcattaaattaaaa

SEQ ID NO: 290534 - DNA, 327 bp, Glycine max
agctttcttttatcagagaagaggctattctcttggtccaagcccttggagcttgctttaagccatacaatgccttaagcaattagaacactctatcttccttgccttagatctccaaactacgaggttgttcaacaaaccacctcggttgccaaggtaccacttcaggtaaagctgacatttacattaatctgggtataaagaccaatctctattatgggcttgcgcaattaccaaccttatgggttcaagcctagctactggaccataacttcagaatgatccaaaccagatttttggaggacatcctttgcaactaaccttgct

SEQ ID NO: 290535 - DNA, 406 bp, Glycine max
tgtaaagcattgatttgatactgcttctttcatcatgtggctcatgatgtttacaatttaatgatcctttgctaccctgcaatgagacacacacagatacacaatcacacacacatagagacaaactcacgcagacacaaacacaatcacacattcacacataatgatacacacacacacactcacatacagagtctcgcacacataaagacacagactaagacgcaaacacactgtgccacaaacacacagagagacccacacacaaagacacacacactgagtcatatacacacacatacacaaacacactcacacacatggacagacacacacacacttattgagacaaacactcacacactacatagatatagagacaacttcttacactcacacccacaca

SEQ ID NO: 290536 - DNA, 361 bp, Glycine max
  unsure (1)..(361): unsure at all n locations
atttctaggctcctctactttgcactatatgacatactgttggtttaaggccaagcatttntttttcacaagctgctccctttaagatgttaatgttgctgagaattgattgcccccttattaagtcatttcactacggattattctgacttctgggcatctaattgtaagaatggagtcatggagaaaatgctatcaacgtgttgtggtatgggttaatctttgacgggagcattcatgtgtttaacctattgagtatcttatctccttatttagcagatcaaaattgagactttaaaacttttatgtgtgggatgcttttagttaataattactttggacattcgaatatgttgccgtg

SEQ ID NO: 290537 - DNA, 312 bp, Glycine max
agcaacgtttattctcagcattatttaattttttgcttcggaatggaggcttccattcaaactagtattactgatcttaatgcttgaatttactttgcagattctacttcgattatagtacaacctttgtgggagcacgaaagatttgcttccatcctgtgaactgttctttgctccttgtgactgtgctcctttatggggttatgtatccgctcattgatcggcttaaaggaaactggtctccagaccactttgaataaacttacttgatgggcttatacggatataaggtatttggttcaattgctctaa

SEQ ID NO: 290538 - DNA, 777 bp, Glycine max
  unsure (1)..(777): unsure at all n locations
gacgggggannangctggatacnctcgtactngcanancnttngtaancnactttganaacaacnanagtatannaanaangaataacttatcacgagagtangcgggcacgatttcgtntcacagnatatttctncgcgctcttactcgcagggcgngatatcacacagtgtatagcatagatcgacctatcttactcgacattaatatacgtacagataaaaatgtatccggaggtgcntacccgcgtcagatcgtcgatcttacgtaacacgctggtgaaaatgcacctgactatacggtanctgatcgcaagtgttgacacaggcgaacagcaacgttacaaaataccangagtcatcgtctcgaggtatacatggagcgacgtacgtacngtcgaggactacggaaccgcataggagttctaccgtacacgcacacagtgtgcggatccaggtctcatcgacgaagtagatcgtgtcgactacgagagagtggacacggtctcgcgcgagatatacaacgtggaggtacaagtnacagatgagagcagatagagataatgacgatatagagaaagngatagcgcgatgatgagtcgcggtatgacgagatcgntaggtatcgtcgctcacatatcaacncgntatatgcgagtacgcatgtcgatgatcgntantatggacgagatactgtgctcatngttcantatacgatatcctatactatgtatgnangtatactatgagactgagcgtcatgcactatgtcgcgcgg

SEQ ID NO: 290539 - DNA, 693 bp, Glycine max
  unsure (1)..(693): unsure at all n locations
actacctgannaaactgatgccgtcgaatttgacnnaatttagnaaatnccnagnngacactaatatatatacataagctgtctctatccaaggacttagtcttgattgttgaagacgatatttttgcatggctctacagccctaatagggatgggagcgctatctgtacacacactctctatgtttcattatagatctcttactcgcttaggaaatcatcgacacgagggtgcgtataatcgctctcaccactatctaagaggacatctctatatctgatacatcttcgatacacgaattcacatcgcatctcacgaatanacatacatctctcgagcggaggcgcttagaactatacaatngatataataacgtactnccgtcatctatatactcgatctcacgctacattggactatgactgcacgctcccggactactcaataagtgatatatcggtttgtgagagtggtcaactactgngctggcctcactccatagttaccctgcgtgtctccattagctctatatactgtcacgactcatacaccaataaacgtggacaataacatacataaggacgacgcgcaccgaaccatgtgttctgaacagaacaatacgatcgacacaaccgcagtcagagcgtacgacacctaatataaggcctgaactggttctggtacccacgttcg

SEQ ID NO: 290540 - DNA, 960 bp, Glycine max
  unsure (1)..(960): unsure at all n locations
ctgaggagctgtacttgaataccctttgttccttggaanccnntnaactanaaactaaagctagtgaaccaactttttggatnanactcttcagcttttgtcgcggnacacggtgcctacactacatgatctcttatcattataattatatcacgtgacacataattaacagttgtgcagtgaagatagcatgttgcagcgattagtgtgtctgagactcctctggagcgtaatgcgatagggatangaagaactgtggtcacctactctacatgcgcagtcacacttggntatagatattgtgtgtatacatgatgtgcgtaggacatgagcagctcgatcattataacgtatatcgatgacgaccgngcacgcntgatantgacgagcgcatgacggatacactgtcgtgcacatcgagngcctntgatacgtgcatattncaacgcaatcaagtcgactgctggtatgncanactcantggactangagattgcgtcgtaatcatcgantgcntaacgtcgtcntgctagntgcactagttcgcgtaattacgacgctgactcgtactcagtttgtacgatgcgtntganctacttacanatnacgagcagtattctgaactantgcagctantgactgacngtaatcaatcgataatcgancgagttctaatgagtnnggtaccngacgtctgctagtcgacngtcggtcaggctgatcgtcgaaagtacgcagtacntantcgaatatacgatgaggccatggcgaacaccatngntcgagantaagtcccccgtcgtagtactgatcgtctgacaatctgaccatcactgcgactgcgagtgcaattgttcattgtggtcgtacggcgtgancgagtagcatgtcgacgacgaccctgacngcagcactagntcgtntattacgcagcnatcactaaccaccagtcgctccacg

SEQ ID NO: 290541 - DNA, 381 bp, Glycine max
agctttaccgagtgtctgaaagcctcatcaatggtagagaaccactccctatttccacacatgtgattgctacaaccggagtcgagaaaccaagtctcttcttgttgcaagttgtcagcttcgacaagagacatgagcagcatctcttcttcttcataaatctcagcatagtttgcactctccttccatcttgggcattcgtattggaagtgtcctagtttgtggcacttaaagcactccactgtggctttgtttggagactgccttcctctgcctctgcctcgaccccgaccaaagcctctacctctgcctctacctccattctgttcttcatgtgagaccttcaatgcttgctcatcccttgtgtcactaccatgagaa

SEQ ID NO: 290542 - DNA, 424 bp, Glycine max
ctaagcttaaccccgctggatgcgcgtgagcacagggagtctagcgagggaaagtttggacgcaaaaatgaagagtcaagcgagggagaaatgaacagtcaaggataaggccaaatttaaaattaaaatacacacacacaaaaacaacaacattttcatataaaaaattggcgccgatttgtgttccactaggacattctaaggcggtttcaagaaactgtcttagaatgtgtgtcataaaaaaataattattcttaattacagaactgccaccgcataacattctaaggcggttatgtataatcgtcttagaatgcgcgtcgtaaaaaaatgattttttagtagcggggtttgcaagttttgtatcgggtatgttctttgtgcttctttgttttcagttgatgatgtgggatataaagtctct

SEQ ID NO: 290543 - DNA, 385 bp, Glycine max
  unsure (1)..(385): unsure at all n locations
agcttatgctgcaaacatttataatagacctcctcagtagcaaaaccaacaacaacaaaataattatgaccttttaagcaataaatacaatccaagttggaggaatcatctaaatctgagatggacaagtcctccacaacaacaacaacctatccctccttttcagaatgctgctggtccaagcaagccatatgttcctcctccaatatagcagcagcaacaatagcagccacaataaagacaacaagcagctgaggctcctcctcaaccttccttagaagagttagtgaggcaaatgaccatccagaatatgcaatttcagcaagacacaagagcctccattcagagtctgacaaattagatggngcagatggctactcagttg

SEQ ID NO: 290544 - DNA, 416 bp, Glycine max
  unsure (1)..(416): unsure at all n locations
accatgatctcaccttaaccttaatgtattttggagttttggaattgttttgggaataagtctggggggttttgttggataacatatttcgttggctatgtttcatgatgtattttgggccatacttgatgtacattgtatactggttaaatgttggacatgctgaatgatatgctatttctcaaatgctacagttcaaaaaaaaattagttgaatcaattcgaaaaaaaaagaaaaagaaaagaaataaagttgagtgaataagatcttaaatggaaaaagaatgatgagactcttggctntactctntgcgtttaaattttatctttaggttttcttattttttcttaatatgcacttattccccattactcctctattcctttgggatttagctatttattccatatttttcc

SEQ ID NO: 290545 - DNA, 377 bp, Glycine max
tttatgcaagcttctgcgtagaattgaattggaaggagaggggagaatgtggaattggaacttacatgggacgaaggcgattatgagagagacgacgactgcgtcggcaatagagaagatcacgggctaagggtgctttggggttttcgagcaaggtgattctccctcttgatctcggaggaggtgctgactgcgtcaccgattcacagggcatcgtttctctgcttatcagttgtctgcctccgggttccattatgtcgtccacgaacacgatcaattcacattctcacttggattgcttggttaaaacatcaatctcctctgtcactttcacattaattattgttctgggctcgatcccctgtgccacctgaatt

SEQ ID NO: 290546 - DNA, 409 bp, Glycine max
tcttgaaatgaacaaggtatgagtattagttgatattatgcctgaatagaatattaattcatttaaggaagatcccaaaacttgcattacttctacctaaaagtaataatgggttcccgccaaacacactacataagctgaaatagcacttttatgattctagcaatatatatggaggtagacaaaccatatatgtcccaactagagtgatgccttcaatttaccccagtttaattttaacttttaagtgccatacaatgtttccttgtgtgcctgttggagtctaagaataaaatttgcattgattacatctttaaaggtctgtgtactgattcttcttctcaacccatgttttttatgcaatatggcatggaattatttttgaattgctgtttctcaattgttttat

SEQ ID NO: 290547 - DNA, 373 bp, Glycine max
agcttataataagaaagtgaagtcaaaaacttttaatgttggagatttagtttggaaggttatcctgcccatagatagtaaggatcgagccttgggcaaatggtccccaaattgggaaggaccgtataaaataattcagatctattcgaatggtgcttatgagttagaggagctaacccctcagaaacgtactttgagcataaatggtaagtatttgaaaaaatataaaccaacactgctcgaagttaaaataagcatagaataagagaaatacgggaaacataaaaatggcgataacagtaaattgccacgaaagggcatgtgtcaatattacatcgaaaagtagaatcgaaatacagaattcgaaataaag

SEQ ID NO: 290548 - DNA, 407 bp, Glycine max
tcttatccaaggctcatcttggtggtgaagctccttcttccatggcttattccctagtgggtggcgcctcctctcacctcttctcatttgtcttccgctgcatctccatggtggaaaatcaccattaaaggacctcattgaagctcaaagatccagcctccatagaatccccacaagcaagcttccatcaaaactatcatataaattttagtcatgatagtcaccaagaattaaaggattggttgggatgtcaagcggttcaatcatgtactggttcacatacgtaaatgcagaatccacaaaactgcaagaacaacaaagtgagcaatgaacatggtttgaaatcaaattttgacaaaagtatcagaggtacaacattaataatggcagaactggtactggtttgc

SEQ ID NO: 290549 - DNA, 370 bp, Glycine max
gcaagcttactatacataacaattaagatttattatcaaataatagtgtaaaaataatttatactatctatatatgtataaactatttgctcttaaaatttaaaacaaaagaaggaagattaaactcttgtgagagcacaggaaataaaagtatataactgagtcaaagattaacaataaatgctaagtacacatttgatctttaacacactttttttaatatctactggattttttgttattaaaagttagtaattttttttaaaacattgtgaatttcacatcatatttaactaattcttcttgattttataattttgaacgaattttaataaatgagagtatgtgtcaaataattaatcaattaaac

SEQ ID NO: 290550 - DNA, 393 bp, Glycine max
ctcagctatgctttccagtaggatatttctgattagcctgcctgtcgcgatgtgacttcatttgtatgacgatttctggtctatgaagcttgttgttaaaaaattgcggtccatgaagtgaagttcatttgtcctatttttgtgaccatggaagtttaaagcataactatgactcaaatatcattttcttcatctgtgaatctctatcctttttttccccttttctcatgggaggttagctctgcttctgaattgcgtgctttgagtatggcatctgtgctactaaagtgaaaggggatttcatggattttgtcatactatctttgtactttggtgttgtatatttcttcacggcaagaagataatattgctgagtactatcagcagcaggtg

SEQ ID NO: 290551 - DNA, 360 bp, Glycine max
caatctaggatatgagaagcgtagctgacactcaatctctggaacgttataaccagaatatagaaaccatatctctgtacgtagaccagataatcccaacaaaagaaccgagatcaagatcaataaagcatataagaatgaaaaaagtaccgaagcctccaaaagtatagggcaaacaaaataaacaagttcttattcgtggataatctaacacaagccatgggcgtcgataaagaggacactaaaactgtcggcgcaggaaaccataccgataccaaataccgatgcgctaagctccagaatgtagccattaaacaagcatttaggagtaatgagatcaaggggaaataaaagataacc

SEQ ID NO: 290552 - DNA, 396 bp, Glycine max
tgagatgttcacatatccctttcatgatctttgcctcggagatgatttttccttggtttgggttgtttattctacatctgcttttctcacggaaaccttttgggaagtttatattctttaacttgttggttgaaatttattaggacctaccaaattttgagtaccaccccatgtttattaatagtgtttaggaattggttttagaagggaagggagagtaaaattttcatttcaaataaatatgttctaaattgatttttctataataaaagtaataaaatgacaaattgacaaaaattaatgtcttaaccttttatttctataaattggaattctcttaatgtaaaaattaaaattgttttttgtttaaaaaaacatgaatttcacactttaaca

SEQ ID NO: 290553 - DNA, 354 bp, Glycine max
  unsure (1)..(354): unsure at all n locations
agcttgttcttgattntttcaaagttctttaacaaccttagaacaatatactcgtccttcatttaattatctttgggcttgtcgaccacgatcaacaaagtactttcgacagctactatatgttgatttcaccaacgctgttatcggtatgctgcgacaatccttcaataccttatttacacattcggacaagttggttgtcatgtggtcatatctacgtccttctttatcataagtcacagtccatttttcctttgaaatgcgatcaatccatgttgctactggactcaatggacgaaatttttctaaattttcatcaaatatatgcttgcaaggagtggagcctgcataaaa

SEQ ID NO: 290554 - DNA, 415 bp, Glycine max
ctaagcttatacaaccaatattctttgtcctaccatgcgactgttgactctaacacaaatcaacacttagtcttttcttaaaatgaatactacggataacattaaataatgattttagattttcaaggattacaaatatttataggtactaaaattaaacttcactcattttacaagggctataaatagtgatttcaaaatttaaattgatgaaaaataaataaatatttttaaagggaccaaaataaaaaaaactcaaaagtcactcattttataataactaaatacatatttaatccaataatttatactaatattcacattacacatgtatgaataatttcaatggttgtaatggaaaaacaatcttaaccgcatgcaggaaccaagctcttttatttcttattttttatac

SEQ ID NO: 290555 - DNA, 300 bp, Glycine max
cggagaagtaactttgtgatcagtatcatctctccattatgttatgaaccatatgtggaaccggaacaggactaggtgatctatctctcttcctagcagacctcaagttgttctttaacggaatagggggaagtgaacttagccttcttaccgtgctacaagcttgaccattttctccattttgttgttgatcatttctactcaacaacaggtcctcatcgaattcaaaatcacttgcattgaaatcagaccccaacgtgagaagtttgtttttattagccaggacttgatactcaagag

SEQ ID NO: 290556 - DNA, 393 bp, Glycine max
  unsure (1)..(393): unsure at all n locations
cgattnagtgaacttgactgngcatgaaaacttgcatnccgtgaacttagatagtcagcgtggacgccccttcttaggagcgttgtcgattccaggcgccatgatggtatttgaaccctgataaccctcgaagactaggaaaatggtcaaagggtgcaccctcggatcgaattatcccgcgagccgagcttaagaccatacgagcctgtataacagcttggaaacaggttactggggagcagatgagagtacaaccccaggggggcccaattatagatgaaaaggattcacggaccatgatcagagtaagacttcatcttcatgttcacggagttctatgctccatttaactggctcttcttagagcgctctaaagttattcaaatctcctcg

SEQ ID NO: 290557 - DNA, 383 bp, Glycine max
  unsure (1)..(383): unsure at all n locations
agcttatgactccgtatctatgttgtatggtatgaatactattatttgaaatgatatcatacatacattttttcttttaaaaaaatttagatgcaggtatgcattgtgttaaataaaattgatatttaaatgtaaagaaatataaaatttatccacttgtgaccaacttaagtatgggtgttcgcgggtcggttctggctggttttagtcaaattcgggatccaacccaatcaaatttagtcggtttggtttggttttcataattttttttaaacccaacccaacctaacccattcatgaatggtttggttcgatttataccaatggattacccatttaaatttgatctttttcttaanactactattgtatatcatgattct

SEQ ID NO: 290558 - DNA, 425 bp, Glycine max
tgccaaaatttcaaatctaatacatttaatttgcgatttaatcaagtctttgcttgttattggtagcaacattgtgataagcaatattcttggagtaatattatgcttctattcttaccatagttgtttactttcaaaaccagattgagttatatgaatgagggtctttatcacatgtctaaggattttctagcaaagtcataattatattaagtagtgtatgaataaaacccttatgagcataattggaatatatatatatatatatatatatatatatatatttctaactctccgagaggaaggtttctttcatcatgttctgaaccttgatatcaagtgaatatattttgcgatagtctgttgaccttttcttcattgtctaattatttaaacaatctatgtgttcgttcaatcaattcaaa

SEQ ID NO: 290559 - DNA, 376 bp, Glycine max
agcttgaaggacattcacgaagtgtgactatatgatgtggcaatggggtgtagcaagaaaatgctcacctccccctctaaaatttaattgtattgggcttcttccaattcaattaaatttagttcccaacacccacatcaaatattcacttaattcatgtgaaattacaaaactacccctaatacaaaaactagtctaggtgccctaaaatacaatggctgaaaaatcgggctcatacttagcccatgggcccaaaatctaccctaaggctcatgagaaccctagggccttctcttgcatctttggcccaatcttcttggagtcttctatccaatgcccttaggggtaggattgcatcattccctcccccttgaaa

SEQ ID NO: 290560 - DNA, 399 bp, Glycine max
agcttccatcaagaagtgtggtgagtaggtgcataaaaaatgagatgatcttcttgtatggattgctaaggaagattatcaccgatgatgccaccaatctgaacaacaggatgatgaaagaaatgtgtgaggatttcaagacccaacaccacagttctatgccttacaggcccaagatgaatggggcagttgaggctgctaataagaatatcaagaagatagttcataagatgtctatgtcatacaaggaccggcacgagatgctaacctttgagtcgcatggttatcgaacttcagtgtgctcattgactggggcaacccctttctctttagtgtacgggatggaggctatgctcctgtttgaggtagaggatccttctttgagaatgctagccgaat

SEQ ID NO: 290561 - DNA, 383 bp, Glycine max
agcttccaaaagtatcaagttaacccttagcacatctttgtagtgggttcttctcacatgttcctatgtcgaagagttgttcttcaaaagaactcccacaagaacaaacaagacgttctccacggtggaagatccttactttcataataaccttaaagaacctttattgtagatccaaattgatgaagatgaaaaaaataatatattatagcaactcaaaatcaagaggcaccatctcaaagcatctaaatcaaagaaaaactcaaaaaatacaatagattgtgcatactaccaacttttatgattgaaaaaaattaccagatcagcgaacgaggagaagaaaatcagcaaaagagacttcatttaactaaatagtcaattaa

SEQ ID NO: 290562 - DNA, 429 bp, Glycine max
taagcttgtcgctgttgatgaagattgtcgcaccaccgcacataggtttgtgacttgtcggctgccgtcgcacttggggcccatttcttggtgagttttcttaccctgacgtggtgtgcataaagcaactaaaggtcttttgtagggattcaatcaatcaacctaattttattctaacagacaatcatcaatcctaaccacatgttttctatccatgtagagaaaaattattgcataaagatgaataaaaccctattgtgtttccatactcaaaatcatgcatacctggattagccataatggaattatgaaaggttgatgaggatcaagattggttttatgatcttctaaatgtagagagtccttttttttctcttaatctttcttttctgataggcataaaaagaaaacaagagcgaaattgtacgt

SEQ ID NO: 290563 - DNA, 384 bp, Glycine max
agctttatgatgatgaatcaagttgattcaagtagttttgatgatgacaaagatgatgacaaaaagcccaagagaatgatttcaagattgagtcaactagtttcaagaatcaagagaagtttgatttcaagattcaagagaagatgaattcaagattcaagagaagaaatcaagaagacttcactagggaagtattgaaaagatttttcaaaaaacaaacatagcacagttttgtttttcaaaagagtttttctcaaaattttctaagttaccagagtttttactctttggtaatcgattactagtttcctgtaattgattaccaatggcaaagtttgatttcaaaagttttcaactgaatttgtaacgtttcaattgatttca

SEQ ID NO: 290564 - DNA, 428 bp, Glycine max
ctaagcttgttcatcttgagataataggtggtcatcctcatttgtagatgatggtgttacatacttctttggcctaacaggaactccaatatttttacagcttctaatgttatgattggtttggccacaccttccacatgtaaactcagccaatttcctctttagcttgtcctgtgacattgtcctcatctacagatctacttctatttttctttggccttcctctttggacctttttatgtggtggaacagggtgtgtatactgtgtctgggcccaatattgtggtccttggactggctcaataaaatgctggcatgtcttattataagcttctattgacagccactcatgacacatgttctcaggcttccctcctttgagagttattgttgcaatggcatgtccgcatgacatccctacatcaaag

SEQ ID NO: 290565 - DNA, 356 bp, Glycine max
agctttccaaagttttctggttttccaaaccttgaaaactgtgctattcatcttttcatttccttctccatttgccaaaaagaattcgccaaggactaaccgcctgaattctttttgtgtctctcttctcccttttccaaaagagcaaaggactaaccgcctgaattcttttgtttctcccttctccctagtcaaaaattcaataagacacactctgagaattcttttgattcttctctttctcatatacaaaagatttcaaaggactaaccgcttgagaattcttttgtatcctcattcacaaagattcaaagggttaaccgcctgagaactctgtcttaacacattggaggatg

SEQ ID NO: 290566 - DNA, 405 bp, Glycine max
tcacgaccaatcggttttcgattccttcaccatctgttcccctggcgttgttaactacaacgagttccccaccattaccagcatttcccaagttttcggtcaaatgcctagctgttgaagaattgacaaaccgtagggacagaggcatgtgttaccactgcaacgagaaatgggtcactggccaccaatgtaagccccgattacacttgtttatcgcatatgacaagtcagagctatcattgtctccctcagcaacagactcctcgatcaacttgccggaacctttggtcgttgactcccctcacccgagcctcaacgtaatgtcgggcatgcctccccaactactttttgcatttatgggattctaagtcatcaccaagctacaatactggtggatggtgggag

SEQ ID NO: 290567 - DNA, 305 bp, Glycine max
tttatgcaagcttttatgattatggagtacccatcacatatggtactagggggcggacgggcgatggtgcacaacaagttttccacatccacaatgcgcgtatagacccaccatcccctgttgcccacctccatctgagcttacgtactcccacgtagcccatatcctcgtttatctcaacaccgggtccccatcaatcctgccaaacttccacaacatccaagcaaaacaacatttcaacagcacaagctatcacagccaagcaaaacagggcaaaggcagaaaactctgctcaacacaccaac

SEQ ID NO: 290568 - DNA, 413 bp, Glycine max
  unsure (1)..(413): unsure at all n locations
tttgtaggtgaaattaggtgctttcatttcccttattgtcctctcacggngtggaggttgtgccatgttctcagaatgtgcaaaatcaaatgctcaaaattataatgttccaaatcaggatgttcaaaatcaccaataacagaatgcacagattcaccagtaatggaatgctcaggatgatcaaaaggtataaaatgatgcctaactaatctatgaaatgtcctatctatctcagggtcaaagggttgtaagtcaatggattgcctctagtcatacattacattcagcatgcacaactagttgccttgtcatgtaaataaaggtgtaggtttgaactacatctaccctcaaatgatatccaaatgtcttgaaattttgtgagctaccttataaaatgatgagaagatagcaca

SEQ ID NO: 290569 - DNA, 374 bp, Glycine max
  unsure (1)..(374): unsure at all n locations
agcttaacaaaatgcatgcgaagtgggtggaattcctagagcaattcccttatgttatcaaacataaaaagggaaaaggtaatattgtagccgatgctctttctcggcgtcatgcattactttctatgcttgaaacaaaattgattggtcttaaatgtttgaaaagcatgtatgaaaatgatgaaacttttggagaaatttttaaaaattgtgaaaatttttcagaaaatggtttctttagacatgaaggctttcttttcaaagaaaacaaattgtgtgtgcctaaatgttctactagaaatttgcttgtttgtgaagcacatgaaggaggtttaatggngcattttggggtccaaaagactctagaaacatta

SEQ ID NO: 290570 - DNA, 406 bp, Glycine max
actaagcttgcgattggtctcgcgtgaagatcaagttttcttttagaggccaatttaatcatcctgcttagacgaatgaaaaaactggggcaaataaaaaaggtgaggatgagggaaaaacccatgatgtgactgccattcctatacgggcaagtttcccaccaaacccaacaatgtcattactcagtcaataacaaaccaccttcttacccaccacccagttatccacaaaggccatccctaaatcaaccacaaagcctgtctaccgcacttccaatgacgaagaccacctttagcacaaaccaaaaaaaacaccaaccaagaaatgaattttgcagcgaaaagcctgtaggattcaccccaaattccggtgtcatatgctaacttgctcccatatctacttgat

SEQ ID NO: 290571 - DNA, 376 bp, Glycine max
aagcttctcaagcattccactcattaacaaacaagagacgatggcctacaaatgtatcatatatagcctcattagttattcatctgtagtgtcaaattataaagatttcatgtctaagaagctccttctacttcaatcaattcttagactttagtctccaaatgggatgttataacttgtacgaattccagatgagcttatcaagaatgccaagtacatagccacaccatggaaggggatcctggcagcagatgagagcacgggcaccatcgggaagcgcctagcgagcattaacgttgagaacattgaggccaaccgccaagcccttcgcgagcttctcttcaccgctacatatgccctccaatacctctctggg

SEQ ID NO: 290572 - DNA, 412 bp, Glycine max
  unsure (1)..(412): unsure at all n locations
taagtttgcatttcatcaaacattaaagggttacactatcacacatcacacatgttgcaagtttgatgcaagttatgggatatagtggtaagttaaaaaaaaaaaaaacttatattcaattcattttttttaaaatgaggccaaaatccaacaaaagcatatacgcatgactttttttttagattgagtcatgaccagattaatgtaaaaagttccaaatttaattcatactaaaaaatttaagttcgattcctatatacatcgggcatctttgggtcaagttagttgctaactggactgggttggtggaagcattgtttgcataagctttttgctggctaattaagactagattatgttaaaacaacctaaattaatttgtactcaaaatntaagtatcaatctacacatt

SEQ ID NO: 290573 - DNA, 363 bp, Glycine max
  unsure (1)..(363): unsure at all n locations
agcttacacaaccactaagatcatcttagtaccgtttcaagtttttctgctttagataagtctgggatctcaatcaaatctggggagtatttaaggtcaattttctttaaattcacaagattctgtaacaagaaaaaaccatcacaatgttcagaaattattaaattcataatcacggccttaactaaaagagaaatctaatcattcagatgagaaagtggtgaatagttaaacatagaagaatcgtatatcgttcattagtttacacattgttagttgaattatacatttcctagggtactatttgatatagaccagaactccagaagggaacctgatggaggttntcccgaacagttctgg

SEQ ID NO: 290574 - DNA, 412 bp, Glycine max
acactataaaactaagcttggtataatgaatcttgctaacttaacaaagctattattcactcatttctcgcaagtttccttcatccattaaagttgatagcgttacacatggccgttactgtgaaaagagagatagtgggaactctaaacactttttgtagcatatcttcatagaactacaacttgccagtgtcgtcttgcgctcaaagttgacttttagtgtacaaatcaaatataacattaacagcataagacaaaaggaattaagaatattaagacaagacaatttaaatcttcccttttgtgcgttgtggcacgagttgcttattgaacctatggacgctactttctgatgattgctttttgtacttaaggatagagtaattgtttcattgcctttgtactatgagcg

SEQ ID NO: 290575 - DNA, 365 bp, Glycine max
  unsure (1)..(365): unsure at all n locations
agctttattagtaattgagccatatatattcttattctctttattattttatacaaactcacgaaacatattctttccttcgcttatactcattctcactgtctcagcaccttgccaaattaacatagctttaatttctctccctgctttttatgtatcacctatgcatatctctttaatttattcatctgcgtaacttgccaaattaacatagctntaattagtctttcattttgatccctttcatttcatgcatggatgattcctttaatatggaagatagacaaatcacgtacatgcactgtacttaactacacacagcaggcaaagtggtggtggccaatatctgcatgtatcgaaagact

SEQ ID NO: 290576 - DNA, 388 bp, Glycine max
  unsure (1)..(388): unsure at all n locations
gagattgagtttcccattcttgctgttattgtcagtaatcaattgccactgtttggaaactttatctgctggtaccatagatgcagataagttgtatggagttaagtttcagaagaaatcagaagctatcacattggatattgatctcaattctaccattcggaatgcatttcaggcaacggtatgtgtttaattttttttatttgaacattttgtcaatgatgtgtgtcagttagagaaccttttggatggaaagtgcatggtatttgttagcaatcatcacatttataacctttcgactaagagagttcattcacaataggattttgggaaatattcatggacgcttttagagacaaggcttatctttttttctttnttttttttg

SEQ ID NO: 290577 - DNA, 392 bp, Glycine max
  unsure (1)..(392): unsure at all n locations
agcttggttaggatgcttcaatggaggaaaagaatgagagagagaaagagagaggggggagcacgaaattgaaggaagaaaaagagagagaagttgaactttgagttgtgatgcaatcctccctaggaagggaccagtcactagaaccataagcaagagactccaagaagattgggctagagctgctgaagaaggccctagggttctcatgaacctcagggtagatttctgagcccatgggcctgtgtccaattatctttgtacatattagactaggatgtcattatatttggtccttgtatttagggctccatattgtaggtagggtaccctagacatataggattttttcagcccttgtattttagggcacctagactagttnttgtatt

SEQ ID NO: 290578 - DNA, 458 bp, Glycine max
  unsure (1)..(458): unsure at all n locations
tgccgcccagctcgcccaggcgagcaaggttgcttcctccagaagctttatccttctggaggaatcttctggagggcccaagtgggcctggttgctatttacacccccctttttactaaatgcaccccccttttctatttgtttgtaattctttgtccgtaacgttacgtaactttacgaatttcgaaatgatacttattttccttccgcaaggttacgaatccttacggattatgtatttactctttcttggctttcaaagaagttactgaaactcacggattgctcaaaaacacgtcttttcgattttcgccacattacggaatttcacggattacgcaagcctgcttccttatggatttctgagacgtctcgggacttcatttattgcatgtcatcaagtaataatccccggacgaaattanggtatgacaatcgctagcggtatagtacatatt

SEQ ID NO: 290579 - DNA, 386 bp, Glycine max
agcttcattgtgagatatgtggttaaattaaataagataccttttttgagcaggatgagtttcttcaaaaattagttcaaaatgctagtatggcagtatctagtaaaagtttgaatccatgcacttagtcttgaagatttaaatctatgaactaacaggattttccatgaaaaagaggctatactgatgttgttgaaacaacaaaaaatgcatatttggactaacattaccgtagaatgctcttcaagaaaatatcatgaataaaatattgaatggagttatacctagcttggattgaaaatgaacaaacgaagagtaaaaacaaaatatgactatagaacatagacacagaatgaggtccacaaggccaaacattcatatgaaaa

SEQ ID NO: 290580 - DNA, 468 bp, Glycine max
aagcttcaaacacttgtgtaatcaattacaatcagcctgtaatcgattaaaatagagagttttaactatagaagaaatattctatccttagaacttttcttctaactcctacatgatgatgcatgatgcacatatgaaaagatagagactaagatgcaacacaaaatataacaatcaatacaaatgtcactcaagagagttgaacatgtaaaacacaaaacttcatcaagttgttcttggttctttttcaagcttcaaggctaagtcttcatgttgttccccgtatctctaacatatattatgcacttattatatgattccttccttttcccatgttgttaattacttcctgggttcaaagatacacctcttggaacaataactatgtttaatactctatgcaggttgttcgccttcctacacagttcctttttcttaaatttacaaacacttatatcaaaggggaag

SEQ ID NO: 290581 - DNA, 388 bp, Glycine max
agcttgctctaaatttacattgatgtttgtatttatgggaggaggttgtatgccatttttttttagtagtgtcccactggtaaaactaactttccaaatgtttgccttcgcaggaaatggccccgaggaagcttgcctcaaagaggtccaggaaggacaaggcagccgaaggaactagttccgctccggagtatgacagtcaccgctttaggagcgctgtacaccagcagcgcttcgaggccatcaagggatggttgtttctccgggagcgacgggtccagctcagggacgacgagtatactgatttccaggaggaaatagggcgccgacggtggacatcactggttactcccatggccaagtttgatccagaaatagtccttgagtt

SEQ ID NO: 290582 - DNA, 457 bp, Glycine max
  unsure (1)..(457): unsure at all n locations
gcttctatataagctgaaccattttatcaataaacacatgttgagttttattcagaaaattagagtttatctcttttatcttagtgagagtgattctcctaaattcttgagtgattcaagaacaccctggctgtatcaaaggactttcacaacctttgtgtgttgccctcgctggaaagagtgattctttccttcctatcatctccacccttgttctttcaaaccacaattccagaaaatccacctctgcccaaaattatctcgtgaccataactcccatttcacacactcaaattaagtgattcttgagcctaaattgaatttcaaaacgagacctttcacctcgttttggaatcacctcatttggagccctgtagcttccgttattgccatttctatatttctgtccagccaccacttaacctacgttntaccatcccattcatccattttatgc

SEQ ID NO: 290583 - DNA, 295 bp, Glycine max
agctttgtcttattggcttgtaccccatcactggctagcgaagctataacctcattgtctctcacagacaataaattggggagccaatccaatccttgtgaccggactctcaaccacttatgatagccgccgatgatcgcattactgtctatcctaagccattatgacctttcttcacaccgcatcccatgccaagcgaactccttggagcaccctcacattgagggcactgaaacaacacgcgaagaaaggcgagatgctttgatctgatggcactcctctcatggggcagccc

SEQ ID NO: 290584 - DNA, 472 bp, Glycine max
  unsure (1)..(472): unsure at all n locations
cgtcgtgcaaccgacatttttatgagttatattatgccactatctatcttccgctctcattagcatcaggtgtgtgtcactacaatatgtgcacactatctttacatatgtatcttctaaggacaacgagatatctttcacaaacatgcttagaactgaactcttttgccacgattataccaaacaaacaagatcctttcttttttaataagagctcccagctatacatattacacttgtattgcccatccatgtgcaaaattactaagggtgagtcacccaaattgtgagcttaccatactcatcgtacctatagcatattcaaacccaaaatcaatgcgtcttatcttgcctgactatttcaataatcgacaccgtgtggagtggaatcctataccatgcctatggggatgattcttagtgtgccaactgtataaacctcnttgtgtatccgatatgtaaacccctaacn

SEQ ID NO: 290585 - DNA, 391 bp, Glycine max
ttgctttgcggatttggtcttcgctggcgaaatgatcgaagtgggtttaaaatgaggcaaatctgatcatcatgctttgataaatgcaaaaaaaactggggcaagtgaagagggtgaaaatgagggagaaacccatgctatgactaccattcctatatagccaagtttcccaccaacccaacaatgtcattactcagccaataacaaaccttctccttacccaccacccagttatccacaaaggccatccctaaatcaaccacaaagcctgtctaccgcacttccaatgacgaacaccacctttagcacaaaccaaaacaccaaccaagaaatgaatattgcagcgaaaaagcctgtagaattcaccccaattccggtgtcctatgctgac

SEQ ID NO: 290586 - DNA, 406 bp, Glycine max
tcgtcaactggtttgggagtggaatttgcatcggatttggtggagaatattggaagctatgaagatatatagcagtgtcctttttctctgttaaatcaacttataacttagtgatgaaccatatagctaggttagcgtgtaaataatattgaacagaggtttttaatcatctttggaattgtaaagtccctctgaaaatcgcttggcttttttatggcgctgcttatgagaatgtaaatcatttgttttcctccggcctgttcggtacgtttctcaacaaaattggttttatgtctatatactttattggaaatgtctacgattcttcatattatttatagcatatggctctatccttaattaggcaagatgttctagaacttctaccatattatctggcactcag

SEQ ID NO: 290587 - DNA, 383 bp, Glycine max
agcttacattatatatcaaattaaattcgttgtctctagatacgtaattgcttactgtgtaactttctaagatactattagatttgtaacttctgttatttaaaaggacttagcacaaggaattgtgctccttgaaagtgagcaactcagtttaaaggaaagataaagtaaaagtttttctggtcattgatgttaaaatcggcggtcaacgtcatcctaatattaattgtttttttgtaacctaaaggttctaacgagcaactcatttttaattattagattatgaaaaaaaaatcactcatattttgtttatttagtttccttgtactagagacatgatagtaattatgggttattattttttttgaacaatacaaaatatt

SEQ ID NO: 290588 - DNA, 422 bp, Glycine max
  unsure (1)..(422): unsure at all n locations
aaactcaagcttaggttaaattagtctaaacttacgatggatcgaggtttattattttatgctacagcatagaacaccaaagcgtgattgattagagaaatatcttcatatgcatcagcttgtttgttagaaagacccaacgctttctacttattgctgtcaacttttacttacttgcatttattgtttttaccatagaagtagtttatttctgttttaaccatccattattaatgttattccaacaaagccttatttatgattaaaactatgtctaataagcaagttccctgagtttgatactcggatcactccgttntaatgttaaatacttgacgactcaatgcgtttctcgatgtttcatttcccttgaatataattgntgaaaattggataaacagtaactgcangggaaaacgaac

SEQ ID NO: 290589 - DNA, 392 bp, Glycine max
  unsure (1)..(392): unsure at all n locations
ccaccccatagacaaaagagaagagaaacgggggccaagaaaccncnatnnnaggagagttgagctcaaaccagcaanaanaaccggggacaaggaacacgagcagccactattaagaagagacgcggggcgggcgcgacgcaaccaaccccgcgaaaacaagcagaaaggacggaccgaaagcgggacacgaacggccgagaaagggccaaaagctcacagcggagggccgagaacagcgaacggcgggaaaacaacacacacgaccggacaacacacgcaagagcacaagaaagagcaaacaaccaagggacgacagcccgacagaacgaagcgaacaaacgaggaggggaaaacggacacaacggcacagggcaaacgaagcagaaggc

SEQ ID NO: 290590 - DNA, 400 bp, Glycine max
  unsure (1)..(400): unsure at all n locations
agaggtcgcttgatcctttgatactttgaaacacanncancnaaatacgcgtggttttgggacagacaagttttccccttgttaacataacggggcgctatggggattgagaccactcactccatttatagtgttaacgaaccacgggatgtataaaggcgtttacacctctagagtgccactcgcagctaagcggctctgaatggtagcacaccccgtgccttcgtatatagatgggaagatgacctggcaacagacgtgacggtatgccattacaccccacatttgattttgtccaattgatttatctaactatcaagggtggatgaattatgagctgggggccgttcgcatatgtagggggatacttaagcactggttgcgctattcttaaccgagc

SEQ ID NO: 290591 - DNA, 383 bp, Glycine max
tttcttgtgttactcttaaaggaaaaaagatttcaagttatgtcttgaggctgagacaaatgccagcaaaaatgctacccttctttagaacttttaggagttggaaaacaaagggaaatatcttcaaatggatctaaaggagcttaatgaacttcataatcatcagaaagaagaaaaatatgatctttggagagatcgttcaaaagcacacaaagattatgaagacctcaatatgagtaaacataatctgtgtggaaggtgaagaacataagaaatatgtgagtttcttgaataatgagcttctgaagtatcaagaacttaagggtcaaccttcagatgtttgtaaacttcatgaggaaataataaccttaaagactatatta

SEQ ID NO: 290592 - DNA, 463 bp, Glycine max
  unsure (1)..(463): unsure at all n locations
acactctcgnnaaactccgcttgccaagagaaggagtccacggaggttatgcttaccatctcaaaagactggaaagcggtttctaatgactcctctgcggcctccacataaggcatagaagatgggcagctcacctagatgtcttcctcgcctgatacgatgaccagatgcccttccactatgaatttcaacttttggtggagtgtacagggaacaactcccattgagtggatccatggccgccccaacagacagctgtacgggggggttaatatccattatttggaaggtaactcgacaggtgtgagggcctatctgtaccatgagatcgatcctccctctaacctctcggcgagggccgtcgaatgcacgaaccaccattgaactcggctttatgtgggaagcattgaatggtaattctccagagtgctttaggcatcacgtctaactggaccattatcga

SEQ ID NO: 290593 - DNA, 390 bp, Glycine max
ttgcttgcatgatttacattctccccctttctcaagcaaattcttaattcttcttgacatcatcaaaatcttcatgatttacattctccccctttttgatgaggacaaccacctgtaggttagaagcaacaacaaagaaaaaatatttatttgcatatagtttactcctccttggttttgcaatgattgcttatatgagacagttgaagatttcatatttttcatatgtaaacaaattgtctcataaacaatagataattattcttactattttatcttttatctttctctccccctttgtcaacatcaaaaacaaatcatgaatagagaggagaaagatgttaccactttttgcaatgtatgagaatcaagtgataccaaaaggcatta

SEQ ID NO: 290594 - DNA, 397 bp, Glycine max
atactctgctcgaatgggaagtgtgaacggttttttcctgcttttattcgttgaccacagagaggttcctgtagatatgtctcagaggtcaggacaccttttagacgtcaggtggggtgctattgcccaaaaccaagcttgaccaatcccgacccatcccgggcatagtcggtcagtgagaacctgtgatgtacctaaacaggcgagctcctgacagtcaacagctaagaggaacacatactacaaagcaaggaggcttggggtggctggccagctgtgaattgtgtgtgatatgtggatcatggcctctggtaatcgattaccaagggtggcttatctatcacgatgcttaaaatagaagacacgaggctaagatggtctctggttatcgattacc

SEQ ID NO: 290595 - DNA, 384 bp, Glycine max
agcttgtggcaggcgctaagcgcacgatctgaacgcgctaagcgtgcctttgaaggcccaaagctcatttctgcgcctataaatagagatccaagccaagggagaacgtacacctcgcctcatagcacttctctcagcattccaagcctgagctctccattttctctctatattctttgcttttattacccattctttctttcacccctatttgtaaagccctcaatggccatgagcggctaatcccctagctagggcctgacaggcctaaaaagccaacgatgtatggtgtacttcaggagttatcaatgcaaagaggattcattccaggttttaggttctaattcttttctttttatcttgcatttatgtcttgaatatctt

SEQ ID NO: 290596 - DNA, 411 bp, Glycine max
  unsure (1)..(411): unsure at all n locations
ntatcgtcagtctcaaacttggcctagtctctatttttcaaaacctatcatttactttatctattgtatttttattattttataaaaagaaactctattttattgtctatcaaatgaataaataaaacattcttttattttctctcaaatcattattttaattaataaaggcatttctccttatttatttaattataaaaacctcatcattttttctaaaaactatttatttataaataataatcccttataaattagtttacaaaaaatgaaatgttacaactgagtaatccaaatgacaaaattaaggttgacaatcacgaaaatattgcgttgagtaggtgatgtacataatcattataagaaaaatatgattaaccttaatatataagataaatattaagttaattt

SEQ ID NO: 290597 - DNA, 384 bp, Glycine max
agcttagcatcaaccccaaactcttcaatttccaacaacacatatttattgcattgaaaaattagcaattgcaatgggtgattccttctataaatggaagaagagaaccaacagagagtgcatgaaaagtgagaaacaaatcttcacatttagatggaaatgtgagagtgagagagagacacacacacaaagagcatgatagaaagaaaattgttttcccattattgttacaatagaagtttgagagactaaggggttccatagtttttctcttgctaatactgagaagattttccatgtaaaaaaaattatgcttattattctacatttcttcttagtgtccattttgacttcacatagaagagaaacaaaaatgtttcttgg

SEQ ID NO: 290598 - DNA, 493 bp, Glycine max
  unsure (1)..(493): unsure at all n locations
agagcggtagctttgatccttggataacntttgatacctctgcatccgngccttanaaatctaacttgcataaacgggcgttcctaattctctacnactgctttacccgtgaggaggcagtgaagaagaatgttgcatttacctgaggtgaaaaacaagaacgagcctatggtttagtcaagaaaagctaactagagcacctttataacccttccttgactttctaaaacgtttgagctacaatgtgatgcctccggagtgtgagtcggagctgttttgttgcatagtgggcaccctattgctattttaatgaaatacttcatggtgcccccttaactaccccagctatgataaagagctttatggccttataagagcacttccgaacttgggaacatatccttgctgcaaggaaattgcattcttagcgatcatcatcacttaggttcattagaggcaaaccagttaacaaagcatgcaaatgggataagct

SEQ ID NO: 290599 - DNA, 387 bp, Glycine max
agcttatatgtttgggttgccatggcttatctcttgcaattgattgacactataatatttgacgacaagtcctcgactcatgtccatgtcacataccactagtacctaagcaacctaaatgcttgccatgagtacgtatggggagtcattgcactagcgtgcctctacgaccatctctcctatgcgagccaatataccagcaagcagtatggaggttatatgatgttactcatgctaagtaaattattatagtattgtaattattttttattattgaaattaatattttttttacagtcatgtgtgtttgcacatctacctagtgttgactacttagagtcggaggattgtgtggtgaaggacccaatagccaccagatagaagcca

SEQ ID NO: 290600 - DNA, 259 bp, Glycine max
ggactttaagatcgaaggtcatgcactgtcccatttatggccccggagtaccctcgtgatacgcgcaagtcgcgttcgggttgaaccaccttattaaatagtgacaggctcattttttcatgggtcaccaccgacaactagttggcgattcatgaggcaacaagtcctcgtatgacatcaaaattaaagcgaactctataacttcttattagagcgcatccctgaattggaacttatgctaggatttgaattacctaca

SEQ ID NO: 290601 - DNA, 390 bp, Glycine max
  unsure (1)..(390): unsure at all n locations
agcttgatagtgtgtaaccaaccattttctcattgtagaacaccggtaacgtgtatactatcattgtgatcatctttttctctgtcattgaaggtgccacttgagctgtcaagtccctccacctctgggcgtattccttgaatgactcatgctcttttttacacatgttttgtagttgcgttctatccggagccgtatcataattgtactgatattgcctaacgaaggcaaccattaggtccttccaagaatagactcgggaaggttccaagttagtgtcataccctaatttcgtccggngattattacttgacgacatgcaacctttgattggccgtttcaagatacttggcaccctttgttgcacaatatgtaagtcttgagacgcac

SEQ ID NO: 290602 - DNA, 460 bp, Glycine max
  unsure (1)..(460): unsure at all n locations
nttcgattcattctatgtacccgtagtggtccacattgtgtttcgtgcattnttattctcgttntgtttactttttatacccccctcttgacgtgcttaagccattttacttaagtcatttctcgcttaacttaaaaataaaataaatttccaccgaatgtttgaattgtattatccattaacttcggttaaaatcaattccgaccgttcggtcatgccgtaaccacgttggaaatcaaaaagaggtaaaaaataatataataatcaaaaaaatatctttttagtgaaataaagcggaaaatcaatcggacgttttctctttgggatttctcattcttaatcgaattaattaataactaaagtgaaactaaggctaaaatcaactcgcctagtcaagctcgtccacaaaaataggctnttgaagtttgtcatttcaattcctcactaagaaaaatggatc

SEQ ID NO: 290603 - DNA, 385 bp, Glycine max
agcttcaatgccactaccttatagggattatgcctttatttatagtgtctacttgataaatcgacttccatcctcatctattcaatatgaattgacttactaaaaactatttccgaaattaccagattatagcttcttaaggatctttggttgtgcatgttttcctctattttgactatatagctcctctctcactaagacttgctcataatgactccaaagtttctcttgaagattatccaaaaaaatctattatgaccctgaagcaactatctagcaatgccattaagccttcttatcaatcttcttttttctttgaaaatattgccaaaagagttaacattccaatctttcaaagcatgttggatatgtttgaccctttgac

SEQ ID NO: 290604 - DNA, 462 bp, Glycine max
  unsure (1)..(462): unsure at all n locations
tgcaagtgtaatcaaattacttgacttaagcatgctttatcaaagaataagttacactagaatcagaaggtatgctcaaaagaatattctttattaaatatatctcaatatgagtcatcgaactatagagtatcagcatcgctaagaacaagaaatcacaaacaaccatactatctatgctattaaggcaaaacaccatactacaagcatacatagaattataaggttcctataacaagtatatagcatacatataagaataaaggattgaacagtcactaagggtgtatttaaggaatcacaagtttcaacaatcacgcttatggtcacacataaagaaaaaaagaatagtcaacacatgttaacacattgattaaacacactcattcacaacacacctgcaagttcaaggttnttgacaacattaatacacacatcaagttttcaagaccacttgtatca

SEQ ID NO: 290605 - DNA, 387 bp, Glycine max
agcttcatattatcaattgcaccatgttccaagaagagtagagggtaccacctttgttgagtggttttattaacattattttagttgaaataaaggccccaacttgttttaatttgaagaaattaaggtttaataaggtggaaactctaggcttgtggctgcctcttggctgaccaaggagttgcacaattttccacatgtttttgtgtcttattctagttttaattaggtataatgacaccatcaattattgttattgtcttaattctagttttaattaggtataatggcatcatcaattgttgttattggtgatcatttcatcttctcactgttgtaaccaactcgatgtcattcctatttatgggctgcacattttctaataaa

SEQ ID NO: 290606 - DNA, 467 bp, Glycine max
  unsure (1)..(467): unsure at all n locations
tatacaatactcntgcttataacctaattattgttttccataaatcattaccggctctggaacatttcaaaatatttgtttgaggttggatgcatatagaaaaagttatcgttctacaaagaaatttacaaaataaacttttttttttctctctctcaagatttataagatgtttggagagttttacaacttaaaaaaaattaaatgcaaagagaatgaaggcgaagatagttcattacaaattttgtaatttcaacactttcaatagacttcaacaatcaatgtgagtaaatcacatcctttttgcatctggagcaagtatcaattggagcattaaatgctgcattctattctattaagtgaagatttgaaataaaacatatcggttgcttaactatagacatgtttcaagtaacccanagggttgaggcagtggtaaaatgaatggaaatgatatatctaatata

SEQ ID NO: 290607 - DNA, 394 bp, Glycine max
agcttgttcatgttatttaaaagatgcagtgacatatggtttcaacataatttataataaaaattggtcatgctcataatcacccaattgctgacagatgacctgaaaattacatagttaagataaggaagcacacttgtgcaccatatataagagaaggttgtagcttgcataatgcggaaattggcaataaattaggaccacagataaggagattttttccttctaaaataacattacaattgatcagattaaaggatgtaagaataactatgaccatatgtaaaaaattctgacatatcaatgtaaaattctaaatgtacatatgacaaataaggcagcttcaagtttggaccaatattgtgcttacaaggctagaatactcttatcaatt

SEQ ID NO: 290608 - DNA, 493 bp, Glycine max
  unsure (1)..(493): unsure at all n locations
ggagggccttgancctttganccttgagaccctcgaaccaccacacnaancnactactgtcactgccacacgcgtcttcgtgcaatttactgcattcaatccagcggcactgagggatattcacgaaatcctcgcaacctcgatatatactttcgcccgaggggattgctcctctgaggaaaacagactataccaacgaccgagataatatgctcctgacaccaaagaacagtctattcgtggagaagcggatcatactgagttccggatcgattcgctcgcgaatgcgacaaacccaagcttcgcgacagtgtgtgcgaggaacaacagtcatgcatcatagactcagatgttcgccacgagtatgtcgctcgagaggactctctttctatcaagccatcggacaagtcatgcgtcattcctgagccggtgactcacggatccttaaactggatgccggcctcggaagcatccaccccacctttccatatcg

SEQ ID NO: 290609 - DNA, 387 bp, Glycine max
tcttcttgaaccaaaaccggcgagagtgtgatcttaaactgtgatcgaacgacttgctatgagtaataatctttgcatcaatctcttaattttagaatgaaatgtataaatgaggacatgatggaggccatgattgtgcatacacaagccttttgaccaaaaagcttaccttgaatgataactgtaccatttgcaccctttgtgagctgaatgatgttgtcaataattgaaccctgaacctaaatgattatctccagataccttgcttagattctaggagagcatatggttcaaggcaaattcaccccaaatttgggggagtggaactaattgggatgcaaagaaagagataaagcatcaacacacacaacatataagttgtgtgtt

SEQ ID NO: 290610 - DNA, 421 bp, Glycine max
  unsure (1)..(421): unsure at all n locations
tcggggaatctttggacaacgttgttttgagtangtatgccattattggccattgaacttgcaaatttgtagctcctttttcatttcagcccaacaatagtttggttcgcctgggccaaagtgtggtaaggtgaagcattaagctcgagggttatttcgaaccagctagaattgtgttctggctgggccagagcttgacagaaaggagaattctctccaggggttatggcctgaccaaagttgtgttttagttgggctagactgtgacaaaatagagcattaaactccaagagtgttttagcccatcaagaggttgtgtgattgggacataaaagtgatagaatggttttagccagactagaatttggtcaatcgggccaaaaatgtgatagaatgggtaacttatgtctacaggagttat

SEQ ID NO: 290611 - DNA, 352 bp, Glycine max
ttgcttcctttattttcaccttttccccagcttataaattcttttaactcaaaagctaaaggcctaaatccttccaccaaagatttataacttaagatgttacattggactataaagtgtatgtgtggattaatgcttggataatatatcgcacgtttaaagaacagttttgcgagaaacaacaaaatatcgcattactcaattgttgtccctgaagtggaacaatgaacacactagtgacactacaagaaattacattagaccacctgtacaagtttatatagataaagcatgtgtatgataatagggctgattatgttgtgtgatacattgtccggcgtgatatatatga

SEQ ID NO: 290612 - DNA, 290 bp, Glycine max
gttgtgcagagacactctatgttctcataccaaaagcttaattatacatactgctatgaatttttaaaaaaaataatattcttaataaaggatattttcatgattatgatctctaatccatttttcacacgtatgtttatggtaatgcgatcattcttgtttaactatttggatacagttaaaaatcttttatattatattaactcatatatgtattaaatattaaaatatcaataaaaatatgattactctttgattttaaaaaatatctaaaattctcatgactacca

SEQ ID NO: 290613 - DNA, 383 bp, Glycine max
tgctttacaccaagcttgaacaatctaatattctttttcctatcaagccattactaactctaacacaaataaaaaaatttgttgtttgattggctcactaactaattcttaattgtcttacaaactaattttcaatctaagcaattagagaatccttagtgctagaacccaatttgggttcttaaccacttttaaatgggtcctttagtgacatgtaggttttaagaactctttgattttatgtctgtactggtagaaccaattttcaagttcttaagttaatctaagcggccccacagtatattttactttccttttctgtttctacattttgtagtgcccaccccaccccatgagaccccttcacttccttttctctttac

SEQ ID NO: 290614 - DNA, 442 bp, Glycine max
  unsure (1)..(442): unsure at all n locations
tcttacaagagactaaganacttttgtctaanaattttgagacgaaagatcttggggaagactcttttgtattaggaatcaagatactaagagatcgctttcaaggtatcctaaggttatcacaagagagttatatcgataaggtcctagatagattcaacatgaaagatagtaaaccaggagataccccaatagctaaaggagataaatttagtctcaaacaatgccccaataatgaccttgaaagaatagagatgtaaaagattccttatgcatcaacagtaggaagtttaaagtatgctaaagtttgcacttgtcccgatatagcatntgtagtaggagttctgggcagatatttgagtaatcctggaatacaacattggaaagcagtaaaacgtgtgatgcgttacctaaagagaacaanaggatacatgctcacata

SEQ ID NO: 290615 - DNA, 379 bp, Glycine max
tatctttcatcttccataagctgttccacctgaagttttgagaacaatctgttaatattaggactgaataaagggatgcttactaaagatacattattagttagataggagtgaaagaagtacaataatgaagagttaagttactaaattagaatatccaatcaatgattcgtattgtcatgtttatggcatacagaatttcatagttcaggcgaaatttagttcaaacagtaataaattttagttctctgtcttctgaaattttatacctagtacgacatctttactgtattactattcgctaactagaacatgatgggtgttcttaattgttcatacggtgacgaactacatgattaagacttcttatctttaaatt

SEQ ID NO: 290616 - DNA, 349 bp, Glycine max
tgagaagtactgctgaacacaacattttaaataaatttatgtttgtgttgcagagggcgtaaataaacttaacggccaatattctgagcttattcagaagtccgagtggcgaacgtaagcacacactgcaatgctaagctttggcatataatataataataacgaaagtgattaaaaattctggcaaaaatcactacgctttataaaaggctgagaacacgagcattgccaaggggatgatgataagctgatctgaaggaaattctgttctgaaacccacactcattctctatctctaaaaaataaacactctctttctctctctagacaatagagagaagtgaaatga

SEQ ID NO: 290617 - DNA, 392 bp, Glycine max
  unsure (1)..(392): unsure at all n locations
agcttgtaggattatggggtactcatcacatgtggtactaggtggcggtcgggcgatggtgcaagacaattctccacatccacaaatcacgtataaacccaccatcccctgttgcccacctccaactgagctcacgtactcccacgtagcccatattctcgtttctctcaacaccgggtccccatcaatcctcccaagcttccccaacatccaggtaaatcaacattcaaacagcacaaactatcacagccaagaaaacagggcaaaggcagaaaactctgcccaaaacaccaaccaaaatcacagcttttttctcacttagagaccccagtaacatttccttcgttccaattctttaaccgttggatcgactcgaaaantttactggaagt

SEQ ID NO: 290618 - DNA, 459 bp, Glycine max
  unsure (1)..(459): unsure at all n locations
tcttccatgtctctaccaactgcattatcatgaatattactgcaaacatttaacatgcattaattattagtcagaagaaacaaaagtcatagtgctttttctttttcaagaaagaaatttaattttgaaggaaaaaagactataagaatgacggagataatattctccttaaaccaaagaacaaaataaaaatggagaaacaaaaaatacagaataccaaacagaatccctaaagaatgctaaaaacccatgtattgtgacagtgtatgtgaggaagaattgtagtggatcatagccccaagtgggcaagaaaattggcttgacttggggtaactaactgccagcacggccagtggggaaattctgttgtaagctacagagaagagatataagtggttatggtgaaatgtgatctgatgctgttcctatctatcanaatccttgagttanacaccaagg

SEQ ID NO: 290619 - DNA, 357 bp, Glycine max
  unsure (1)..(357): unsure at all n locations
cgcttgtcaactttgtacctgaaaccctctgtctaaatcaaagctttgaccctgaaaccctctatgtaaatttgacagcctcgtatctcccttcctgaaaacccactaaaaactgtctaaccccccctgctgatactctataattcattntgcaataactgcttaaggcagctacatatagtcctaaatcactacagattcagttacgactaaccctgtgtgcctaactagggtttcaaaacatcacaacagagaccgaccattgaacaatggattgtcatcattatacatacaacagagacataccttcgatggaagcgcatacactaactacacaaacgctaactcgacaatgcg

SEQ ID NO: 290620 - DNA, 347 bp, Glycine max
tatgtgataaatcatgttctatgtgatagttgtatgacgttttggagacattttacagaacctattaattctgaagggaaaagaatatatagtcttcaaatgtttctctacacacacacttagagcagtactcatctcgatggatctaacataaggcggacaaccttaagtaacatcattttagaggcacagcttaagtgagttgtatttttagaatctttctaaattactttctaggaggaatccattaaaatacacccctaatttatgagctttcacaaatgggtttaagtagttttgtatcgacattatgtaatgtatagctaaatgaggattttctcttgttt

SEQ ID NO: 290621 - DNA, 380 bp, Glycine max
  unsure (1)..(380): unsure at all n locations
agcttgccgcgtcaaatgattgtttctggagaacaggatggatatatacaagagtgcagcattctgtagcttttctgtataatggtttgctctctatctcggcatgttgtctgcattattctcaattgattatatttcaattagcactaaaatcttctattatcttatttagagtatattgcatttcataaatctctcctgcaggtcaggtggtcttagatgcaccattgcgcctcaaaagtccgcaaagttgtcaaattttatgcgttaaaccacttgctgtttctgctagttcttgtgctcaatttgttttgaaaggattcaattttttgctgtctaactcgaggtaaatctctatacgctngatgatttgaatttgt

SEQ ID NO: 290622 - DNA, 437 bp, Glycine max
  unsure (1)..(437): unsure at all n locations
tcagtgcaagcgcatatctaacaacaacaaagaaggggaaccaaagcctaacaacaacaacaatgttctcaaagacaatgttgaatctaatgcacggagaacctctagaatcatgaagaagaagcacatgctttaacaacaacaacaatgttctcaaagacaatgttgaatctaacgcacggagaacctctagaatcatgaagaagaagcacatgcttttcgaggattccgatgatgcttctccagcgtggaagaaggcgctgaagcagggcgatatgctggagctcttgaagatggtgctaaagacagaggctgagaagaagaagagcaagaaaaagaaaactgataactantttttntaaattggaacaggtgttactaattttaagttagagttgtaatatttattataacttnntttntttttactttatcac

SEQ ID NO: 290623 - DNA, 392 bp, Glycine max
agcttgtggatccagggatggttctaggaaatcattaaaggagggttggacaaaattgtactttaattatttaaatatctaaattctaataaataattatttaataaataattatttattagttctacaggtaaaactaaaattgatttttatttcaaataatacatatttcttatttcaagttttgaaagatttgttgatctcacaaagacgatcaaatagacaataatatggctttaaaaaagaggaataaactcatcaaatataataatagttgaaataaaatatgtttttagtccattatacttacgttaattatttttggtctggaaactttcatattgtaaatttaatccttgaaatttatataaaaaaatgattatagtctctag

SEQ ID NO: 290624 - DNA, 464 bp, Glycine max
aaaacacctgtagatagttctttctttcttatgatgaaaatgattcctatcgatcaaatttggtgcctattgtagtaatgacgtggctaggtcataaattattgctgttacgtggaattattccaatttctgcctcacatttattttgatgataacaatgcgcaaaacttggtcctgtaagactagtcaactgccatgcaatgtgccaatgggggggccctcggtttatgcttgcaattgtttttatctaacaaaaaattgacggaattttgatggttttatctctccaatacacatgaattttacaacttgccacgtggtcctgatcttcaaattggacggtgagatgagtattgtttatggcattgagtttgttttccctcattggaaccaagctaattggaatagaatccaataagctcaccatttttacttgtgacttctcagaacaacctaaattctcg

SEQ ID NO: 290625 - DNA, 386 bp, Glycine max
agcttggtaagatcctccttggtggggatgtgacgtgcaccgcacacactcacgagctcctcacgtgcccgtatctgccactgcggatgcatcgcgagcaggatcgtggtccacgttagcaaattcgaagtggtgtgtttgcctgcgaagaaaaaggttttgcactcttccactatgtcatccaccgttacgttcacattggaggtggtgttgttgttgttgttggaagcccaaatcatgagccccagcaaatccgttggcctttttgtttcttctttcccacacgcattctcttttcttcgtcgttcgatgatcttcaccaacgatttcttgatttccttgtccagtttccaagaatatatattcctcctcgtggggaagaatct

SEQ ID NO: 290626 - DNA, 445 bp, Glycine max
  unsure (1)..(445): unsure at all n locations
tgcttctacaccaaacctgaagcatccacctccaccataaagaattttgttaagtcaggtaaagccaaaactggagcctcagtagcttcttctttaattgttgaaaagccagttttgttgcatcagaccagataaagttatcttttttaagcatgttagttaagggtttagcaatgccaccatatcccttgacaaaccttatgtaatatccaattaaccccaggaagcctctaagttgtttcaaagtttgaggtaatggccactggtctattgtgtgcactttagctggatcagttgataccccctccttagaaatgaagtggccaaggtactctaccatagacaccccaaaatagcacttactcttcttagcagacaaggaattcgccttcatagttatcacaactttgtgtanatgtagcaaatggtcttccaatgaacaatt

SEQ ID NO: 290627 - DNA, 388 bp, Glycine max
  unsure (1)..(388): unsure at all n locations
atcttacttacataaaataaaatccatctgatatggaacacatgagatacacaaaaaataccaattgataatgaacacagggcaaaaagaaagcgtagttacactctacagattatgcaatttaatacatacttattttctttaccctaacaacaaattttcttacaattgaaattaacccacaataagtattcagtaaaaagcttaaaactcaaatcagacaatgttaaattgccacacccttcttccttaccttggaatgaaaatccatcaaattttctttccattgtcaacagagccgtacaagagaaagagtctgacttgtccccttgaagaatgcctggtnagacactctgtaagagaatatacaatttgaaatcaaaataac

SEQ ID NO: 290628 - DNA, 452 bp, Glycine max
taaatagactgttccatgctattacctattattactgtttttttttataaaaaaattacttttcaattacattaatgatatagcacttatctatctatctatatatatgagtataaaattaattaatttactataaaatcaataatttactatcatgttataaaattagtatactcttttattactataatatagttaccgatgtttcttttttttttttaaacagcaaaatatattattaatgaagaaaccatgtgattacccacaaggagtgacaaccaacatgcatagagtcaccgatttttgataatcaatataattataacctgatataggttatacttaaacattttatttattagtttctaacacgaagatttttctattattaaatctactctaaataaacaaaactggcaaatttaaagcttttaaattgtacaaaatataat

SEQ ID NO: 290629 - DNA, 389 bp, Glycine max
agcttgccacccagctcgctcaggcgagcagggttgcttcctccagaagcaacagccttctggagggcccaagtgggcctggttgctatttgcacccctatttttactaaatacaccccctgcctttttttggtgattcttttttcgtaaagttacggaaacttacgaatttcgtaacgatacttgttttctttccgtaatattatggaaccttgcggattacataatcatcccctttttttacttacggaatgttacggaacctcactaattgtgcaacgatgcttccttttgatttccggtgtgtcacggaaccttacggattgtgcatcaataccttcttttcatttccggcatgtcccggaacttcacaaattgcctaatgatgg

SEQ ID NO: 290630 - DNA, 459 bp, Glycine max
tgacagtattacaaatctgaatatatgttgccaagtgtgagtatggatcttcatttggtaacccatgaaacaaattgctttgtattagctgtatcaatgaaggtgggtaagttaagttttgtgcttgaacctctggccgcgcaacacttgagaaatattgtggcaccatagtacttgagtaatcttccaaggtcactcgtcgaggttgctcttcagccatgacttcggcttcaagttctgctgtttgagattccttggatgtaggtgaactagaagatgatgactcagaaaagtgagcctcttcaaggattgatgctactgtcctgtcgtgcaaaagctttctttttctctttgcgttgtttcttctaaaggtggcttcaatttctaaatccaatggaaccaattcacctgcagaagatctacgcatacaaacactaacaggaacagcagttaaccaat

SEQ ID NO: 290631 - DNA, 392 bp, Glycine max
agcttatgcaattgtgttatatccagagcaaaacatatttaagcctattccagtcaaacagaaatacttcttataatagacatcggtggcgttaaaaaaaaaatataaagtgtaatacaaaactttccaacagataattcattcaatgtggtccaaaggttgtttagaggttaattttaaattgaaacattaaaattgaagtccaatgcaatttcaattattgagataaacatgataaatggtactttagctcttttattcagagatccttgcatacataatgcacaccaggaaatttagcagcaaattagatttcagtcatttgcatcagtaatgtggacttggatcaacgctgctacataccaatgtaatttgtaagcataagctaaatg

SEQ ID NO: 290632 - DNA, 427 bp, Glycine max
ttttctctggctgttttgttaggattctcaagcgttatatagagaaagaaaggattattagtctcaattttattgtctccgtgcgacggatatttctctctttacaaacattatttcaaaaatcccaacggtgaagatgtgagaatttgaggaccatacgcggagtctaaatttcaggatgatccaacagttaacgaatccaagatcatagttgtactgtaataaatttacgtgtatgcgaaaaaaaaaggaattttgagagaggaaggaagacgaacgaatttatgaggaagtgagagcgtagatcaatatcaaaattgacctaatatgtttctatctatagttagagtattctaaacttattatctactctattattttatcttatcactttataaaaaaaagaactctctattactatgtcatt

SEQ ID NO: 290633 - DNA, 212 bp, Glycine max
tagcttgagtaagcctctcccagagacaagcaaaatagcttgggaagtctctatcctcaagcttgagtgaaccaccataaagcgactcaattatgtaaatacctccttgtaaccctactatcactatgtatagtggaagaatctccatattggagaattataatcgtgcgctcctactactacctgtaattactatgtgactatcttaactt

SEQ ID NO: 290634 - DNA, 510 bp, Glycine max
  unsure (1)..(510): unsure at all n locations
ggtgcgagtcgcnttgatacctngtagatacctagatacnccgagacactatcnaagactcacacttgattatacatggttcgcgtctactatatccacactttactggtcgaacgtgaggagaccttcgagcctatatcgctcacgtggtggacaaacaaatggcctgtaccgtgcatagccaaccaatggtcattgcgcaattgttttattgccgtaaactatatcgcgcacacaaagttcttgccgactcgtatgctacgcggaccgtgatctactactcatagcagacatgctgcttacaccatcgaacatctgttattagcaaactctcgacagaggcggcccgttgagaatgaaacatgcaagaccccttttgagaagcaaggcgcttattcttgaccctactcccataatgcaaaggtcgccacatcacaagttacgactgtagggttgcacgaccattgaccccgcaaaggttttatgtgatctgaggcacattgtaccacn

SEQ ID NO: 290635 - DNA, 353 bp, Glycine max
agtttgcttttggagattgtaactatgctcttgtgtggtggaacaagctacaaaaggtgagagcatgaaatgaagagccactggttgatacatgggcggagatgaaaaggatcatgatgaagctgtatgtgccggctagatactcaagggattagaaatttaatcttcaaaaactaacccaaggcaacaagggggttgaggagtatttcaaggaaatggatgtgctcatgattcaagctaagattgaagaaaatgaggacgtaactatggctcaatttcataatggtctgactaaagatatccgtgatattgttcagtcgcatgagattgttgaaatggattatttgcttcac

SEQ ID NO: 290636 - DNA, 474 bp, Glycine max
  unsure (1)..(474): unsure at all n locations
gaggcgcggtggtccttttgaacttgagacctggancaccaaactcaaatcccagagtgagacgtcagctttaggacattttgtccaatattgncgggggcgacagccgacagagacgnttggcttcgcctaactaaaactggggcctcctcgatcttcttttacaagtggcgactgtggtcccctgtttagttctggggacaccatatgggaagtcttcttggggagcgtaggaacaaaccccctgaaagctccaagggggatcccaccccctcttgttgcaatgtaacccccgcgacctcgtgcttgaatattccacgtctactctcttgaacagaaagaggggtgtctcctccacagacactagaaaatacgtccttgacaatgtcaggaggcgcactccctccttattatgtcaactctgcccatgctcattacgggatctctaaatagtgtgccccacgtccatgctct

SEQ ID NO: 290637 - DNA, 385 bp, Glycine max
ttgctttggcatcatcaaaacatcttggtgaatcatcatggtaactttgcttccataatctccccctttttgatgatgacaaacctgaaatcaagagatgcatacaaattattttctagtcgttcactcactttattctccccctttctttttaagtttaagattcattttaagttaagctaataattgtatgaattcttgatttatatgaccccacatttttctccccctctggcatcaacaaaaaggccaaagtacgttgtaacataaaatcatacgcaaatggattaacatacaagagatgtattcatacaagaaaaaaggagaaacttataaaaatcaagcaagataataaattatccacacatcataataaaaacatatg

SEQ ID NO: 290638 - DNA, 447 bp, Glycine max
tggagaggatgcttcaatggaggatattaaagagggtgagaaagagagaggggggagcacgaaattgaaggaagaaaatgggagagaagttgaactttgagttgtgtctcacaagactctcattcatcaaagttacaacaagtgttacacatgcttctatttatagactaggtagcttccttgagaagctctcttaagaaaacttccttgagaagcttctttgagaaaacttccttgagaagctagagtttagctacacacacccatctaaaaaataagctcacctccttgagaagcttccttgagaagctataacttagctacacacccctataatagctaagctcacccccatgacaaaaaaaacatgagaatacaaaaaaaaaatcctactacaaagactactcagaatgccctgaaatacaaggataacaccctatactacta

SEQ ID NO: 290639 - DNA, 385 bp, Glycine max
agcttgtaggattatggggtacccatcatatgtggtactaggtggcaatcaggcgatggtgcaagtcgactctccacatccacaaatcacacataaatccaccatccccagttgtccaccttcaactgagctcacgtgctcccacgtagcccttatcctcgttcctctcaacaccgggtccccatcaatccctccaagcttccacaacatccaagaaattcagcatccaaacatcatgaactatccaaaaccaagaaaacagggcataggcagaaaactcttcccaaaacacattccaataccacagttttcctcactcaaataccccagtaacattctctatgtttcgattcgttaaccgttggatcaactcaaaattcttact

SEQ ID NO: 290640 - DNA, 441 bp, Glycine max
tattgcatgagctatatcaggttgagtacatgccatagcatacattattgaacctataatgttagcatatgtgatactctccatataagtatactcttcagctctctttggggattgacttacacttagtttgaattgatcatatataggtgtcacaataggccaacttcgaatttgacattccaaacctttcaataaatttattgaggtatgtctcttgagatagatacaaaatcttcttctttctatcccttttgatttccattcccaatattctccttgttgtcccaagtccttcatttcaaattccctttctaactcagctgtgaccttggtaatttcggccttaccgttacttggtattaacatgtcatcaacatatagcagtacgattacagaggtacctttattccttttgaatagccattttcaattgactac

SEQ ID NO: 290641 - DNA, 393 bp, Glycine max
tatcttactataaataacaattaatatttattatcaaataatagtgtaaaaataatttatactatctatatatgtataaactatttgctcttaaaatttaaaacaaaagaaggaagattaaactcttgtgagagcacgggaaataaaagtatataactgagtcaaaggatgtatgcttagagacaaaggatgcatgcttagagagttattatgaaaatttaaatgtccaacataggtatattaaactaataattaatctacacattaaggaaattactatgggaaattactatggtatattggtagtgacatgaagataatatgtaataatacggtgagttattaactatttgttaaataatgattctatactaaatgttcgaaattataata

SEQ ID NO: 290642 - DNA, 455 bp, Glycine max
  unsure (1)..(455): unsure at all n locations
tcctaaaatgaaaacatctggaggctttaaaggatatctagaattaacttaaatagaaggcattaataatgtgaactattcatacatcatataacttaacagtcatgttaagctgcatcatattgtacaatgatgaagaggatatagcacatgattttcttatcggggatcagttctattcccctagtttgcaattttttttggcatctatactttttccttttgcaaaatagaaataaaatttaagctaatctgtcaaatacaaaaattaaacatttataatatatccaatgttcaaagtcaaataagtaaataagaaaaagaccatgtagttgaaaaaatgttcataaaacacacaaagatagaaaaatcaaagcacataaactaaatctagtggtcccaattctttctccggcagatgacaatctcccatattntgtcaatgctcctgtaat

SEQ ID NO: 290643 - DNA, 379 bp, Glycine max
agtttctagatctcttggagacaacaaggtgtgttttcatataattacttctattttaaacaaagcaatagaaaatgccaagcagatttatgcttgataatatctacataaagcagaaaattacgatattggaaaagacagccaagatggtgggctaaacgtacagtattatcatctagcaatgagaaattctttttccctgctttctaatggcaataattgtagtaataaatacaggttatatagaagaacattgactctatggacttactacgataagacaaaggaaagagaaaaagtggctttgtggcgcataatgagcaatacaatgttagagagggataaacaagtggtatatattttagtagaactgatcatg

SEQ ID NO: 290644 - DNA, 548 bp, Glycine max
  unsure (1)..(548): unsure at all n locations
agacgagtgtcnagcttttgatacccctgttgaaaacccttagattaccntcgacatncacgngacactatagacatactcaagtctatantgagcagttcatctactagtgactatttattgcactatataattgatgcgtcatgatgcgagagcatacaagttcgagtatcttaggcataatattactattatctgacgatcactacaatnatgattcttaaaatgatatcttctacaatattcgcttattttaatattttggtgcagctattttagaactatcattggaatataatcattattatgtccatgtaatatgtgcatacatttgctttttcttcctaacattttttagagggacttcctcttaccgcacaaaatactatctactctacgattacctgtggactaaaaagatttcttctggagataatgatgctaatagtgttaacagcaaaaagagttccacttattacaaaatatgtatcaacttcaaacatatttattgaaaccacacatagttaattcccacatatcatttttcn

SEQ ID NO: 290645 - DNA, 378 bp, Glycine max
agcttggtgccactcttgaaacaaaacaccaaggttcgacatatcgtgttcatcatctgggaactcccaatctaaatcgagaccattgaacccgtattggcgcgccacgtggatggtggagtttatgaacacttgtcgtgtgtgtttgttgctagccatgagggagaatgcggttgagttgctaccacctcctccaattgacaagagagttttcaccggcgggtaacggtagcggagtccattgatgaattttggtatccatttttcatcaaattcggtgacactaaggtgaaaaagttgagggtcttgttggataaaggcatagtagatatgagtgaagtattttgtgtcaatggaagagggtgaaaggtcatcacc

SEQ ID NO: 290646 - DNA, 439 bp, Glycine max
  unsure (1)..(439): unsure at all n locations
tgaagtgttttcaacatatttcagtttgcgggggatattagagatatagatgagtttaattagttacaaattagttattaatttagtttattacaagttagtttagttaattacaaatttagttacaagtgtaattatataagatttcaagtaaaatctgatttgctcgttttaagcattattcaaagtaatattcaggttttcttttctcttattttcatctctctaccttgaacttttatcataaaatgtaattgaactaatcaagatcactagttaattcagctcacagttttaaaaatgatacacgatcgactgcaatttcagctgtgatactgtgacgccaagattnttgaaacatgcaagactgtattaacactacgattgacgttgcattgttcatatttgtatgcactatgatagaaattggtatatatgt

SEQ ID NO: 290647 - DNA, 389 bp, Glycine max
  unsure (1)..(389): unsure at all n locations
gcttctacaatctccccctttttgatgatgacaacttctgaaatcaagaaacacacacacacacacacacacacacacacacacacacacacacacactttttcctagtcgatcactcacataaattctgcccctttgtttttgaatttatgcttctcttaaaattaagtagattactcatgtgagttcttgatttaatccctatttctctccccctttggcatcaacaaaaagccaaagtgcatatctaatttgaagtattcaaatataactaaacattcatacaacattcatggaaaaaactatcaaccaaatcatgaagcaagaaccatgaagcaataatcatgaatagattaactataaaatccacatagtcaaataacatactn

SEQ ID NO: 290648 - DNA, 459 bp, Glycine max
  unsure (1)..(459): unsure at all n locations
tcatgatgatgaatcaagtataaatcaagtagttntgatgatgacaactagcccaaaagaatgatttcaagtttgagtcaacaagttcaagatcaagattaatttcaagattcaagaaaagacatcaagatttaagagaagatgaattcaagattcaagagaagaaatcaagaagcaacaagtcaagacttcacaagggaagtattgacaaagaatttttcaaaaaccaaacatagcacagttttgttttacaaaagagttttctcaaatttttctaagttaccagagtatttactctctggtaatcgattaccagtttactgtaatcgattactagtgataaaatttgatttcaaaaagtttttaactgaatttgcaacgttccaaaagaattttaaatggtgtaatcgattacaatatattggtaatcgattaccagtgtatctgaatgttgaattc

SEQ ID NO: 290649 - DNA, 393 bp, Glycine max
agctttacagcagattttagtaatgacccactaacctagaattaaaataacttaatgccattaacctagggaattaaaacaaactaaatggctgagtgtaactgaaattgttggcaaccaaaagtcacccccaacagccaacaagtcagccaccatttggtctcccaaaaggctgatgcctaggttgccaattgggcccttattacaacttgaactaaagcccttttagttgattaacccaaaacatatttttggtcagccaactctacaaggattgggccattatttagacaaactaaacactctaaaattgaaataaagtggtgtcatttagtcctccatttgcgccatgatacaactcacaaccttggacttttctccttgagacttggg

SEQ ID NO: 290650 - DNA, 451 bp, Glycine max
  unsure (1)..(451): unsure at all n locations
actcagcttcttacatagtccgcctttgcttgaccttctttatgtttaanaacattaacattaggcataggcgaaagatcacgacgagtctgtgggttaaaaccataaacaacttcgaaaggagaacaattagtggtgctaaaatccttcacaaatcatctataaaaacttgctaagccatgaaaactcctcacctcggtcacggacttaggtgtaggccattcttgaatagccctcaacatttcctcatcaacttgcactccttttgaactcacaacaaaaccaagaaacacaacatggttagtacaaaagatgcacttttcaagattggcatacaattgttcttctctaagcacaatcaagacagattctacatgatcaatatgcaaatcaagtgaagtgcttagataaaatatcatcaagtcacaccacacnaactttctataactct

SEQ ID NO: 290651 - DNA, 366 bp, Glycine max
  unsure (1)..(366): unsure at all n locations
agttactccataancgaagacacaccgacaaacaacacgaaacacaaacatggccacgcaacagccacgcgcggaccggacaaacaaacggggacaagacacgccgcgcaagcggccacgaaacgaggtacgagcacatgccacgcaaacgcagggaagagcagacgccagaaaacgaaacagggctacaaaaccggaaaaaagacacgaaggacgcaacccaagcaccgcgacccccacacatgaacaaaagcaatgctcgccaagggccaaccctgaacaacgacaacgagggtcggccaacacgaacatgcatgcagacccagcaagacacgagcccaccgtcaacttccaacgaaccacccg

SEQ ID NO: 290652 - DNA, 183 bp, Glycine max
tgcttctatacaagcactcataactatggtccttcccttgacaccatcgctgccgtcgttctcggcccggctcacttggtggcagcacttgctgattatgattatgatgatgacgatatactctcagatctcaccacaaaccaatggagacatacagaccgactgcatggggagcatgatatg

SEQ ID NO: 290653 - DNA, 343 bp, Glycine max
agcttatttaaatctaattaagaagctaacataacaatatctgtgtgtgtctttgtatccgtgtgtttatatttttaactatcagatggtgtagttgttttcaagaagcttaataaagttacagaatcaaattataatggatgtgacattcatatatgaagcaagaataaccaacaaaaaagttaaaggactatagtggggtaaagaagccaaactggtgttctatgttttaagatttgtatctattttattctctaggtcttccttatttatttgaaagaaaaagattgcaaaacatcatgcaggcatattatacctttttttttgggggggggggagggat

SEQ ID NO: 290654 - DNA, 456 bp, Glycine max
  unsure (1)..(456): unsure at all n locations
tatgatcttctaataattaataattcacgcacacaatttaacaaactatcaaacaaaaaacacttcataacaacaacaacaacccttctgaaattctcaacacaagtttcaaaaaacagagtaaaagaaacagagcaaaaacacacacacaaaaacacaaacacagacaccttttaagtattaaggtgtctctttctctccccggaaagtttctccgtcggcggtggtgattgaccggagtgccatggagtctggacggattttctttggtgcctctgcttcaagcggcaacaacatgctctttctcggcaacactgaacttgcttttcgaggtcattctctntctatctctctntctgatgatttttatttaatcttattacgttttctcttaccctttntgtggattgaaaanttgaaactggatatgttgtggagtagttgttgttgttattg

SEQ ID NO: 290655 - DNA, 338 bp, Glycine max
agtgtctccggaacgatgagctcttgaagccgaagcggaggcggatgaacccttacgtttctttgacgatttttccatttgaaggagtttttgcagatttcaatcggtgaaatcaaaagaaaaatgaaaaagaagaagattgcaatttacgggagttgatttgatgatgaaatgagtgagataggaaggtttggaggtttgggaatggaggaacgtcgcaaggaggaaggggctgcgcaggggtttctaaaaacgagatatttatagagcaggacgcatggtaatcgattacaagtaatggtaatcgattacaagaggaggcagcctactggtaatcg

SEQ ID NO: 290656 - DNA, 430 bp, Glycine max
  unsure (1)..(430): unsure at all n locations
tgtaatggcctccaaaattttagacaagtggcctctgtatcttaagaaggggggttgaattaagataaaaaactttccctaattaaaattttaactatgttttggattaacaatgcaccccagttgcccaatcaaatagctaggtcactcgaatgaaactagtgtccttatctttacttcccttttatttccaataaaagataagtaaagaagggcaactgtcataccctaatttcgtccagggactatcattcatggatattttgattttcgctagccgaattgagttgttcgacgcctattaccacccaagacgaaagatcattcgacgttntggtgaagaatgcgaanaatacccaaaagggagggcaaaagggtcattnntaatcctttttttgaaccctagctcgcccaggctagcctctagctc

SEQ ID NO: 290657 - DNA, 522 bp, Glycine max
  unsure (1)..(522): unsure at all n locations
gccacaacgacgacaaacaacaaagcgatagaaagagacgcgacgaataccaaaacatactnaanannnaagaggggnnnaatgagcatcnaagaacaccnnanagaannnnncgcgccgcaaacanacaccaggacacgcacgcnncgcaacgctaaacaagaagagnanacacaaagagaccagcggacccgcgggaaacacaaccacccacccaacacacancggaaataacgacaaaccaaccggaacagcgcacagacagagcgccagacaagagagagcacaaaagggcaacaaccaaacacaaaccgaccggaagcgagggagcaaagcaaccaagaggacccaacccacaccgaccaaagcacacgagaagaacaaaaagaacagcaagacaagggccaacccggaggagaccaaaccaacacaaagggcggcgacaaccaacaaccaaggcaggacaaccaacccggaaaacggcacggaacaccaaacacacagccacccaccagaagtacg

SEQ ID NO: 290658 - DNA, 452 bp, Glycine max
  unsure (1)..(452): unsure at all n locations
tgtacgaatatggcgtacccatcacatgtggtactatttggcggtcgggcgatggtgcacaacaagttgtccacatccacaaatcacgtataaacccaccatcccctgttgtccacctgcaactgagctcacgtactcccacgtagcccatatcctcgtttctctcaacaacgggtccccatcaatcctcccaagcttccccacattcaggtaattcaacatccaaatcatcacagactaacaaaccaagcaaaaccgggcaaaggcagaaaactctgcccaaaattcaaaccataatcacagctttttctcacttaaagaccccagtgacatttccttcgttccaatccgttaaccgtgggatcgactcgaaaatattactgggagtctctagaacatatgtatacattgttaccggtgggatctactagatnacatccagaactcattct

SEQ ID NO: 290659 - DNA, 386 bp, Glycine max
ttgcttgcattcagcaaattccacaacccgtaaaatccatccagtgaagcgtgcattctaaacgtatctaggacgaaaactgaatttttctaattttatagataagaaacatcttttaatattttttttttcaattggatgttttcatctaacttcttttgaccattaattgttagacttggagctgacattcctattagatgcctatagatgtttggaagagttttgttgctgttatgtagttcaatgttttttctaggtagcagtcatgtcgggttatgatagcaatcatttcttatctaaagtgtatgtttagatggatagcatattctctgaaagctttaacaactattctatcaccatagaacttcctcattgattgtcct

SEQ ID NO: 290660 - DNA, 317 bp, Glycine max
tcttagtttcagatgatgcagatggttttgtaactatctcatgcactcctctaatgactatggcatcatttctggcgctaaactgctgggagttggaggccatcttctcaattaaatgtctggcttcaacaggggtcatgtctccaaaggctccaccactggcagcatctatcatacttctgtccatattactgagtccttcataaaaatattggacaagaagctgttctgaaatctgatggtgggggcaactggcacataaaatcttaaatctctcccagtactcatacaggcatctctcactgagatgtctaata

SEQ ID NO: 290661 - DNA, 139 bp, Glycine max
aaaacagccggacaaagcacgcgcgccttagaacgcagccgggctggaaggcacaaaccaccacagaacaaagcaaagaggacacgacagcgacccgaccgaaaacaaagccaaagaccacacccaaagaaggcagaca

SEQ ID NO: 290662 - DNA, 499 bp, Glycine max
  unsure (1)..(499): unsure at all n locations
gtgaggtcccttttgattcccattgatanctttgnactnncncngacactctcnaanactccatctctaacgttctcgggacgatatggcttgtatgtatatctttttttacgagtgcagcgggcggtgtaatggtgcactactatccattgggttgcatctaattaccttagtccgtcgtcagactcaccctctatagcattgcgttattcgctcatgaatattatctattccaacgtgtttgaacctgctaggtaatgtttatatgctcctcattatctgctgaatttctagcatgttttgctctcatctcgatttgatgacgaatatattgtttgctagctatatccacgtgtgaatgtagattggcttgcgggttatcctattatttttttaacaagttttattctctcttcttgtgtgtgagtcctctgcttagctttgtctatcactgtgttttcctttgtcctattccctctcctccttcagtcgattttcg

SEQ ID NO: 290663 - DNA, 385 bp, Glycine max
ttgctttctctttatgaataatgtggtatccactttacctctggagaattctttttcaagaagaaaattacttaatcgttcataccatgccctaggggcttgtttcaaaccataaagagccttttgtaatttataaacatgatttggtttattagaaatttcaaaaccagggggttgttcaacatatacctcttcttgaattaagccatttagaaaggcactcttaacatccatttgataaagtttaaagttcattatggatgcatatgccaaaagcattctaatggcttctaatcttgcaacaggagcatatgtttcttcatagtctatcatgtaaacattattgactctatgtcctacatgctttatattaatgtcatgctta

SEQ ID NO: 290664 - DNA, 443 bp, Glycine max
tggacttgcgagttgattctagccttagtttcactttatttatttttcaattcaattaagaaagagaaattccaaagagaaacgtccgattgattttttgctctattttactataagatatttttttattattatattattattttacctctctttggcttccaacgtaattacggtgtgaccgaatgatcggatttcattttaacagaaattaacagatattacaaatcacacgatccgtggaaatatattttattgtttgtgattaggagagagaatgacttaagtcaatgactgaagcacgtcaaaagggggtatggaaagtaaatgaaacgagaataaaagtacacgatacaaatggtgaccaccactggtacatagaatgaatagaagagttcgattcgggtacttaccggttgaagactgaagaacaatgaagaacg

SEQ ID NO: 290665 - DNA, 389 bp, Glycine max
agcttaataaatcaatctatggcttgaagcaagcctcctgccaatggtatttgaagtttcatgatgtcgtcacttcatttggctttgaaaagaacatcatggatcaatgtatataccaaaaggtcagtgggagtaagatttttttcttgtgttatacgtggatgacattttgcttgcaactaatgataagggtttgctatatgaggtgaaataatttctctcaaagaactttgatatgaaggatatgggaaatgcattttatgtcattggcattaagatccatagggaaagatctcgaggaattttgggtttgtctcaagagacttatattaacaaatttttagagagatttaacatgaaagattgttcaccaagtgtagctcccattg

SEQ ID NO: 290666 - DNA, 417 bp, Glycine max
gtgcttagtgctccttcttatctttatagtcatagttgctctctatgccgcatggtgctcctctcctagggaggttgctcgagaactaacactcaatcactcgcctgagtgtatcatcaagacccatgacaactgcactcacgctcttgagaagaatgaagaatctggctgaatatcgttgttacttgtggacgggggacatcaacataggagtatgttcaatcggctatcgatgatgaatcataaggcgtagggtgtgagggttgattgattctttattccttcctacttaacataaagattagcgagtgccaggtgtgcaggttgaatacttaaaaatattcatattctaaattctaaacattaaaacactatcacctttcgacaaatgtaaaagataacacgaaatcacaatgt

SEQ ID NO: 290667 - DNA, 383 bp, Glycine max
agctttagtcaaggaaagtaacccaaaaatgacaaagaataggttgttgaaaaagcataacaatactttcctaaattggttcaaagatacaatattgagtgatgataacgcttctaaaatgttaaggaagctagtagatgggcctaaaagaaatgttataacatggcaaggatacaatatcagcaagtattcattctacatgaaatcacaagatgacaatagtataatgaaaaataatggggttagtctaagggcttaatcccaacactttgctactaatcttgataacaatccccgtgtagttttcatgccttactttggaatcattaaagaaatctaggagcttaattatgcaaaattcattgtctgtgtttataagtata

SEQ ID NO: 290668 - DNA, 355 bp, Glycine max
  unsure (1)..(355): unsure at all n locations
ctattcatctttttcattctcttctccctttgccaaaaagaattcaccaaggactaaccgcctaaattctttntgtgtctctcttctcccttttccaaaagaacaaaggactaaccgcctgaattcttttgtgtctgccttctcccttgtcaaagaattcaaaatgacacagtctgagaattctcttgattcttgcctttcccttacacaaaagatttcaaagaactaaccgcctgagatatctttggtttccccttcacaaaggttcaaaggactaaccgcttgagaactttgtcttaacacattggagggtacatccttagctggacaagtagagggtacatctacttgggtt

SEQ ID NO: 290669 - DNA, 379 bp, Glycine max
agcttattctatcataacccctttctggaaatacatttccggtggtgtgaacgccttgctcctgcccctctcctttgtgtgtgctcaccccatgaataagcttgttcttgacctttcaccaaagctctataaatatcacccttgaaagttgcattcagtgcaattcatagttcatgcctcttatgcaaacaagcatgaggaaactacatagttcaacataaactcaggctcagctacttggagattctattataattgcaaatttatttctagttcaataaaattttctaatttaaataaataaaatcatccactgaagttaaatatatggatatcgattacaagtatagctctctttcaggagtacatttgctgataa

SEQ ID NO: 290670 - DNA, 448 bp, Glycine max
  unsure (1)..(448): unsure at all n locations
ctataaaactcagcttatctccaggcatataatgatcgctcttctggctctatcaatcatctctgatgtctcctttgagcttagagattcacacatccttttttgtcctttaagagcttctacacagccatgttgaatcaagattgcttccatcttgattctccataacccgaagtcattttcccctgaaaacttctcaatattggactttgttgatcctattattcttgatcttgattccccacagatggcgccacttgttggtggttgtataagttctggttctcttagaacctgcacaagataaaagaaaaaaagaatacacagcatacacgcacagcagagcaagaacccaaagatntacgtggttcgacaatgtgcctacatccacgggaaagagcagctcatcatcatcacattgatcatgaaattacaagttcatacaagc

SEQ ID NO: 290671 - DNA, 389 bp, Glycine max
agcttaagcgtcttgttcaatcaccaaattcgttcttcatggtataaaaacgttcttctaattgttattatttgaaatagaagttcttatttgaagcatttcgtatgttttaattatttgttgtaggatgtcaagtgccagggctgcttcaacatgtaagtaggatctttctttttatttgttttaatgtgattataatgataatttatgtaagtgacgttaatttggttatgtgcctttttttttaatttggatgcagaacaactgtgtttagccactcccagacagttgtagtatgtggtaactgccagactgtgttgtgccaaccaacgggtggacgggcgagggtaaccgaaaggtgctcttttatgaagaatggagattgaatg

SEQ ID NO: 290672 - DNA, 368 bp, Glycine max
actaagctcatatcctattttatacactaccataaagtttatctactttttcatgaagccaccctaatgctgatacaaaattcaattgggtttattgcttgtattgtgatattatatcatcatttattgctgctgctaatgctatggatgtatacctgtctgactatgtacaaaagaatggcaatggccttaattttatttgaattaatcaaaatataccatgtactagcagtatatgtgtatgtattatgtatcttggctatatattgcttggctatatggggctttctggtatgaatgatgctttgatatattcgattcggtttatctgaagaaaaaccgcaaggttaatgataaatatgaaaagg

SEQ ID NO: 290673 - DNA, 259 bp, Glycine max
  unsure (1)..(259): unsure at all n locations
agcgccgattttttgggtcagataccgtgaattgagacatagccctttgattttcacaacgaacctngttacgcttgcttagatattggggctgcccatttgcttgtcacgactaaccaaggcagaacgaaaacattgaaggaggtgtaatcagcccgttggtgtgaatgcgacggctacttgtgtggacgatgaagcaccctgaagcttacctagtagggatccctgactgagcccgggaagttgtgcgtgtgtaaag

SEQ ID NO: 290674 - DNA, 283 bp, Glycine max
tgtgatgactcatagagaatcagactcacttcgtatgagactgctcttggacaatcctaaaaagttattggcacacctgtcttcaattagaactatggttagctttaggtgacagtaaagtgtgtctattcagaaagaacttgtttgcagacttgaattatagattcactctgaatttcatgcacacaacgggtaaaaagtgtatgatttactccatttatgcacttgactcgatcatggtacgttttaggcctataatacaaagttacccaactcgataaca

SEQ ID NO: 290675 - DNA, 388 bp, Glycine max
agctttcatatgactgcaaattacaagttgcccccttaaatataaaagggtaataaatcatctactacagtagtagccatctaacctcaaaattttagaactcaaccagcaaatgttgcctcaactctattctcctgctcgccgagaaccgacactgcctccttttcacctattaattctaccattaccagtctacatctctgactataaaaacgttgcaggtagatgattcaaaccggcctaacatgtatgccaggttaatcatagctcatcatgaccttcagtttgctcagttaccgtctcttcgcttgtgccttctgaactgttaacggatgaatcacttgaagaggaactatcagctgagttagaatcagaattctctgtattc

SEQ ID NO: 290676 - DNA, 467 bp, Glycine max
caatactcaagcttatcatattccctttcaaccaagttgaattctcaaaatgagttttgtttatcaaaatatagagtaccctgaagtaaagtcggtctcactatacaaaatcattgccaaaagtctaaaactttacaaacttatagaacataagatttagaaaaagaacattgaaaattcacaacagcttcagatggttttaccacggcaagcgggtccttaaagaactagccttggtcattacttgaataatgaaagacaactaaggaatgatttttgtaactcaattaggcaactcgaatggcaaaacttgagaaattgtaataaaaccaaattcctgaaggattctctaatcctctaaaacaggagttgcaattgttcgggtgttccttcggctgctccacttctcctgacccatacacagaatcacaattctattgttgctcataattctcatttcttcacaa

SEQ ID NO: 290677 - DNA, 374 bp, Glycine max
agcttctagccaaatggacttaccttgaattaattcctttgatagcccttttgagccttgtttccctttccttgttttgaagctcactacaagccttaagtgaaaaaccatgatattaccatatccttaaggaattttggagctttggaattgttttgggaataagtgtggggggtttttgtttcattggacaacttgttttgttggctatgcttcatgatgtattttgggccatacttgatgtacattgtatattggttaaatgttggacatgctgaatgaaatgttgtttctcaaaggctaaagagtaaaaaaaaaaaaaaaaaattcgaaaaaaaaaaaaattcgaacaaaaaaattcgaaaaaagaaaga

SEQ ID NO: 290678 - DNA, 361 bp, Glycine max
  unsure (1)..(361): unsure at all n locations
ngcaattgcatgcggttatcgatgaagaatccgctatactgngcctacatataaaacacattgccactcttcccattttacaaaattatatccttacttattagcggcctctacgcgaccctgggtggccgcacgcatatacataaattgcacgagaatggggaccatgtcccatgccacattgcttcagaaacaacatacgcctaacgccttctccttcagatcctctactcactacaacatgcgtgaatccccacccaaactgccacccccatataagcgcactctcacaatatggagcaccttgcgatgaacatacacatcctgcgggaaactaaaaacatcaggagcgaatacttac

SEQ ID NO: 290679 - DNA, 374 bp, Glycine max
ttgctttagtcaagaagaagatcaataatgagcaattaatatggaccttaccagcgacaatggaagggaaagaagggacgataaataaaaagaagaaaaagacctttccatagataaagctttggtgcttcgatattgtcctggcatcacattgacatgggccgtaaaacaaggatatccgatgaaatgtggagttcagcccttcacatatacattcctagctaatggttaatgtgaacctgccaccaccactacagataatgctaacctgtctatcttttgcataaatcagaaatctccaccttttgatgattcctggaggaaattaaggtgatttcaaatatagggatctttatcttttaatgagtgaagtc

SEQ ID NO: 290680 - DNA, 315 bp, Glycine max
tcattcagtaataaaatagttacttttgtagaactatcttccctgaaagttactgatgcatagaggaatttcgaacttgaaaacctgctaacacatgtttaaagagtttacataaactctagatatatgccactatggccagatcaattatcttctgatccacggataggagaaaaattcattaccgttctccacgactaatcgacgcatgttaagtgtgggtcaagatctctgcatatttggtcatctttattcgattaaacgcgtacatttactacatggatggtaccacaactctcacacacttacaaaaat

SEQ ID NO: 290681 - DNA, 574 bp, Glycine max
  unsure (1)..(574): unsure at all n locations
gccgaccacactctaagtccntatatgatgagttgatagtatacaggtactaccgagacgtatacatccnnntcttattnnnaagcgcggacanncttgatggcgatcgaacgccctncgcaaacaannannaaacggggctggcggacccttacaggcaccaccgcgcgcacgttttcttgtctttgccacaaaacacaatcaggacgaaagaaagaaatggacaaccgccgatcggcgcgaaaaacactgactgaaaacgatattggataccacagacgtagaaagcaggcgaaaccaaaggcgcaaaaggcgccggtgggtgcgcaacaagctacgcgtgggtcagggatggcacatcacacaatgcgaggcgcagacgacgcgcgtatcgcacccagctggagcacacacaaaacgaggcgagcggagccaacaacgaatgccggcgccacagagcagaaacccacgcccatgaggatagggaacaaggagacagaccacggaagccccaccgggcaaagataaccccgcagggagacacaccgcgaccacgagtccatggcaacaaccg

SEQ ID NO: 290682 - DNA, 405 bp, Glycine max
  unsure (1)..(405): unsure at all n locations
tgtgaatcgatagaccatcacgagtgttcattgacatgtacncttgtgtcaatggcacgtattggcgcttggcatccattacattcagatctagctccatgtgcataaagtataaatgtttgatcaagtgaaagagtccgaatcaacacaaatctataaagaaactgaagactctacactataccatggccaaagtattttaccacaatcatggtgaccacaatgcccataataagatcaccactaccctaaagatcaatgcctaccagncgatcacagtcgtgataattcgataacggctgtgatcaattcatgaggaccgtgacagatccataacaccctatagcactcaacgtcaatgtgtctgatcccgatcaccgtagatctaccaccgttccctatgcg

SEQ ID NO: 290683 - DNA, 359 bp, Glycine max
ttgtatgtaagtaccctacggaggggggggacgacttggggaagaacatgagtggagactatgggctttgcatctccatttccaaatccaccaagaggtcgtgacaaacccattgcttgatgagagggaagaagaactactgttgggcaaggaaacccaaatgagtccaaatctctctggcatgcgaacaatcacgaagacaatgaagagtgtctttctgcgggtgggagcaatcatggcatgccgcccaagtagctaactagtgacgatagcgaacatcattggttggcaaggagaataagccaacagaaggtgctaattttctatggaatgagaggctgccaaagccatttgaagtt

SEQ ID NO: 290684 - DNA, 444 bp, Glycine max
gtgacttttacaataaaacgttatatgtatatgttcataatttatgattcaatgtcaatgtgaattttttttacaatgtcattacatgatcgatcattaaactcttcttataacaacatggtgttatctttgtttaagaaaatttctccaagttacaagttaattaaaatatcgatgactaagctttcgacaagattaaagtgacgttgtttctatcaaaatattgtctttcgataaaagatggtttcttgacaaaattattatgcacatggaagaatagagtgctcgcaggaggagtttgaatttgaatttgaaataaaagttacaaaagttagcgaatagggttacttgaagacattagacgtcgttagatctaaataattaggaacttgctgtactcgtgtcaaaaatctataattcgaacatctagtggtgaaagtttat

SEQ ID NO: 290685 - DNA, 384 bp, Glycine max
tgcttcttttggaccttgaacaagcaattaactcctctttcagaaccatgctatgtgctcgcgactggaccctttcttcccttcgcaacttgagttcactattgctaccccatagagctccgcaaaatttattccggccatactcttccttgcgagccctcttggtttcttgttcaagggctcttgcggtaatcgcattctcttcccgtaacccggcacactcttttcgaacgtgtgtagcggccaacttgaacttctctttggcaagtttcgcctttcctaactcgcttttgagagcttggacttcttcgtcctcttccggtgctacaaaactctcttcgctgacgacttttaacttggcgagcgcatctaaacttcgtatat

SEQ ID NO: 290686 - DNA, 451 bp, Glycine max
tgcttaagaagattgctaaagaagctagagcttatctactacatacttctctaatagctaagctcacctccttgagatgagaagctagaacttagctacacaccccctataatagctaagctcacccccatgacaaaaaacatgaaaatacacaaaaaagtccttactacaaagacaactcataatgccccgaaatacaaggctaaaaccctatactactagaatgaccaaaatacaaggcccaaacgaaggaaaaacctattctaatatttacaaagataagcgggatcatacttagcccatgggctcgaaatctaccctaaggctcatgagaaccctagggcctacccttggatctccagcccaatctacttggagtcttctacccaatgcccttgcacgataggattgcatcagatgattaggatattttatgcaaaacagggcatgc

SEQ ID NO: 290687 - DNA, 248 bp, Glycine max
ctgtgcgccacctgcactaatgactcggcctacgcgactcactgaccgcagtaccgattccttcgatccaattcggtaaccgagggatcgactccaatatttgactggacgtgtatagtgtataagcctacattgtgaccgtcgggatctactagcaaacatctagagctcatgatgtactactccctgcccagccaaccacacacgtgcattttctgcaccaagctaataccctgctgcacctattc

SEQ ID NO: 290688 - DNA, 321 bp, Glycine max
ggatattggctgagcgatgacattgttgagctgccgggaacttaggccatgtacgaatggcagccacaacatgggttccttcctcattctcatcctcttcatttgccccagttctctcattcatcaaagtaggatgctcaaatttgcctcttttcacacccacttcgatcctttcgctggcgaagacaaaattcgcgaagcttgaaggtgcgtaacccaccattttttcatagtacaacactgcgaatgtgtctactattattatgatcatatacttctccatcattggaggtgccactcgaactgccaagactctccatc

SEQ ID NO: 290689 - DNA, 382 bp, Glycine max
tagcttcaatggctcaatgagcaatgggaaatgatagtcaatcaacaaataaagatacccttttctataagaggctattgtgataaagatttatatgatatgatccctatggaagcagggcacattttgtttggtagaccatggaaatttgacaagaaagcaatccataatggtctcaccaatgaaataaccctcacctatggaagcaaaaagttcaaacttgttccctttacaccttcacaactggccagggatcaagtacaaataaaattcaaaagggatgagcaaaagaatagaaaaagataagaagaacaacctttaatggttaaggaggagtgtaaggaggtaagtgtctactctaagagattagctaagaaggaaa

SEQ ID NO: 290690 - DNA, 260 bp, Glycine max
atgggcagctcaccaacatgtctttctcgcctgacacgatgaccaaatgccccttcactacgaattttaacttttggtggagtgtagagggcacaacttccactgagtggatccacgggtgccacaacagacagctgtagggggggttaatatccattatttggaaggtgacatgacacgtgtgatggcctatttgtactgggagatcgatctctcccctaagctcttggcgagtgttgttgaatgcacgaaccaccatt

SEQ ID NO: 290691 - DNA, 381 bp, Glycine max
agctttgaataattgtcgttcataattgggtaagtgtttgtttgagtttaaggaatcaagaagtatttgcaacacaccaaaaatctcttggattaattgaattaaggaatgtattttgaaaagttttcatgtggggtcatatatcattttgaaatcaattctctctctttcttggtttatgataatttttgccattattttttacatataaggcacttagagaagttatttgcatctaacatattaataaaatgcatattttttagtttcttaatggaatccacattcacatgtcccaacctataatgccaaagattaacagattcaacaatataagcacaaccagtagagaaattattattagatgcaaaagcaatagtg

SEQ ID NO: 290692 - DNA, 440 bp, Glycine max
  unsure (1)..(440): unsure at all n locations
ttgtggcaaacttcactgcagaattcataagcttggtatgtgctaaattccctgtcaaggtacctcaaatagtggacagaaaatttttcttcactgtggggctagggactaatccttgccccanaaacacaacatgccaagggccaagtaataacaccaaatttgcagcctcagtgaacaacatttcttttgcacttccatcatctgtttccatcatgcaggcatactattctagccaggccaatggggttttcaagactgattttcctgccacccctttgaaccctttcaactacacaggaacacctccaaacaacacaatggtcaccaatgacacanagctggtggtgctcaagtttaacaccagtgtggagttggtgctgcaggacactagtattcttggagctgagagccatcccttgcatcttcatggttatgac

SEQ ID NO: 290693 - DNA, 309 bp, Glycine max
  unsure (1)..(309): unsure at all n locations
ccaccacacatgggaggaaaagaagacaagaccaatnngggggttgactcagcacaacnnaaaaggaagcaaacgaaacaacgactattacagagcacaagggcagaacgcacaacccaaaaccaccccacccacgcaccaacagccaaccgacgacataaaggggcggacccaaagaccacccaggccgccacacaacacgacacgaccaacacccgcgaccaacacaacaccgggaacaaggaagacacagacggacgaacgacacgaaccagaagcagagccaggagacggaaacaaccccaacac

SEQ ID NO: 290694 - DNA, 450 bp, Glycine max
  unsure (1)..(450): unsure at all n locations
agggtcacgtgatccctgatccntgaatgcaaacccccnnnnannaggtgttagaganagacatgtttttgactttaattaaataacaaggggaggtacggaaaatgtatcccatcactgcatcatgctattaagataatgattgactgcgacggtttcacttctgacatatgtcgtgtggctcgtgaactattagggaattgtgagtgatgatacctgtacgagagacgtctagaagacttcaagagtccattactattcactgatggggacagatattgattatgcctcgttgttagatgaattctgacatcaagtatagcgtgaacattgcggatgacatctgagaacgtcgtttagaggcgatgcgcaggcgacagtaaattagcgagtcgcgagttacatataacgcgggggccttcgatcacaagtctattatggtaattgccg

SEQ ID NO: 290695 - DNA, 383 bp, Glycine max
agcttattttagagataataatcaccctctagtaagtgaaatcagtttcagtctgcctcatttctaacatacttctatggagaccatgttttcacaaaactgatttattgtcttcccagagaacgagagtaataatgcctttgtaatttaaactctagaaacacatgcacgcttgatccaagtctaaaaccgactcttcaaaacaagaaaatcttcaggcaacttaattggtaacccatgatggtttgaattctctttaccaatataagctgtattaaatacacaattaattttacaattactagtacaataatatattttgaacctacttttcacacaattaggagtgaagaaaccagctcgtgtcatactctgtttacgta

SEQ ID NO: 290696 - DNA, 575 bp, Glycine max
  unsure (1)..(575): unsure at all n locations
agagagtcgtcccnttttgatccncatangannacgtagactatacccacacncacgctcatgcatanggtaagtgtacatacataccaagctcgtctcaccacnctcataactagtatttttgctgattgcgatgacaccggacatttattgacgttctcttgcgcgtgcgaatattctagtcctactccaaagcctccnctaactgtgctgttatgtgatatcactcatccgataganctagacctgttcaggaactggtgatcacttacataccactactggattatcggagttcaattaatcatctgcattctcaacatcgtcattgnactctcaactttttacagggtttgatattatatgctcatattttcgatagggatatcaaactatctaaaggaatctgagttggcatcaaaatcgtgaagaaacgaatccattatttgcttacttgagatatttacgtaaggaatttaagtcctgaatttatactcatgaactttcttcttacatatattttcgtgattctcaggatctcatactgtgaagaaactttcttgtgcctctccacg

SEQ ID NO: 290697 - DNA, 382 bp, Glycine max
agcttcattcaaaaactgctttcaaagcttcttggtggggaagcataagatcctagtgaacatcctcgaatttgctgataatactattttttttggagaagcttctatggataatgtcaaagctgtgaaggccattcttagaagctatgagatggtctcaggcttgagaattaacttttccaagagccactttggagcaattggccaatctgaagaatggtgttgttttgctgctgattaccttaattttgccatgcttcaattccccttttgctacctagggttgcctataggcattaatccgagaagaaaggtggtgtgggagcctatcatttgaaagtttgaggctaggttgaactagtggaatcaaaggagcatctca

SEQ ID NO: 290698 - DNA, 427 bp, Glycine max
  unsure (1)..(427): unsure at all n locations
ntngtggacatttctgactttcgccagtaattggtgtttattaagatccaaaagccttggtcaagactcattcatatttgttcctaatgaggaaaacttgttgtcacattcccaggtgtgctcttcaattctgcaagtccccgtccctgcaaagatgctatgatttgaattttaacatcaatgggtatcatcattcagttgctgttgccgttgttgctgtttttcttttcagagaaagatggttcagtgatgcatggactggaaagtctatcttgaacagccaacctttgtatctgctatcaaatctttcttttataataaggatggagggaatcgtaaatgacactcttcaatccttattttgttaccttaaataaatgaataactaaatgttagatgctagtcacagtagtgtaccttctatcat

SEQ ID NO: 290699 - DNA, 390 bp, Glycine max
agcttccatcaagtgatatcagagcattagagcttcaagtaggtgctccttaaacctccattaattttcagctttaccttctcctctattcttgtttcttcatttttctccatgtacctcctcacatgtcttatgctaaatgttgttcacatgattctttagaatttccactgattaaacttgctatatgtcttaccctaatttcgtctgggaaccatccgttgttgggatgcgaccctcgtttgaccacttcgaggtatttggcacccatcgttaggcaatttgtgaagttctgagacatgccggaagtcaaaagaaaagcgtcgtaacacaatccgtgaagttccgtgacatgtcggaaattaaaaggaagtgttagtgcgaaatccg

SEQ ID NO: 290700 - DNA, 436 bp, Glycine max
  unsure (1)..(436): unsure at all n locations
gaaattaaagatattcaacatggatgatcaagattgtttctagagtcttaggaagggtatattacataggaagggaattcctatttgaagtatcaaaaggtttggccaagaaatttaagttaaaaagctttattcaagagatttactctctggtcatcaattaccagaggatgtaatcgattaccactggccaaagatgatttacaacagctattaaaatttgaattcaaaatttgcactgtgtaatcgattacacatatatggtaatcgattaccagcagtttctgaacattgtaattcaaatgttagagcttgtaatcgattacacacatactgtgatcgattaccagaggagtttttcagagaacattctcaacagtcacatcttgttatctatttcttaaatggccatcanaggcctatatatatgtgtgac

SEQ ID NO: 290701 - DNA, 393 bp, Glycine max
agcttgttcaggaattatttgtatgggttggatgttgaattctggttgttcctggtgtggagatgatggtacatgtttgtgaaccagaagcggaagtttcttttggtgaggaagccatggaaaaacagagcgtttggaatgatttcgtaaatctcagaaaactattgggaaatgctggtgaaaacacgaatgccacgaaaatataaatttgaatgaggaatgtagagggccgtgtgaagcaacggtcgaatttgccttggttcagtagtgaacgtgctattaatgttaagtgattcgtttgggcacgttcagatatcagtagttgctacaattcctctagcagacaaatgcccagcttgcccctcagtttttcaaactgatttgcatccaaag

SEQ ID NO: 290702 - DNA, 120 bp, Glycine max
ggggcttgccaaccactgacatccacacccggctaaagcaggaactgttgtcctacagcactctgcttacactaagacaacacccaacagtccgggtgcgccctgaattgtgcaatgcga

SEQ ID NO: 290703 - DNA, 381 bp, Glycine max
ttgttttacaaaagcagattgtaacaatgatggaaaactgtgtagttaaatgaagatgagatgaaacatgcacaacaccttgacttatatagacacaaaaaacacgagactagagatagaaacttaaaaataccagtgatccaacagcaactaaagcacgaaatttggggtcgacttcaacattgtcatcctcaccaatctgcacaaaaacaaaatacatatcagtatagtctacaaataataatatctaaaagtaggaaatgtgattttaaataatctagacacgtacaaatgtaaagcaaatgcagctttagtatgacaaaagctagcattatttaggagtgaaaatttgcactgattagataacatattgacatggat

SEQ ID NO: 290704 - DNA, 356 bp, Glycine max
tctcagcttggcctttgctgatgtcatgttttcaattttaagttgtggatatcaggtcgattttgtgtgttcgtcgtgccataattagtcgaggtaatagaaccactatcggtctgagagaccaggcgtaatagttgataaataacgcactaatgaagaaaacagagctttcataatcgtagaaaaatgtataagtataatgaacgttatattaacggccaatttttaactttcaatttgcttctttggtattagcgtttgtccgtttccaccatatatgatctattacttaagcataacaaaactatcataaattggattaattgaccacacattatgaagcaggccaatgagaa

SEQ ID NO: 290705 - DNA, 385 bp, Glycine max
tgctttgaacatgttgcaagcaaacttgaacagcatcatgtactctcacaaagtaccattctttgcctatcaactccaccagaccggatctagacaaggtaagcagaacttctggacttggattggatattgcaatctgcaagaagaataagctcaagttggttggtggagacattgcaaacctgtggcgattatttcaagaattctaacagtagttgaaactttggtatcttattctacctgaatgtcccgtaatttgtactcctgatacaagtctttcaaagcctgaacagcactagaatctatgtaggtcacagctgcagtcatcacaagtcataaccacatgattagaagaaagtagaattatcatcattatccctttcat

SEQ ID NO: 290706 - DNA, 373 bp, Glycine max
  unsure (1)..(373): unsure at all n locations
tgcatgtgcacacattaagcgtcatgtacattacatctgactacaatgaccactagatgcttgacacatgttcttccaagttggacttctcgcgctgagcgcgcacaggcacaccaagtgaacggcttaagttctaacatttttcagtccattgttgttgtactaaaactctatagaacaagctaaaactataaaattcattaacattaactttctgaaggcaaaaaaaacaatcgaaatttttatcgaaaaccgagcattaaaagagaanaaaaatgagataattgctatttaatttaagtgcaaaaaccaagtatacataacaattttcatatagtgtagatggaactttattgcttatattacacgtata

SEQ ID NO: 290707 - DNA, 387 bp, Glycine max
tgcttttaggttgactagttcattgacattcagcaattgaaggagatatacatctatttcaagaaaagaaaaatcataaaagacagtgtgcattaaaaaaaatcaccttcattggctgcatcaacttgaacaaccatgcatgttctgaagaaggaagaactggcggaatcttcattttcttccagtccatgctaactaaatcagttgatgctgaataatccctgataagcacatcaatattttgtactctattcttaacattccttttcttctgagtttgatcaatcacctcctcctttgcattatttttcaatgcaatcctcttatcaagactcaatcgtttggccttcttattctggtttctaaccacattatcacaatttccat

SEQ ID NO: 290708 - DNA, 448 bp, Glycine max
  unsure (1)..(448): unsure at all n locations
ntaattganattaagttatctaattatgtaagttcttgatttaatccctattttctctccccctttggcatcaacaaaaagccaaagtgcataacacatataaaacatacataaatgactaatcatacaagacatttattgaaaaatctaaaccgatcatgaagcaaaaaacatgaaatatccaaattaaaatataaaccacataatcatataacataatttatagatgttcagttatagtaagcaaatagtaaaagaaatactaaatgttcaaatgtcataatattacagatcatttggataagtcactagcatctagcagtcctaattctcttctaatgttgaagaaggaatctttatttagtgtctatgagaagatgtctgcaagttgatttttagtatctacaaattcataacaacatcacctgttagaatatgatctctaata

SEQ ID NO: 290709 - DNA, 377 bp, Glycine max
tagcttcagaccaaagcaactcaaaatctaggtatccaaaacccctcaatttaatggattttcaaggtttgagaagtgaaattgagaatgaggtaaatttggagcaaactctcacctcacacaagtctataacatcaatttaaacttgctcaaactggatttacacctaaaattccaccgaatcaaaatttgactcctcaacacccaattttaccctagaaatggctctttgttcactttggtcatttgtttttctctctagcacagcccaaactttctcataagtcctaaatgacatttcaagctaggattaactcactttaacctccaaatgccactaaatccagatttggccttccaactctcaaaactcactc

SEQ ID NO: 290710 - DNA, 170 bp, Glycine max
gaacgctcgattgacttttatgattattgtagccaaagatatttcgattacttcattattatttttcccgatattttgaatattctattaactttccgcttgttgtggtttaactcgccatgaccgcgctgaatgatcggctcgattttgttgttgcagcgattaatcga

SEQ ID NO: 290711 - DNA, 393 bp, Glycine max
  unsure (1)..(393): unsure at all n locations
agctttgatggtgttgagaagaaatcacatgtttgtcatcatcaaaaagggggagaatgtgaatgtatgtatacatgattttgatgatgtcaaaagaagaatcaaacaaggctcattttgcttcaagattaatacaagattgtttcaacaaacaaagccttgattcaagatttcttcaagatcaagccttgcctcacaatgaaaggtttcaagtcattcaaggcacatgtaatcaattaccaatacatgtaatcgattaccaatggtttgaaagtgtgtaattgattacacatcatatgtaatcgattaccagagactctgaacgttgagaatttaaattntaaatgaagggtcacaactgttcaagaaaaacaactgtgtaatcaattacac

SEQ ID NO: 290712 - DNA, 278 bp, Glycine max
agactcagctgcttctatgtgctttgattgctgtattcgatgattaatccctgtacaataggctcgtttaaaatccattggctcagctctcatttcacttaatttggtcttacgttattacttgtctctatcggtccttgggtgggggctgccatatacggaattggaaggaggattggagccatcccttgaccaatttgagttaagaagaaaggtgccaaccacgttatgagctattggactaagactcactacaacttgagtgaatcaccaccgag

SEQ ID NO: 290713 - DNA, 384 bp, Glycine max
  unsure (1)..(384): unsure at all n locations
agcttggtgctaaaacatgtccaagggttctaaaaaattttaactttgaggtttaacaacgtaatccgctacaacccagaaaaacataatacccagaaagagggagcgcaaggcagcaaaaaattggaattcgtgaggagataattcacgtatgttgagatagagagagagtcaaagaagcataccatggcgaattgggtcatactcatgtcgaaggattgaacaaagtcaaaggctttgggggtttagggttcccgatcacataaatttgaaagaagtatcctactctgcacttcagcttcagacttgttcaatcgacgggagttgcccccttctttttcttttcatttatttatgacaactntttnttttatttctttttta

SEQ ID NO: 290714 - DNA, 393 bp, Glycine max
  unsure (1)..(393): unsure at all n locations
cttattaaattagcgtgttaaatattntttaaaaaaggtggcgctcatgcagtttaagttcctctgtaaacttggtggaaaagtggagaaattattgttgtgtaagtttgccagacttaccctcatgaatcaatggttaaaacttagaaaacccaaacgtactgaattagtaagggtaaaaaggtatttttattaaaaatctatttcttttttttcttctttctttcaaaacaaactttataatattattttcatttctcttaaaccaaacaattcatattttcatctcttttctttctctcacctacttattttcactccaactatttcttatctctagtaaacaaagtggtcatcttgtatagagaaacttcgttggtccataatttcaat

SEQ ID NO: 290715 - DNA, 380 bp, Glycine max
ttctattattaacagcttagatctagtgcactgaactatgtttaatagcagtttgattaataaaacttagaacagcttatgtttagttttttataaaataattcagtttgtaatagtttaattcattttggtattaaagtagttcacagatcacattaattttttggacacccctaaatactttccatttgataatggcataatatatgggagaatttacataactcatgaatgatacttactaggcctactgcaatgtcaaggtgatacttgcgtcctgtagtgtgcactggtgcaccacgactagaagtccggttaaaattatcatttatcacatcacctactatgaatttagaagaaactcagtataaatgctaaag

SEQ ID NO: 290716 - DNA, 440 bp, Glycine max
  unsure (1)..(440): unsure at all n locations
tgtttgactaggctattatgctagagagttggagttttctaagtttgacaaatgagaagtgtagtttctaaattattttgatatgttgaaatgaaccatattttgtagtatgtgcttctccacaaccatatcctatattagcaatgtccttgagactagcattagctgctgcttctaataccaaatccacacttaaaaatattgacaatacagttgatgatcccttgaataaataatgaacatagatagtacatatagaatcttggtccttggaccattttttggtgctgccgatgtttcatagaatcatgcaggatggaagcagganagggaaaaggttacttagctagctagatattatgccagacaacctaganatctgctagtaaagttccacaattaaagaaaaataaatattagtattcaagtgatgaataggg

SEQ ID NO: 290717 - DNA, 526 bp, Glycine max
  unsure (1)..(526): unsure at all n locations
ccccaccgcgagacacaagtagagaagaaggaagaggagagacaacaatactaaatantnancaggcgtnncctgagcatcgagacatccaancnagnnaaaacctaggaaacgcatccaaagcacaacactattttacttctaacgcacacaaaccgagaggaggagaagaatggcagcaccgagcgacaacacaaatacaaacagcaccacccgagagaaagcgcacagaaaacagagaaggcccgacgaaagataacaacaacgcagagtggcaacaccagaacaaaaaaaaacaacgaaaacaagcggcaagaaggggccaccgaagaaacgcgcaccagagcagcaatagaaccgagcgaaccaagccaaccagggcgcacagggcggccaaaccggaaagagcgcaaaaacggcagcagcccgacaatgcagcggacaaacacgaccaggacgacccgacaagtccaccacagagaggcgacacccgacgcgaaacaacaccaaaacgcgacgcgaagac

SEQ ID NO: 290718 - DNA, 734 bp, Glycine max
  unsure (1)..(734): unsure at all n locations
gctgcgacgtacacnttttgatccttcgtatgaccccttcgaatacctcacaanaatcgcggagatactcacgagagtngcctactgaaactagnaaacagcggtttgttgaatatctttcacacattgaacacaagggcgngatctggagggtactctcgttacaacaaatcagcggcgtggtcatctagctatgtaatntntctatctcactggcagtgatcgtgctagtgtacgtantgtantagtactaatcgcgggtgtagacgtgatcgtagatatatgagcatagaacgactatgcccacggctctcgaganattgcgtatntgtagcacgcgcttgtcgagtatacagcggtgctctgataanctatgattgtcgtangcgctgcgccattntnatcgagactaanactcgtctcngccggcacgcnggagtgagagtatatagtcacaccgcgcgatacacgcgcgactacggctctgtatatatatggtagtgatgcgttattctgcgcgctacagtatnttaccttgtacgactcggcgtgcttgcgcgctgtctactcgtnagagtctcaacgatcgttctgcgacagtctatctcctacgagtcacacatcatncgatgagtgcgaccgcatgacgctgatcatgtatactacgcatatcgnanctgctgccatgtgacacgcnctcgtgncttccgcatgctcgcgcataccgcgcgcgn

SEQ ID NO: 290719 - DNA, 384 bp, Glycine max
tatcttgtagaatggctagacatgatacatgtcagggtttggtttggttcaaggataaaagggataccccacattatttccatgacacaaatgcaaaaatgatgatttggaaattttatgcaaaactggtcatgcatgcacctacgtggtcgctcaagtgtcaaatttttatggtcatgtgatgctagggctcaggattcatttcctctattttaaatcaacccaatgtttccaaaatatgttcttttatcaatttgtgcattcatcctagtccatttcgggcgtccggggaaatttcacagcattcacccttcaggtgtagacacatttttcaaaaattggttatgatcaatgaaatcttttttttcacagaaaagttggaaa

SEQ ID NO: 290720 - DNA, 462 bp, Glycine max
  unsure (1)..(462): unsure at all n locations
cgggtacgattgatcccttatacnttggaancacnacccttcaaactcacgcattggcttatgccgaaaaccacttttgtacattttttgncacggccccgccccttataggggattgtcactatacgcgcctccactgtcaagattatacncctagcggaacaacagaccataaatatttcctgagcttacctatagcatttggatatcaagacaagaacgcagtaagttcattgtatgacattagcaattgtgcctatacgactgggttattcgtaggaaaatcttctcgctagagactagaatcgatgccagtactttcggccacgtattaagggggggttaccgagagactcacggtggctctgacgcgatgggacctttggccaatggtctagcccggcgagggattcttgcacaccctggatggcgcgggtaacaacatggggtacggcgcttacg

SEQ ID NO: 290721 - DNA, 391 bp, Glycine max
agctttcttaagaagattcctaaaaaagctagagcttagctacacatacctttctaatagctaagctcacctccttgagatgagaagctagatcttagctacacaccccctataatggctaagctcacccccatgacaaaaaacatgaaaatacaaaaaaaattccttactacaaagactactcaaaatgccccgaaatacaaggctaaaaccctatactactagaatgaccaaaatacaaggcccagacgaaggaaaaacctattctaatatttacaaagataagcgggctcatacttagcccatgggctcgaaatctaccctaaggctcatgagaaccctagggccttcccttggatctctagcccaatctacttggagtcttctaccc

SEQ ID NO: 290722 - DNA, 467 bp, Glycine max
  unsure (1)..(467): unsure at all n locations
actcaagctntcatatgactgcaaattacaagttgcccccttaaatataaaagggtaataaatcatctactacagtagtagccatctaacctcaaaattttagaactcaaccagcaaatgttgcctcaactctattctcctgctcgccgagaaccgacactgcctccttttcacctattaattctaccattaccagtctacatctctgactataaaaacgttgcaggtagatgattcaaaccggcctaacatgtatgccaggttaatcatagctcatcatgaccttcagtttgctcagttaccgtctcttcgcttgtgccttctgaactgttaacggatgaatcacttgaagaggaactatcagctgagttagaatcagaattctctgtattctgctcactgctttcggtttcattttttacgggcttctgaaccttaggtttgtgctngngaattctattaatact

SEQ ID NO: 290723 - DNA, 390 bp, Glycine max
agcttttttttattagaaatttttctaaaatgtttatggggtaaaaaattctctattgtattatttaaattataaattaccttgtgccagaaatgtaaattataccttacctataagactatagcatttaatattttatttaaagaaatacagtaacaaacacctatatttttttattgagaaaataaaataaaaatataaaaaaggaccctaaacacgtgcaaattgaacacctatagtattaacttggaaggtggacatgaatgtttaaagtacgaaagtctagcagataaattcattatcctaagaaatagcctacaaataccctagcttcttaattagctaaaagatcaatacaaaaattctcttttctaacaaggtaattaagat

SEQ ID NO: 290724 - DNA, 468 bp, Glycine max
  unsure (1)..(468): unsure at all n locations
atacaaactcaagcttaacgatctacagacaatgcactccanagtgtcatatttaatngagttctcatatatataaacccatcaataaaagtaataggatcagtagttactggttgaatattgggtatgttgcataaaatttcaaagaaggaacaggttaaaaagcaggactgttagaagcatacagggaaacatcagctaaaatcatgggaagatttttaaacacaaggttttcttgttatgaagatgaccactgaactgataatttgtgaaaaccagtaaaagaagcaatgctgagctctgagtcatcatgtaagtagtttacagacgcattgtgctccatgggctctaggaggatacagatagagtgaagaaagtatcaatgtttaagacgtgcagagaactgatgagactcaagtagcatgtcaagaatcgaggtatcgtgaaacacagcaagatggtcttatt

SEQ ID NO: 290725 - DNA, 337 bp, Glycine max
agcttgttcttgaacggtacatgtatcatttcaacgagttgtgcgtaccattaactctcgagacatcactatatatctctgcacctggctcactatacaaagggatgatcatcggggatatgatcctatctcggactactgggaaactcatcgttggccaaacatcgagagagtcagcgctgatacgacactggcttgcgaagtgaaacagattcattccgccattcttcaacggctacgtaacgatcaatttctgtctttgaattatattagggatgagatggacgctgcttacactcctgatcttccactgtgtaagaatgtaggtcagctaagg

SEQ ID NO: 290726 - DNA, 437 bp, Glycine max
  unsure (1)..(437): unsure at all n locations
ctcacgcttgtctccctaggcaggaccatcaaccatctagcaattcttcattccttgtcagcttcctttctccctttctttcttatacgtagtcttatggtgtacccctggcttctgtatttggacctctggtttgtgttctctgttaactgccccttgttcctcagcttttgtatcagtattccgtatggtggtataaaaattagaacaaagggagcataatgctgtttgtgcttattatgttgtagttatgaattgtataatggttttttttaagagtgtctattatgctaatgaaaaaggatacgttcactgcacattcaaaattcatttatgttaatcactaaatatgcattataatattcataattaaattcctatgctgtcatatagtgctcatccanagtgatggatgatgctttatttctagcttggtc

SEQ ID NO: 290727 - DNA, 385 bp, Glycine max
  unsure (1)..(385): unsure at all n locations
tagcttgagcatatatgtcatatgaaccaagcttgttaaaaatgtggtaaacccaacaaaaacaaaaatgaagatggttctagttgtgtggttgcgcaaaaaacctcggcgacagccaatgaaggctcacagttgcgacggtgttcacccgtgaataaagcaaagcacgccctcaggtggaaggaggtgattccaatgtaacgctcaccagagatgcatcacgcatcgtgtgcgtcaacttctcttgccgttgcgtggggtcactgtggcggtgtgttgagttggctgcccatgtggatggcgtggcattcttganaggtcgttgatgcaaaccgataagagggtggcacactggttgccaaacaagcccaatagtgggcacgag

SEQ ID NO: 290728 - DNA, 424 bp, Glycine max
tgttgaaggagaatagataaggagtttatgaagaggttgtggtcacggcagtgtttgggaaggaagaactccaagacaaaatcaaaatggggataagaagaagtccttagaggaatagcgacggcagaatgcaagtcaaagatgttggcgtggtgagagagaggatattcggccttggtgaaggcggttatgtccatagcaaaacagggcttggcagttgtgaaggccgtaccgacaattccttgtccgcggaaaaggtggtgctgagagcatgcctcctggaaccccaatagctggggctgaccatcccccacaaaacacgctctgtccacaatcgacacatagttgttctcatcccttgaatgcccacaatccacacatagttgttggacgcaaggagcccatgtcagatgccaaggcacat

SEQ ID NO: 290729 - DNA, 352 bp, Glycine max
  unsure (1)..(352): unsure at all n locations
ctagacatgatacatgtcaggttgggttggttcaaggataaagggataccccacattatttccatgacacaaatgcaaaaatgatgattggaaatttatgcaaactggtcatgcatgcacctacgtggtcgctcaagtgtcaaatttttatggtcatgtgatgctagggctcaggattcatttcctctaatttaaatcaacccaatgtttccaaaatatgttcttttatcaatttgtgcattcatcctagtccatttcgggcgtccggngaaattacacagcattcacccttcaggtgtagacacatttttcacaaattggttatgatcaaatgaaattcttttttcaaaga

SEQ ID NO: 290730 - DNA, 429 bp, Glycine max
  unsure (1)..(429): unsure at all n locations
ttgtgctttatgcttaanagccacacactgttcaatttagtgtcatgggacaccaccatgataggcgaatgtaatgataggcgcatgtaatgttgggattataccatcggggaactagaggttcatagatctttcctgggcttactattgctatttggttatcaagaaagtatggtagtaggttaatgtatgacattggaattggggcaaataggactggtttcttttctgggaaatctcttctgggttagtgtttaggttaggattgggagtagtgtttggtctaggttgtataaggggtggattttgtgggtgattttggggtggtctctgtggttgattgggagctcttggtcgaaggggtattgngcagggggagggttaatattggtcgagcagtggtattggtgtaggggatactaatacatg

SEQ ID NO: 290731 - DNA, 386 bp, Glycine max
ttgcttgagatgaggaagtgttgaagggtgaaacttcctgcttttattgttgaccacagagtggtacctggagatatgtcgcgggggtcaggagaccttggggacgtcaggtggggtgctattgcccaaaaccaagcttgaccaatcccgacccaacccgggcatagtcagttagtgagaacctgtgatgtacctaaacaggcgagctcctggcagtcaacagataaaaggaacaaagaccacatagcaaggaggcttgtggtggctggccagctgtgaactttgattgatatgtgggttatggcctctggtaatcgattaccaatggtgggtaatcgattacaaggctaagaaaatgaagacaggaggctaagatggtctctggt

SEQ ID NO: 290732 - DNA, 453 bp, Glycine max
  unsure (1)..(453): unsure at all n locations
tctttgagaaaacttccttgagatgttagagcttatctacacacacccctctcatgactaagctgacctccttgagaagctctcttaagaagattcctaaagaagctagagcttagctacacacacctttctaatagctaagctcacctccttgagatgagaagctagagcttagctacacaccccctataatagctaagctcacccctatgccaaaaaaacatgaaaaaaacaaaaaaagtcgttgctacaaagactactcaaaatgccccgaaatacaaggctaaaaccctatactactagaatggccaaaatacaaggcccaaacgaaggagaaacctattctaatatttacaaagataagcgggctcatacttggtccatgggcttgaaatctaccctaaagctcatgagatccctanggccttcccttggatctttgcgccaatctac

SEQ ID NO: 290733 - DNA, 384 bp, Glycine max
tagcttctatctaaatggacttaccttgaattaattcctttgatagcccttttgagccttgtttccctttccttgttttgaagctcactacaagccttaagtgaaaaaccatgatattaccatatccttaaggaattttggagctttggaattgttttgggaataagtgtggggggtttttgtttcattggacaacttgttttgttggctatgcttcatgatgtattttgggccatacttgatgtacattgtatattggttaaatgttggacatgctgaatgaaatgttgtttctcataggctaaagagttctaaaaaaaaaattcgaaaaaaagaaaaagaacagcaataaagttgagtgaataagatcttaaatggcacaag

SEQ ID NO: 290734 - DNA, 446 bp, Glycine max
gacctataaaactcagctcacatatcagcattaattttaaatatcatatctaccctaaaccaagaaaacagggcagaggcagaaaactctgcccaaaacacactcacatattacaactttccttactcaaataccccagtaacattctcttcattccgattcgttaacagttggatcgacttgaaaattttactggaggttcctagtacataagtctacattttgaccgttgggatctgctagaaaaatgtccagaacctaatatgtactacctttcccataaccagcaatgcacaagcattttctgcacatgttgagcaattctgctgcacaaatttgacagctttttgctgcacaatttggcagatttcgaaattcatcttacccacatccaattttgctcagattggatcctacaagtgctaaatcatgtataaatcatattt

SEQ ID NO: 290735 - DNA, 380 bp, Glycine max
agcttaataaatcaatctatggcttgaagcaagcctcctgccaatggtatttgaagtttcatgatgtcgtcacttcatttggctttgaaaagaacatcatggatcaatgtatataccaaaaggtcagtgggagtaagatttttttcttgtgttatacgtggatgacattttgcttgcaactaatgataagggtttgctatatgaggtgaaataatttctctcaaagaactttgatatgaaggatatgggaaatgcattttatgtcattggcattaagatccatagggaaagatctcgaggaattttgggtttgtctcaagagacttatattaacaaatttttagagagaattaacatgaaagatgttcaccaagtgtagc

SEQ ID NO: 290736 - DNA, 508 bp, Glycine max
  unsure (1)..(508): unsure at all n locations
cgacgagggtnccnnttttgaaccttagttagatacgtttgactacgctagacatacccgngacactctagaatactgcatcttagtgctacttcttatcttttaatcatatgtgctctatatgctgcatgagctacgttactggtgacttcgtagataactaacactcaatctcttccctgagtgtattactaaactccaggacaaccgcaatcacgcacttggaagaaacgaagaatatggcgtagcattgttgttacttgtgaacatgggacatgcacatattagtatgtctaatacgcaggaatgataaatgaaaatacttaaggtgagaggttagattgatcctttatgcttaatactaaataaagaataacgagtgaatgcgtaaggatcgaagattttaatgattaccattcaaaagctaatcatgaaacattaaacctttaacatttatcatatgcatctgaacccatgtaagatgtgactctcgattttcaccattcan

SEQ ID NO: 290737 - DNA, 380 bp, Glycine max
tatgcttgagatgaagatgtgtcgtagggtgaaacttcctgcttttattgatgaccacagagtggtacctgtagatatgtaccgggggtcaggataccttggggacgtcttgtggcgtgctattgcccacatgcacgcttgaccaatcccgacccaacccgggcatagtccgtcagagagaacctgtgatgtacctatgcatgctagctcctggcagtcaacggatacaaggaatgcacgaccaccaagcagggcggcttgtggtggctgtccagctgtgaattgtgagtaatatgtggatcgcggcctctggtaatcgactaccaacggagggtgatcgattacaaggcttataaatgaatacaggaggctatgatggt

SEQ ID NO: 290738 - DNA, 444 bp, Glycine max
  unsure (1)..(444): unsure at all n locations
tgcttgtggagcttctatggaggctgtatctttgagcttcaatggcgtcctttaatggtgattttccaccatggagatgcagcggaagacaaaggacaataggtgagaggaggcgccatccattaaggaataagccatggaagaatgagcttcaccaccaagatgagccttggataagaagcttggagaagatgcttcaatggaggaaaagaaagagggagagaaagagagaggggggagcacgaaattgaaggaataaaagaggtatagaagtggaactttgaagtatgtctcacaagactctcattcatcanagttacaacaagtgttacacatgcttctatntatagactangtagcttccttgagaagctgtcttgagaaagcttctttgagaaaacttccttgagaagctagagcttatctacacacacccctctcata

SEQ ID NO: 290739 - DNA, 384 bp, Glycine max
agtttttggttatgaaatctagcagaacgttaattaataatgtaactgaatacacttgcttatgttggacaggtgacaaacaagctctttcagcttagttacatatcaggagatgttgaaaagtttgcaacaaaaatgctgctttctgctgtagaccatgaagtttcagatacaggtcttttgcaatctggacatactgaacaaatagctgaggcagaggtgttgtactatttttctcgtgtcatttctctaattaatgttccttgtgataattgatgtgcagagttctaatatattggattgagttatttgattctgatcttgttgctaccgtgtcccagaataatcttgtttctcataaattctaattgactcttgtcagat

SEQ ID NO: 290740 - DNA, 273 bp, Glycine max
  unsure (1)..(273): unsure at all n locations
actagttgatatggatcttgagtgccaaattaacaaagaaaacgaaatcatatttgagataagatctagcctgcttcattcattctacttactacatatttataccgaatattcactatattttgactacagatctttagtacaaaatgggtgttggcgcctaaatgaattacntacatagcggagtggctacttagctgaatctgttccacgagctagcggctcctaactaccttgttgatagctttggagctcttcagacgaagacctgca

SEQ ID NO: 290741 - DNA, 306 bp, Glycine max
  unsure (1)..(306): unsure at all n locations
cccacacaagccgcaaggaaaaaaaaaggcacgacaaccccnnggagggttgagctcagaccanaanagcggcgcaggcccgaccacattaatacaaaaacaaggggcgacttcgcaaacaccaaggaccagaaaggggcaacgacccaggcacacggggcgcaaccaaaaaaccggccaaccgcacgcagccaaaaacgaagccacaaaacccaaaccgcgaagaccgaccaccacggccgccgacacgagaaagacgggaggaaagaccccccgccggggaagaaccaacacaagaccaccccg

SEQ ID NO: 290742 - DNA, 352 bp, Glycine max
  unsure (1)..(352): unsure at all n locations
ggggtcaatgatctgtgaccgtgaacccganccccgaacaaccgcttaggccgacaccttatggctttgtccttaagagggccttgggggacaatgccacatcgccgcgcctttctcaatagggctcgcgtcgatttaaaaacgcccgcagacagtcacaccggcgggcgcttgaaactaccggctgtcccgagaatagcgtggcccacagaatgggatcgacttccgaaaaaagcggccgggcttcatctgaactgagagtcttacaacacaaccgggggctgtagataaacgacggagagcaaaaggttaggcccgcggaaccccgcacccgtggtctcgcgaactctcg

SEQ ID NO: 290743 - DNA, 388 bp, Glycine max
agctttcatctcccataagctgttccacctgaaattttgagaacaattagttaatattaggactgaagaaagggatgcttactaaagatacattattagtaagataggagtaaaagaaatacaataatgatgagttaagttactaaattagaatatccaatcaatgattcgtattttcatgtctatagcatacagaatttcatagttcagccgaaatttagttcaaacagtaataaattttagttctctgtcttctgaaattttatacctagtacgtcatctttactgtattactatttgctaactagaacatgaagggtgttcttaattgtccatacggtaacaaactacatgattaagacttcttatctttaaattatagacgctc

SEQ ID NO: 290744 - DNA, 445 bp, Glycine max
  unsure (1)..(445): unsure at all n locations
tgggaagtaatgctganaacaatataaaaaataaattttggttngtgttgtagagtgtgtaaataaacttaacggccaagattctgagcttattcagaagtttgagtggtgaacgtaagcacacactgcaatgctaagttttggcatataatataataataacgaaagtgattaaaaattctggtaaaaatcctaagctntagaaaaggctgagaacaagagaaaagccaaagggatgaggaaaagctgatctgaaggaaattctgttctgaaacccacactcagtctctctctctaaaaaataaacactctctttctctctctagaaaatagagagaagtgaaatgagtgtgttgtttaacgagtgtcttattggaatggtaaattaccgttgcacgctccctggtggacgcggttactactctaccatgacatgctgcccatg

SEQ ID NO: 290745 - DNA, 390 bp, Glycine max
agcttggacatgtttagaagaaatgtaccaaatatcatgcttagcgtgcaaagaagggtatgtttcttactttggtctgttctgagaggtcaatttagcttcagtacctggaaacacttggtggttagattctggtgccactaataacatcagtgtttcaatgtagggttgtctaagctaccagaaaccaattgattctgaaagatggatctatgttggagatggtaaatcggtggaagtggaagctatagagcactttagattatttctatgtactagtttttatttggatttgaaagacacttttgttgtaccgtcatttagacggaatttggtttcagattcttatttggacaaattgtgttatttgtgttcatttggaaacaatgt

SEQ ID NO: 290746 - DNA, 464 bp, Glycine max
  unsure (1)..(464): unsure at all n locations
tggatntgcaaagaaggagtgttgtagatttcgcagttttggctaagctaaaacttttagctttaaataattttcgtcaaacttgggtctgcatgaattagctcaagctaaacaaaattacaacaagctttctgaagcttaaagagttaagtctcatattggtttaatcaattatagttctactttaatcgatttgagacaatgactgatttttcaagagtctctggtttaattgattaccaggtggatcaatcgattacttctttcttgttaaattgttcaaagccgaacaaagaacactntaattgataacttaggtcatctaatcgattacattgttcttgagtggttntctagatgttggatgaacactntaattgataacttaggatatgtgggacactctacaagttacacatgagggaacaactgatgtcaaaagatctaggataaatactctaact

SEQ ID NO: 290747 - DNA, 392 bp, Glycine max
agcttattatgagcacatgtgcatgaagcaaagcttggtcgaagccagccaccactagtaggatcatgagttcctgcagggctctcggttctagatcttgggacaatttgatgtattgaatgaaaacatggacaatacttaacttgtttcagcttcttacttacagaatcaattgaaacagattggctttccatatcattaaatttagcaagaaaacccaagtcactgccattgtgccctggaaaatgaagagttccctatattagaaaaggtatgctagtacaagacatgtattataataactacaatgcaactttggagacaagctctcaccagcacaagtgcccgagggcagccatccatgtttctgcccgtgatttgatagtgggaga

SEQ ID NO: 290748 - DNA, 433 bp, Glycine max
  unsure (1)..(433): unsure at all n locations
nttgctagagtggtatgtataattntgactaatcttattatgatgttcttgttcttatggaatgtttcaggtcatgtatgttgatatggaggttaatggtgtcccattaaaggttagtgctttctcacgataagtgcattttttttagtttaggttctaagtataaagaatataacttgctttcttttagctctgttgcttccatctatgactggttatgaaatggaacatgcacaaattccattctcactttttttcaggcttttgttgatagtggagctcagtctaccattatatcaaaaagttgtgctgagcgtctcgggtatgataaagttgttagactggaataggctttcaagacatttataataccatataacgattaaatttattaggtggctcatttgctcgcctatgaatntactcgtacatg

SEQ ID NO: 290749 - DNA, 396 bp, Glycine max
tgtctatgcaagcttataatatatcgatacgctcgaaattaaacattggaaactctcgggaaattcaaatagtcataacttttcacacggatgtccgattcgggcgcataatatgtcgagaggctcgaaattgaacaacgcaagctcttgagaaattagactggtataacttttcacacggaagctctcgtgaagtccatatggtcataacttttcacactgaggtccgattgatgtttataatatatcgatacactcgaaattaaacatcggaaactctgtagaaattcaaatggtcatagcgtttcacacggatgtgcgactcgggcgcatgatatgtcgagaggctcgaaattgacaaacggaagctctcgagaaattcaaatggccataact

SEQ ID NO: 290750 - DNA, 467 bp, Glycine max
tgaatcggacatccgtgtgaaaagttatgaccatttttatttctcaagagcttccgttgttcagtttcgatcctctcgacatattatgcacccgaatcggacatctgtgtgaaaagtcatgatcatttgaatttctcgagagtttgcgatgtttaatttcgagcgtatcgatatattataaccctgaatcggacctcagtctgaaaagttatgaccatttgaatttgacgagagcttccgttgttcaatttcgaatatcactgtatgtgatgcgcctaaattggacattcgagttaaatgttatgaccatttgaatttctcaagagcttccgctgttcaattctgagcgtctcgatatgtgatttgcctgaatcggacatccgtgtgaaaagtatgtccatttgaatctctcaagtgcttccgttgatcaatttcgagcgtctcgacatattatgcgcccgaatcgg

SEQ ID NO: 290751 - DNA, 380 bp, Glycine max
tttcttacactttttcactttcctcaagaatttcaacctctttctcacttagacttttcagatttgggagccaagttatcccttgcgttctagacttcaaccacttgtgatagccatcgatgacgccattgctacttcccctaagctccttatcttttcttcccactctattccatgctttacggattttctgaagtatcttcgcattagcttcattaagacctcgcgcgatgaaaggcgtgatgatttcctccgacggtgcacctctcatagggtagcctaactgtcttatggccagcatgggattataattaatacaacctctcgtccccatcaaggggacatttgggaatccctcacacgagcataacactcctacc

SEQ ID NO: 290752 - DNA, 425 bp, Glycine max
  unsure (1)..(425): unsure at all n locations
tcaacttatgtgcatgaattatgtgttattacgattgttgttaagaagtggagacaatatctgctcggtcaacagttcaccatttttaaccgatcattagaaccttaaggagctcttgactcaggtcattcaaaccccagagcaacatatgtatttagccagactcatgggttatgattattgcatccaatatcggtctggtaacactaatttagtggctgatgctttatctcgaagatctgagaaaacagaaggtaccatgttattattgtcggtgccatgcttggcatttttggaagaaccgaagaaacaattaactcaggaagcaactttcattgaattcagacagaacataagggcccatcccgaaacattccatggatattctgtttcanataggataattttgcatggaaattgcattt

SEQ ID NO: 290753 - DNA, 382 bp, Glycine max
ttgctttctatttcatttcatgagttctatttatgttcatcaacactttataatgattgatgccactggcttgaatttgtattcatttagaaaaactaaattgcaactttcgtatttgaaaaattaagttgcaccatttatatccatgtctgctctgaaacatattggctttcattcttacatgtgcaatgatgagtgttgcttatctaaatgatatagtttctaaacatataatgtatccatttgcaccatctagattctgttgtttagttaattgtatttatattttggtatatcctaactgacattggtttgtaattttgaccgagaccactagactacactaataatagtgtctggcattacaagtatacgtttgtcg

SEQ ID NO: 290754 - DNA, 482 bp, Glycine max
  unsure (1)..(482): unsure at all n locations
gcagaccgggtgatccctgtgataccatganncccttgaaccccaanactcagcggtgcaagcgctcataataacgtttatgtcgagttttacaattgtttaagaccaaaccgcgggtaaggggttcttaaacgacactagcgaaaacgagcaacagctccaaccttgatgccctcaaatgctctagatgtggttcagctaacactccagcaaccncacttacagtgcacagacctaaaatttcgacatggctgcgtctaatgtacaattccgaatggatactatacacatagtagaagagcatgctaggtgtaccttaaaaatcatgatggttctgctaccgaataccttcttggaaatagttacaaaatgaaaatttatcgatggcgatagacaatattgatgaggagttttcacaataagaatcattatgcggatcacattcaacacctagtggctgcttcacaaaaatcgaactaccn

SEQ ID NO: 290755 - DNA, 242 bp, Glycine max
  unsure (1)..(242): unsure at all n locations
caccaccaaaaaaaaacaaagacaaaaannnggagggatgcctgaacaaaagaccggctaacacggacccttagagagagccaggacaggaaaagagccaaaccgagagaaaaggaaaggacgcgaacgacacgccggagaaaacgcgcacaggccgacaaaaacagacaacaagcagaacaaaccgaaaacggcagcaaggaaaccaggaggcaacagggaggagacaagaagcaggaggg

SEQ ID NO: 290756 - DNA, 449 bp, Glycine max
  unsure (1)..(449): unsure at all n locations
cgctgaacgcctggggtcgataccttccattatcgatacttttagacccttcacagcgcagaactgagcgagatgatacacatactgatgacttgtcaacgccacctttatgggcagcaaccccgatcaccggtggaaatacgtcttcagcacgtcggcaatagcgtaccaaacacatcacgcatatgattaatgacgacgactgaatattcaacacgatgctcaacacgtcgctaacaatgcatatccgggagcgaggatcgccctgctaactcagcatctctgatcacctgagaagataccccaactcaatcggctgcttaacctattctccagcgccgagtgattttcctcacgttcggctagctcattaaactgcccatgaggatagccatcctctcacataccacgttgagcaccggtgacagtgactgagatcattctcaccn

SEQ ID NO: 290757 - DNA, 391 bp, Glycine max
agctttttggagtagaaacatgggaccaactcattttatttcaaaaaggaagtcgtatccagtcaaggtctgagagaccatacaagtttcctaacgatttctaattatgtgggccattaagtctatcatatgctgacaatagccgagaagcccatgaatctcttcgggggtggagtaggtgtctgccatcgccttggccttggctaacaagcggggaagttcttgacttccgttcaaggtaagagcaaaccggtccatccacatggttgcctcttggtgtaaagagtcgatcacccttcctctagcctctttttccgcatatacttgagcatactcatccgcgattctatgctcgtgggccgtggctagacctaactcttcttggtacttg

SEQ ID NO: 290758 - DNA, 412 bp, Glycine max
tttcggttcattctatgtacccatggtggtccacattgtgtctcgtgtatttctattctcgttgcatttacttgttatcccccctcttgacgtgcttaagccattttacttaagtcatttctcgcttaaactaaaaataaaaataaatttccaccgaacgtttgaattgcattatccgttaacttcgtttaaaaggaattccgaccgttcggtcgtgccgtagccacgttggaaatcgaaaagagatactataatagtataaataacaaaaatataccttttagtaaaataaagcggaaaatcaatcggacgctatctctttgggatatctcattcttaatcgaattgactaataactaacgtgagactaaggctaaaatcaactcgcctagtcgagctcgtccacaaaaat

SEQ ID NO: 290759 - DNA, 517 bp, Glycine max
  unsure (1)..(517): unsure at all n locations
aggtagagacccgttgacgcgtgttgcnccttatataccttgtacaccncnnnctntggnngntnngctgagatcatcaagcggttttatagagacattataggatttgattctcagangtatntggtccgcgcgagggatattattctctttaccaacattatttcagaaatcccaaccgtgaaaacgtgaaaatttgagatccataagtggagtctaaattccaggatgatccaacatgtaacgaatccgagatcatagttggactgaaacacattcatgtgtatgcaaaaaaataatgaatcttgagagaggaaggaagaagaaccacttcatgaggaagcgagactgtagatccaatacaaactgacctatatgcctctactcatagttacacgattctaaactcaatacttactctatcattgaatcatatcacttgataaaaaacagaactctctcttactatgtcctgactaaacagaccatcaaaacatctgtctacttctgtatcaac

SEQ ID NO: 290760 - DNA, 366 bp, Glycine max
agttattaaagagcaaggaagccaatcaaattaatatttggtaaccacgcacataggcaataagacatataaatttatataaatgttggctagctaggttttggagataataggatccataagcttgtgagacagcatacgataaatccaacatcagaaactgaatcatgtttaggaaaattgtataaaggttttaaagtgtggttgtgattcctgacattgtggaaaaatatgaccgatgatgtcaccacaagatgctgtcgcccacaaagcttgatattgtgattgaaattcctgttactgatatttttgaacaccttggtatgaattacaatttttcaagctagcccaaccaccgtccaacac

SEQ ID NO: 290761 - DNA, 365 bp, Glycine max
  unsure (1)..(365): unsure at all n locations
ggcgccagggtgagcggtgaaccatgaacctgaanaccgacacaaaaccagcgggattgaattttaaaaaatttgaaatatttgggaaaacggcttggggtattgatataataaaatatgacgatatttaagacaaaatctttaggatataagtaaatgaagagttatgctaatatatgtaaatgtcatggactatgtatgttaatatttagtctttgcggattacgtacataatacgcgtagaggagaaaaaatcctgatgtttttataacaaagtaataagagctataaatggaaatgctcaaaaaacctctaacattcgacttgatgcatataaaaacccaaggataatttgctgtaaggtc

SEQ ID NO: 290762 - DNA, 386 bp, Glycine max
agcttggcttcaaacttccttataataggctgccaaacactccagctcttagaagacacccctaccttgcaagtattttgttaaataatgtgattgaagtaaattttttattagatttaattaaataaatgtttagtattttgttctttcctattagtatgttgatagctaactggaataaaagaaaagctaaggtcggaccagttgatagctaactggaataaaagaaaagctaaattgcagggaataattctgatatctttttatttcatcattacccctttttatagccatttcatacaagatattttgctaagttgttataacagaattttgaaattgcataaccacacaggtatcaagtaaaacgtggaaaaagctttaag

SEQ ID NO: 290763 - DNA, 442 bp, Glycine max
  unsure (1)..(442): unsure at all n locations
tggagtgaaccaatataaaacaataaattatgcactactatcttccctctctttgcattggttgtgttataaatatgttaactattttcattgatctttaagacaagaaaatctttcacaaatatacttaaaactgaactcttttgtcaagattttttcaaacaaacaaatccttttttttttaaatagagctctcaactaacaatattacacttgtattccccattcatgtgcaaaattactaagtgtgaatcaccataattatgagcttactatactcatcttcccaataaaatatttaaacccaaaatcaatgcttcatattttgcttgactatttcagaaatctagatctattggattagaatctcaaaccatgctagtggggataattcttactatcccaatcctaataacttcttgtgttnttgatatgtcatacc

SEQ ID NO: 290764 - DNA, 380 bp, Glycine max
agctttcaaacccatgtaatctcctaatatctcccacactttgtgggttgggccattcttggatggccttgattttctcagggtccacttggaccccatttctaccaactacaaaacctaagaaaactatattatctacacaaaaggtacacttctctatatttgcatagaaggtgtttttcctaagaacagaaagaacttgtctgagatgtactaagtgatcatctaggctcctactatacactaaaatatcatcaaaataaacaactacaaatctacctatgaaatcccttaagacatgatgcataagcctcataaaggtgcttggtgcattagtgagccctaaaagcatcactatccattcatataaaccaaacttg

SEQ ID NO: 290765 - DNA, 669 bp, Glycine max
  unsure (1)..(669): unsure at all n locations
ggggaccaatgtgnnnnntttttttattcngactagctagnngcntgcantcaanatttcnncaaaanananactgngcnananantgntatnananaganagaactngagtagagtgcgccatgtctgtagattagttanagtngctttcgtctgcnnacanaatgatncgatgcgagtgcgcgctacatggtgattgactattaagaacacaatacttcatccacgtcgtgtgctatanaggaataaattactagaggggtaaagttgtggcgcactgtaaacgtattcgaatgcggcgcctatacatctggcctgatataggcgctctctctgtctgcagagcgaggtctcctgcgttgccttactcagagcatagtatgtggcgcagagagtctagctcttgttctcctgtagaatcgttcatagtgattgtctaaacaatttacctattgctctatgtatccatggcgccaatcagttggaaaatctctcgtcatgttccttaatactagtaaatcgtgtgtgttctatggtctcgtcctcaaggagtctcctcggacacgtgaaacacttcctgccaccacgtcgttcataaaaatggagaaacataacgattgatggcttctactccctcactataccgccatctaatacatgtgtccgtgg

SEQ ID NO: 290766 - DNA, 440 bp, Glycine max
  unsure (1)..(440): unsure at all n locations
natgaaccctgattactgctcganancaggcaannaaccgcaccgggacctcagagccacacttggccngcgattccgtgaacagaccgaccacagcacggggcacgaccaccaggccagcgccgaaagccggagaaagaggcaaccaagggaaacgagacacagctggcggcgggaagctaaagagagtaatgctgaggaacatatagactgtacacgtcatagacatgtgacataaagtcaaagcacaggaacaccaacggagacctggcaaggccgcagcagacacgaaaggccgacaccagaaacacgtgcgccagcaaggaaccgactccaaccaaatcggacacaaccttcgaatatgatacggaacgcaaacacgtcgaatagaccccacatggctgatcacgcgatgtangcaagcactaccaatatgcacg

SEQ ID NO: 290767 - DNA, 156 bp, Glycine max
agtcattgaagatcggcggcaatatcgtaaccaacatggcaaacctcaccaaatatccaccttcatttcagagttcatagcaatagaagaaacctcattaccaatactatcagctctgacaacaatttagaaaatattctctcttccatgacttcc

SEQ ID NO: 290768 - DNA, 462 bp, Glycine max
  unsure (1)..(462): unsure at all n locations
gactctcgnnnnnttggangcattaaatgaggtcttgcatgcacggccccgggatccttagaggcgcctgcaagctgcaagctttctaaacagatctgatctgaagtctcggattcgaaaacttacccgttgtagaaccgaaatcggctgatgaacgatgaggatcgatgaataacggacgaatacctttacggatttgcttacggaagcatctcggaagcgttacggaagcacctcggctatgatggtcttcacggaaaaatttttttcacccataacagctggaatacatagccagggggctgacggatccttagaacagcccccttcagcctttctataagactaaggaggaggaggatgccgccagctcgtccagtcgaacttagctcgactatgcgagctcngctggttaatttatatgacgctaagcgcagtttgtgtgtaacaacactaacctcn

SEQ ID NO: 290769 - DNA, 427 bp, Glycine max
caagctccaaatacggaaaattagattacaaatgcagcagagtttaagctctttattaaaatgctggtcccacaactatgttagagaggttttgtagccatactgtgacactttcttaaaagtagcccatatgagatcgatgtatagtggaaactaacacatccatagatattaatttaatagttactatatcgaatttgagactacaaaatagcataattactcaagttttcgtctttgatttctcttgtgttctcatattttaatgtgattgctaatgttaaaagtgaaattgttttcatgcatacaacttatcatttttcattaactttccaaaactaacggtcatacttaattcttattaatttcaactttcttagatgtgagattgtgtgcatatggtgatgtttacattaagaatttttta

SEQ ID NO: 290770 - DNA, 258 bp, Glycine max
tatgaaagagcatgctatgtgctcgagacaggcccctctataccatccacaacgagagctcataaaagcgaccccacagaactccgcaaaaattagggcgaccatactcttcctagcgagcactcttgacctctagttcaaaggctctcacagcagttgcattctctacccgaaaaccagcacactccttacggatgtgcgtaacggccaacaagaacttctccatggcaagatacgcccttcctaactcactttcga

SEQ ID NO: 290771 - DNA, 419 bp, Glycine max
  unsure (1)..(419): unsure at all n locations
cattcagatgtagtaatgaaccactaacctagtttaaaagaactaagttgccctagcccagggaatnaagggaacttaatggatgagtgtaactaaaattgtggcaaccaaaagtcacccctaacagccatcaagccagccaccatttggtctcccaaaaggctgatgcctaggttgccaattgggcccttattacaactagaactaaaccaaactaaagcccttatagttgattaacccaaaacatatttttggtcagccaactttacaaggattgggccattatttagacaaactaaacactctataactgatacaaagtggtgtcatttagtcctcctccatttgggccatgatacaactcacaaccttggacttttctccttgagacttgggcttgtattctaatagcatggaca

SEQ ID NO: 290772 - DNA, 392 bp, Glycine max
agcatatacttaagtgtttagtattagaggctaaaatatattctgtacaatgaatttaaaaaaaaaataaaagtagtgagaacactaaaaataatcaaaaggaagaacaaacataatgaatggattaagccaggacccattaaccaagatagctaattctataattaggtcaagattgcctatgtgaaatgtatccaggtactcatgactaacaaatagagggatgacgccccaccaagtgaaactagattgataatatgctcagcacaaaagctacattatctatatatgtgcaacaatatcaaaataatatcttttctaaaaataacgaaactctccaaggaacaagacaagcattattgaacgcctccacaacaacagaccaatcactt

SEQ ID NO: 290773 - DNA, 316 bp, Glycine max
tttatatatgcataaggaccgattgatatataattacaaaatgaagatgccagttaggtggtagatctattgcactaatcttactaaggagcgcatccaacgtaatgtatattggaaagaccgaaagactgagaaaggtgtgtactactaataatactatgggaatcacaacatatggtgtaaagcattcgtgacatggaggctccaatatattcgaaatagatagaagtgccagcttatctacgcgtggaatctataattaggcatttattacttgaccgtggtgaagacaggatatgagagatcattgacattg

SEQ ID NO: 290774 - DNA, 372 bp, Glycine max
  unsure (1)..(372): unsure at all n locations
agctcgnngtttgctgcagtctactaatatatggaattacccattgctttgcctgagaataacaattggttgaccacaacagcgctggaggcggcaacggacaatggtctttcaaataaacctgttgtacatgaacaaacattatatcatgcgctgaccgtgccaaacgaaccagcgaagtcattgcataattgttacactaactatattcaatgtacctgaacaaaatgatttccaaacacgtgaccgacacatatgatgcggtggccagaagagtcaggtggtggttgacttctaagaaggaaaaatgtcatgctttgttgttgggacaacgatacaaggattacgttataccgcgaagcaatcacatat

SEQ ID NO: 290775 - DNA, 289 bp, Glycine max
cacaaaataaagccggacgacagagcccactaaagaaataattccatctttgttcttttcttgtttcaatgcatgcaagcagatttgtgcattaaattggccagtcttttgtgcccaattgaatacatgcatggcttttggaccacactgtcaatcccttgcacttgcaggcatgtaaaactggtgcgtataattcatgtgtttgtcgctttgcagtgactggataatcgaataagaacattattaatttagttgatggcactgatcatacagttcttatttattcatg

SEQ ID NO: 290776 - DNA, 222 bp, Glycine max
aaagggcagaagccaagagcacccacacagaaagccagcgcacccagcagaatatggtaacggacaaaaaaaccccccggggaacacacaagaaacaaatgagcagcgcccccgaagaagcttcatccacactcacacgactgagcacccagcgcctccctataggatcaaacacgcaacactacaacgtgacccctacataggccacacagcgacagccga

SEQ ID NO: 290777 - DNA, 396 bp, Glycine max
actccgctggatgcaacatgggagagggaatttatcacgagttgatgcgctccatgaaaggcaggatcggatggataatagagaacacactgaagataacaggaggagaagagggaatgatggtgttcctaaacaaaaccgaattgatggtattaaactcaacattcctccatttaaaggaaagaatgatccggaggcctacttggagtgggagatgaaaatagagcatgttttctcatgcaacaactatgatgaggaccagaatgtgaatcttgccgccacggatttttccgactatgctcttgtgtggtggaacaagctaccaaacgagagagcaagaaatgaagagccaatggttgatacatggacggagatgataaatatcatgacgaagcg

SEQ ID NO: 290778 - DNA, 366 bp, Glycine max
  unsure (1)..(366): unsure at all n locations
agctttgtttatttggtcttcgccagtgaaaggatcgatgtgggtctgaaaaaaggcaaatttgatcatcctactaggacgactgagaaaactggggcaaataaagagggtgaggatgagggagaaacccatgctgtgactgccattcctgtacggccaagtttcccaccaaacccaacaatgtcattactcagtcaataacaaacctcctccttacccaccacccagttatccacaaaggccatccctaaatcaaccacaaagcctatctatcgcacttccaatgacgaacaccacctttggcacaaaccanaaaaacaccaacaaaaaggaattttgcagcanaaagcctgtagggttcacccc

SEQ ID NO: 290779 - DNA, 417 bp, Glycine max
tcttgttttcacgacctcgtagtgaggattaatgaaagttgcagttgattcttgcaaaaagaattttccaaggacgagaaatagttgaaggatctttcagttgatggattaagtcaaatgactcctatgtagaagcaagatgttttgatgttttgatgatgccaaaggatcaagtgcttccaagttttattcaaggcaagaatccaagaatccaagaaaatcaagatatatgatcaagttgatctctagaatcttagggagaagtttccaaattgaagaagcaaaaggtttgaccaaggaattctatcctttcaaattgagatttgctctctggtaatcgattaccagcagtttgaaaatgttttaattcaaatttttaaaacctgtaatcgattacataagtcttgtaattgatta

SEQ ID NO: 290780 - DNA, 372 bp, Glycine max
  unsure (1)..(372): unsure at all n locations
agcttaatggtcaagnacatggcccattcctgtgggctaagctctttaagtgagtccatgctgaattcccttttattgagcatgtgatcaattcctctaagtcaaactatttgacctggccattagtaaatttaattgttgaagcttagactatgatgatgtctatatctccaacgacacagaattaagatacttaccaccactttcttccaacaatataaggaacctcctcccactatatgaggaacttaccttaaaataataggaacctctcattactatgagtagataactagaataccccctatgaaccctaaaagggaacaacacacttttgaatgtcctaggcataagtcatcttcatattgtcat

SEQ ID NO: 290781 - DNA, 338 bp, Glycine max
  unsure (1)..(338): unsure at all n locations
aataataaaattaaattgaaggaaattaatatactaagattnaacgataaaaattgtgaatgcatttttagtttaattatttattaactctttttaattgaaaataatataatttgatttaatacatacatgttttgttccatgtaaatattaatattgngtgatgtttatatgattcatgaggtgtgataacatgtcgcattatgattataacattgtgattgagattgggtgaatgtaataaattgagtatgtgttgaattgtaagatacatgtgtaatgagatcttgtacgcattgagttatgagctatgaactgtacaatcacacaactttaat

SEQ ID NO: 290782 - DNA, 299 bp, Glycine max
ttagttttgtatgaggaagcgttgaaaggtgaaacttcctgctgttattgctgaccacagagtggtacctggagatatgtcacgggggccacgagaccttggggacgtcaggtggggtgctattgcccaaaaccaaacttgaccaatcccgacccatccctggcatagtcggtcagtgcgaacctgtgatgtacctaaacaggcgagctcctggctgtcaacagatacaaggaacaaagaccacagagcaacgaggcttgtggtggctggccagctgtgaattttgtgtaatatgtgga

SEQ ID NO: 290783 - DNA, 405 bp, Glycine max
gtgtaatcgattaatttcatacaagttataactctgtgtgcttaaaacaatctgtgtgatcgattacgattatgctattcatgattaaaacagaaagtgttgacttctgaaaaaattttattttcactcacacatgatgatgcatgatgcacaaatgatatgatatagactaagatgcaccattcaatataacaaccaatacaaaagccactctagatagttggacatgtaaaagacaaaacttcttcaagctcttcttcaagctgtaagattaagtcttcatgttgctcatgttgctccccctatatctaacacctccaaagtcgcactcttgtttaatagcttcacatctcatcgctgctttctctaatttccttctcataggcctaattcggtgcagctctc

SEQ ID NO: 290784 - DNA, 358 bp, Glycine max
  unsure (1)..(358): unsure at all n locations
caactctcccatttagaggaagcttttggagaaagaggagaccatatttttcttcttcttccaagttttaccaagttttcttgagcccttcttccatcaagcttaagtaagtgacctccattttcaactctaaacttgattttcacttcattntcttgctctattctcacttgtagtttcaaaatcttatttttcactcttgaaggttggaaacttgaatctgaactcccactcttttccttctaaattttgttgagtctacaagggataaggggagtctctccaattattgaaccatatgcttgttgttgaacttgcttgaacatgttgatttgaaattttcgagcttgctgtcatg

SEQ ID NO: 290785 - DNA, 402 bp, Glycine max
tgaaggtgcgtaccctcaccattttatatagaaatctctggtaatgtgtctactattattatgatcatctctttatccgtcattggaggtgccacttgagcttgctaggtctctccacctttgggcttattatttgaaagattcgtgcccctttttgtacatgttctgtagttgtatcctatccagagccatatcagaattgtactgatattgcctaacgatggcaaacattaggtctttccaagaatggattcaggaaggttccaagttagtttaccaggtaccccagtaagactttcttggaagaaatgtatcagcagttcctcatcttttgcgtatgcccccatcttccaacaatacacctttagatggttcttggggcaagtagtccccttgtacttg

SEQ ID NO: 290786 - DNA, 374 bp, Glycine max
agcttgaagtgagaatgtgtgttaagtcagtcttcctacttttatttgttgaccatagagtggtacctggagatatgtcgcgggagtcaggagaccttggggacgtcaggtggggtgctattgcccaaaaccaagcttgatcaatcctgacccaacccgggcatagtcagtcagtgagaacctgtgacgtacctaaacaggcgagctcctggtagtcaaccaataaaagaacaaagaccacaaagcaaggaggcttgtgtggtggctggccagctatggatcttgagtgatatctagaatatggcctctggtaatcgattaccaagggtgtgtaatcgattacaaggcttaaaaatgaagacagaaagttaata

SEQ ID NO: 290787 - DNA, 418 bp, Glycine max
agctcgaatcggacatccgtgtgaaaagttatgagcatttgtttttctcaagagcttccattgttcaatttcgagcatctcgatatattataagcctgaatcggacattcgtgtgaaaagttatgaccatttgaatttctcaagaggttccgttgttcaatttcgagcctctcgacatcttatacgcccgaatcgaacatccgtgtgaaaagttatgaccatttgaatttgcaagagtttccgatgtttaatttcgagcgtatcgatatattataagcctgaaacggacattcgtataaaaagttatgaccatttgaatttctcaagagcttccgctgttcatttcgagccttcgacatattatgcgcccgaatcggacatccgtgtgaaaagatatgaccatttgaatttcgcgaga

SEQ ID NO: 290788 - DNA, 383 bp, Glycine max
  unsure (1)..(383): unsure at all n locations
atcttcaacttcaattatgagttgagcaggtaaaaaagattcgtcttcaaactcttagaggtgactctgagtgtttgtttatggaggagtccgagtcaatttatgattatttttctcgagtattggccgtagtcaatcaacttaaaagaaatggtgaagatgttgatgaggtgaaggttatggaaaaaatacttcgaactttaaatccaagttttgacttcattgttaccaacattgaagaaaacaaggatttaaagaccatgactattgagcaactcatgggttccttacaagcacacgaagaanaacaaaagagaaaaattaaacaaaaggaggctacggagcaactactacaactcaacgtanaggaagcaaactatgcc

SEQ ID NO: 290789 - DNA, 388 bp, Glycine max
acatgaacacactttacatgactctggaacttattgattgcatggatgcttctaaccagattataacaagggtacaagggtgaagagagcaacagccattattcactagatttgtaccaacttgggaatcaaaataaattctgatccgtctatgtcttctatcccaaaccatttgaagaacaagcaaatatggcccattactctgctgccaaattcgtacatataccaagctttgccgcaaatccacaaataaagcacttattagtgtgtttgttgacgtttaaactgttttcctttaaaagaaagtaattttctgttttaatttgagaaaaaaaatatctgcttataaataaaacattttttaagaagtatttttctaacattactt

SEQ ID NO: 290790 - DNA, 383 bp, Glycine max
  unsure (1)..(383): unsure at all n locations
agctttggttaaagttttcagttctcctgagcgagctaggttacttttggaggaagcaagtagcttacctgggcaagctactatgcaacctcctcccctcatttcctatatataggcgtgagggggcgactgaggagaagggtccaacacctaaaataaagagattttgagtgaaattagtgagaagaaggagaaagaagaagaaaaaacaaggccgagacgctttcgtaacgtttctgtgattgttctccatcgttcttcgtctgttcttcgttcgttctttattcatcgaccggttagtctttatttttgaagctntgaattcattctatgcacccttaggggtccatccttgctttgatatcttcatcttcattcttcta

SEQ ID NO: 290791 - DNA, 422 bp, Glycine max
  unsure (1)..(422): unsure at all n locations
caagcttgcctcanagaggtccaggaaggacaaggcggccgaatgaactagtttcgccccggagttcgacagtcaccgctttaggagcattgtgcaccagcagcgcttcgaagccatcaagggatggtcgtttctccgggagcgacgcgtccagctcagggacgacgagtatactgatttccaggaggaaatagggcgccggcggtggccaccactggttacccccatggccaagttcgatccagaaatagtccttgagttttatgccaatgcttggccaacagaggagggcgtgcgtgacatgagatcctaggttaggggtcagtggatcccgttcgatgccgacgctatcagccagctcctgggatatccgatggtattggaagagggccaggaatgcgagtatggccagaggaggaacc

SEQ ID NO: 290792 - DNA, 383 bp, Glycine max
  unsure (1)..(383): unsure at all n locations
tagctttatnaggcatagttgttatcctccgactgatccctagagtgtatcccgtatcatcatttttagcactttataactttatgtttcttagcatttcagacttcatgcctatggttatttaggctttggtacattttaatttttgttacattacctttaaactattctgtttgaatgtttaggacttggtactttcaattattattaatctttttatggcactactatattatttgtttaggacttggaactttaaattatttgaagtcttgtgtatggtttttctactccttccttgtttttgatgttgccaaagggggagaaatagctaaaaggtaaggcgatttttttgttggaattatttgaacatatattctgaa

SEQ ID NO: 290793 - DNA, 398 bp, Glycine max
tgaaccaaaactggtgagagtgtgatcttacactgtgtgtgaacgtttatctatgagtaataatctttgcatgaatctctgaattttagaatgaaatgtataaatgaggacatgatgaaggctatgattgtgcatatacaagccttttgaacaaaaagcttaccttgaattataattgtatcctctgcaccctttatgagctgaatgatattgtcaaaaatttgaaccctgaacttaaataattatctctagataccttgtttagattctaggagagcatatggttcaaggaaaatttactccaactttgggggagtggaactaatttggatgcaaagaaagagataaagcatcagcacacacaacacataagttgtgtgttaaaaaaagaagaaaag

SEQ ID NO: 290794 - DNA, 386 bp, Glycine max
agcttcttgcgtagcctctctttgtgctcagaaaatcccaaaaacaaatccctcttattactagctattttgaattctttagttcctgaatgtacaaccttcaaattgttgctcgttcccctctttcttttttgcaaaaaagaaaatcaatatcaaagaaaacatggatgaagtcataaggatgccatgtacatgtgtatttctgaagatatagtatttatattccatcaagcatacattgactgttgattacatgtaatagactttttataacatggttgccccaagtcacaattaaaaagcacaactaccaatctttcggagtcctttggttaatttgtcttgtctccttatgtggtggggatgtgtataataatattatactt

SEQ ID NO: 290795 - DNA, 427 bp, Glycine max
  unsure (1)..(427): unsure at all n locations
agctcncaacttacttccaatgaacaaccttcttgttacattatttgaaatctttgaaggtaatttaattgtcaattacaaaagtacataaaggtcctcaattttggtggttgctctctctttgatgattcactcaatttggagtgcttcttagttcaatagcttttaaggtggttggcccctcgcttcttgattgaaattcttcaatggatgacatcaatcctcctttccaattccctatatggaaactcacaaacaagaaaacaaagagacaaacaataaccaaagaccaaaaaattaaatgaaagctaaaccaataaatttttaacaagaaaaattttcaaggattattcgacaattaaagcaatgaaaaggacatagaagcaagctaggactcaaagagaaacttagaatgactctagagtag

SEQ ID NO: 290796 - DNA, 351 bp, Glycine max
  unsure (1)..(351): unsure at all n locations
agttcntgttgtcnncaagcaaatgttggaagagggtgtaacgcctagtgctccaacttttgtgagtgttatagatgcctgtgcacaggatgcgcttatacgaagaggtaaacaggtgcatggtcaaattattaaaggtgacaaaagtggtaacttgtttaatgtgtatgtgtgtaatgctttgattgacatgtatgctaagtgtggagatatgaaatcagctgaaaatttgttcgagatggctcctatgagggatgtggtaacttggaacacattgattactgggtttgcacaaaatggccatggagaggagtcactggctgttttcacaaagatgatagaagccaaagt

SEQ ID NO: 290797 - DNA, 521 bp, Glycine max
  unsure (1)..(521): unsure at all n locations
accccacccctccccgccccggggaacgggcaataaactgtcgcatccncccnncccacncccggcgcgttgaccttgagcctggcataccggaccnacaccaccggccacgagagaaaagaaagagcacacttctcnacatctttgcnancatagcttagccagagacgatgctatctaaatgttagcctaggcagatcgtattctatatagattctaatcgtccagatttatgcatgctagcggatcatatccagactttattcgatttcatttacgggctctgacttataatagaactggaagctttggggctgaggatctatataacagcacccatgttctagtgtagagagtttcttctttcggagagaagaactattgtaggaattgacgaattcaatgtttatcactgcgcatgcccactattcacgtagaatacaagtcactttctgggaagcatcttttatccatacattttttaatactatgctctttgtaatctcctgtggagtactggn

SEQ ID NO: 290798 - DNA, 371 bp, Glycine max
agctttgttcctcatcgggctttgctattaaaggtcttgaacgaagctcatgtagctcgagacatctccgtagaaggctttgggggactcgtcaataacatcaccgccaacgactatctcgcctttgctgaagaagaaatccccgccgaggggagagggcataacagggctttccatgtgtcagtcaaatgcatggaccacgtcgtggccaaggtactcatcgataacggttccaatttaaacgtgatgcccaaaagcacgttggagaaatttccgtttaacgcttcccatcaaaggccaagttccatggtggtccgtgccttcaacggaagccgccgagaggtgaggggagagattgacctccctgtgca

SEQ ID NO: 290799 - DNA, 359 bp, Glycine max
  unsure (1)..(359): unsure at all n locations
aatcattacaaacaaaggccatacaggacttntgatggcacgagtgtcaacatgcactttattaaataatcatattggagtcgagctattttatgacacatacgtatttgcacacattacaaaatcatgtgtgaagcattctacgacacctatccatgtacatattttattgacaaacctttccatgctacatcctatatatatacacacattttttttggaaggcttgttttggtacctactcgacaatacacatattttgaaaaaaaacgtttacgctacccattcaacactntgtgaggcacttcatgctatatatattcatagtatgcanggcattttcatgctatatatataca

SEQ ID NO: 290800 - DNA, 366 bp, Glycine max
  unsure (1)..(366): unsure at all n locations
agctcgngtgaagaganagagagacaaagactcagaaattgttttgcaattgtctatccactaagcacagaccttgcgctaagtgctcagacttcacgttctaagccgagcttgctggcgctaagcgcacaaacccctgattggttggctgaatagttcagctaagcgcacatcactgcgcgaagccctacatcttcacgataattgaaccttaaccagtgggcttagcgtggatgatgtgctcagtgccacttcttctctggaaaatttttattggagcagcgctaagcgcgctatcctgcactaagccctagatccattctgtaacttgagtttgtaagctgggcttaatggggcaagaagtgc

SEQ ID NO: 290801 - DNA, 406 bp, Glycine max
gaaactcagcttacaaatgtttgaatccagcccatttgtacattattcaaatctagataagataagataggagctatattaaataatatctagatgagaaatgcaaatctagataagataagataagatctagatcaaataatatctagatgagaaattcaaatctagataagatatgataaagataagatatgataagatctaattttgtagaataaaatagtctgccctcttcaagtccaagctcaattctggattcaagcccaagcccaattctggattcaaacctgtcataccctaattacgtccggggacctttgcttgatgacatgcgacctttctttggtccttgagaggcgcttgacatccatcattgggcaatttgtgaaattccaggacatgccga

SEQ ID NO: 290802 - DNA, 379 bp, Glycine max
  unsure (1)..(379): unsure at all n locations
tctgcangcaagcttggataactnnnnnnangggagatngatgcatattttactaattatgttaaaattttgttttctcttcttctgcattgtagttaaattaaactattatgtgaaagtttggtccatctgtgtttcagccctgcttcaattactttctgggtgtagagctatcaaggtcaatggaatctatttaggaatattgtttaacttctacatgattaagttattacaaatttgcactgtttgattgtttaaagaagggatatatatggtgcttgngagcaatatcttggactggaacacgatgacagtgctccaaaaaagtcctatgcagtcaaccaggtaaatattgaggattagtttctttctttccttt

SEQ ID NO: 290803 - DNA, 414 bp, Glycine max
  unsure (1)..(414): unsure at all n locations
ctaagcttgtggaagccttgagcaacaaactgttgggtttttggcaagctttgaagacccagccatcgtaaaaaaaaaaggtatgatttatcattgttttgtttgcagtagtggccatgctctaacgagtgcgtaccaaagttatcttcagttgatctaacatgttttgtctgtggagcattgattcttcaagggaatgaatggtggtggacccttgaacgtagtcaagaagggaaggttgatctcgacaatacaaagcacgaaagggctaatgttgatggccgaatggtaggaagaattgtaccaatatttgacgaggtgaaggtacttgtaccaagatcatggatgttctccaacaaaacatctcaattaaacctcanaactgcgattagtgacttcagtttggttgtctaa

SEQ ID NO: 290804 - DNA, 387 bp, Glycine max
tttgcatgcaagtttgtgaggatgctttaatggaggaaaagaaagagagaaggggggagcacgaaattgaaggaataaaagagggaaagaagtggaactttgaagtgtatctcataagactttcattcatcaaagttaaaacaagtgttacacatgcttctatttatagactaggtagcttccttgagaagctttcttgagaaaacttccttgagaagcttctttgagaagctagagcttagctacacacacccctctcataactaagctcacctccttgagaagcttccttaagaagattcctaaagaagctagagctacacacctttctaatagttaagctcacctccttgagatgagaagctagagcttagctacacaccccta

SEQ ID NO: 290805 - DNA, 406 bp, Glycine max
tcttttctggaaaattccttccctgattggtgttctttatggtattatgtgttggagtttgatattggatgtgttgtgggtggatgttgtggccgatttaagggtggcctttgttgttgactgggtgttcttggttggtgggtggtgggtaatgggcaggactgacattggcagagtattgatattgcttggaagaatattgcgtcatatgattataatgggctagtggaaagttttgccacttgggaactgcaaccactacatgaggttctccctttttcttcctttcgcaattcctcccaactgtcgcattgtcatgaattacttgaatatggttatttatgttgatactagcttatttattgttgaagcatgtatgtctctgcattagtttatggatatcttg

SEQ ID NO: 290806 - DNA, 336 bp, Glycine max
  unsure (1)..(336): unsure at all n locations
ggaaaccaagggggatgaaaantatatnancaattnngccagncgttaatgttgaatcatagntttgctctctcatctgccctttgtctcatctctttaccttacaacttagtcaattctatcattaccctttttcaatatgcagaatcagcaacatgcaaacatatctaatccagcaaatgccaccatcaatagccacgctatggtccagaaccaacaaaatgcctcatgtcccatttctttcatcttctaaatttattgtagcttctgcagatttaaaagaagcatccggttcttcatttcaacatgaatctactgtttagttcataattcact

SEQ ID NO: 290807 - DNA, 235 bp, Glycine max
  unsure (1)..(235): unsure at all n locations
tggcnttgaaataaaaatntgtaggtgtngcaagggtttgtggttagtgcttatntgntgagaaanatatagaactttgntnttatatgcagcaacctgcagcaattgaccagcctgaagcttactgctgccatatttacaatagacctcctcaacctcagcagcaaaatcaaccacagcagaaccattgtgacctttcccgcgacagatacaaccctggatggacgaatcaccc

SEQ ID NO: 290808 - DNA, 392 bp, Glycine max
taatctgatcatttttatatcatttttacaggcctattcttgttaaccatggcgagattatgatgacgcttacgagcgcacggtgcctaactcatgaactaggtccagagaactagagggcacacttgatactaccatgcttccactcaatgacgttaactgttcacacacatgaacgatacaggtgaaagactgggacacattcggaaagcaaccaagagcagtagctactggtcatgggagacttaagaaccacttggaacatgtttctgaggagacatcaggggccagtactaaagcagaaggactgaagaaagacatgataaagatcattgaccttcctcaaacagacacgggaaattccttggcatagatgatatacaaggtccaca

SEQ ID NO: 290809 - DNA, 387 bp, Glycine max
agcttctatcttcattattagttatgaatacaagcatcttgctctttcctatttttttttaatcctaaattagattagagaccacgaccgtccatcaatctatttggtcaaaaattaatttcactcaagttaatagttcaatatgttttttatgctaactctttttggttctcaaacttagtaatgacttaaggaaaaaaagttgaccattgttataagatgattttaagtagccaaatttaggcaccccatccatgtgctggggtttagccttctgttccttaataaaattattttctcattaaaataaataaagtcatgtgaatgttagttaataaattgagataatatttttagagaattataatatttaatattattaatata

SEQ ID NO: 290810 - DNA, 403 bp, Glycine max
tatcagaaaccttttggagatttgaccaatccattgatcccttggtatatgattcggtctgtgtttcaataaggtatgtttagtcttatactttgtgaaatacatactccttaaatcacatttgtagtctttccatttctttccaagtgattttttgacaaattccacaccacgttccgggatcgagaacttcttctacaaaaacacaacaagctgtaacaatgtcataccatgcatgataaaaataaatgaaaattaccacattaagaaaagttatttcataccctcacaagatccaccaatttatttttttcttctttgtcaaaacatctccaatcgtctatgtttaaaggtgctaactctggatttctagctataatgcctagaaagctagcaagctttc

SEQ ID NO: 290811 - DNA, 385 bp, Glycine max
agcttggaacgtgcaattcggtggctgacaccctttctcacatccttgacccttagatttcaccatatgtcactttatccatgttgaacttcacattcttagatcagttgcaacagactttgctagctagttctaagttttgtttcttctccaacaaatttaggtaaacctcacttcccataagaatatcagcattagttgcaaactcattttttaaaggcaaaatatggttgaactctaacaacccattttagaccattttgttggaaaagttccataaaactccattgggtgggcacttgggtgtagctaagacatcccataagctgcaacaaaagttcttttggaccaacatgcgtcatgatgttaaactctatgttacaaa

SEQ ID NO: 290812 - DNA, 472 bp, Glycine max
  unsure (1)..(472): unsure at all n locations
cttccccatgaacccttcgatnctgtggactatcgaatactcaagctagtcttgcgcagaattagggtagaggatttagcatgtttacagaattccagagcaagtataccatagtgctaattttgagataaaagctctggaggcagcaagaggagcaattttgcggagaagcctagggttcttcaattagagagagattagtgagctatagagtgattgtgaggtgctgagaagaggagggatcccccttcttgtgtaaggaacaattattttgtactgttaatctcatttgtgttagggtttttctgtaatggctggctaaacacccttgttggggatttctaaggaacaactgatgtaattattttaatatctaattaattgtgtttgatgtgtttagtgcttctttcaatgcttaatttcgtcatgctcttagtttgatcacccatttgtgtgtacagttaggtgactt

SEQ ID NO: 290813 - DNA, 240 bp, Glycine max
  unsure (1)..(240): unsure at all n locations
aacgggaagaagagggcggggaaaaagcacaacaaaaccccccgccaacgagagaaagaaacaaacccagcacaggagcaaggcgccacaaaccaaacagaaaacgaacagaagggccaaaaaaaaagcaccaccaggcaaggacacgacaaaaacaggcagacacngcacacaaaagcacaagaagacaaaaggacaaagcagaacagcggaggcaccccaaaggcggaaccgcaacac

SEQ ID NO: 290814 - DNA, 410 bp, Glycine max
  unsure (1)..(410): unsure at all n locations
agcaattcttagagaatcggcatgatatgcgctctaaatacaatatccgngcnattttagacgcngcatgtaacttgatggctaaggtgccaatgacaagaaataaaatgattttgctcaacattcaaaatgatgtggcacaatatctcgagatgtgctacaaggatgcatctcggctttggcatattcaatttgggcatcttaattttggaggattatagtttctctccaagatagaaatagtgagaggattgtcttgcaatagtcaccttgatcaagtgtgtgaaggatgtctacttggcaagcaatttaagaaaaacatttcaaaggagtctaactcaagagctaaaaaattgttggaacttatgcatatagatgtgtgcagttctatccagccgtagtcacatgga

SEQ ID NO: 290815 - DNA, 383 bp, Glycine max
  unsure (1)..(383): unsure at all n locations
agtttctaatgngnncataatgattgcagaagcatacttagttctcccgaaatcctcctgcaaaaactgcagcataatgtcttgtgggtctgtggttctgaagaagcttggtaaatctcaacaaaatttctttgacgccaggtaaccaatcgatggcagtctccaaatagccatttgttatatcagtcgactctgcaagcataggcatgcaataaattgagtgcatttatgaattcatgttatatggaaaatcacgttgcaacatcagttagtataatatttatagatatcgtctttaatttcatgttaagaaattgattttgaatacacggtcaattttgagttcaacaaaaaaaaaacatcaaaaaataaattactttact

SEQ ID NO: 290816 - DNA, 376 bp, Glycine max
  unsure (1)..(376): unsure at all n locations
aacaggatcagtatattcattgacttagattgtatgatgaattcgttgtacgtgacatattatggagtgatcctgatgcagtcaaattaagcaatgcctataatttggtatttttgatagacaatacctacaaaacaaacaggcacatgtcaccattacttgatattgttggtgtgacaccaacaaggatgacatcatctgttgcttttacctatttggagggagaacatctgaataatgttgttagggctctacaacggtttcaaggtctttntcttagacgtgatgcagtcctttgagttattgttaccaacaaagatctaacattgatgaatgtatcgaaaaatgcattccctaaggttaccaattagttgtg

SEQ ID NO: 290817 - DNA, 378 bp, Glycine max
  unsure (1)..(378): unsure at all n locations
agcttgtgggatngagtttagtttcaaaatccgtgcctcctccaaagcgaacagggtggattggaagaggaaattgtcacatggaaaaggccaccatagatctgaagcgcgatggaaaggatctgaacggtcgcgttcatcaactcccctgctgcgtcaagcacgactgtcccgcctccgtttcccactatttcaaaccctaacacaaatgtgttggggaagacgagggtttaccgttacaagaggctcattttagaggcaggttactccaaggaacaacactccctcttccgcacggttactctggtacgctatgcctctctcaacacacgcatgtcagtgaatgttatctgctcctatgtatatgtgtgtgtatgc

SEQ ID NO: 290818 - DNA, 428 bp, Glycine max
  unsure (1)..(428): unsure at all n locations
catctaagcttcaacgatgaaacaaggctcacttacagtgactgagtttttcactcgtctacgtgtaatttgggatgagattgagaactttagacccgatcccatctgttcctgtaatatcaggtgttcctgcaacgcattcaccattatcgcgcaacggaagctcgaggatagagccatgcagttcctacgaggcctgaaggaacaatatgctaatattcgttctcatgttctcctcgtggatcccatacccgctatctccaaaatattctcctatgtagctcaacaggaaaggcaactactgggtaacaccgaaccaggtattaacttcgaacccaaagatatctccattaacgctgctaagaccgtntgcgatttctgtggacgcattggtcatgtggaaagcgcgtgttataagaagcatggag

SEQ ID NO: 290819 - DNA, 375 bp, Glycine max
agcttgcacttctcaaagaagtcaacaaggagatcagcagcacggtcaccatggtaagggtcaatgtggaagccagacttgccatgcacaatgatctcagcaggaccaccattgcatgtggcgaatgttggcaacccacaagtcatggcctcaaccactgtcaaaccaaaagcctcgtatatagccggctgcacgaaagctcccttggtgtcgcagatcacacggtacagctctccgttcctcacacggttcatctgagatgaaatccatctgaattgcccgttcaacttgtaggtctcgatcaggccgtacatcttcttcatctcggccttctcttccaagtccttcgactccttcctcctgtctccggcaaca

SEQ ID NO: 290820 - DNA, 346 bp, Glycine max
  unsure (1)..(346): unsure at all n locations
aactaacgctgctctaatccccgcaaaaagacgatcattccagctctaccagcgaattcttcaaatgcaagtaaccttttcccagtgtcccccacaattaattcatagtcatataacgatgccctctcagctagaatctaagattatggaaaataccaaaagcgagttagaagttgcaagaaaccaccacaaaatcgaagtcacatttcaagcatttaagtattatatatacaagtatgtaacattaacacaccttatccagcaaaggcatgttatctttctgtgctntatgtgtatgtgagaggaaagcataagctctatctggtaatatcatctacagctgcac

SEQ ID NO: 290821 - DNA, 376 bp, Glycine max
agctcccttcttgtgagtgctttgtcatcaaagcccaaggtagccaacccaatcttcttctcttcactatattcatgacatgcaaagatttggtcaactttcatctcccacacaagatatgcctctgggtcatgcttcatttgaaaattaggaattttatgcttttccccttccatattatcctctttattattattttttctctctatctcttcctctttaactccctatcccatgtcgcctaagcctcatttctccttcaaataagatgaataatgcattcttgcacaaaatggttagcacaaataatataaatatggaccttaccattcaacttagtgtttcaatcaaagtccacttgtgtctctctctctct

SEQ ID NO: 290822 - DNA, 406 bp, Glycine max
  unsure (1)..(406): unsure at all n locations
ttctcaaggaagcatctcaaggaggtgatcgtagctatttaggggtgtgtgtagttaggctctagcttctcaaggaagtttctcaaggaagctttcatttagttagtgacgtatgctataaatagaagcatgtgtaacacttgtcataattttcatgaatgtgaaacttatgagatgcacttcaaagttcaacttctctcccttttattctccttcaatttcatgcccccccccctctctctcattattttcctccatttaagtttcctctctaagcttcttatccaaggtactctcttggcggtgaagctcctccttccctggcttattccctagtggatggcgcctactctcacctattctcctttatcttcagctgcatctccatggntgaaaatcaccattg

SEQ ID NO: 290823 - DNA, 419 bp, Glycine max
tgggaccgtggtcccagtctgattatcattctcgacgattttagtgggaccgtggtcccagactaataatcagaccgacgatacgagtgggaccgtggtcccagactaataatcagaccgacgatacgagtgggaccgtggtcccagtctgattatcagaccgacgatacaagtggaacagtgggcccagagagaatattcaggccagttatgctttctggcctgtaacaaaggacattaagtaaagacagataaacgtagactaaaacgtggtcgcatcagggtgctggcttttcaagttccttaagaatggcctcaattttctctatacactcagttggaacacgagacctgtccaggttaagcaccattttatcgcccttatacaatactgtcgctccaggagcaaactgatgtcg

SEQ ID NO: 290824 - DNA, 377 bp, Glycine max
  unsure (1)..(377): unsure at all n locations
ctcgacccgggatccttagagncacctttagcatgcaagctangttctatgaacggaacaaacccggagagatgacggaaacatgaaccgcacaccaaaaagaagagcgagtccaaagacttcacagatcgaaataagggtaaattaaacaactgagttagcggcttaacttataaaaatcattggctgatgtacgaaaataatactaagtattgacatgtaagaagaagagtgctatgagtacactatagactggaactagtctctttaaccatgatgctccactgcgtctcagtgatatcttaatgatacttatgacaatacaaatttgaagcgagagtatgaagtatagttaaagatggggtagtatctggcta

SEQ ID NO: 290825 - DNA, 298 bp, Glycine max
ctactatctgtattgcgttactactaaattgacctagactattggtataaaatataaatgaccattaggtatgtgctatgttggacatatcaatatcaacctcctgtcatgttgacctacgggtctcaattcctcctttctcagcctctaactatatcacctactataagcgtatgaggccaaaactgcttattaaacatgggctacaataccatttgcatcaggaactggttaggcctgttaattctgcaatcatttccaatacagaagatatacccaaatgctaacatgatttgat

SEQ ID NO: 290826 - DNA, 378 bp, Glycine max
  unsure (1)..(378): unsure at all n locations
agcttgtatatgaagcttgcagaggaagttagagaaagaaagagatgaaggaagcaatgaattgcatagaatgaatcaacttacaaagttagtcatattagtttgttatatagttagttacaagagtaactaagttataactaactcattaactcttgttacatagagattagccaactaaaataactctagttacataataatctatgctaagaacacctcatttgggttttgtatttactcatggctacggttagcatgggaaaggtaaacaggtctcctatcatgaaaaaaagttgttggactatcggattttttttttttacttttgaattanaggctaggattttttttctcttttatctttgtattttctat

SEQ ID NO: 290827 - DNA, 424 bp, Glycine max
gacctataaaactcaagcttatataatcattgaaatcaagctttgtgccaatctcttattaaccaatgtgagattcttttaacacataaactaaatctttatctaactcttgatcttagtttcttgatcttgagttaaagcttgaagcaaccttggtttttgacatcatcaagacctgtatacatacattcacaatagtgttgtttggtgtttccacttccttttgtgttgcatgtgtgttgtctaatagcttttgtgattcatgagttctttgggaagcttttcgagggagtttaaggggccaggttctaaacttgtagtcgtgttggttgacaacttagagtttattgaccttttttcaacatatactgattcggccttcttatctagtgtcgagaaggggtccgatgatgactgagtgttg

SEQ ID NO: 290828 - DNA, 375 bp, Glycine max
tctagtcttcttcacatagtccgcctttgcttgaccttctttatgcttaaaaacagaaacattaggcataggcaaaagatcaagaggagttagtgggttaaaaccataaacaacttcaaaaggagaacaattagtggtgctatgaacagctctattgtaagcaaattcaacatggggtaaacaagcttcccaagtttttaagttcttcctcaaaactgtcctaagcaaagttcccaaagtcctattaacaacttccgtttgcccatcggtttgtgggtgacaagtggttgaaaataacaatttagtgcccaacttgctccacaaagtcctccaaaaatggcttaagaacttagagtccctatcactaacaatgct

SEQ ID NO: 290829 - DNA, 478 bp, Glycine max
  unsure (1)..(478): unsure at all n locations
natgaccccctactgagacctcagattantccctcngaccnccaangaccctatngaatactccagcttataagaacaaaattgtctaaatcttattcaaagatgcgtgagaatgctgaagcatcctctaggaaaaatcccaaggaatcgtgcattcaattaatggcgtaaagcacaccataagagcatgtgtaacgatggccctaattctcacgaatgtgaacacataagttatgcacttctaaggacacctacaggaccaattgttgatccacagaacaaagacgccagacatttctattattaaatgaatcacacaatatctgaacactaacccttatatccaaagtactctcttggcggtgaagctcctccttgcctggcttattccctagtggatggcgcctactctcacctattctgctttatcttcagctgcatatccatggttgaagatcaccattgagagacctcattn

SEQ ID NO: 290830 - DNA, 416 bp, Glycine max
  unsure (1)..(416): unsure at all n locations
gcaattcagctcgtacccgggatccttagagttttctgcggcatgttatttgctgcactntgaaatgccatgcaatatcttgagagctgtagctggtatatcaaatcctgatcgacttccaacaaagattaatttaattttatggtgggttaattgtggctgccaatagttggattaatttgatccatctctttatatactatctgaaatgtaggtgtgaattcaagaataaccatggtaattgggttcgtgaagtcaaacctaatttatgtcctgaaattgcattaagtgtggaaaaagccttagagacaaacaaatgaagagaaagttaattggtatttgtcattctataaataagaaactgcgagattcttttactgatcttcttgnggtgttatttctctctgtcatacaca

SEQ ID NO: 290831 - DNA, 403 bp, Glycine max
tactaccacattcattggactaaatccatttcaagattacattgttgtgtcctgagacaaaaagcatgggaaagctatattcaggaaaaaaaaattctttccaaaaaagttatagaaaaagaaaaaatcaagttccacaatatgctaatctggacatgtaagtgaagaccaatgcctagtttggattaacttgtgggaattttttaattaagaaaccctactattattatttttcaaaggcaataatgccaagttttgataaatttactggtgcttatgaacaatttggacaagggagcttctgaaaaattatagttgcataagttttttttttaggtttaattacacatttagtttctatagtttttaaacttgtcccttttagtccctatagataataagt

SEQ ID NO: 290832 - DNA, 414 bp, Glycine max
  unsure (1)..(414): unsure at all n locations
gcccataattgtcatcccttcttcaagaatcccttttatttctgaattgcnngnattcatatatcaaatttgttgtcttattgaacttttctgcaacacttgcccaactaagcttagtgaaatggctgtgaggtttatatccaacattcacctcttctatgcacactntcaacataatctcaatatttatatcataccatcttgctttctttcttttcacaggaacttgattgagagacatttctcanacttaatgaagcacacaaaagcataaccctaatccataacaattcaaaatttaatgagaagaaaaagacattaatgaaaaattggttaacccgtgatgttaataaaggaagacgaacagatgctgaaggatgatctgaagagaaattgaaaatggaagagagactg

SEQ ID NO: 290833 - DNA, 430 bp, Glycine max
tcaagaacatgaaatggaactcatgagactccatcaatatgaatagtttgataaaaaagaggaaaggaatagcactcagagcctcatcaacttttattcaagaagaaagtgacaaagaggacttgaatgaaatagaagaaggtgatgatttcataccttttgtgaagagattcaataagtttctgagaaacaaaagaaatcaaagaaaatcaaacatcaattcaaagaagaaaggagaagattcctccttagccccaaaatgctatgaatgcaatcaacctgagcacttgagatttgattgtcttgtccttaaaagaagaatggaaaaattcgacaagagagatttcatagaaaagacagcatacgtcacttgagaagacaatgacatggatccttcaggtgattcagaaaataaaatcataaatctggg

SEQ ID NO: 290834 - DNA, 343 bp, Glycine max
actttgccgacattttgttttttgcccctgtagagataaggagtagggccgatcatttgtgttggaatctcatatggtcactggtggagctttatctagccgatcgtacacgttgatacctcggatatacaacaagtggcacacaagcttttatatatatcacaatgtctctaacttgagaagttatattgagtctatcagactgagaagcttggatgagaactcgaacgagttgactaataagctaagtgaaactgacattctgataccaatgccagatgtcgtacaagatgtcacgacataacacttcagaacatgctagatctattctacagtttgctct

SEQ ID NO: 290835 - DNA, 365 bp, Glycine max
gtctcacgattgtcatgtgctcatgcaacaattgatatccttggctttacgagacatcctgccgatacaaagacaggttaaccatatctcgcctgcgctaattgttccatgctatatgtagcacactcattgatcctgtgaagtctgatgacctgtacaatgaggccgcagccatactgggccagttggacatgatattcacccctatgctttctttgacatcatgattaactcgatagagcatctgtgcagagaaaccaaacgatgagggcctgtttatctacagaggatgtacccggtagaacgatacatgaagagcgtaaaagggtacaccattaatctatatcgactacacacatccattg

SEQ ID NO: 290836 - DNA, 384 bp, Glycine max
agctttacacgtatcatttaagtgtatggaccatatcgtagccaaggtgctcatcgataatggttccagtttaaacgtgatgcctaagagcactttggagaaattaccattcaatgcctcccacctaaagccgagttcaatggtggttcgtgccttcgacggcacccgccgagaggttaggggacagatcgacctcccagtacagataggccctcacagatgccaagttaccttccaaataatggacattaaccccccctacagctgtctgttggggtgtccgtggatccactcagtgggagttgttccctctacacaccaccaaaagttgaaattcgtagtggaagggcatctggtcatcgtatcaggcgaggaagacatctt

SEQ ID NO: 290837 - DNA, 420 bp, Glycine max
ttgacttgagtcatcaagaaattataaatatgtgaccatggcatgagtttcattaatcatccttcaataagttttcacaacaagtttttacaaaactttctacctcgtttctcttcatctttcaatagaaatatttgattcatttctcaacttctttctaagagtttttgttcaaaactttctcttccaagaaaagttctttgctaaaaaacttgtgctattttttcttcttcattctcttctcccttttccaaaagaacgaagcactaaccgcctgaatgcttttgtgtctctcttctccctttgtcaaaagaacgaaggactaaccgcctcaattcttttgtgtctctcgtctgccttacaaaagattcaaaggactaaccgcctgagaattcttttgattcttcccttccccttaag

SEQ ID NO: 290838 - DNA, 386 bp, Glycine max
  unsure (1)..(386): unsure at all n locations
agctttgtgaagctcctgttttatctttacccgattttactcaaccatttgaagttgaatgtgatgctagtggagttggcattggggctgttttgatacaaaacaaaaggcctatagcttatttctcggagaaattgggaggagccagattgaactattgcacctatgacaaagagttctatgccattgtgagagctcttgatcattggaatcattatttgcgttctaatcactttatattgcattcagatcatgagtcattgaagtatatcaatgggcagcagaagttgagtccaaggcatgctaaatgggttgaatttcttcaatcttttaatttctcttcanaatacaaggatggtaagagtaatgtggtggctgatgcactt

SEQ ID NO: 290839 - DNA, 419 bp, Glycine max
tcgaccaaaatcaaatgataataactttttactcggttgtccgaatgaataccgtattatatcgagaggttcgaaattgacaacggaggctctgagaaaatccaaacgacaataactttttactcggatgtcagattgtgtcccatagtatatcgagatgctcgtaattgaaaccggatgctcgtagcaaattcaaacgacaataactttttactcggatgtccgaatgaatcccataatatatcgagacgctcgtaattgaaaacagaagctctgagcatattctaatgacaataactttttactcggatgtcagattgagtcccgtaatatatcgagacactcgtaattgaaaacagaagctctgagaaatatctaacgacaattactttttactcggatgtctgaatgaatcccgt

SEQ ID NO: 290840 - DNA, 375 bp, Glycine max
agcttgtgttataagaagcttatggtgtatttaatccaagtcagaaaataaaaaatattaattatttttcaacagtatttttctcattgaatattgttgctcctaaatattaattaattcgaaactataatataatgttttataatgaggacattttaataaatagaggggctcactaattaatttgatcttcaaacttcaagttcttgaagacgggcaacaagatcgagcaaataaagataatgttcagacaatagaatagcgccccaagcaattgcaagtaaatttggaggaaaccaacaaattcaattcatactttttttttattatttatttttatatgtataaattaaaatagttatgtacttatgttga

SEQ ID NO: 290841 - DNA, 325 bp, Glycine max
atcaagcatgaagaattcgatccaagattcgagattcaagagaagaaatcgtgaagatacaagtcgcgacttcatatagaataagttttaaaagaattcttcaaaaaccaaatagcacagttgcgttttacaaaagaacttgctcaaattttctaaagttacatagtgattactctctggtaatcaattaccagctggtagtcatcaattaccagtgaccagattggttttcaaaatgttatcaaatgatgtgtaacgttccataatgatctttagatagtgtaatcagttgcactatattaggaatcgattacgagtgaagctg

SEQ ID NO: 290842 - DNA, 376 bp, Glycine max
agcttgttatcaaagtacatgaactatgctagtagaattcattttcaggcagcaaaaagagctcttagatatgttaaaggcacaattgattttggaataagataccattatgttaaaaacttcagacttcatggttattctgatagtgattgggctggatgtgctgatgatatgagaagtacttcaggttatctttttagctttggttctggaattttctcattgtattcaaagaaacaggaagtaatagctcaatccatagcagaagcagaatatgttgttgcaactgctgcttgtaatcaagctctctagatcagaaagcttatgacagaattgcatatggaacaacaagacaatacgcaaatatttgtcgata

SEQ ID NO: 290843 - DNA, 414 bp, Glycine max
  unsure (1)..(414): unsure at all n locations
tccgcttattagtgaacaattccttctttaatttagtatatcttggaattcgctntattgcatccagcagaggtatgtttacctctacttttctaaatgtttcaaagatctctttctatgcctcttccatttttttgttggaaattgctcttggagggaatggaagagggatatgctgcttctctttagattcacctggatagaaattgttaggtaacttactctttaaatttttgtcatcatctttttctggagtagagtgaggttgggcaggttcattggtggatgaggaagatgctactggttgaggtccttgacactgctttcctgacctcaatgtaatgacactcacattnttgggattctggacagattgagaacgtaatctatcagaattctgggactgttgttgat

SEQ ID NO: 290844 - DNA, 372 bp, Glycine max
agcttgaatatgatgctctaatggaggaaagaaaagagaagggggagcacgaaattgaaggaataaaagagggagagaagtggaactttgaagtgtgtctcataagactcttcttcatcaaagttacaacaagtgttacacatgcttctatttatagactaggtagccttcttgaaaagctttcttgagaaaacttccttgagaagcttctttgagaaaacttccttgagaagctagagcttagctacacacacccctctcataactaagctcacctccttgagaagcatccttaagaagattcgtaaagaagctagagcttagctacacatacctctctaatagctaagctcacctccttgagatgagaag

SEQ ID NO: 290845 - DNA, 416 bp, Glycine max
  unsure (1)..(416): unsure at all n locations
ntacagcagattttagtaatgacccactaacctagaatttaaataacttaatgccattaacctagggaattaaaacaaactaaatggctgagtgtaactgaaattgttggcaaccaaaagtcacccccaacagccaacaagtcagccaccatttggtctcccaaaaggctgatgcctaggttgccaattgggcccttattacaacttgaactaaagcccttttagttgattaacccaaaacatatttttggtcagccaactttacaaggattgggccattatttagacaaactaaacactctaaaattgaaataaagtggtgtcatttagtcctccatttgggccatgatacaactcacaaccttggacttttctccttgaaacttgggcttgtattcaaatagtatggacagcac

SEQ ID NO: 290846 - DNA, 376 bp, Glycine max
agcttcaactattcctgtgcatttctgatggttacattatctactgacagaataacatcaccaggagctaaataaccgaacaaaggtgaggttgggggtacattcaaaacctgcctcccatgtagccaccaacatgcaataagaaagtgcatgatatacaaaatccaaacaaaatgacaagcatacaatgatttaggaaaagtaccatgggactactatcactgctgtaaaagggaaacaagatcatgggcaagaggaataatgccattccgcaagctgcacaacactagaaaatggtcgaaggtgtagaaatgcaattagcaatctagatcatttaaaaatcaaattaaaaacatacatatgcatataaatgcat

SEQ ID NO: 290847 - DNA, 180 bp, Glycine max
cctcttatatgcgtagtgatgagtgactaatctcaaagtgctttgtagtgagtgcaatgaacagccctggtctgtatcgccatgcactttcaacacccttatgtgtgctgcccaatactggcaagagtgactcgtttacttcctttaaacaccacccttggtctttcgagccactattcc

SEQ ID NO: 290848 - DNA, 377 bp, Glycine max
agcttattggattatggggcacccgtcatatgtggtactaggaggcgatcgggcgatgacacaaatcaactatcccatttccaaaagccaggcagaagctttcacaatatccaaacaattcaattccatttgtcatgaaactaccttaaacaaagaaaaacagagtggaggcataaatctttgcacaagattcattcaaattccatagagtttttcctaccctcataccttagcaaaatcctcttcgttccgattcgttaacctttggatctccttgaaaatttaactgggggttcctaatacagaaatctaaattttgaccattgggatctgctaaagaacatacaaaacacgaaatatactacctttcccgtgac

SEQ ID NO: 290849 - DNA, 420 bp, Glycine max
accgcttgagatgaggaagtgtggaagggtgagacttcctacttttatttgttgttcacagagtggtacctggagatatgtcgcgggggtcaggagaccttggggacgtcaggtggggtgctattgcccaaaaccaagcttgaccaatcctgacccaacccgggcataatcagtcagtgagaacctgtgatgtacctaaacaggcgagctcctggcagtcaaccgataaaagaacaaagaccacaaagcagggaggcttgtgtggtggctggccaactatgaatcttgagtgatatctgtgatatggcctctagtaatcgattaccaagggtgggtaatcgattacaaggcttaaaggtgaaggtaggaagctaagatggcctctggtaatcgattaccaaagggtgtaatcgattacca

SEQ ID NO: 290850 - DNA, 376 bp, Glycine max
ttctgctttatatggttacaaaccaatcaacaacaatcccttgatggcaggtgatacaacagttgaagcagtagactacaccatcaggactcgagaggaaattgcaacaattttacacaagaatctcaggaaagcacaggagaggatgcagttgtatgctaacaagaataggacaaacaaagaatttgcagtgggagattgggtatatttgaagttacatccatttaaacaacagtcaatacctaactcagcgtttcacaaattagttgcacgattttatggtccttacagaattgtagagagagtggggaaggtggcatacaagctagacttaccagctcaagctcgcatacataatgtattccacatttccttg

SEQ ID NO: 290851 - DNA, 407 bp, Glycine max
  unsure (1)..(407): unsure at all n locations
ntccaaatatgtagcaattgatctgcaaacaagtggtaaaacttcaaacagcttgctagaatctttgtcaaaacacaaaggtaacaatattactaaaataaattctttgaaaaatggtacaattgatattcaatcaagcaaagaaaagtcaggtagtttgtctacacggtcaaaagtcaaggaaagtgataacattaatccctcttctatcaaagatggaaaacttgaaagtatttccagcagtttcagcaacatggttgtcaatataagatctggaaattctgaatacactaatgctaagggaacttgctcacatgtttcttataagccagaaatatggattctccctcaacaagttgaagatacattgactcagctgaatctttcaattgtatgcaaatggacta

SEQ ID NO: 290852 - DNA, 373 bp, Glycine max
  unsure (1)..(373): unsure at all n locations
ttagctatgtgcacctgnngagcaacccctttaccatgagtagcattgctgttctcatgcgtgcaaggcaccttccttctgtcaaacttcggtctattaacgaaaaccttctagccacctataaaaatattgttatctaggcatctttccaacccctgctcatccatcacctctttgaacctaacaaaaccgaacctatggccaagtttgtttttggttcgggggatgaagacctcccatacctttccccatttctggaaaatctgccacatatcttgctccattatcccttcagggaatctagagaaatagaaggtcgtaacatcatccttatttctctatgtcatctgctnttctttcctttggtagctgt

SEQ ID NO: 290853 - DNA, 396 bp, Glycine max
  unsure (1)..(396): unsure at all n locations
tgttggactatattttacattactgctggaaataaataacagatacaggtaagccagcaaatcccaattgtcactatatgtttttataggttttgtttttggtagttttgttgtcttgaatgtgcatacatgtnaaactgaaattatttgttgagaacattcggttgtggcttgttattgtatatttgcttatgcttttgccattatggacaataaatagttaaggtgaatatatggtggaatcgtaacaagatttagtttgtcctttgatatgccaacagtagagaccgaatgattgatttagttctactattgagcctgcagctccaatctttgaagctggatctacttctgtgcaagctaattctcctcagtcattagattagtctccttctg

SEQ ID NO: 290854 - DNA, 382 bp, Glycine max
agcttgaaggtgtgtaccccaccatttttcatagtaaaacactggtaatgtgtctactattattgtgatcatctctttctccgtcattgtaggtgccacttgagttgccaagtctctccatctttgggcatattctttgaaagatccgtgccccctttttgcacatgttctgtagttgtatcctatccggaatcatatcaaaattgtactgatactgcctaacgaaggcaaccattaggtccttccaagaatggactcgggaaggttccaagttagtgtaccaagtagcagctactccagtaagactttcttggaagaaatgtatcaacagttcctcatcttttgcgtatgcccccatcttttgacaacacatctttagatg

SEQ ID NO: 290855 - DNA, 424 bp, Glycine max
  unsure (1)..(424): unsure at all n locations
ntntgaaaagacacatttcttcaaaccattttgaaaaggcacaaaggacctatatatatgtgtgtttgacttcgaaaagcaagaaagagatattctaagagaacttcattgtcaaatgctctctcaacaactcttgggcaaacacttgcaaatctattgagagttcatctaggaacatcaaattgtattatccactctaaaggagagaaatctttttgttcatctcagaaaatcaattgtaatcaatagactggttgtctcttgaattgtgagtttcctgaacacaagggaaagggattccttaggtgttcagatgttgtaaaaaggtttttacaaagttagtgaaaatctcaagtgggttgcttgaggactggacgtangcacgggaagtaaccgaaccagtataaattgagtttgcatttct

SEQ ID NO: 290856 - DNA, 335 bp, Glycine max
agtttgtcctaactgtttgtatgatctttagagatgtcactgacctaccgtcacattattgtagatgctttctctctatattctcttgctcttatatatgaaaggtgcattcacagcccgtaacttcttttgttttctattattaagaacaaaatttgtgatgaattctttgacccttgctaccttaaataatggctaaaattaagatgatgttattctttccctttttgtatattgctattttgatatttataacagaaagaacaggccaaagttaacatggagggcgctcttgatgtcattattttgcggcatatatgggtatggataaactc

SEQ ID NO: 290857 - DNA, 401 bp, Glycine max
  unsure (1)..(401): unsure at all n locations
ttggactccttgcanagcagttccgtaaggtgtcttttatataccatttctcactagtctctttatttgcttcttatttgcttcttattcttttaataaacaagagttataataatatttgtacgtaacttattcataaccgttatccttgctgaatcatattctatcaacattatagtgtcattttgagtttgccattcacgatattgggaattggatgcaattttggttctagaattttttttatcctagcatttatctctttttttttcaatgaaaatcattgtaattttgaagtctgtcttgagaacaaatcaaattggagattaaaaaaagtcctttttttgtgttataggtattggaattattttttacctatgaattatggactaaatatgtat

SEQ ID NO: 290858 - DNA, 177 bp, Glycine max
  unsure (1)..(177): unsure at all n locations
agcttttagaaaanattgnattccctgaccnggccccnaaacgagaagagaaagcagaaaaacacgaagccaaacgccacccaacgcagaagaaaacnacacanggccaacgggccacggccgacaaagcngacacggagccccagaccaaaaaagaaccaaacaaaacaaaaaggg

SEQ ID NO: 290859 - DNA, 427 bp, Glycine max
agctctctaatccatataaaccataccatgctcttaacatgtaatattgtcttcagccatcatttggagagctagtgcaaatctttctctatttactaaatcatctatgtaacatctgtaacaatttacggacgtataatgctgccacttaacatgacatctgatgatgaaccaatttacgtaaatgctaagcagtaccatggaatcattagacgtcggcagtcccgtgccaaagctgtacttgatcacaaattgactaaacgtcgcaaggtatgattcctcatatgggggtatcccacatattttttcactcatattaatgaacattatagtctcagcttcactggccttgaaaaaaagtaggtatgatagggtggtctggcctaactcttgtagaaagtgatagattatctctttcaagcaacgc

SEQ ID NO: 290860 - DNA, 385 bp, Glycine max
  unsure (1)..(385): unsure at all n locations
agcttttgagggcacctcaaattctgangncatacgctaaactggatcccatatctacttgataattcaatggtagccataaccctagccaaggttcatcaacctccatttcttcgagaatacgactcgaacgcaacgtgtgcttgtcacggagaagccccggggcgttccattgagcatggtagggctctgaagcgtaaggtgcaaggtctaattgatgcgggctggctgaaatttgaggagaattgcgtgtaaatcctgacattgacaagagatgccacacatggggcaattttgacagttgttgttatgtgtccctaatgactcatcagggtttccaagtttatgccattattgtaaaccacagctacaatgttaaatgaaa

SEQ ID NO: 290861 - DNA, 418 bp, Glycine max
  unsure (1)..(418): unsure at all n locations
ctaagctcggtgcgttgcgcgtactcgagggaccatgaggtttntgctgtttcttgacccactcgggtgttgaagagacggcatgggcatctccttctttcctttttgcccctgtcgccccgattcttttggcattcacgtttgtggaggaaacgtaatcaaactttcctctcttcaatccaacctcgattctttccccggcaaacaccagatccgcaaagctggacggcatgtaacccactagcttctcatagtagaacactggcagagtgtctaccatcatggtgatcatctctctctcaaccatgggaggagctacttgtgccgccaaatcccttcatcgctgcgcatattctttaaaggtttcaccctctatcttgaacatattctgcaattgagtaccgtcaagagccatatc

SEQ ID NO: 290862 - DNA, 274 bp, Glycine max
  unsure (1)..(274): unsure at all n locations
gcacgcaagctcattggaataaggcgcgcccgngaaggaggaactacgaggccaacagaccatgacccaaatcaactatgccaatgacacaagccaagcagaagcgttcacaatatccaaacaaatcaatttcatccgcacagacactaccctaaactaatatgaacagagtggaggcccaaaaccatgcacaagatatattccacatccatacagtgtccactaccctcatacatgaacaaaaatctctccggtgcgacacgaataccaccgg

SEQ ID NO: 290863 - DNA, 673 bp, Glycine max
  unsure (1)..(673): unsure at all n locations
ggggaggggagcnnnnnnnnnatttgatnaccccanatttgatnnnccgatcacgctangnnnttcatnncancannatangngcnnnanngnagnntcgnagcnccangtatntcanggnngngaggangagtatacngnantngtttttgtatnnannagagatananaatanggngnngnagtatcanacaagaagnnngaganntgaggggnngaagatctntaggaggnnatggcgagacncccagagaactaacgntcgtgaggatccgtctacaccacgtgatgagcgatntcncgacntcaagtacgcgaagcaactcgttgatgtgtagttactttactcttcgcgacgatgctttctgataaggcgtccatagcccgagngtattcgctttcacaaagagcacattctgtatggcgtttcaccgctctgattacgcactactatcgacatgggactactacgacagtaacgcactagttgttggtgttctcgcaaagacctatggaagctccgaatgaccgtgatgtgcatctgctacgtttatcttctatgagcaataaggcgagtggacatttacgacattcgttcagtaggtgatcgcaaagacttcaaagaacagtatctgagatgactattgctctaaaggtgtaatctatacgaccg

SEQ ID NO: 290864 - DNA, 493 bp, Glycine max
  unsure (1)..(493): unsure at all n locations
cgcnnaacggagtnnnncattgaaccccatagcatatcctcgacactatcagaaacccacggaatactcaagctaaaggtcgctccttccactacgcgcgttttaacaattgtgtcacgaacngagtccggcgggctcgacccacatcccgttgcatcattcaagtgagggttttatggagatgacaactcacctcacctggtcgccctaggaagaacatataatggggtgaccaccatgcccaatagccctctgggcaatgatatgatgaaggcaggtgataaggaagttcaagacgttgatgctcacgacccttgtcccactgaacaggctaggctaatggggtaagcccctaacacctgccttacccatcctgcacaacctttttgaaataaaagattagctctttgtagaatcaatgactattactaaaaaaaggacccgctacaaataaagattcgactattatgaaactcacggtattatctggatc

SEQ ID NO: 290865 - DNA, 374 bp, Glycine max
agctattttattgataggcccaccagtaattgctgcaccagctagtaaataactggcacttgaagcatcaccttcaacaaaagcattgccaggagacctaataggaaacatgagtcttaatttcattgcattttggatactaaaagtgatgtaacactaaaacatagaaacctacttgtacttttgacctccatggaccaagaacctatcccaattaccactgtgttccacagaaactccaaaacgctccatcaacttcagagtcatttcaacatatggaacagaaatcagtttatcaacaatctcaatttccacatcaccaagagctaaaggagctgccataagcaaagcagtcaagtattgactgctaactg

SEQ ID NO: 290866 - DNA, 364 bp, Glycine max
  unsure (1)..(364): unsure at all n locations
ctaagctgttatgtcctcagggcttgagctttgacttctanctaantgattcttaaaaaaatcatatctttggcacttgggtatatgccttacttgggagcagccacatttttctttaaaatatgtttttctattttaaagccttataatagcatgaaattgtcagaaaatgacaatttgtggtggctttaaaaatcttaagagatcaattacaaatattttacaagatcaacgacacgattactatttttttagtttagagacctaaataaaaactcctaaatagttgagggaattaaattaaccttgaatgaacataaacaaacaacttttcacatggatatgtaaataaaaacaccaatat

SEQ ID NO: 290867 - DNA, 337 bp, Glycine max
  unsure (1)..(337): unsure at all n locations
cagggcccatgagcttgagcctgatacgcccnaaaaacncgcggaccagaaagccccgattttaaaattactgccctttggggaccaggggacttcagctcagctccccgaaagagccaaacgaacgggtacaagagagaggaatccgcgagctacagaggacagagcacattcacgaacggggccgcctccggaccagaggaatacaaaacaagcggcacgcaccggggacgagacagatggggtaggaaagccaacgggaaaacgtgcaatgtacacgcagggagggaggacggaaccgagcaaacgacagtacaggggggatccatgggagagg

SEQ ID NO: 290868 - DNA, 389 bp, Glycine max
tttgcatgcaagtttgttttgtgaggaggtgaatagcagtaaggaaatgcatctattcatcaatgtaggtcattcaaatgaaaggtctgtgggtagaaaggattgaggttgaggctgctcccacgtatgatatctaaaatggactagcataacatattcctgtgtcagagctacttatgtaaaggattattttacaaaactcaaatggtaaaaacaacattcagggggcaaatagacaaagctgatacaactggtatccacaaatagaagaattcacacaacagtacacagagacgcagagagagaaaaaggaaccagctattatctattgattactgaaaatagtgtctcagcactctcctctacaatgagtttccccaataaatacc

SEQ ID NO: 290869 - DNA, 407 bp, Glycine max
gcccttctgatccgaagaggctgacttttgcggatttcgtcgagagcttatttgacctcatcaacgtgctccatcatctcttcgaactcctgcgcctccatcagcgtccacgtagtcggaatccccttcggcggcgctcgcttcgccctcttcgactcccttgctacgcctgcgccggagccgtatccgaagtcgccgatctccgaatcgaataatgaccaatgctgcgaggaccattcctgggatgagaacgctaatccgcagaaagggtcgtcaatctcctgagataacgaatccctgactggcttcgaaacgtcgtcgattatagaggacgatcccgattacgtacccgagaggggtcctttgctgctggcgtaggcgcggacgatcattttacatggagatcg

SEQ ID NO: 290870 - DNA, 367 bp, Glycine max
agctaccctcctgtgttccccttttttggcttcccaagaagtaagaggaatgacttgactttctacattgaaagaaatgactggccaaagaactcaatttttcttcaaaagcataccccacttgatagattgtgaaggaaattacaagatcagaaacagtcaaagaagtttacctactaaagttacaataatgtgaaaaataaaaaaaatctcctcaattaccttcagatcctaagcaaaaaccaaaaagcaggtgttccaaacataacaattatcatcaagaagaaaacaaaactggtttggaagcacattccagacccgcaatgttgagaagcattcactacgaagaaaaacaaaaactcaaaga

SEQ ID NO: 290871 - DNA, 406 bp, Glycine max
tgggtctagacatgtctatagcattctcatgagctagtttatataaggagttagaaattttgtttgtctctctataaatatgagaaccttgttggattaaaataaaattggaaaataaataaagaactttaacctatatactatgtgatcaatctataaaatgataatcataacatttcaattatataatcattaagaaataagggtggacatgggttaggttgctcgggtttaaaaaatatttagatttaaccaaattaatattaatcagaaaaaaattatatagaattaaacaaacaaattatatattatagaatcatacaacataaaaaagtatattttttctaaaatggtataggcttatgttggtttgggtctccgtacctagatctgataattgaattga

SEQ ID NO: 290872 - DNA, 117 bp, Glycine max
ggaaaaccgacacgggaagcccgaaaacggcagcagaagccaagcccacccaggaacgaaggaagacgagcacagagcacccaaaaaaagcaccgacccaggcaggcacaaaacagc

SEQ ID NO: 290873 - DNA, 379 bp, Glycine max
  unsure (1)..(379): unsure at all n locations
taagagcaatntctttttttnttttatcattnnctttgtgtngatnnaatctcaacagttccatttcgtattcctgtaactttccaaatagtgtagcaagagacatgttagttaaatctcgtgactcagtaatggttgttaccttaggttgccattctctacttaaacatcttaatactttatttatgatatcttcatttggaaaaattttccctaaagatgcaagatgatttattatatgtgtaaacctcttttgcatgtcttgtatactttcatttgaattcattctaaataattcatacttatgagttaatggatttatcctagatattttcacatctgttgtgccctcatgtgttacttgtagggtatcccacat

SEQ ID NO: 290874 - DNA, 386 bp, Glycine max
  unsure (1)..(386): unsure at all n locations
agcttgttatactattatgtattatgatatgaacaaatatgttaatgttatctcattaagagataatatatataattgaactattttttttgttggaaaaataaactattttaggaaaacaaaatataacatatggtctcaaatatactatgttgtacaatagtttttcttatgtgaaggtctcattgaaaaataaatagacttcagttgaaaataactataaagtcagaaacaatcattattgaataatgtttaattgtattagatcaagaacaattgcttaaatatgcttaatttgtttaaaaaatttcaaaatttgagtctaatttgttatttgttataagttntatttttaggttaaatttaatctatctgaaagtctaact

SEQ ID NO: 290875 - DNA, 426 bp, Glycine max
  unsure (1)..(426): unsure at all n locations
ctccaaaaagaattgcaagagtcatgttagcgagatctttcgattatgcaatngtagttacctttggttgtcattgcctgcttaaacatctcaacactttgttaatgaaatcttcattatgaaatattttttctaatgatgcaagatgattaactatatgtgtaaatctcttttggatatcttgtatggtctcattttgattcattctaaacagttcatatttatgtgtgagagtatttattctagatctcttgacatcaattatgccttcatgggttacttgtagtgtatcccacatttcttttgcatttttacaatttgaaactctaaaatattcatccatgcctaatgcagaggtaattatatttttgacctttanattatattgaacccttcttctttcatcttcatcccattgttctctag

SEQ ID NO: 290876 - DNA, 386 bp, Glycine max
agcttgtatttgaatgttgatgtttattcacaaaaccaaaatcgaaattcatcttttgaagcaataatacagccaacagaatccagctaatggcataacatgcaggacggctgttaaataccattatttgcccactctgaaccagagagaactcctgctttgattttttgtatggattttgagatacacggggagagacacctctttgtgcagcctcagttgatgccatagtcacaacatgtgcagcttcgtcatcattagcatcaaacattgactttgggtttctcttattaggcaaaacataattttccctatcatcaggcttagagtcgttaactgggaaacgaggcgtccttttcgcaactggccaaggtgggatacctgat

SEQ ID NO: 290877 - DNA, 425 bp, Glycine max
tctaaacacgttaaggattgtgagtacttattcaaatttttatctattagtgcatgaggtgcacaagtgctagttgaaagttcaatgaggaaacttcttgatttgttttattcttatctcctgtaagtgttttgttaagatataggaacataagcatggttagaacacctccaagtgacagtggagacttatttttgaaggatactctacgcattcccgcaatgtcattctatttcaaatagtagtatatgtttccctactccctgttgctcaacatgattttatagcttttaagtatctttaatatagttttcaatctcagtttcttgtatcccttccttgacttgctttaatcagtgctatcaggcaccgttgttgacaaagtagttgctgaactggagtcatgcgggttccaatgtttcatt

SEQ ID NO: 290878 - DNA, 333 bp, Glycine max
gcctttgcaggataacgcaaggccttaacgcacctattcaagcgccatattgcgttctgaaaacctacattattccaataacagcaaatggagagcaacacgatatccataacaaggaaaagcactggacttgatctcaaggtcaaaaatctgaacaatcagcaatgcgtgaggagtattgcagtgagagagagagacctcgtttccaatggagtgtgtgcaatacacgtgggcacggcgggaagtatgtgagagtgaggaaagaagagtctcagcaaccaccaaaacaacaagcaaatatgattaacataacattgatgaagagcatttatt

SEQ ID NO: 290879 - DNA, 398 bp, Glycine max
atgagattctttcttggcattgtatttttgcagattccagaagggattttcttgtgtcaaagaaaatatgccactgatatcttgaagaagtttgcaatgtctgagagcaaacatgtgaaaagtccaattgttccaggttttaaaattaatagagatgttgatggtgcagctgtggatgacacttatttcaagcaaattgttggaagcttaatgtatcttacaactacaaggccagatataatgtatagtgtgagcttaattagcagatataggtcaaaaccaatagagttgcatttacaagctgctaaaagaatattaaggtatttaaacggaaccactagctacgggatattctacaagaagggaggggcagaagacttgtttgctttcacggattc

SEQ ID NO: 290880 - DNA, 385 bp, Glycine max
agcttgcaacatcagttacatgaaaaactgtctttgcagagacagagagggaaagatgtgaaaacacagttacctaggggaattttgcggtctgctccgagtcaactacactagtttggcactaggtttgatgacatgtcaacgagttacttacagaaatgatccaacaattgaatcagctcggctaagggtctggtttccgattcaaccagccgagccgagccgagtttaataacactgattgggagggttccttacttagtattgaaaatcttgctttcaatttgatagtaggtagtaaagttcttcttcatggagtatgtctcattaatattctcccgcatttcacaaatggaggtagaaaacatacaattacagcttattt

SEQ ID NO: 290881 - DNA, 424 bp, Glycine max
tgtcgggttcaacttcaattaagtgctcggggcatcctatggactgtgcgaaaaggctcaggtcatcaaatactacgcatcttttaaagcacaaagcgaggatcagaacctcaaccctacgttcttttaaaagactgcgatgggaaaattacagaggacaggaatccctgggggaaaccaagaagaacacacaaaaataaaaacatgcagcgacttccttaattgccccagatctcaagcatagtatcgcttgacaacgtcagagtttacgggtgaaggtagctccttgtcatccatgttggcgagcaccagggcccctccggagaaagccctttttacaacgaaaggcccttcgtagttcgggacccactttcctttgttgtctttcagagcttgggagactttcttcagcaccaagtcccct

SEQ ID NO: 290882 - DNA, 387 bp, Glycine max
  unsure (1)..(387): unsure at all n locations
agtatatggntaaaagctttttttttttcctcctgttatgttatgtttaaacacccagtgcactaaaatatgatttttgcgggccgagtaattggaaccacaaccttggcccaaaactaactgtatctatgaattaggggagtgcatttagcaactgcaatgttgtgaaggcttttttgagttttcttccactgcaatctgaaaacatttttcatcttgcaacgcttctctttatctcgagctcttctccacctttattttgcaatgcattagccgcattctttatgtaggagaatgtctatggagaaaatgagattacaataatgaaaaataacagttttatttgtgcctcagtacactcacaacagtaaaagagccactagctag

SEQ ID NO: 290883 - DNA, 423 bp, Glycine max
tcaggcttctgacctagccttcctcatgaaataaagtatataatatttaactgttgccggtcaccttgaaaataacagagattttcttctctttgtcctttcaaatacctgtttccaaatattaaaaccagtagaaatgtagaatccagattttttttttttggtgacgtagaatccagattataatcaaactgtgtttgtagcctgctgtaaaacttgcttggagtagccacattcaaaatagaagtgatcatttgtttcaactgctccatcacgggttacatgttgaatccatcaggcatgtaactgaactgtgggattgtttttgatgacttgaatatggttttttatgttgatacaagtttatttattgttgaagcatgtatgtctctgcattagtttacgtatatcttgtatgattac

SEQ ID NO: 290884 - DNA, 372 bp, Glycine max
  unsure (1)..(372): unsure at all n locations
agtttcttattctcagctgatgaagatgaattcgtggctacttcatgcactcctctaatgacaatagcatcatttctggcactaaattgctgggagttggaagccatcttctcaattaaatttttggctttagcaggggtcatgtctccaagggctccaccactggcagcatctatcatacttctctccatgttactgagtccttcataaaaatattggaggagaagctgctcagaaatctggtggtgaaggcaactggcacatagtttttaaatctctcccaatattcatattggctctctccactgagttgcctaatgcctganatatcatttctaatggccgtggtcctggaagcagggaaaatttttt

SEQ ID NO: 290885 - DNA, 397 bp, Glycine max
ggacctatcaatctcagctagagatgcccgagtcttcatcccttgagatgatttgaagtattggccatcagaattgccattccttggattatagggttgaaccgagctcatgctattacaataaggttcatcaagtcaggttgaaatatggaagtaaccattctgcaaacttggggcaaaagatgaatcgagtcacatcactgcttggtctactgcccaacatatttatgattatcgatgtccttgttacttacagtttcaccttgacaaagatgtcatggaccatgttgaaaatctaaattgattcaaccccatatcctgcgtaaaaattctcaatactattacatcattcgcatgcatccatgcttttcattggtggcattgatcatatgattct

SEQ ID NO: 290886 - DNA, 373 bp, Glycine max
agcttccttagaggccaacttcaggctcacgaattgcaagtccaccctcgcaaagcctccaccctacaccctcgcaaatctggttgtcgatgtagaggcatccatcggaggaagagacagtggtgcacagtgtcagggttgagccaacagaggaggtggaaggaccgacttgatgaggaggaagtcattgttggagtcctagatttggagggagagagaaagaggggaaggcgaaccacttgtcatcgaggttgtcatggaggtgagaggagggggcaagggcaagaagggttcggagtagaaatagagactgcgaagggtagagaaagagaaggaagagaggctaggatcgttggatttgagagagagagag

SEQ ID NO: 290887 - DNA, 415 bp, Glycine max
  unsure (1)..(415): unsure at all n locations
gacactatagacaactcccgcttggacgaatccgaacctaagttnctgatgtgtgtccataaaaaaccagacactatcctacttttgcgttcccttgctgtctctctctctctctctctctctctctctaatccaacgatcctagcctatcttccttcgctctctctaccgttcaccgcctctatatctactcggaacccttcatgccctagcgctacctcctctcacctccatgacaacctcgatgacaagttgtacgacttgccctctttctttctgcctccaaatctaagactccgacaatgacttcctcctcatcaagtcgggccttccacctcctctattggctcaaccctgacactgtgcaccactgtctcttgcatcgatggatgcctctacatcgacgaccagattt

SEQ ID NO: 290888 - DNA, 230 bp, Glycine max
gggtatgatgtttaattaagacctctagagcctcaaaacttgttcctggcccgaaagattatcatttgaggtaatataactactgaccataaacttatactacgagaaataagtgataccaccttcaaaagtcgaatctgatgttggaaagcaaatacatccccaatagaatcgtccgttaccacagcctaccagaacaatatatggaatgtatagcgataggatcatga

SEQ ID NO: 290889 - DNA, 196 bp, Glycine max
tacctcgtgcttcatagccttcaaaaatgcctcttaacgctcccaaaaatatcattgggtgtgaactccactcaactagcacactgctggagcaagaatgttcactttctagccatcacgatgggataacacacaaattcattgcgaggatccattatgaggagctcattttgaagaacctcatggatgaacacta

SEQ ID NO: 290890 - DNA, 375 bp, Glycine max
agcttatatgaacaaaattgcctcaatcatttccaaatatgcatgtgaattaccaagaatcaacaagaatcaagccaaggctattgtgcaagcaatcaatggggcaaaacacaccaaatgattatgatgatggatggctcaaattctcacaaaggtaaactcatcactttcaaattgagctttcaaaactatcatgacatgtagaggagaatcaaggatttcaagtcacaaaatgtcaagaacttttattttcaaaacaattacccatttcttgaacatatcctataattcaaagaaaaacatgcaaagtcgttcatgcacacaaaattgacccaaaatattaaactaaaaatccgacgaaactaacaacattaa

SEQ ID NO: 290891 - DNA, 414 bp, Glycine max
tctaaatctcagatagaagagagataattatttatgtttaattctaaatcccccataaccagctttccactaatttcctacttatcatatgaagtagaagatagttaaacattttacgtttcacaaatattaaattaaatgcatcttttaaatattttgttacaagtataaggaggattaatatgatattgttttagataatttatacacctcctagtgaagaaaatttaagtaccttgatttctattttctttattctattttcatagacggcgttgtacttatggctggagggaaattgtgatggtgaaatgtggaagagggagtgtggtttaaaattaagattcttttcgcatataattacatagagaaagttatgatatatcatgataaaatataattatattttaaact

SEQ ID NO: 290892 - DNA, 380 bp, Glycine max
  unsure (1)..(380): unsure at all n locations
agcttggacgatgtattcgatgtagatccgcgtgatgacactgctaatagaggcccaaagcctattgaagaacttttcaaactataactcagacccaaaccggggtagtatacacagctcagccgacacctcaccagccatgaacatagacacatagtcgataccttacataggaacacaaacctatttgcatggcagacatctgacatatcgggtatccaccccagcattatatgccacaagctcgccatctgtctccaggccaaattagtgtcataggagaagaggaagatgggagaagaaagacgtagattggtcagagaggaagtagataagctccttatagccaattntatccgagaagttaggtactccacttg

SEQ ID NO: 290893 - DNA, 409 bp, Glycine max
ttagacttatatctattctcaatatactacttttaatgtttcctagcatttatgtaggtttttgatttctggtgtctatagattttgtgtgaatgaatggtaaagcttaaaattttgagactagctttacatagcataataacaagctccacacttcaagcatgtacacaattcaacttatgagtagtttagttgacggtgtctagggtgcaaaagtgaaactactttcgcaccctatgaaagtttgtgcaaaaaaaaaaaagcaattggaaccgtccgattagttttaaccatatcgaatagtggagatgtgttcattgctaccggtagtaaatggatccctcgagttctatgtcagctttcctcgaaccgcgattgaaggtatggagccctcgagtttctgttctgc

SEQ ID NO: 290894 - DNA, 83 bp, Glycine max
ccgccaaggacacagcaatgaaccgaggaagagacaccgggcgccccccgataggcacgcggaccgacaggagagggaaagac

SEQ ID NO: 290895 - DNA, 351 bp, Glycine max
tattttgatgagatatgcagcttcattcgggcaatgataaatcatgtgtttatgactttatgcatgtattcataagtaaagaatctagttgaatgcaatttcctcttatagcttattagttgtgagaattagtcccttgctctgattagtttggactactggatatactggttcttttaccctgcatgttgtagcaacatgcaaagctctatctggtagaaagcctctaatggctatgacacttttctatatatttgtattaaatctttttagggttattgtggtggcagaggaggcctacggtcattaattaagtctactctttaactataattagtggttcttggggga

SEQ ID NO: 290896 - DNA, 390 bp, Glycine max
  unsure (1)..(390): unsure at all n locations
agctcggccccgggatgcttagagtttatcgcagcaatatgtctttgggcncgaaacttttctgagtgatttcaatatggagcagaatgatcgcccaaatatgtacgttgacaacaaagctttcatagctatttcccataatcctgtctttcatgggaaaactaagcattctaatatcaagttgtcctttgttagagaagtacacaaaagtggacttgttaatcttgtctactgcaaaacagataaccatgctgcagatctgttaccaagccattgccagctatcaagtttgagattctcatacagaagttaggacattggaaatcttaaagcactgagaagtgttaagaaactgcttttggactgcacgtggatcattattgtccacct

SEQ ID NO: 290897 - DNA, 311 bp, Glycine max
gacctatagaatactacagcttgagggatcatatttttccactatttacactgctctttttattgcactacatatgtgagcccactcacgggtaaaggttaagtttatcataatagcggttataaagaacatgtgtagggatccttagaggattaacttgcgatcaattttgaaatgttcattgaattataactcttctcttatgattctaaatatgatattattgtgtttgatataccaattgatgtcctgatgtgaattagataattcaattgagtgatctcggtagttctgcattttgacctatgatt

SEQ ID NO: 290898 - DNA, 388 bp, Glycine max
agctttagctctcagcttaaactcccttcacaaaatctgatttcaggcttaaataggtggccttgttcgtgctcgtgcgcttagcgcaattctgaaccgcttagcacacattagtgaatttcgacttagcgcgtgcttttctcgctcaacggatggactgaagcggtgcgcttagtgagatgaagtggtgggcgcagcgaacctgtacaactcatccttttccagattcttcctcgcgcttagccaatgagtgttgcgcttagcggatgctagctaagccagcagattggcttagcgagaaggtgaaaaatagcacttttcagagttgcataattaacctgaaattgagagaaaatgattattaaacacacaaaatggaagtactaag

SEQ ID NO: 290899 - DNA, 425 bp, Glycine max
  unsure (1)..(425): unsure at all n locations
ntgaaaaattcggctttggtcagagtctctgaagatgtgttagttacttgtgttacaagcatttacgtttagttttatgagaaatgcagtttcattcgggcaatgataaattatgtgtttatgactttatgcatgtattcataagtaaagaatctagtttaatgcaatttcctcttatagcttattagttgtgtgaattagtccctttttctgattagtttggacttttggatatagtggttcttttaccctgcatgttgtagcaacatgcaaagctctatttggttgaaaacttctaatggttatgacacttttttatttattgttattaaatttttttagggttattgtggtggcagaggaggcctatggtcattaattaagtttactttttaactntaattagtgtttcttgggggtgagac

SEQ ID NO: 290900 - DNA, 304 bp, Glycine max
agctttaaccaaaacctgtgagagtgtgatcttaaactgtgatcgaacgacttgctatgagtaataatctttgcatcaatctcttaattttagaatgaaatgtataaatgaggacatgatggaggccatgattgtgcatacacaagccttttgaccaaaaagcttaccttgaatgataactgtaccatttgcaccctttgtgagctgaatgatgttgtcaataattgaaccctgaacctaaatgattatctccagataccttgcttagattctaggagagcatatggttcaaggcaaattcacc

SEQ ID NO: 290901 - DNA, 421 bp, Glycine max
  unsure (1)..(421): unsure at all n locations
tcggtgaatctttggacaatgttgggctgagtaggtatgccattaatggccattgaacttgcaaatttgtagctcctttttcatttcagcccaacaatagtttggttcgcctgngccaaagtgtggtagggtgaagcattaagctcgagggttatttcgaaccagctagaattgtgttctggctgggccagagcttgacagaaaggagaattctctccaggggttttggcctgaccaaagttgtgttttagttgggctagactgtgacaaaatagagcattaaactccaagagtgttttagcccatcaagaggttgtgtgattgggacataaaagtgatagaagggttttagccagactagaatttgttcaattgggccaaaaatgtgatagaatgggtaacttaagtttacaggagttat

SEQ ID NO: 290902 - DNA, 388 bp, Glycine max
agctttgcctttagggcttgtacctcatcactttcttccgaagctttaacctcatcgtctctcacagtctttagatttgggagccaatccaatccttgtgttcggactctcagccacttatgatagccgccgatgatcccattactgcttcccctaagctctctgtcctttcttcacgccgcatcccatgccttgcgaactcctttgagtaccctcgcgttgtggtcaccgaaaccccgtgcgatgaaaggcgtgatgctttcgtctgatggcactcctctcatggggtagccaagctgtcttatggcgaggacgagattataattaatacaaccccttgttccatcaagggaacatttggacatccttcgcatgaagatagaatcct

SEQ ID NO: 290903 - DNA, 423 bp, Glycine max
  unsure (1)..(423): unsure at all n locations
tgtgcaaatcaaatcactcctacatctcatctctagcttgcattttctttctttacccactcctcacgtttggttttttagggaaaacaccataactaaacgcgccgcaagggatccctatcgcaccagatccaaatctagaacgatgggtgatcaagaggagacacaggaacagatgaaagccgacatgtcggctctgaaagaacaaatggcctccatgatggaggccatgttaggtatgaagcagctcatggagaaaaacgcggccactgccgccgctgtcagttcggctgccgaagcagacccgactctcttggcaactacgcaccatcctcccccaagcatagtaggacggggaagggacgcactggggcacgatggcagccctcacctgngatacaaccgagcggcttacccttatgg

SEQ ID NO: 290904 - DNA, 376 bp, Glycine max
agctttggtctttgcagatcttcacacagcaaaatctctcaaaactctttggaacttagacctttctctctctagaatcactagacatgcaaagcttcagctctcagcccaaactcccttcacaaaatctgatttcaggcttaaataggtggccttgttcgtgctcgtgcgcttagcgcaattctgaaccgcttagcgcacattagtgaatttcggcttagcgcgtgcttttctcgcttaacggatggactgaagcggtgcgcttagtgagatgaagtggtacgctcagtgaacctgtacagttcatcttcttccaaattcttcttcgcgcttagccaatcagtgttgcgcttagcggacgctcgctaagccagta

SEQ ID NO: 290905 - DNA, 425 bp, Glycine max
tgcccaatgcctcgtgttggcttccatctgttggttatttgtcatttataagcactgatctcaggctcgaaatagccaatagtgggcagatgtgcaaacacccaaaactataaaaaaaaaacatggtcaaaaaaattaattacggtaataaagaaaaaacatagataatcacaattaacaattatttacttaccatgactaatgacatgtaacctccaaatgtcatgtaacctccaacatgtttgctggtgtactagctcgcatatgagagatggtcgtatgggtatgccaatgcagagactccccaagcataccaatgacaaccatccaagttgttgaggtagtggaggtaggcaacatggatgtgagtcgaggacttgttggcaaatatcatattaccaaccaagtggaaaagataagttgtg

SEQ ID NO: 290906 - DNA, 381 bp, Glycine max
  unsure (1)..(381): unsure at all n locations
agcttttgtggccatgtatacactaaggcttagtgtttgtttcccccattcaatcaacccagtgtttccaaaagaatgctcctttatcatgtcacgcatacatccaagtctatttaggcattcgggaaaatctttcattgcgttcacccttcaggcgcacacattttgtttttcaaaaaccttttttatgtcatgatccgtgaatttcccaaagaaaacagaaagtcattctttttcaaaagtgtgttggctttttagntttcttttttgttttcttttttaatttttagaaagagtttgtaatctgaggaaaaaaaggcgtgtaaatgaaaacaatacacaaggccctattntttttctacttaagtttttttttattca

SEQ ID NO: 290907 - DNA, 417 bp, Glycine max
taacaataataacaaaacaatttatatgcagtttttataacttgttactgaaattttagttacataagtaatagtgacgaaaattactattagtaactaaaaaaattaatgcattaatatctcgtagtgatcctaagatttatttttattttgtaattagttttattaatctagtaaaattatatttttatccttaataaatatctaatttttatatttttttccttaataaatttttattttatattgaatttctgataaaaaattttttttatcctagacactttttttaactctaataaattagttaattgtatatttattttctaataaaaaatttcatttgttattagtcgaaagtaaaataaaattctctaatttatcaaaaactaaaacaaaatattaaagacaaaaata

SEQ ID NO: 290908 - DNA, 379 bp, Glycine max
agctcgatagtttacttatagtcatccccgaaactccccaaccttcggaaggaacatcgagaatggtgacaagaagtacctccaaattaattaatgttattaatgaaaatagtgaccaaaactcaaaaaacgctgtagaagcaaagcttcatgatgaatcaagaatgattcaaagatgtcttgatgataacaaaggtgatgacaaaaagctcaaaggtcaatcaaagaatgagttcaagaaagatagaatcaagaaagaatgagttcaagatgttcaagatagaatcaagaacacttcaagattcaaggatcaagcatccaagaatcaagatcaagattcaagactcaagattcaagattcaagaatcaagagaagact

SEQ ID NO: 290909 - DNA, 415 bp, Glycine max
tataagaacaaaattgcctcaatcatgttcaaatatttatgtgaataacgacgcatcaacaagaatcaagccaaggctattgcgctagcactcaatggggcaaaacacaccaaattattatgaatatggatggctcaaattctcacaaaggtaagatcatcactttcaaatcgagctatcaaaactatcatgacatgtagagaagaatcaaggatttcaagtcacataatgtcaagaacttttattttcaaaacaattacccatttcttgaacatatcctataattcaaagaagaacatgcaaagtcgtacgtgcacacaatattgacccaaaatattaaactaaaaatccgacgaagctaacaacattaacaaatcatcacatctaacacattaacaaaaccaacatgactatc

SEQ ID NO: 290910 - DNA, 376 bp, Glycine max
agctttcctgttggatcaagtggcctcagaataattaagaagggggggttgaattaattattaacgtgtcttgactaattaaaaatctatcattcttaatgttactagattcaattaggcttttactactaagtcaagaaagtaaagaacagaaatagaaacttaaccaaaagtaaaagcgataattaaaagtacgcagtggaaattaaagagtgtagggaagaagaagacaaacacaagatttatactagtttgaccacaaaccgtgcctacatccagtccccaagcaacctgcggttcttgagatttctttcaaccttgtaaaatcctttacaagccaaagatccacatgggatgtaccctcccttgttgatgc

SEQ ID NO: 290911 - DNA, 401 bp, Glycine max
tgtcaagccctttagcctggataagtgttgtccaggctacttttgccgtgttgtcccgagtggacatgcttttggttttgtaggggaggtgtgatgtgcaagttgagggacgtccatgtttctaatgattatgcccttttctgattgttggaggatgcattaaagacaaacattacattttgtcttttgctataggtgtgtgcagcgcacacacaatactcttgtatatgtgtcactcatggagtgggcacgtactgaagacatggtgcatgggtgagtaggggtgtgtcatggcgcgaagaattatagcatcatttttgctactaccagttactgaagagtccgcctccactttatatggaggggatgcttgtattgcaatcactgtcacttctaaattt

SEQ ID NO: 290912 - DNA, 374 bp, Glycine max
agctttatttgtcattgctgtgatcctccgactgatccctagagtttatcccgtatcatcattattagcactttataactttatgtttcttagcatttcagacttcatgcctatggttatttaagctctggtacattttagtttttgttacattacctttaaactattctgtttgaatgtttaggacttggtactttcaattattattaatctttctatggtactactatattatttgtttaggacttggaactttaaattatttgaagtcttgtgtatggtttttctactccttccttgtctttgatgttgccaaagggggagaaatagctaaaaggtaacgtgatctctttgttggaattatttgaatatat

SEQ ID NO: 290913 - DNA, 410 bp, Glycine max
tgaaccaaaactggtgagagtgtgatcttacactgtgtgtgaacgactagctatgagtaataatctttgcatgaatctctgaattttagaatgaaatgtataaatgaggacatgatgaaggctatgattgtgcatatacaagccttttgaacaaaaagcttaccttgaattataattgtatcctctgcaccctttatgagctgaatgatattgtcaaaaatttgaaccctgaacttaaataattatctctagataccttgtttagattctaggagagcatatggttcaaggaaaatttactccaactttgggggagtggaactaatttggatgcaaagaaagagataaagcatcagcacacacaacacataagttgtgtgttaaaaaaagaagaaaagaaagcaaaaaag

SEQ ID NO: 290914 - DNA, 426 bp, Glycine max
  unsure (1)..(426): unsure at all n locations
gcgaactatgaaactcaagctgagtctgcatgcatcttatngattgttaatgtattcctgttngttatttctacttaattctgcttaacaaaattaagtgtttgttagcatgacgaatagtagatcgagtcaaaagtcatacactaacatcatctaattacacatgtaattagttattgttgttgaagtcacttcttttatataaagtgtctgtgtctatatttttattacacaaacttcagtatttagtttttttaattttaaatgttatttgaatttctttacttttacttaatctcctattaaactccattatttttaaaattatttaaatatctaaacaaaaattagcctaaaacactaaattcttctcccagaattatcatccaaataaaactctcattattttaaaaaaaaatacccact

SEQ ID NO: 290915 - DNA, 466 bp, Glycine max
  unsure (1)..(466): unsure at all n locations
aggtccgagnacgtgaccctggaatgaatgatgcatnganangccggngaannnagcccgcgcgccggatacgtagagctgttcgcnggcatttcactgnattgtgggaacccgnccaggaggcactaagacgggaccgggcgaacacacacataaccnaccccattgacaaaagccaggcaaaagcatccaccatatcccaacaaaccaataccattaggcgagaaactacctcccgcaaagagagaacaagaggcgcataaatctttgcaccaaaatgagtgagggtccaatcaggtgttacgaccctcatacaatagctaacaacgtcaacggcatgggcgaccaaccatggagcgtcctgccaacctaagtgcgggatcccaatacagaaatttcagtttgacccaagggagcacggtacgaacactcggagcacgacaaatacctccccttgcgcgacacg

SEQ ID NO: 290916 - DNA, 464 bp, Glycine max
  unsure (1)..(464): unsure at all n locations
agaagaccnnnggtganccnttgaacctttgatgatctatttgannncgngaccttagaaacacagcnggggcaacncttattctcaattttaacagngttcttgcagggggcgcggagatccggaggaagtttgaggacaactaacagaaaaacacgccgctgagtgtatcagtaagccccaggacaactgaaagcacgcactcgaaggctaagaagaatctgacgaacatatggatgttactgagcaacggaggacatgaacatccgacgatgtcaaatcagcaaccgcaaatgactgaagatactgagggggtccggccacaatgaatcttgagtgatatctagcgaaatgccacacatcagagaatacacggggtggatcgacttctcaacgtattttgagccagaaggctcatatatagccactgagaacttatgacaaatgaggatctaaaatgcacg

SEQ ID NO: 290917 - DNA, 371 bp, Glycine max
agcttcttggaagaatcctttcccactttttccttccccttggcctttgaagacaaggccttaccatccttctttttcttttggttttctagtttttcttcctcatccctcttatctttcatagttatttgatctttggctacctgtgaaggtgtttaaagatgcaaaacaaactctgttccaagatgggtgagggttatctcattagttaggccattatagattattttcctatgatattgccatggcctacctaagagaaggtgtcctgcctccataagaactacatcacaaatcacttcatccttatatgttccaatggagaacggcactttcactctgtgattgactatcatctccccttgctcatt

SEQ ID NO: 290918 - DNA, 469 bp, Glycine max
  unsure (1)..(469): unsure at all n locations
ctcncgattgaacctttganntcgtgcattgagcccttgaagnccgcgangtttngaaactacccctggggtcactgggttttgttgcgtctcattaaaagatatatttaaaacaaatgaccggccgaaacttattttcttgatgattaactgaggttacaacacatatgatctattgaattttattttaatggcgattaaacgagattaccacacaaactatcgggtgaatttcaatctaacattgatttaacgtgaataacacttacatgatccatcaaaactcgcttaaaacacaaaaaaaaatcacttatgggtgaagaactaacatgaagacatgcctagccagggagggcaccctaaggtgcatacaatgaaatcaaggtgtcaaaataaaacttacccggcaaagatccaagaacgataaagaacggaccaagaatggtcacccaattgtcgccaaaacatt

SEQ ID NO: 290919 - DNA, 143 bp, Glycine max
agggggtgatgcttctatgttggcttttggggcttggatggtgtggatgatgtacaactattgtacgactgagggaaagcttgcatcttggaccccaagtctcctcatttccttactttcttcatcccatagcaagttcattg

SEQ ID NO: 290920 - DNA, 402 bp, Glycine max
tgcactcgggagtgttaggatatatttccaccctattaacttcagctacgaaaggttttattgacaacgactattcgggatagtgctcgtgttttttgtcctagacaaaatggtcactaagatttaatttttagaaaatatgcatgtgtcctatatggtccatgtcttttctggtggagattagatatatggtatttgcttttttcttttaaagagagacgatataataatatattttttaatacatttatttctaatacaatttttattatttattaaaatttattacaaattataaaactttgaacattttacttcttatttaataaacaatactcatgattctgtaatctgtaataaattttaattgataataaaaatctgttttaaaagacacatgta

SEQ ID NO: 290921 - DNA, 385 bp, Glycine max
agctttataagcgcggtttctgtagacaaaggtcaagcgttcgcgatatgcgaagatgatatttcgagtactttggatttggtacgactatgccctcctgatttccagctgggaaattggcgagtggaggaacgccccggcatttacgcaactagcataatgtaaacctttacggttttaaaagctctatagttgggcctaggctttagagtttttccttttgttaaggctttgtgtcttttgtttttgaatttataatacaaggatcttgcttcatctgttcctggtctctacccattctcattcatttgcatgtttacttctttttctgaaacggcagatccgatgacgagtcccccgaaggtactaatacctgggacccgtc

SEQ ID NO: 290922 - DNA, 421 bp, Glycine max
  unsure (1)..(421): unsure at all n locations
tgattatgatttgattntagttntggtttcacttggttattttccatctcattaaaagagaactttcaaagtaaatgaccggttgaaacttatttttttgatgattaactgaggttacaacacatatgatctattgaattttattttaatggcgattaaacgagattacaacacaaacgatcggttgaatttcattttaacattgattaagtgtgattacaacttaaatgatcgatcaaaactcgcttaaaacaaagaaaaagatcactgatggtagaagaatgaagatgaagacatgcaaagcaaggatggacccctaagggtgcatagaatgaattcaaagcttcaaaatagaaaactaaccggtcaaagatcgaagaacgataaagaacggacgaagaatggtcacagaattgatcac

SEQ ID NO: 290923 - DNA, 389 bp, Glycine max
  unsure (1)..(389): unsure at all n locations
agcttctgcgaaacgattcatgcaacttcagaattctactttcctcctctacagaaaatgtttgtatattgagatcagctctaacatagttttaaactagtgaacaccaatttcatgaaaaccattttcagaatgctagtgttcatttcaatttgtactttgaaatagtgaacaccataattgtgtcgtacttgatcatttacctcaccaacaaccaaggcctctcacaagctaaggttgctccgcacattaaggcccttctcagattaatttctaccatggctcttcctctcttccacctctttcttcaatcatcaacacctctttctcagattaattntagcctttntctttgttgtttttcaagttggtttgttggtgattntatt

SEQ ID NO: 290924 - DNA, 418 bp, Glycine max
  unsure (1)..(418): unsure at all n locations
agtctccttgcaaggaacttcctatggnggggtgtttttggcattttaaaatcccttgggtgaaatgggaagtagtttgtctctctaagaggatgggggtctaggaatcaaagatatttctaaattcaatacagctctgatgggtagatggatatgggctttatcttctaatcataatcagctgtgggttagaatcttattgtctaaatatggtggatggtcagatcttagcagtgggagggataaatcctggcagtctcattggtggagggaccttcgaaagttatatcaacagcctgagttcagaattatccagcagcagatggtatggaaggtgggaggaggggaaaaaataaaattctggacagataattggttgggggaagaatataaacttgaacagcaattcaatcagcta

SEQ ID NO: 290925 - DNA, 388 bp, Glycine max
agctttcttcactctctcctcatttatgtctaagtgtgcataaaaaaactatgtctaagtgtaaatacaaggtggggttgtatcctaacctttgtattttaagttatctacaacactatttgccacacattatagcgtaatatgtcttccttgccaaacatcttggcatggtgttagtcgagtccgtgtttgagtatgacaacatatgatgataacatcgttgagcctctttgacatttcaagaagggtatgcctcttgacatatctacatgtctgtgtgatttattgccaacctatcttgttaggtattagaggtaggtatacttggatgagaatgaatgggcaatctctatagaggtcatacattgtacttgtagacttgtcattg

SEQ ID NO: 290926 - DNA, 423 bp, Glycine max
cgaagattagtaggagtgtcaaccactggtatcgatgtgctttattattcatttgtcattggttgaatattcaccactcaaattagtatttagtttggtggattggtcatattgagagggtttatccatatttgtggtcaattcacaaaatccttatcctagttgtgatgacctctaaaacttattttttgattttcttatcgaggattttaaatcctaagcaaaggtgatcatcatcgaggacggtgtttgacgaaaaattgtctgtgttttaaagttaagaagttccagaagaacaacttagttgaatggaattgattattctctagcaatgaattaagacacggaaatacaatcatgcaagctaataatcaacaatgtaatttttcaaaacttcatgtgcattgctcatggaaagaaaat

SEQ ID NO: 290927 - DNA, 391 bp, Glycine max
agtctataagaacaaaattgccttaatcatttccaaatatgcatgtgaattaggacgcatcaacaagaatcaagccaaggctattgtgcaagcaatcaatggggcaaaacacaccaaatgattataatgatggatggctcaaattctcacaaaggtaaaatcatcactttcaaattgagctttcaaaactatcatgacatgtagagaagaatcaaggatttcaagtcacaaaatgtcaagaacttttattttcaaaacaattacccatttcttgaacatatcctataattcaaagaaaaacatgcaaagtcgtacgtgcacacgaaattgacccaaaatattaaactgaaaatccgacgaaactaacaacattaacaaattaacacaacta

SEQ ID NO: 290928 - DNA, 402 bp, Glycine max
tgatttgtgacatattgcttgacttgttttatgattttacttctttctgtgtggaggttaaacattgttcatttgttagcttctgtcataagtggttaagccttagttattgctgattcactaagtgtttgtgaaaagtccttatagaagacaaattttgtgattcttctattttgttgatgtaagctcatgtctgagatgattaagcattgtttaagcttttgccatagatggttagcattgaatcgttgttttgcttttgctcttgatggttaagcatcattgcttctcccaagtggttaaactttgaagtctcgtttctgcttggtggctaaggtttgatagcttcttggattgatgattagagctcttgtcaaatgaccttgttgctgattcgcttga

SEQ ID NO: 290929 - DNA, 372 bp, Glycine max
  unsure (1)..(372): unsure at all n locations
ttctgtttgaaaganaattagtaattaattaatataattaaagttagaaattaagtgggggataattaaggttgattaatgatgatttagatttcatagaattataaaggggtaattaaggagtgaataaacattttaattcctgtctttgtacccattttgcaaatcaatctttatctttttgaaatgtaaaaaatagttcatatctttacatccgatatacaaataagtccctactgttaaaattcaatttccactgttagtcatatatctatgtgataagtcttagttcatgtaagcaaacccatgtaacaagtatttggactgaattgaaaaattatgatacgttaagataaacaaatggacattgcg

SEQ ID NO: 290930 - DNA, 371 bp, Glycine max
tgtgcattgcaaattctgaccattgcccaccatgactcgcaagggaatagaggtggtccggcatggaaggcgcaattgattgacgagatcctgttggatgaagttgtgggtattgccactgtccaccagtaccacgacagggtggccagcgagcaggcccaataaacgcaaagtctctgggggcaagatgacccgctaaggagtttagacttatttgggtcgggcccgggtcaagaggctccacaggatcaagcgggtcaggaggcgggttagttggcactatatgaggagggggttctcgtcttcgtccatgattagcagaaaaaccctagaggcacaatggtggcctctatggtatttctcgttgcagc

SEQ ID NO: 290931 - DNA, 361 bp, Glycine max
agttttgcagatttggtcgtcgccagtgaaaggatcgatgtgggtctgaaaaaaaaaaaaaaaaaaatagaacgcaaatttgatcatcctactaggacgactgataaaactggggcaaataaagagggtgaggataaaggagaaacccatgctgtgactgccattcctgtacgaccaagtttcccaccaacccaacaatgtcattactcagccaataacaaaccttgtccttacccaccacccaagtatccacaaaggccatccctaaatctaccaaaaagtctgtctaccgcactttcaatgacgaacaccacctttagcacaaaccaaaaacaccaactgtcgcaacctacccttcggc

SEQ ID NO: 290932 - DNA, 382 bp, Glycine max
  unsure (1)..(382): unsure at all n locations
acctagcaagactcacgctggaatcatctacccgatttctgacggttattgggcgattccagaccaaatggctcctaagatgataggactgacagagaccaagaatgaagaggatgaactgatgcccacaacagagcagaacaattggcgagtatgcattgggcataggaggctgaattcagcaaccacaatagatcattttcccttgccttccatggatcaaaggctngaccgcttggcaggtcaatctcattactgctttctcgatggattttatggctgttggcaaattcatattgctcttgacgatctnagaaagaccacattcacctgtcccttaggcactattgcctatatgaggatgccctacaacctatgcaat

SEQ ID NO: 290933 - DNA, 422 bp, Glycine max
gacctataaaactcagctggaattttttgaaagaaactttttaaagccttcaaggcttatataatacttgggaggaagcctaaagaggccttaagaaagaatacttgaagggaagcctggagaggctttgtgaaagaatacttggaggaagcctagagaggctttagaaaagaatactctagtgaagcctaaaaaggctttttgaaagtaatcttctagtggagcctatagaggcttagagaatattggttgtaggagcttgtgtagactttaggaaagaaagaataccacaattgggtgcttggtttttgtggaaaaagcctataggtgtaggaactagatgtagctcaggttggggtgaaccatgtataattccttggtgtgattgttcccttctttattgcttcttggttatatttatt

SEQ ID NO: 290934 - DNA, 376 bp, Glycine max
  unsure (1)..(376): unsure at all n locations
agctttacattatagcttggnggataatggatgctaataggcctaattttgatgtcaattttaacactattttggatttcttttcattatgtttcacctgtctactaactaaaatagcataccccaatcatacttttctttgataccctttgaaattaccaacttctaattttatggtttgcagcatttgtagattgtaaaattgcaatgatttcctacttctaatttctgtcatgcccctttggagatactcaagcaaaaagtgatattaccttgtaaaactatacaagttcataatttaatagccctaatacatttcattctggactcttaaatctcanaacatagagattccctggttctgtattaagtccat

SEQ ID NO: 290935 - DNA, 416 bp, Glycine max
tataagaacgaaattgcctaaatcatttccaaatatgtatgtgaattatgaagtatcaacaagaatcaagccaaggctattgtgcaagcaatcaatggggcaaaacacaccaaaagattatgatgatggatggcttgaattctcacaaaggtaaacttatcactttcaaattgagctttcgaaactatcatgacatgtaaaggaaaaacaaggatttcaagtcacaaaatgtcaagagacttttattttcagaacaattacccattacttgaacatatcctataattcaaagacaaacatgcaaatttaacacaacaaaactaacaaaattaaactaaaacccaacaaaactaacaaaattaaactaatttaacacaactaacaaaatcaaaaccaaagaacacactcccccccat

SEQ ID NO: 290936 - DNA, 412 bp, Glycine max
tctcaaccgccttgctcctgtgccttcctccaccactcccaaccccactctagtccctcgccactccacctctgttcctgcacaaatccgatatgccccatcaccgtatgaggatcctgtcggtgccttgttcaaactcactcacacgggttcagtgctaacatacctgaaggagttcgaagacttggctaatagaattatcggcttgccgacccccttcctgttgccttgcttcatctcgggtttgacatcggagatgcgccgcacagtccaggtccaccagcctatgactgtggacaaggccgccggccttgcgaagatctaggagcagaagctatcgaaccttcgtctgcctccaccgcggctgcgaccccaccgttggtagctccaccgccagcccctttggttcccc

SEQ ID NO: 290937 - DNA, 371 bp, Glycine max
  unsure (1)..(371): unsure at all n locations
tatgtcttctaatacggatccataagaccggcttagagtgacatgcttttaagacacgacttgcttaaatggaactcgacttgcatgttgctaagatggtattgcggacagcatgatagaaggacgaccgttctagcattggttgcgcaaaatcggcggagaatagtgatatttatttaccgacatctcatcatagttctttctaacactattatttatcaatcgactgggaagcgacctcgtaaataacactgatctagcagagagtaaagggaatagctacacataactctgaatcatagagtccctcccatagctcgtatgaactagttatatgacgctaaagccgngatggaccttactacagtatc

SEQ ID NO: 290938 - DNA, 402 bp, Glycine max
  unsure (1)..(402): unsure at all n locations
ttattatgccctctctccctcggcggggatttcttcttctgcgaaggcgagatagttgttggcagtgatattattgaccagccctccgaaaccttctaccgagatatcttgggccacgtgggcctcgttcaaaaccttcactagcagagcccgatgaggctcggagctcatgagtaactccaacagcgagaccctggccggggttttgttgagctgttcgataaccttgaattcgctctgctgaattatacggaggaactcgctggcttcctctagtgatacctcctttntaccatcctttttctccggaagaccttttgccggaatatctttattcgaagcatggggtgcttcgccatcttgttcctccaccactttcccttttcccttgacgttcgcggg

SEQ ID NO: 290939 - DNA, 369 bp, Glycine max
  unsure (1)..(369): unsure at all n locations
ttgctttagttnttaaccaagttgaacggcatcaagtcatatgatctatgtagccgacttcgcttaatggaacaagactttgctgttgttattgtcttaataattactccatgattggcggccgattgctaatgctattgttggttaagatttgtggaagtggaggaatctttagctcgtcaactaccaaaggtaaataacaactttgttatataccagtcctctgggaagtgaacttaaatctagcactgattcttcttatagttcatgatctatttactttctcctctgatactttgcttcactcttttgtaacgtttgtttaatttatatgatgctaagtgcagtttgtgtgtaacaacactaacc

SEQ ID NO: 290940 - DNA, 403 bp, Glycine max
tgtacgcacatcgttcacgtgtattatatccactccttatggtttgaagtagaggagagcttcaaccctataatgcaacgtggcggacaaaagtgggcagtaaacttgaatggtcgtcattgtcaatgcggaaggtattctgcgcttcactatccatgttcacacattattgcagcttgtggttacgtgagcatgaactactaccaatatatagatgttgtttatacaaacgagcacatcttaaaagcttactccgcacaatggtggcctcttgggaatgaagcggctattcctccttctgatgacgcatggacacttatccctgacccaactacaattcgtgcgaaaggtcgcccaaaatcaacaaggataagaaatgagatggattgtgtcgaaccatctg

SEQ ID NO: 290941 - DNA, 293 bp, Glycine max
gagggaccttcacactgcctatactctgacgtacacggacctactcctgcctggacacaggctggttagctgagggcttatggatctattttccatcatagcttggatgctactgtgatgtgatgcccggagtgagcactatctggacgggtgtcttagcgatcacttcgatttgccttgaatgcagaggaccgttccacaccactgtcagaaacattattctgacatgcaaacataagacaatgtgcacgtcagaaacactagacagtagacacagaactggacctttatta

SEQ ID NO: 290942 - DNA, 403 bp, Glycine max
tttgatcttgcaagctaaattagacgtgtcaggtggtatatgtccttatatatgacgattctgcccttttctgatcgttggaggatgcattgaagacaaatgtttcattttgtcttttgctacaggcgagtgcaacacacacgtattactcttgcatatgtgtcactcatggagtgggcgtgtactgaagattcaatacgtgggtgagtggagttgcatcatggtttaaaaaattaaggcaccatttcagcttatgcaagttaccgaaaagtcacgcctctactttaaatggagtgaaagtttgattttttatcgtcaccattttcgaatttctgctttctctggatacaagtgtagcaacatttaaaatgtttgatcgatatgttcatcaacttctaaatag

SEQ ID NO: 290943 - DNA, 478 bp, Glycine max
  unsure (1)..(478): unsure at all n locations
aggtgtatgatgatcntagacgncaccacatatactaagcgccgtccgcagatccctcaagtgagactagactcagctttagtttctcaccaacgcttagcctaatagagggtaggcttcatccgcagatgcctcctgtccgactaggcctatactcaatagccctattggaactacgataagtctaccaaaacttaacccgcagattcctcatgtaagattaagcttagatactggttcggtcaagatctaaggctacagtacatttcccaatgctaaagtcacctaactgtgcatacaaatgagtgatcagaccaaaagcatactaacactaaacattgaaggaagcattgaacactcaacacacgatcaattagatattaagtatttacatcaactgctcataagaaatacccaactagggtggttagctagggattacaaagagaccctaaacacatgagatttaaagcacgct

SEQ ID NO: 290944 - DNA, 102 bp, Glycine max
gacaagacaagaaaaggggacgaccggcaggaaacccccgaaaagggagaacagaccgaccaggccaggcaccaaaaccgcaccaggcccagaaaacaagaa

SEQ ID NO: 290945 - DNA, 475 bp, Glycine max
  unsure (1)..(475): unsure at all n locations
gggcgcttgatagtcgttgacggcgcacaattacaaaccnccgcgggggatcgaaaaacaggatgcccaagcgccattangttgttggtttatcaattggacgccaggagggggtatatgaccatacctcaactgcttcagtatggactcatccatattctcacattacaatgcatggaggcgcccacatggcataaatagaggaaatactntattaggagccaatttgatagaaaatatttggccctttcttttatgaatgatattacatttatcataatcaaagatgactatataatttttatgaataagctgaccaacacttaaaagattttgagtaagacctgacacataaaaaacatactggatatattgcttgctaccattttgagttataacagcaatggtgcctcttccttcaactgtttgaacatttgcatcaccgagtgtaacttcgaatttattgtcgcattcc

SEQ ID NO: 290946 - DNA, 337 bp, Glycine max
  unsure (1)..(337): unsure at all n locations
agcttgtagattctaagcaccttgtgagcatgggaacttatacggcttgactggctcaaagccaatgatcatactaccaacgacactatggatacatcgcatcaaatggcttcccataggtcttgcagtggataatgacagggtttacaagcataacctttgctaatcctatagccttctgcaatgcataatcacttggtgcactgaatacatgttctatgtcagtgccaataccaagggcagggtggtcaccaacactggggactgcatggctcaccatggtcagcatttctggagcgttttactgtatgcaagtgancttgcatgttctctcatc

SEQ ID NO: 290947 - DNA, 481 bp, Glycine max
  unsure (1)..(481): unsure at all n locations
aagagcgatgttcatgattcactgtacancnnctnaattagtaaacancccgccgaannanggnacacaccttntgagacttgtttttttattttcacacgcatttactgcacagtatgttggtatatttctatttngggaaaacaaacacctanaatcatactaaacatgaaacaaacttgtgcattctaatcctatgttcttgtcatttgagaagatattattgatgtaaagaatgagtgtgaaatcgctgataagagaaggaattcccctttttgtgtaagaaactatcattctttgcttttaatcacatttatagttaaggtttcttatgcatggctgtctaaacaccctagttggggatttctaatgaacaattgatgtaaattcatatatctattgaatgtgtttatgtgttcaagctgattcanagcttatgttagttgctttggttggatagccattggtgcacattagggag

SEQ ID NO: 290948 - DNA, 399 bp, Glycine max
  unsure (1)..(399): unsure at all n locations
agcttttgaaatttatctttatcactggtaatcaattacagganactggtaattgattaccagagagtaaatactctggtaacttaaaaaattttgagataactcttttgaaaaacaaaactgtgctatgtttggtttttgaaaaatccttttcaatacttaccttgtgaagtcttcttgatttcttctcttgaatcttgaattcatcttctcttgaatcttgaaatcaacttctcttgaattcttgaatcttcttgatntcttctcatgaatcttgaaattaatcttgatcttcaacttgttgactcaatcttgaaatcattcttttgggcttttttcatcatcaaaactacttgattcatacttgaatcatcatcatgaaacttgcttctacacgat

SEQ ID NO: 290949 - DNA, 433 bp, Glycine max
  unsure (1)..(433): unsure at all n locations
ntcccagtttgaattccaattntcccattccctgagcatacaacctcntttgcaggcaacaagtcgtcccatacatctacaagaagctctattatctggagatatagtgaagtaaatgtcaaagcatcaacatcactggatcccanagaatcaaatttcatagtggttagctccttcaaacacttgcatcaatgacatcagcacccgaaaggaagcaatgattaaaataaacaaaaagacattaatagatgcatgcatggtaaatttaaacaatcaaaaaataaaaaaaaatgtcgtattaaagaatattataagcttgcaggacatcttanatttcatgcctataaactgaagaaaggcactgctgactaactagtatccccatatcttgtatgtaatataaactcatcacagaattatacatcgatatgcc

SEQ ID NO: 290950 - DNA, 461 bp, Glycine max
  unsure (1)..(461): unsure at all n locations
aggggatgtctagacatgacaccattattaacacggcccctgcactgtgaactaataatagttgttgattctgttgtgctcaaagtctgtggatgagagcaacaacttgaagactttggagtaaaccttgatcacattcctctaaaatgtgacaacacaagtgcgatcaacctaaaaaaaaaccttgtcatgcattctaggactaaacacatagagataaggcattattttcttagaaatcatgtgttaaaaggtgattgttgtattgagttcattgatagtgagcatcaactagcagatattttcactaaacctcttgctagagataggttctttttcattagaaatgaactacgcatattacatgcatctagcatagaatgatattctgtttgcacagtgtgtgtgattgacattgctactcatataatatctttttgtttagtctgtgtcacaagttn

SEQ ID NO: 290951 - DNA, 472 bp, Glycine max
  unsure (1)..(472): unsure at all n locations
cggcgctttatgagtcgttgactccggacctatgaaactccgctgatgaccctggacggcaatcaatgttattagtgngtggatatacaatgctaacaagaagtaggatttaatagttaaaggaaaatggcacgaaatgtaatttcaccattattcaatttataattctgaaaggccaaccattagttcattacaaagtaattacatgtttttccgtaacaagaaagttgcttggctccaacagattttgtggtagagtcattccatcatacagcttgcgggctacaaaaataaaacaaaagctttcaacccacaaacatcatcaatcacaacaatctaacaatttagtgtcattcattgaacatcaaacgaatacattcctcagaccaacaccaactatgccaaccgtaaacgcaaaggtcaaaaagggaggcaaatggtactataaacacatatctcattgaggagagtg

SEQ ID NO: 290952 - DNA, 385 bp, Glycine max
agcttcttataagctgttccattttatcaatagacacatgttgagttttattcagaaaattagagtttatctcttttatcttagtgagagtgattctcctaaattcttgagtgattcaagaacaccttggctgtatcaaaggactttcacaacctttgtgtgttgccctcgctggaaagagtgattctttccttcctttcatcatcacccttgttctttcaaaccacaattccagataatccacctctgcccagaattatctcgtggccataacttccattttacgcactctaattaagtgattcttgagcctaaattgaacttcaaacgagacctttcacctcgttctggaatcacctcatttggagccctgtagcttcagtta

SEQ ID NO: 290953 - DNA, 410 bp, Glycine max
  unsure (1)..(410): unsure at all n locations
acacatagaatactaagcttctattaagctgaaccattgatcaataatttcaagttgagttttattcaaagagtagagaatatctcttttgtcttagagacagtgatactactaaattctggagcgattcaaaaacaccctggctgataagaagacttaccaatctttgtgtgtagccctcgctggaaagagtgattcattacttcctttcatctataccctggttctttctaaccacaattccagagaatccacctctgcccagaattatctcgtggccataactcccgttttacgcactcaaattaagtgattcttgagccttaattgaatttcanaacgaaacacttcacctcgtttaggaatcacctcatttggagccctggagctcaagtattgccatctctata

SEQ ID NO: 290954 - DNA, 538 bp, Glycine max
  unsure (1)..(538): unsure at all n locations
aaaggggccgacaagcacggaacgagaaacaacaggagggagaaaaacaccaaaaaaaaaaaggagaattgagcgctgagccctgacaccnaggcgaancnnacgcgcacccgggaaccacagagccgccggcaggcttgcaagcttgtcaggggcagagagaagggacaccgggacacaacagaacacacacccggaacaaggccacgccaaagaaaaacacaggagccaaaaggcccagcacgggaaaaaaggccgagaagcaccgaagaggagcaaccngnagcagagacaccaaccgcgacggaagccaaggaccgcgagcggccccaccaaaaaggcaggcngaacacccgagngggggagccccaaagaacaaccgacggaaacacaaaacaaccaagagaaagcgcaggacgcaancaaagccgcaaacaaagcgcgaagagcgacagcccagggccgaacaccccagacgggggcacacgaggcgacgaagcanggagaaaggaacggaagccaagacaacgaacaaacc

SEQ ID NO: 290955 - DNA, 330 bp, Glycine max
gctcaagatcacaatattcaaaatcaccctcaacagaatgctcaaaatgcacagaatgaccaggatgcacactacgcctaactaatctatgaaaggttctatctatttcaggatcaaagggttcgaaatcacctggattgcccctagtcatgcactatacgcagcaaaaaatgtgtgtctcagcaaacacctaacagggggtaaaactacagctatactcaaacgatatcaaaatgagctgatatattgtgaggaacaccctaaaatcatgacaagatagcccataaattttcatacaaaaattcaaaatctaactatgagaactaccta

SEQ ID NO: 290956 - DNA, 350 bp, Glycine max
tttgcaagcttctttcgaatttcattagtgactgattgctacatcgttcttcattcatcgaccaattagtttttattttaaagttttgaatttgctctatgcacctttaggggtcccttttgttgatttgtacatcatcatctatattcttctaccattagtggtctcatttctttgtgtaaagcgagttttgaccgatcgtttgtgccataatctcactttatcattgtaaaataaaaattcgaccgatcgtttgtgccgtaatctcggtatgtcaatgtaaaataaaatttaaccggtcatttactttgcagttgtcttttgtgagattgaagtatataagtgaaacc

SEQ ID NO: 290957 - DNA, 410 bp, Glycine max
  unsure (1)..(410): unsure at all n locations
taaagtatgcctgagtaattcatccctatgatatgctttctatgtattggcgancanaatcgccatgccttggattatagggatgaaccaagctcacgcttttacaaaaaggttcatcaagtcaagttgaaatatgcgtagtaaccgtcttgcaaaattgcggcaaaagatgaatcgagtcacatcactgcttcgtctactggccaacatatttacgattactgatgtgcttgttacttacagcttcaccttgacaaagatgtgatggaccactgggaaaaactatatagattcaaccccatatcttgcggacagatgcccagtactataactgcacatcattcgcatgcgttcatgctcttcattggttgcaatgctcgtgcattcttccttgaaaaaagataaatgac

SEQ ID NO: 290958 - DNA, 366 bp, Glycine max
agctttatacacacaaaataggagaaagctttatacggaaaaaaaagaagctttaatggtaattagagttcaactcttaaaataagataacgcacctaaattttatcctttctaaacagttgcaggtcggagtagataaattggacaaaaatttagacattggctcaatggctccatttacccattaatgatgctaataatacaagttgcttcttgaagccttgttttctatgaattcgtgggcatatctataatctatatgcacattaatcgaagcatatacaagaattctaaatagagtaaactactattccctgaatgtagcaagtggaactggtagctcctgaatgtactaaagaaagtacg

SEQ ID NO: 290959 - DNA, 426 bp, Glycine max
  unsure (1)..(426): unsure at all n locations
cttgctgctgatagtggtgtttcaccactagattatcnataagtggattnagannctatgaagaagagattgcatgaagagagggtcacgcataaagaagccattaaacttgttcgtgatgcagctaataatagtttacaagctggtttaattcctatttttaagacattggagagtttcacttcagaggtggtgaaagctcatgaacaagtcaggcttcaaagtgctggggactcgtagagattccagctatttggtttcttttgaggtcatagtgattgcatttactagtgtggattgattgggggagtttagagagtacatggaagatttagaactaacccaccagttttgcagctagagttagtcttattatgtaggaaaggacctcttgaattaccctaaagaggttttcttggaacatgt

SEQ ID NO: 290960 - DNA, 394 bp, Glycine max
  unsure (1)..(394): unsure at all n locations
agcttgctgagattaagaaccattttcttcaactntgacaaatgtggatgaccctagcgatcatgcacaagtttatgagacagcgatgcaaaacaagacatagactggctggtttcaagatagtagaggcctctagattcatgtcctatgccaatcaactgaccacgttcttgtacaacaaaggaatcaacatcaaatgttatagaacaatttaatgattttgttagttgactaagagaaactaagttgaaaggacaattangaacaaaaagaactggatccaagtttaaagaagaagaatgaagactttgccgactcctttagaggtgactttggtgccatttgctanggtgatcagatgaaagaaatttggaggagacagaggtgagtacag

SEQ ID NO: 290961 - DNA, 399 bp, Glycine max
  unsure (1)..(399): unsure at all n locations
tcatgatgaatcaagattgattcatataagttttgatgtttacaaaggtgatgaanaaaagctcagaggtcaagaacacttcatgataacaaagatgatgatctcaagaatcaaagatgagttcaagattgaatcaagaacacttcaaagttcaaagaggaagtttgatttcaagaatcaagaatcaagtttcaagattcaagttccaagaatcaagatcaagattcaagactcaagaatcaagaaaagacttaatcaagataagtattaaaaaggtttttcaaaaactgagtagcacatgaatntttctcanaaccttttaccaaagagtntttactctntggtaatcgattaccagtagcaaaatggttttcaaaagctttcactgaattacaacgt

SEQ ID NO: 290962 - DNA, 389 bp, Glycine max
agtttactgcttgcatgcaagcttgtcgcgtcaaatgattgtttctggagaacaggatggatatatacaagagtgcagcattctgtagcttttctgtataatggtttgctctctatctcggcatgttgtctgcattattctcaattgattatatttcaattagcactaaaatcttctattatcttatttagagtatattgcatttcataaatctctcctgcaggtcaggtggtcttagatgcaccattgcgcctcagaagtccgcaaagttgtcaaattttatgcgttaaaccacttgctgtttctgctagatcttgtgctcaatttgttatgaaaggattcaattttttgctgtctaactcgacgtaaatctctatacgcttgatgat

SEQ ID NO: 290963 - DNA, 429 bp, Glycine max
  unsure (1)..(429): unsure at all n locations
tggctctgccttatgcttctgctctcattctctattctattctgaaatcctccaatgtacaaggattgggggacatatacacccaatgcttgatgcaagatctttatcatggttgggccaaaatcccacatcttagctctccatcctaaagatttcatatgactgaccaaaactaatctggctagtgggtggaaattacttttttcactgctcctgattttctttatttcatgcattaatgtttgtcatcttcaactttggcatgtgatgccaaattggactggatccacaagattatcctgngtttaattgtgcaaaattatccttagatttttttatagacatctggaagcaatttatatattttagaatgatggttgtcttactgaggaagacaatgaaaattccagtcttccattaatggtttac

SEQ ID NO: 290964 - DNA, 407 bp, Glycine max
agcttcgtcctctgatccctcttgttggactgggctcaatttagacagcccttctaagtttagattaacttaacctaagcttcatcctcagatgcctcttattggactagacttagcttaaatagcttacgaaagttttgcctaatttagcctaagctttgtcctcagaaccctcttgttggactagacttagaccaaacaacattattgtaatagcatacttaaaaccaaaacttaatccgcagattcctcttataagactaagttctaattctgcttcattcaagttctaaggcaacaatacattttccaatgttaaaatcacctatctaggcacacaaatggttgatcagaccaagagcatacaatatttaagcattgtaagaagcattgaacacaagatacac

SEQ ID NO: 290965 - DNA, 432 bp, Glycine max
tgtcaatgtttgaaatttcttctttggtgttgaagaattaattattatgggtttagtgaagttggaatgttctaactagcttgttgtgcaattgtttccttgccctaacaaagtaatgtttgaatgtatgcgtttaggaacccattaagataatgttttcttgtttatgctccctagtgttctctgtcttttcttctttggtgttgaagaagttagtattaagggtttagtgaagttggaatgttctaacttgttgtggaattgttgacttgccctaagaatcaatttgacttgcgcttagcttgttggaaacttcaatcagtagatagattcaaatctcttgtttgaagtatttcttcagcctgttgcatgtgttacttggagtacaaaaagtacaactattgacatgaactttgaataagagttagcttc

SEQ ID NO: 290966 - DNA, 409 bp, Glycine max
agcttatgctgcttatatttacaatagacctcctcaaactcagcagcaaaatcaaccacaacagagcaattatgtcctctccagcaacagatacaaccctggatggaggaatcaccctaacctcagatggtccagccctaagcaacaacaacagcagcctgctccttccttccaaaatgctgttggcccaagcagaccatacattcctccaccaatccaacaacagcaacaaccccagaaacagccaacagttgaggcccctccacaaccttccctcgaagaacttgtgaggcaaatgactatgcagaacatgcagtttcagcaagagaccagagcctccattcagagcttaaccaatcagatgggacaattggctacccaattgaatcaacaacagtcccagaattct

SEQ ID NO: 290967 - DNA, 432 bp, Glycine max
  unsure (1)..(432): unsure at all n locations
tcaagaaaaggccaaactcccctcagaaatctgatnttatgcttttataggtggctatgtncatgctcatgctcttagcataattctgaaccgcttagcgcgcattagtgaattttggcttagcgcggcttttctcgctcagcggatggactgaagcggtgcgcttagcgggatgaccattcgctcagtgaatatgcatagctcatcctccttccagattcttcctcatgctcagccgagaagtgttgcgcttagcggatgtctccctaagccagaagattggcttagcgagagggtgaaaatcaacacttcaaaacttgcctaattaacctgaaattgagagaaaaattattattaaacacacaaaaatggaagtactaagtatttattacctacctttaacanaaagtaattacaacactacaaaatacc

SEQ ID NO: 290968 - DNA, 389 bp, Glycine max
  unsure (1)..(389): unsure at all n locations
agctttatgatgtatcaagattgattcaaagagttntgatgataacaaagatgatgacaaaaaactcaaaagtcaagaacacttcatgataacaaagatgatgatctcaagaatcaaagaatgagttcaagattgaatcaagaacacttcaaggttcaaaaggaaatttgatttcaagaatcaagaatcaagtttcaagattcaagactaaagattcaagaatcaagagaagactcaatcaagataagtattaaaaagttttttcagaaactgagtagcacatgaatttttctcaaaaaccttttaccgaagagtttttactctctggtaatcgattaccagatggttataatcgattactagtagcagaatggttttcaaaagtcttc

SEQ ID NO: 290969 - DNA, 437 bp, Glycine max
atctccagcatagtcaacatcacagtagcttgtgagtccaaaatctttccttcttttaaagcatagaccaaggttataagttccaataagatatctaaaaatgcatttaataacagataaaaggactttccttggttctttttgaaaccttgcacataagtaaacactaaacattatatcaggcctatacgctataaggtataacaatgatccaatcattgctatttattgggttttgtccaacttttttagattcttcgtccaaccctaagtatctagttggatgtataggtgtctccatttcttttgcattgtccacgttgaacatatttagaagttctttcatatacttggtgatgcaatcctaccccgcaaggccattgggtagaagacttccagtaaattggctagagatccaatggaacgccctatggttt

SEQ ID NO: 290970 - DNA, 357 bp, Glycine max
agctttatgcatcattcggagaggctaacgagacaacgagatgatgcgctccatgagatgttgcatcaaatggagaatagagatcataatgaacaggaaaggaagagaaaagggaatgatggtgttcctagacaaaaccgaattgatggtattaaactcaacattcctccatttaaaggaaagaatgatccggaggcctacttggagtgggagatgaaaatagagcatgttctctcatgcaacaactatgaggaggaccaaaaggtgaagcttgccgccacggaagtttccgactatgctcttgtgtggtggaacaagctacaaaaggagagagcaagaaacgaagagccatggttg

SEQ ID NO: 290971 - DNA, 455 bp, Glycine max
  unsure (1)..(455): unsure at all n locations
gggctgtgctctgcgccctccaaactaagctgcttgaaaattttattttagatatgaaacttcatattctatcatataagaattgccagggaagtggatcttttataccattgtattggctaatacatttgcattttgagtatgttattgacatccgtgcttacatattatgacttaatatttttgtgctatttgtcatttgacatgctaaaggttatatcagcaacagtagcaagtgatccacagaaatattgtgaagcatttcttgggaaaccaaacgctgagtattgtaactggattcttgactcggagaagtggggaggttagttggcctatgnccttcctaatcaaggctattttaaataaaatttttaatggaaataaataccattttctctgctgcaattggaacactactttggtgttactgggtgaatgtatgaatgtcaatcctt

SEQ ID NO: 290972 - DNA, 377 bp, Glycine max
  unsure (1)..(377): unsure at all n locations
agctttatgatgatgaatcaagttttgatgatgacaaagatgatgacaaaaagcccaaacaatgatttcaagattgagtaagaatgatttcaagattgagtcaacaagttcaagatcaaatttaatttcaagtttcatgagaagaaatcaagaagattcaagaatcaagagaagtttgatttcaagattcaagagaagatgaattcaagattcaagagaagaaatcaagaagacttcacaagggaagtattgaaaagatttttcaaaaaaccaacatagcacagttttgttttccaaaagagtttttttcanaatcttctaagttaccagagtttttactctctggtaatcgattaccagtttcctgtaatcgatta

SEQ ID NO: 290973 - DNA, 423 bp, Glycine max
  unsure (1)..(423): unsure at all n locations
tcaagaatcaagatcaagattcaagactcaagattcatttatttttatattatttaatcaagataagtatgaaaaagttttttcaaaaactgagtagcacatggatttttctcaaaacctttttaccaaagagtttttactctctggtaatcgattaccagactattgtaatcgataaccagtagcaaaatggatttgaaaaagtttttcaactaaatttacaacgttccaattgatttcaaaaagctgtaatcgattacaatgttttggtaatcgattaccagtgcctttgaaagttgaaattcaaattcaaatgtgaagagtcacatcctttcacataaaatntttgtgtaatcgattacactgatttggtaatcgattacttgtgattgtttatgattaaatcaaaagatgtaactcttc

SEQ ID NO: 290974 - DNA, 366 bp, Glycine max
  unsure (1)..(366): unsure at all n locations
agtttgcaagcttgctccagaacacaatgantgcttacaggtaatggaaggaggccaagatgttctgaaagtacgaaccaaaacataagatcacccagtgaggtaaaagcgtcaagctaatgacgctaaagaagcgtttcctgagaggcaacccagtcttaaattctgttatctttgttgtctttcatgcaattaaatcatctaaaacatgctatatagtctgtacatagtagtatatctgccaatctttggatgtttaacataagggtttcaatttcttggaaaaaggagtgaaaataacttataaaaatattttctgaaaaacagtcctttcgctaagcgcatgcctcgcactaaaagcatctc

SEQ ID NO: 290975 - DNA, 342 bp, Glycine max
  unsure (1)..(342): unsure at all n locations
caagaaaggtttagtcattgtttaaaaacgacttaaaaaaaaaagtttaaaagttgtataagctctgtttgtactcggagaacagttatcctcacaatatggcaatatcactccccccaaacatatcatccacaattgtaatattgnacaacttcaacatgatcttctgctccacctagatatcccaccaacttattgatgcgtgtacataattcccttataacctcactatcaaattgcatctgaggattgtcattgaacttaacattctaaaattggacaaccacatgtaatacgtgatgaagttggatattccatcttcgttcaatgattcgaacacac

SEQ ID NO: 290976 - DNA, 394 bp, Glycine max
  unsure (1)..(394): unsure at all n locations
agctttaacatggtttattaaatgttaaatcggtatatttatcagaaataacttccaaaatcctaagaatttaaattaatttattaaaaaatttcaaaataaaagcttattgaaataatgcaatgaaaatgttattttgtttgataatgtataatgaaatcatattccattgtttattatacaacaaaattgtatgtctttcttatattattcaatgaaaatttgatttcattgtacaatattaaaataagttgggtgtttgaaaaaaaagaagacaaaagtaggttccattgcatacctgtgcaacgatatcataagtttgttgttgttaagttggagtgtgnaaaaataattcaacggaacaagattgattacatatctatctatgtatgaa

SEQ ID NO: 290977 - DNA, 342 bp, Glycine max
ctttccaatgtgtggctgaattgatcttaatattacgatgagaagttaattattgaatgaatattgggcggagaaattaaatatggagaatcaagttggtctagtattaaagaaaggaatgttacgtaagaatgaagcatatgggacaaaatgaaatatctcataattgtcgttttgttcaactcaagttgatgaactgagacaaatacgacgcacaaatgggacaagcttaatttcaaacctcagtgaatacagtattggctgtggaaatgaaatgagggaagtcaggttggtttggtctctcaaattgtaaaacaaattctacggaatacactgggtggg

SEQ ID NO: 290978 - DNA, 367 bp, Glycine max
tttgcaagcttgtccaaaaatgcacgaggcaatatttgtataaagacccaaaaaatttgcacttaagtgagtgtttgctcaagccaaaaacttcatgtttaaacagatactacaaactctgcagttttgtaactctgaccaaaatcagtttaagccaaagttgttttgcttaagctaattttcctctgcaactttctttttcatcttctccaaaaaagaacttcaatctgggacctctaatcccaacttaagcacatttgagttgaaattgtcacttcaagctttcattgaaccttggtccaaaaaattgctattcaatccaattcaaaaatcctacataaaggtccatcaataagcatgtgaacta

SEQ ID NO: 290979 - DNA, 420 bp, Glycine max
  unsure (1)..(420): unsure at all n locations
tgagtcgcttataattgagttggcatcttactatgtgtctctgtcaatgactcaagctgcttagctagcagtttgttctgtgccaacagtgcatcttgtgaagaaagctctaacaggcttctttttgtaggtatatgagtccgatcacgcaagatagcatgatcagtagcagccatattttcaataagctccatagcttcttcaggagtcttcaatttaatctttcctccagcagaagcatctaataactgcttggactatggtctcaaaccatctataaaaatgttcaattgaatcggctcaaagaatccatgagttggtgtctttcgcagcaagctacagaatctctcaagtgcttcactcanggattcatctgggaattgatggaatgaagagatagctgccttgccttcagctgtc

SEQ ID NO: 290980 - DNA, 391 bp, Glycine max
agcttataaacctttttatgtgaagatttgaagatcttaatgtatactacataaaagaaaatgctaagcatagcttctgctttttcctctttctttttaacttggttggactccataaattttgttgattaagatgttgattatttgaagatatatttatagcagtttgttaaatgagaaaaatcctaccttgcacattagttgatttggatagtattacggatgtttctcttaggggaatcaaattcagacaagaagttatatataaacttgacttatagaaaccaaactgtgcagggaagatgatgcacgaaggatcggttgagttggagaccgtgctttctttaagatctcctacagcagatatggaaaatgatgacttgtttggtaa

SEQ ID NO: 290981 - DNA, 423 bp, Glycine max
  unsure (1)..(423): unsure at all n locations
ntctgaataaccaagatgaaagtagaaggctgaggagtgtgatgtatcaatacaatggaggagaactgcatataaaggcaattttttttaaagcaactcgtagctcgtgatggcgcctcccccttgcaacgcgcaacctccaatggcgcgtccttgctacactgctacagcctgcactacactcagagctacgctgctgcaccctagggccttcaacgcgccagtttgactggcgccatgcccaagtcgccatttgctgcttgcgactccaatgccacgtangcacaaaggcaaggcgctggtgggaatggcgacaccagcgccacgtgtcacctcctcgccgaaagcgccaatggtggtggcgccatgcatggtgtttacgtgaaaaaacaacacccctctgtatatgtttagaaacaaccc

SEQ ID NO: 290982 - DNA, 394 bp, Glycine max
tttgcaagcttcaacgggatcgacagacccttggcatcactctacgatcttaaatcgggaaagtttcacttggttacataccaaagtgtgacaatccattgccatccttcaatggggcacacgactgatccgaaagccttatgttttcttactatgtagaataatcgaattttttttaaaaaaaggggaaaaccctaggatcaatatttcggttgattgattaaatgtcaaatggctccattgtcgtcatccaaaattgtcaagtgattaaacaaaacatactctttgaaggagtccccgaagagatttgcaaaaaaaaaaaaatagaataaggttgcatgaattatcacatcttctacaaagaggcaatcaatttgtgttttcataataaaaa

SEQ ID NO: 290983 - DNA, 420 bp, Glycine max
  unsure (1)..(420): unsure at all n locations
ntaacctcatcgtccctcacagtctttagatttgggttctcaatccaatccttgggttcggactctcagccacttatgatagtcgccgatgatcccattactgcttcccctaagctctctgtcctttcttcacgccgcatcccatgccttgcgaactccttggagtaccctcgcgttgtggtcactaaaaccccgtgcgatgaaaggcgtgatgctttcgtctaatggcgcttctctcatggggtagccaagctgtcttatggcgaggacgggattataattaatacaaccccttgttcccatcaagagaacatttggacatccttcgcatgaagatagaatcctgattcttccttccttctagcgaggaaaccaattaacagacgcccctccatgctagccaagagttggtcccaattc

SEQ ID NO: 290984 - DNA, 388 bp, Glycine max
agctttgactcggatatccgattgaggcccagtatatatcatcgccctcgaatatagaaatggactgaccacgcaaattcggacagccataacgtttgactcggattcccgattgaagctcataatatatggagatggtcttaggaaaaaaatgaagcccatcgcaaatacaaacgaccataacttttccaccggatctccgaataagccaagtaacctatcgcgatgctcaaaatttatcatggaagactcgggtgaattccgacgggcaatactttttactcggatgtccaattgaggcccataatatatcatcgccctcgaatatagaaatggactgaccacgcaaattctgacagccataacgtttgactcggattcctgattg

SEQ ID NO: 290985 - DNA, 414 bp, Glycine max
  unsure (1)..(414): unsure at all n locations
actaagctttcattcttcatgcacccgttgggttttatttgtttcggcattggattctcatttgttacttttataccccctgtgacgtgcttaagccattttacttaagtcatttctcgcttaacttataaataaaataaattcccaccgaacgtttgaattgtattatccattaacttcggttaaaataaattccgaccgttcggtcgtgccgtaaccacgttggaaatcaaaaaaagaggtaaaaataatataataatcaaaaacatcttttagtaaaataaagcggaaaatcaatcggacgttntctctntgggatttctcattcttaatcgaattgattaataactaaagtgaaactaaggctaanaatcaactcgcctagtcaaactcgtccacaaaaataggcttttg

SEQ ID NO: 290986 - DNA, 384 bp, Glycine max
  unsure (1)..(384): unsure at all n locations
agcttcgtggcaagccagtggttggaggacaaggctggatggtgaagttgatgtgagggattcataatcatgaattggccaagtcattagttggacattcatatgttaggcgattgactaaagctgaaaagacacttattgctgatatgaccaagtcaatggtgaaaccaagaaacattctgctaactctgaaggagcacaatgccaatagttgtatgaccatctaacaaatatataatgcaagaagtgcatatcgttcttccataagaggaagtgatactgaaatgcaacatctaatgaagcttcttgaacgtgatcagtatattcattggcacagattacangatgaagacgtagttcgtgatatcttttggtgtcatcctg

SEQ ID NO: 290987 - DNA, 408 bp, Glycine max
ctaagcttgcatattaaaaccttaatacttgtgttttagatcttacacatgataggtttgccaagagcatgagctcatataatgacattgatatgaagattttttgtgccaaatacatcaagctcaagagttaatttgatgtatctattactattgcatgatttaacaactataagaaactatagttagggtttagctatattgacttgtctttcttgagctttagataatagggttgactttaagcaagaaaatattggaggatgcacgttgcttctccaatcatgggtgtaggactggattacatgcatttctccatatgtgtaggtatgcaaaattgtatttttgtggttgatttgtttcttttatatagaaactaaaattgtgtcattattagtgttacaaatg

SEQ ID NO: 290988 - DNA, 407 bp, Glycine max
agcttttactatttatttaaagtctctaaaatggacctatattagactattgagtaaaatggccctatattggaattaatagaccttattagaactaaaatggtcctatattgaaagaaatttctaactatggatcaaaagactctgatcacatcataaataaaccatatgtttacggactgggcttatgctcaatccatatctcatctctactatgctcaaatgttccaaacattcatctcagacagaatatatatgatatactacatctattaagacacatgaatctttttatgtttcattaaatatctaactggtactatacctaaaaaaactattcggaatctgacataattttaccaagttaaagtgtgattgtgggataagataactgatcataagctaca

SEQ ID NO: 290989 - DNA, 430 bp, Glycine max
  unsure (1)..(430): unsure at all n locations
agcctttcaggagtgaatatcaccagaccaaataaaangnctttgaatcttctttttcctngagaagggcccttggccatgagtacatgtggaaggagtaaagcaacgtgccatttatgactgacttgatcagttgaacccgacccataatggataagagagcgcccttctgagtaaccaacttagattttatacgatcagcaataggccttatatgaataccgcggggctggcttagaaaaaaggggacaacaatgtagttaaacgacagactggccacagcaaaacctagaagaagttttatctactctcagggtgtacccaagggattggtttgggttagatttccaagaacaaaaaataatcatctaatctagattaacttcatcattgtacacagtatggatcgaataatcattcaaaatattta

SEQ ID NO: 290990 - DNA, 406 bp, Glycine max
  unsure (1)..(406): unsure at all n locations
agcttgcttgtgtagcttctatggaggctggatctttgagcttcaatgaggtcctttaatggtgattttccaccatggagatgcagcggaagacaaaggagaagaggtaagaggcggcgccatccactagggaataagccttggaagaatgagcttcaccacccagatgagtctgggataagaagcttggagaggatgcttcaatggaggaaaagaaagagggagagaaagagagaggggggagcacgaaatttaaggaagataaagagagagaagttgaactttgagttatgtctcacaagactctcattcatcatagttacaacaagtgttacacattcttgtatctatagactacgtagcttccttgagaagctntcttgagaagacttccttgagaagcttc

SEQ ID NO: 290991 - DNA, 413 bp, Glycine max
  unsure (1)..(413): unsure at all n locations
taagcttcacatggagctacatcacagcagctgctactgggctctcaactttgtcgcttcttctctncgcgcctcttgtcctcattcgtgcttccttcacgagtctcttctccacctctacaagtctcatctcctctgtcatcatgagtagtgttgtgtcgccgataatgagtttttattttttggactctgtttactccattcagatttgcaatccatatgggacatgcgaaatacgaaatacaaaatacaaaatcataacttatatggattgacaattcgtatgtttcatacagattagcatagattgaagttacaaacaaaataactaacctcctccgctgttgcattgtaacacccaccatgatgacaatcacaaaccgcatatgaaccaccacgaacaatgcacctcg

SEQ ID NO: 290992 - DNA, 393 bp, Glycine max
  unsure (1)..(393): unsure at all n locations
agctttataattattaaaatcgattattnncgntatctataaaacaatttgatttcacgtgcatcaaaactttgttttgttttaaaaaattatccattaggaaacaattgtgtgtaatatcgcattatttctacaatatgtcgtttcaaatgatttctttataattataaagctgaagttttccgacccaagaattaaaggtctccctagtgaaatatcattctaacttacgaaataatttgggtcagtttatttgttaaaaagtagagaccattgttatctataaaagatgaattgatgtaaataaaaagactaaattgatcgatttttttattggttaacaacaaaactggtaattttcatttttccacggaatatcaatcttaaatcttg

SEQ ID NO: 290993 - DNA, 431 bp, Glycine max
taaaggagaaagaagatagaggaaactaaaattagtagtgattgttaattatcttacaagagagttggttattatagttttatataattggttgcaagaataactaacttgtaactaactaaactatctcttgtaacaaagtgatcaatctgaattaaccatgatcaaactatatctatgttaagatcccccttcaagctaggaatggatattggatattcctaacttggaatacaaaaattgaaaagaatcaggcagcatggccttagtgtatatgtctgcaagctcattagcaaaggtgataggaagtaatttcacaattcttttatgcatcttctcccgaactagatgacaatcaatcttaatatgttgtgttctctcatgaaaaacatgatatgttgctatatgaagggcagatcgattatcacaat

SEQ ID NO: 290994 - DNA, 386 bp, Glycine max
  unsure (1)..(386): unsure at all n locations
agcttgtctttgttttanacattattgatacatgatttgggacttgtaggatttgatttgggcaagattggatgaaaggaagggtgattttcgaaatctgcacttatgcagaattttgctgtcaaaataggtgcagcagaattttggctttgtgcagaaaaatgcttgtgtgtggtgggctgtggaaagagtagtacagaatgagttctggacgtttacaagtagatcccaacggtcacaatgtatgcttatgtactagagacttccagtaaaattttcgagtcgatccaacggttaatgaaccggaacgaaggaattgttactggngtctntaagtgagaaaagctgtganttggttggtgttttgggcagagttttctgccttt

SEQ ID NO: 290995 - DNA, 429 bp, Glycine max
  unsure (1)..(429): unsure at all n locations
ctcagcttacaagcagcttcatcagtggttcagagccattatctttttttggtgctccttaaacctccattaattntcagctctaccttctcctccattgttgtttcttcatttttgtccatgtatctcctcacatgtcttgtgataaatgttgttaacatgattctttagaatttccaccgattaaacttgctatagaagctagatttgattctctatggttcaaatttcttgttcttgttcttgaaccatgaattgtgttgagtttagattcctttgagttttgtcttgcaatttttttgtggctgaaacctaaaccataaaattcttacaaaaacattaaagtagaagaaaacctaacaaatatagagtgacttgttcacctattgtagttntgtcatagaagtcatgtctaatcatgaaacttgt

SEQ ID NO: 290996 - DNA, 395 bp, Glycine max
agctttgagccataatcctaacttaccataaaccttgacccagggtgagaatgtcaatccttaccctcggaagcaaaaaagaagagaaggaaaatttccgatcaaagaaaaaaaagagaaggaaaatttccaatcaaagagaaagcaaaaaaaaaaagagaaggaaaatttccaatcaaaggataaaatagaggaaaggaaattcccaatcaaagagtgggagaaagcgaaaagaaaagaaagaaaattcccaaccaaagagtgggagaaagtaaaaggaaggaaagaaagctcctgatcaaggatcgaaagatatcagaagaaatgtgcagaaaggtctgtggaccggacaatatatgtacaatacagaattgttcaccaatgaacataaaaaa

SEQ ID NO: 290997 - DNA, 386 bp, Glycine max
  unsure (1)..(386): unsure at all n locations
taagcttacaacagattntagtaatgacccactaacctagaatataaattactgattgccattaaccttgggaattaagaaaaaacttaatggctgagtgtaactgagatcgtggcaaccaaaagtcaccctcatcagccaacaagtcagccaccatttggtctcccaaaaggctgatgcctaggttgccaattgggcccttattacaacttgaactaaacctactaatgcccctttatttgattaacccaaaacatatttttggtcagccaactttacaaggattgggccagtatttagacaaactaaacactctaagattgagacatagtggtgtcattcacacctgctacattcgggccatgatacaactcacatcctaggac

SEQ ID NO: 290998 - DNA, 400 bp, Glycine max
  unsure (1)..(400): unsure at all n locations
agcttccatcaagtggtatcagagcacaagagcttcaagtaggtgctccttaaacctccattaattttttgctttaccttctcttccattgttgtttcttcatttttctccatgtatctcctcacatgtcttgtgataaatgttgttaacatgattctttagagtttccaccaattaaacttgctatagaagctagattttattttctatggttcaaatttcttgttcttgaaccatgaattgtgttgagtttaggttcctttgagttttgtcttgttattttttgtggctgaaacctaaaccataaaattattagaaaaatattaaagtagaagaaaacctcaaaaatctagagtgacttgttcacctattgtagttntgtcatagaagtcatgtctag

SEQ ID NO: 290999 - DNA, 429 bp, Glycine max
  unsure (1)..(429): unsure at all n locations
nttctaaaggttataactcttctaatggttttcttgatctgacatgaagagtctataaaagcaagaccttgatttgcatttcaacaacacttacaacctttacaaacaacttttccacatattctttttcaacctttaaatctctttgaacatcttcttcttcttcttcttcctttgcaaaagctttcttaagttttttggttttccaaaccttgaaaacaaaaattgtgctattcatctttttcattcccttctccctttgccaaaaagaattcgccaagggctaaccgcctaaattctttttgtgtctctcttatcccttttccaaaagaacgaaggactaaccgcctgagttcttttgtgtctcccttctcccttgtcaaagaattcaaaacaacacagtctgagaattcttttgattcttccctt

SEQ ID NO: 291000 - DNA, 392 bp, Glycine max
  unsure (1)..(392): unsure at all n locations
agcttgctctaaatttacattgatgtttgtatttatgggaggaggttatatgccatttttgctttaagagtaatgtcccactaaaactaactttccaaatgtttgccttcgcaggaatggccccgaggaagcttgcctcaaagaggtccaggaaggacaaggcggccgaaggaactagttccgccccggagtacgacagtcaccgctttaggagcgttgtacaccagcagcgcttcgaagccatcaagggatggtcgtttctccgggagcgacgcgtccagctcanggacgacgagtatactgatttccaggaggaaatagggcgccggcggtgggcaccactggttactcccatggccaagtttgatccagaaatagtccttgagttttac

SEQ ID NO: 291001 - DNA, 430 bp, Glycine max
  unsure (1)..(430): unsure at all n locations
atggtaaaatctgggacctagccatggcagatgtcttcacataggccattgcctccctcgcccaatattatgaccagttgttgaggtgcttcacctctggggacttccagttatcacccatggtggaagagtttgaagagatcctgggatgccctctatgaggaaggaaaccatacatcttctcaggattttatccctctttagctacaatttctaagatagtccgaatctcgacgcgggaattagaccacagaaagcaagtcgaaaatggggtggttggagtaccgacgaaatgtttggaaacaaaagcaagaatcttggcaggtaaacgcgaatgggccccattctaaacatcctcgggcttttgatcttatgaggggtcctctttccaatgtggatgggttggtggacctggcagcaatcgacgctn

SEQ ID NO: 291002 - DNA, 394 bp, Glycine max
  unsure (1)..(394): unsure at all n locations
ctttcaagcttatgtnatnagtccatatgagccaatgagcattatacattttgctctgctggaaacaagagaaaaacaaaccaatatatactttgattcaaaggggtgaacaaatatataatccatatgcatcgaatacatagcatttatattcgcgaggctgatgttctcaatcatttcatggagatgttatcatttcccggctgaaaagcaaaaatgtaaatactgattttcgtttctatagtgtgctgataaaattcgttcccaaagatgaaaacttacattttacgttctcgaaagtgaaaaagtgtgataaatatattcattcattaatttttatccgttacaagttatgaagagacgaattcgttaatgctctacatattcaccaatg

SEQ ID NO: 291003 - DNA, 258 bp, Glycine max
  unsure (1)..(258): unsure at all n locations
aatatgaaactacgcttgctttacaaagcgcacacaaaaagtagtcatatctctatatgaaccttnggcccactgcccccggaacggcgccaaatttggtcgaggtcgtacctgaatcaaataaacattaaaaatgcagtatctaggaagcgatcataggtcgtctcccaacgagcaatggttaaccaaacgttcataatagatagtaatataacagttacgaatgggagggggggggttgtatattaaacataaaat

SEQ ID NO: 291004 - DNA, 317 bp, Glycine max
agcttgaaacacgctctttaaaggataaaagaggacaaattagaggcaaaagcggggccagaaattctcaccaattcaataaagagctcatcatttactttcttgtatgacagaggctgcatggatgcaaaatacttgatgcacacctgtcttgcttcaggcttttgagcctgcaaggccttccttgtctcttacagcaccttctgatacacttccagtgtcatctcctacaacacaggttaaatgccgtttagcaatgagtgaacaataacgaagaaaatataaaggtcaaacgtaacacactaaaagcatgatgg

SEQ ID NO: 291005 - DNA, 370 bp, Glycine max
aagaataaccacaagtggttcactgaaaggaggggaaacaaaactattatactataaattatcttttaccgtacaccacatgatgttgccgttgttgcgatctaaagcccatgcatagccacttttctgaaccgcaacaacaacatctttcttggttcgatttatatatatggacaacatcattggtgcctccccagaatcagcatcttgccaaaaacctctgggtggacaattaggagctgaagcatttatacatgctaagataaatatatcgaagcctccacactggcggtaccatctgatcttccacgaatacaaatcaacggctaatatcgaattggagtggatgtctggctaatacactcatctg

SEQ ID NO: 291006 - DNA, 392 bp, Glycine max
  unsure (1)..(392): unsure at all n locations
agcttgtaattctgagtactatcatagngagccagtggtggttgtggctcaaccaaactgcaacaccggtgaatgtggggaggttgttgattataaacctctagggctaccgattcgcagtttgagatcggttgctagagatgtagatagttctagatatgccaatgaaagtgattccagttcagtttcaaggggttcttctagcggattgggtaagagcggagatagggaatttggggatctgggtccttccaatttggagaaaaaatttaatgatgctgctgctgctggtggatcagcttctgcgattccctggtgctcaacgaatagatggacggaaagggagaagacatctggcaatgttaccagtccttcgcatgttatgccacttt

SEQ ID NO: 291007 - DNA, 426 bp, Glycine max
  unsure (1)..(426): unsure at all n locations
tgaagtatcaggcatgagaaatcacagacattatcatttttaattacattgtgtaaaatttattccgcaattctgagcatagcactgtatacaaaggagcttaaattattaaagaaggaaaattgatttgaaacggacaaacacataacattgttaatcagagcaaatattattaaatagtgaaaattggaatggatgctagcacatatcatcagtcatagcctcaccgacccatcaattcgacaacctcaaagtacaaacctttgagcaagaaacctcaacttcagagagaataagaaacacacacacacacgcagagagagaggaatccaaaaaaggcaacaggaggtcgagagatgccaaaatgcaaaaactccctacattctcttttgtctccattggaaaaatatcaccttannacagtca

SEQ ID NO: 291008 - DNA, 380 bp, Glycine max
agcttggagctgaggaacggcgcacgttcatagagaagcttattaaacacattgagaatgataaccttcgattgctgcaaaaattcaggaaaagaattgacaagtaaccatttctcttagtttcactactctttctctttccctttgtagctcgtgttgcttggagatgtttcactaagttttattaaattatgaatcatgttagaagtcaaccaaattattatttatcacacttcttctaatggcaaaagttacaatataagtctagctcaaatgtgtcatggaaaaggataaaatataaagttaaatataacggcacagagaaaacacattttcatctagttaagtatctggcgtgtaagtttatggtgtaatagatg

SEQ ID NO: 291009 - DNA, 344 bp, Glycine max
  unsure (1)..(344): unsure at all n locations
tgtatagcacataaatgcaatgntaaaaataaaatttaaaatgttctacacaagtgggctgcatctggctatatagtcgtggcatggcatattactagatattatacactcagaattgtcccatacaacaccagaagcgtcacaattgtctcaaaaattgttaccaccaaattatgttcttaccgccagaagtgttgtgtatggaaagcaagtatgagcttaacaaatcgactgcaaattacttagatgcaaggacaatttaagtcagtagaccacatcaagttattgcaataacccttaccaacatctgatgtaccctaatgaagccgagggacaaagaatat

SEQ ID NO: 291010 - DNA, 381 bp, Glycine max
agctttgaatggaggctctggtctcttgttgaaactgcatgttttgcatagtcatttgcctcacaagttcttcaagggaaggttgcggagaagcctcaactatttgttgtttctggggttgttgctgttgttgttgttgctgttgctgttgtgaatgatttgaccatctaaggttgggatgattcctccacccgggattgtacctatttctagagaggtcatagttgttcttttgtggctgattttgctgctgaggttgagggggtctattgtagatgtttgcagcataagcttcaagctgttcaattgcttcatattgttgacaaaaaggcaaaagtctgtgtggtggtcggcaaacgatcatataccatatagtctacc

SEQ ID NO: 291011 - DNA, 528 bp, Glycine max
  unsure (1)..(528): unsure at all n locations
acggtgattcagtctctgacancncnantnncnaacnncgcggggnaactcagacgatgaccgatttctttcacttatacacccaatagagaggcggagtgggggtgctatgtgatatacatagtccaccacacctacatgtgtaaaactcaagtcgtaactccaacgtcacatcgcctctgcggcacaagacaaccttctcgccacggtggcgttagaacacgagaaaggcctcgtgaacgcatcggcgctgtcccgacataatgcgacagccgtgatatggtagaaatggcgccgaggaagcggtaagttatatctcttgacgcatgacgtgcaggaagcaccacaccggggtatggttgcgctactccgtacanagcgtgtgctgatagcgcgcatatgctgagccaacgctcgacatgccgatcaactgccgcttgacagctactactgtgataatgagtatggcaaaaataacgataatcttagtgccctcatttgcctatacgcaacgcatggtttgtctcg

SEQ ID NO: 291012 - DNA, 408 bp, Glycine max
agcttatctaagtacccttttgctcatggaaggagcaagaatattgaaacaaaattccacttcctcaaaaagggaagttggagttgaaaaattgcaataccaatgagtagttggctgatttttaacaaaatctcttaatactgatcgattcaagctaataagagacaccataggggtgctgtctattgctaatctaaattacacggaagtgttgtatataattcagttagtggttatatgttagtgaattgttaacaaactacttgtaaatgtgtaccataaatagtgatgctctgtatatgtgataaaaagaagtaagaaataaaattttctattcaataccatatctcttatcttgttctctctcttttcttctctgttcatgtaagtgatctcattcattctgag

SEQ ID NO: 291013 - DNA, 424 bp, Glycine max
  unsure (1)..(424): unsure at all n locations
gaagcaagatgggattntcctgcactgatacattatctattatgattatgtatttgtcaaaataggttagggtttgatactgagttctgcaacagccacatatggttcatttttttctttaatgcaaaccttcacacctagctcactaaaatttaccatctgttgtagatcagtgcaagacagcatgatattgtacaattagaaatgtggtgcttgaggtttaaggaactagagtttacatgataattaccttattaggaatgtcattgtcgttgattntagtgatgatactgcaatctgtttcttctctttgctcccctgatgagtntattgttgttgatggagatacagatgaggaattttgggttctgcaaacatgcaaaaaagccatccttattagaaaaataaggtatttgttagatac

SEQ ID NO: 291014 - DNA, 395 bp, Glycine max
agtttatattaatttagtctaaactttcataagctatttaagctgagtctagtccaacaagagggatctgaggatgaagcttagtttaagttagtctaaacctatgagggctgtctaaattaagcctagtccaacaagagggatctgaggaggaagcttggattgattcagcctaattagggatcgaggtttagtaatttaggctacaacatagaacacaatagcacgattgattagagaaacatctttatatacatcagcttgtttgttagaaagacccaacaacacttttacctactgctgtcaatcttaattacctatatttctactggttttagcctagacttagtttaattttgttctacattaccaatgtttctttcaacaatgcctta

SEQ ID NO: 291015 - DNA, 426 bp, Glycine max
  unsure (1)..(426): unsure at all n locations
agatgaggaagtgtagaagggtgaacttcctgcttttattttcgaccacagagnggtacctggagatatgtcgcgggggtcaagagaccttggggacgtcaggtggggtgctattgcccaaaaccaagcttgaccaatcccgacccaacccgggcataatcggtcagtgagaacctgtgatgtacctaaacaggcgagctcctggcagtcaacagataaaaggaacaaagaccacaaagcatggaggcttgtggtggctggccagttgtgaattattgtgtgatatatgggttgtggcctctggtaatcgattaccaatggagggtaatcgattacaaggcttaaaaatgaagataggaggctaagatggtctctggtaatcgattaccacggagtgtaatcgattaccaggcttgaaaacgaggt

SEQ ID NO: 291016 - DNA, 401 bp, Glycine max
  unsure (1)..(401): unsure at all n locations
agcttatcaacctttagacataatcagaaacaggtaagatatcatgcttcgcattcatatcaagttttaaattatcaaattacctcaactaataaaacacatacaatttttaactctttcttttgcaactcctcaagagctttctgaaaaaatctgcattcttctagcaaggagatctggatgaatacattcgatgcagaaaatcaccatgtcagggaaatattaacagtggcatatgaaccatataaaagacttcatattcctaaacatgcacttctagtgacaacaganatatttgcattcaaaacaaaacacaatttacctagagcaagacatccgaaacatgaaaatatagatgctgagaaagttctctatttgagttataatggctataatgcata

SEQ ID NO: 291017 - DNA, 356 bp, Glycine max
  unsure (1)..(356): unsure at all n locations
attagaaacgaaaatgcttagcattcctcatatattgtgagaaatatagtaattattataaaagtcgtatcaataataaaaaataatttaattgatttataatactataaaagaaatgaaagataatatattgtgcgaaaatatagtaacttttttatgtagaaatagaagatgataccacaatttacaatactcatgctttattttcaatcaaccattgctattgattaaagatttacaataatacggngatggtttaaattttattggataattagtattnttttaaaatgtgtaattcgttaataaattcgttcctcaaatactaaaattcataatttagtactctanaatgt

SEQ ID NO: 291018 - DNA, 404 bp, Glycine max
  unsure (1)..(404): unsure at all n locations
agcttccatcatttcaccaacagacatgaaaacccattcaaaaaaaatgatgaaggcaagtgaattctcattattagtttcaaggttagcacaataataaatcttctctatttcacattaattgtgtgtgagcatctttattatctttatcatttttttttctctgtgaattcttaattttcaaactaaatctaacatatgccaatgtatagtttaatatataaaaggagaaactattgtaaaatataaaattcaactcttacacataaaaacaaaaaatgtgtagagatagacatatattcagaaaaaataattaataaaccanaaataacatangaaaaaaacttacaaaacatgattntgtgtaggtaaaaccaataaaataaaacttttactacctatgg

SEQ ID NO: 291019 - DNA, 487 bp, Glycine max
  unsure (1)..(487): unsure at all n locations
ggggatgtatttgtgcgtcgctagacgtgcactatagataactcaagctccgctagtcttttcaacaccaatactctntcactaagtctctaaaggatccacaacacaactcaatagttgtatgtccaaccaataatccaacactaactcaccaaatagctttgctaccataattcagtaacagtaatccttagtaagtagtctatgaagtattcttttgccaagctttcatagacttttcaacccaatattctttcactaagcctctaaaggatccacaacacaactcaatagttgtccaaccaacaatatatccaacactaactcaccaaatagcttttttaccatacttcagtaacagtaatccttactaattagcctatggaagcacaatctacttcaaggacttcactctagactctatgttggtntatacttggaaagaatggatacacaaaanaataaaatggctcataaacactcatta

SEQ ID NO: 291020 - DNA, 401 bp, Glycine max
tctttcaagcttattgcaacttattcatatacgcaactgaacgatagctgacgagaaaacgtatatgctcggacttaatgcgggctgcagcaccggctccgcttccctaactgtactacaggcggttgccgaggctctatcctctatggttctatggagtttcaacatgacctgtgagatagaagacacatgagacattaatgaccttcttatcgacagtgttgtttagttcctgtagggccttattctgcatcatttgaacataaaattaaatccactaattgtatagttagaggatcgtccacaaaacactgatggtttgatataaattataaattagttcttcaatatatttaatgattactaatattgaaattacatatgtataatacatctgacct

SEQ ID NO: 291021 - DNA, 434 bp, Glycine max
  unsure (1)..(434): unsure at all n locations
tatgtccaaacggctaaggtttgtcaatgtaaaaatgcttgatgtgttcattcctccagtgtangaatttgagtgcagcacaagaaacttcagttgcttgaatttcccaaaaatctcctgcacctccccaccaaatttattcctgcttaaatccaagatgaacaaatgggtcaagttcaaaagggtctctgggatatccctcgagaaagtgttgttccccaagaacaatgcatcaagaccagaaatggaaccaatttcactgggaatatctccagtaaaattgttaccagaaaggttgagaaccaacaaattcttgcagttagcaacctcctttgggggcttaccgtcaaattcattaacagaaaggtcaagtttttcaaggctacaattgattggaaaagccttggaaggaacaacccctgtgagaaaattct

SEQ ID NO: 291022 - DNA, 401 bp, Glycine max
tttgcaagcttcaaatcacgatttcttaatatatgacaattgaatagaaataagttgaattaatcaaattccaatattatacaaaatgttggaagatggagacgagaattttcaactcacaggacaaaatttagtcaaaactagaatttctccactaggatcaacagtatgtctagccgctagggtctccattacaattgaccttgctggtaaccatgaattgacatgaaatcgaacactctgcaaatgaggagggagctatctcaaacaacaaagcaaaaggtaaaacaggcaagataaaattcaaaaccacttattcatgttaaagttcaacaagaaagtacacaagtgaagacttacatccagaaactcactgccagcaagagccattgcacgttgaa

SEQ ID NO: 291023 - DNA, 422 bp, Glycine max
  unsure (1)..(422): unsure at all n locations
tacgcttgtgtaacttctccttaagtaccattttgaatgcgttttgacatccatttgttgtagtggccaaattgtgaggcgcaagagcaagaatatgccacagttgtcatcttggcgaccgggcaaaagtctcatcattagccaattcatattggtgcttatttccaagcacaactaaacgagctttgtaacgatctatggatccatccgagcgcagctttatagagaacacaaacttgctacttaaaggcttaacagatgtgggacacgggactatatcccatgtttgattttcttccaatgctagaagttcagtttcaatagctntctgccaacaagcattcttcatggcctggctataagaggaagggataggaataaaggataatgaggctgtcatggaatggatatacctgtctggg

SEQ ID NO: 291024 - DNA, 387 bp, Glycine max
agcttcaacatatgttcgtgagctatgtgcaatcactgttgtggtaaaaaaaatggaggcagtatttgcttggacattccttcattatcctcactgataataggagtcttaaggagttgatggcttaaatcattcagaccccagtgctatcttagattaatgggctatgactttaccatccaatataggtccgcccattcaaatttagtggtggatgtgctatcttgcacttccaaggtttccaggggtatggtcttctcactgtcgatgcctcatttcacattcttaactgaactcaaacgttaattagctgatcaccaagagttcatagctctccggtgagacctacaggaacatccagataatcaccctgatcacacttacaca

SEQ ID NO: 291025 - DNA, 474 bp, Glycine max
  unsure (1)..(474): unsure at all n locations
aggtgcctgtgatgatcgatgacgacacttanttactaagctccacactntannattcaaattttaaaagttgttacatatagtattaacttttggtaatcgattacatgcgttgtataatcgattacactgttttaaattcaaattcaaaatttataaaactgtttcaaaaattattttagttattagtaatcaattacatcctctagtagtcgattaccaaagagaaaacatcttatttttgaaaacataattttacttacaagtttttgtaagatattttcctctgtcaaacttgtgcagcatcatctaagaaattcttttcaagatcctatgaactaagtacatcgttcttcttgaatttttttattcttgacttagatcgtgctcatctttgacatcatcaaaacttcatatcatatatgcttctgcaatacttttttcactattgaattangaatgaatgagggtttt

SEQ ID NO: 291026 - DNA, 394 bp, Glycine max
  unsure (1)..(394): unsure at all n locations
agcttggctgcacacaactctctaatagctaagctcacctccttgagatgaaaagcaagagcttagctacacacatcccctataatagttaagctcacccccatgccaaaatacatgaaaatataaagaagtccctaatacaaagactacttaaaatgccctgaaatagaaggctaaaaccctatactactagaatggccaaaatacaaggcccaaaagtaggaaaaacctattctaatatttacaaagaagagtggacccaaccttggcccatgggatcaaaaatctaccctgaggttcatgagaatcttanggccttctttagcagctctagcccaatccttttggagtcttctatctaatacccttggggggtaggattgcatcanagtcg

SEQ ID NO: 291027 - DNA, 425 bp, Glycine max
ttctgcattcaaagcaaatgatttcattgctttccactttgtatttcttcttgaatttgttttatcttttcgtttgggggaatgctgaaactttcctttctttttcatcatttgttcaaacttcctagacataagagccacttaaatcatctgtggatccctcagaattgttattaaagccatcagactcaacaatatgcacttttagagctttaggagagttattcttttcttcttgtctggagctaacttctatagttttgagggcagcaaaatctttcaaaggtagatgatcttggcaaagctgtctagaatcttcaaatgtatctaagatttggtgaaggtttgtcttagagcttcaagaccactcataagcacttaaagtcttccaaacatgtcatccacaaattctccttctttcatgg

SEQ ID NO: 291028 - DNA, 391 bp, Glycine max
agcttgaccaatctttacccaacccgggcatagtcggtcagtgagaacctgtgatgtacctaagcaggcgagctcctggcagtcaacagataaaaggaaaacaagaccactaagcaaggaggcttgtggtggctggccagctatgaattttgtgtaatatgtggattgtggcctctggtaatcgattaccaagggtgggtaatcgattacaaggcttaaaattgaggacaggaggctaagatggtctctggtaatcgattaccaaggggtggaatcgattaccaggcttgaaaacgaagtcaggaaacttatggagcctctggtaatcgattaccagcctgtgtaatcgattacacagatgaatgggtcactggttatcgattaccaggca

SEQ ID NO: 291029 - DNA, 411 bp, Glycine max
  unsure (1)..(411): unsure at all n locations
taatgcggatcaagttgattcgcaagtnttgtgcggatctacttgttctgcagtaggtagggttctctgaggctgaatgtggatcaagttgatctgagagattcatggtttagcatatggatcaagtacaaggtatatgattcacaggagtattttcgatgaagttccttcatgcggatcaagttgatccgcatgaatgtatttaaatttttaaaaataaaaattagtttattatttattaaaatgctattaaattaaggtttagggtcaattttgaggctgccttgtcatgtgcctaaaaaggattacaaccacatgaataattatttccttggataagataaattttagtgacccctatataacactcctcccatgagttataatcagaaccacaagatcgtgggctta

SEQ ID NO: 291030 - DNA, 392 bp, Glycine max
agtttgtccatggttcagacatgattgatacatgatttaggacttgtaggattcaatttgggcaaaattggatgagggcaaatgtgatttcgaaaatctgcactttatgcaaaattttgctgtcaaatatgtgcagcagaattttggctttgtgcagaaaatgttgtgtatttgctggttgtggaaagagtagtacagattggattctggatgttttctagaagatcccaatggtcacaatgtagacttatgtgctagagacttccagtaaaattttcgagtcgatccaacggttaacgaattgtaacgaagagaatgttactggggtatttaagtgagaaaagctgtgatattggtttgtgttgggcagagttttctgcctctgccctgtt

SEQ ID NO: 291031 - DNA, 425 bp, Glycine max
tatgctgcaaacatctacaatagacctcctcaacctctttcagctaaatcagccacaatagaacaattatgacctctccagcaacaagtacaatctcgggtggaggaatcatcccaaccttagatggtcgaatccttcacaacagcaacaacaacaacaaccttattttcagaatgttgctggcccaagtagaccatacgttcctccaccaatccagcagcagcaacaacaacaacaacaacaaccccagaaacaacaaacagttgaggctcctccacaaccttcccttgaagaacttgtgaggcaaatgactatgcaaaacatgcagtttcaacaagagaccagagcctccattcagagcttaactaatcagatgggacaattggctacacagttaaatcaacaacagtcccagaattctgata

SEQ ID NO: 291032 - DNA, 359 bp, Glycine max
  unsure (1)..(359): unsure at all n locations
agcttttaggcagtttataccattgtatggagaatcgcctttgttgttggggtcatgactactacccatgttacagcccaacaggcactacaaagagagagagagagagcaagaattagagtggctggctaatgttgtgttttgcttgctgtttggtggcactaaggacatggacactcccttcatctaatattccttgtctagattgtcatgttcaatcagaaaacaccaattgaaatagaatcgggaactctccacaccaataaacagggctgcagatttttgttttttgttttaattcgggaaaggataatggatctgatgggcaaacaaatataatgcagcaagtagttntctca

SEQ ID NO: 291033 - DNA, 407 bp, Glycine max
taccagctgaagatccatctgccatgaaatatgtgagtcccttttctatttctttttgtcttttatgaacaattgagatgcaaacccttggaaattgagctcttcatacaacttggcagcctgaagattcagactgggatgaatttggcaatgatttgtattcaattcctgatcaagtgcctgttcaatcaagcaacttaattccagaggctcctcctcccaacaaagctgatgaagacagtaagattaaagcctttgttgatactccagccttggattggcaacggtgggtagagtatcctcctttccttagttgtgttgtttggtgcatgtagtcatcacagaatggaaataagtatgatgataataatcaatgaaacaaaaattactaattctttcccacctac

SEQ ID NO: 291034 - DNA, 433 bp, Glycine max
  unsure (1)..(433): unsure at all n locations
catttactattaaagctgtgaatgcaattcaaaatgtataagaaaatccccgatcaaagattggaggaaaacaaaggaaaaagaaagattcccgatcaaagatcggaagaaagcaaaagaaaatatatagaaaggtcgttggaccacacaatatctgaataatgtacaaaattgtcacaagcaagaaagaaaagaaaaacaaccatgacttgagacgcatgaagcaatccccttctttgttaccaaccaaatctttgtgctcgcatctctttcacactgtgccaaaagaaaacagaaaaggaaaaggctgaaatgctcagagccaaatttcccaccaaaaacaccattcccgaaaaagtcatgttagtccatgattgcgcatgttatctttgatttgataggaaatgatttgcaaagtcaagtcatgacatan

SEQ ID NO: 291035 - DNA, 398 bp, Glycine max
agcttgagatgatgaagtgtagaagggtgaaacttcctgcttttattcattgaccacagagtggtacctggagatatgtcgcgggggttaggagaccttggggacgtcaagtggggtgctattgcccaaaaccaagcttgaccaatcccgacccaacccgggcatagtcggtcagtgagaacctgtgatgtacctaaacaggcgagctcctggcagtcaacagataaaaggaacaaagaccacaaagcaaggaggcttgtggtggctggccagctgtgaaacttgattgatatgtgagatatggtctctggtaatcgattaccaagggtgggtaatcgattacaaggcttaaaaatgaagacaggaggctaagatggtctctggtaatcgattaccac

SEQ ID NO: 291036 - DNA, 440 bp, Glycine max
ctaagcttctatataagctgaaccattttatcaataaacacaagttgagttttattcagaaaatttgagtttatctcttttatcttagtgagagtgattctcctaaattcttgagtgattcaagaacaccctggctgtatcaaaggactttcacaacctttgtgtgttgccctcgccggaaagagtgattctttccttcctttcatcttcaaccttgttctttcaaattacaattccagaaaatccacttctgcccagaattatctcgtggccataactcctgttttacgcactcaaattaagtgattcttgagcttaaattgaatttcaagacgagacctttcacctcgtgttggaatcacctcatttggagccctgtagcttgagttttttccatttctatatttctgtccagccaccacttaacctacattgtctca

SEQ ID NO: 291037 - DNA, 404 bp, Glycine max
  unsure (1)..(404): unsure at all n locations
agctttatgatgatgaatcaagttgattcaagtagttttgatgatgacaaaaagctcaagagaatgatttcaagattgagtcaacaagttcaagatcaagattaaatcaagaagattcaagattcaatagaagtttgatttcaagattcaagagaagaaatcaagaagacttcacaagggaagtattgaaaagatttttcaaaaaacaaacatagcacagttttgtttttcaaaagagtttttctcaaaattttctaagttaccagagtttntactctctggtaatcgattaccattttcctgtaatcgattaccagtggcaaagtttgatttcaaaagcttttaactggaattgcaacatttcaattgatctttatatgatgtaatcgactacaatatattgg

SEQ ID NO: 291038 - DNA, 395 bp, Glycine max
gcgatgcccttatattttccctttcctaattaaccatgcgttgagctccatgtgcaataaatgtgccacgctgttgtgtgtgtgtgatgtatttgttacaaatgggtttatgatccctacatggttggctcatggtgcctaacacatgcatctgagaatcgagtgtgaagttgcacgcttccccttttgcgtgatatcttttgtaaggaaaacgcaatgatgatcatacttgagaacaaatggtatgcacttgtgtagatcaaaaagtttgttgaatgcatatgcatgatgatgccatgactcatgcaaaatgtgatgctggtatatgatcacggacaaatgcaggatcatatgttcgttatgacttatgaatagatgctgatgctatgcatgat

SEQ ID NO: 291039 - DNA, 388 bp, Glycine max
agctattgtggtcctttctctttatcgccagggagtctctacatgatgttgtgatatttcttgcgaaagaagcacaagcaaggaggtattgttgtgttctaaaaacaaaaaataagaagtcacaacaaatatattatctaaatcatgaaaattcaaaaatgaaacgtacttttagaagatgaaaacatgaatttttattttattgtttttttgctcttggtttgtatcaatcacaagtgattcatttgtgtgatggttgatatgcttgctcaacaggaacagaaaaagatatcttatcgaccgtataattgacatcccataatagattgaacctgagttggggtgtgaatgttgtatctacaaggcacctactagtcttttgaatgtg

SEQ ID NO: 291040 - DNA, 201 bp, Glycine max
gcaagagacaaacgtctctcttaacaagctaatctcgtgcttagcgtgcaaccttgatccttgtgctctttcagattcccttgtcacgctaagcgcgctgaacccactgggtccgcttagcgcgactgcttcttgtagcacttcaagactctatcctcatttgacctgatattgaacaaatttcatcattaaatctaatgg

SEQ ID NO: 291041 - DNA, 387 bp, Glycine max
agcttctaaactttgtacaagaatgaagctctgataccacttgttatacaagtggcctcagatatcttaagaagggggggttgaattaagatattccaaactgtttcccctaattaaaaatctatttcacttttttactcaagttatgaattcccttaatgacaatcttcttaaatattaattcaaacaaagcaacttgaatatgaatataaagcaataataaataaaggagattaagggaagagaaaatgcaaactcagttttatactggttcgaccacacccttgtgcctacgtccagtccccaagcaacccgcttgagagttccactatcttgtaaattccttttacaagatctaaacacacaaggacaatccttcctttgtgt

SEQ ID NO: 291042 - DNA, 409 bp, Glycine max
  unsure (1)..(409): unsure at all n locations
tcttggcaagccagtggttggaggacaaggctggattgttaagttgatttgtgagattcataatcatgaattagccaagtcattagttggacatccatatgtcgggcgattgactaaagcttgaaagacacttattgttgatatgatgaagtcaatggtcaaaccaagaaacattctgctgactctgaaggagcacaatgccaatagttgtacgaccatcaaacaaatatacaatgcaagaagtgcatatcgttcttccataagaggaagtgatactgaaatgcaacatctaatgaagcttctcgaatgggatcagtatattcattggcacagattanaggatgaagacgtggttcgtgatatcttttggtgtcaccctaatgtagtgaagttagtcaacacatgttat

SEQ ID NO: 291043 - DNA, 457 bp, Glycine max
  unsure (1)..(457): unsure at all n locations
gggattgatgtgacgccctattagaaacccgctgggnganatactccaccttttaagatttgttaatagaaatattgtcaaaanagacagaggtatacaaataatcaggtcccacatttctaaagattgtagaaaaaagtattaaaaataaaaaaaatataacaaaaaacattgtttagatttttttaacgtgtacattattttatatatcatttgtgtaaaaaatttatatttgtattatttgggtaattttttttgtattaaataggcactattagaaaatatgctgttcacatcggttatttatgactttctacatcggtttttaaccgatgttgaaagtattatcgttaacaccggttttttaaaaccgatgttaatgtaaaattgacaacatcggtttattaaacaaccgatgttatataataagatttacaccaaaaaaatatatgaatgg

SEQ ID NO: 291044 - DNA, 335 bp, Glycine max
  unsure (1)..(335): unsure at all n locations
tttgcaagcttgaactctgatactgtaccagcaacttgtggcatactgttgactatctttcttgacatccttcaagttccgtcgaacttcttcagagaagttattccccattacctcttatgcgatctctttcataatttctcagtctgtgtcaatcttcaactgactccccattatatgtgttgngacaactccagatgtgtggacatgtgtgtggagtatatgatcttattgctacatttgttatcgagttctctgattctgttgggatcctgtacgctgcatttttccatttatactacgatctgatttgctatctctttgcatgatctgat

SEQ ID NO: 291045 - DNA, 365 bp, Glycine max
  unsure (1)..(365): unsure at all n locations
ttannaattgatttgaaacgtacagtaactgttggtattctattaccatatatgagtaggcgattacacattgcatattttgaattcaaactataatagctgttgtaaatgatttttggccactggtaatcgatcacatcctctggtaatcaattaccacagagtaaatcccttgaaaaagacttttaatgtaaatcacttggccaatccttctgctagcttaattggaatggcctgcttatctaatgtacccttcctatgacactagagacggtcttgatcatccatcttggatatctttaattactttgtctcgaataaatctttgacaagcacgtgatccatgcgatcctttggcatcctca

SEQ ID NO: 291046 - DNA, 392 bp, Glycine max
agcttggtgtacttgatatatggagtataactctctggtgcttcttgtatgggaggtaactttttagataacttttttactgccatagcgccacatgcatgtcaacatctttatttgctttgtgttataaattaaaaatcaagatgaatataaaaaacatctcaaccttctagaggacaagaaaaccagtaattatcagaatgtaactcttcctcaggataattattgctatgacgtgattccagttcagttagattggctttcaatgaatcaatctagacaaataaactttcaaccttacgagcaagctttaaatgcatgtaaagttagtagcagaatagcataatgctaatggggggtatttgttagaaacccacaaatgtgttgagtta

SEQ ID NO: 291047 - DNA, 427 bp, Glycine max
  unsure (1)..(427): unsure at all n locations
ttggaagattacagatggaaggagccaaagtctcctgttactattgttttggtaaagattcacagaattaccactctacctgtgtagtacacaccagtccaatataaggataggtttcacaaaatcaacaatgaacacgggacaattgagagacgaggttcaagataaagcagaagatgacatagtatgacacaaaatattaagagtattaccgtgttgtgaaaggaagagggaaaaaccaagccactcttctcactaagctactctttctcataaccaggaatgaccacacattntagtagtcttactcgggttcgttggctttatttgtctctctctcctaagtatgnataatgcttgttgagaaatgctcttactcataanaatttaattctctgatacaagcttaaactttttttagcatgta

SEQ ID NO: 291048 - DNA, 388 bp, Glycine max
  unsure (1)..(388): unsure at all n locations
ttcctgagaaagacaaggagagagacgaagagagcggaatacgcccggagacgaacaacangggagtatagcccaactgcaaacattcaatgagtatgaaatgctatgaagactggtgagcgaatcgagacaacatctcagtacagaataatcccaatgattaacggtatgatcgatccacatagaacacacttcccgcggcaagtcaaacatgaatccctgactcacgatagatacacgcgcaacacaattaacagcaatacaaacaccggctctaacagggaatcacgctacgagaaacacacgaatgccacacgataatccaaaaaacgcataacgaatggatacgactgacgccaaggaccccagagagatgcacaggaccacn

SEQ ID NO: 291049 - DNA, 389 bp, Glycine max
agcttgttacttcattatgacattattttagtgtcccatacgatctagaggctagcctgggcgagccaggggtctaaaaaagcctccaaatgacccttttgccctcccttttgggtattttccctattcttttccaaaacatcaaaaaaccttttgaattgcacgacaagtggtgttaagcaactcaatttggctagcaagaatcaaaatgttagcaaatgatagtccccagacgaaattagggtatgacagttgcccttctttacttatcttttattggaaataaaagggaagtaaagataaggacactaatttcgtttgagcaatcttgttattcgacagggcaaccaaggaagtcaaaccgagaaaacatgaggacattgaagttc

SEQ ID NO: 291050 - DNA, 405 bp, Glycine max
  unsure (1)..(405): unsure at all n locations
tcaattcaagatncaatatggataggggncttggtagtataagtcttcaaggatcaaccattctattgggtatttgttcatgttgtgtcttcaagatcctatcaacatgatggacaacacaatcaagattgagaaatttataagaaagaatagcttcaacctttgatgcatcaagatacgagccttgttgaaagaacagggcatctaggctcctccctcctatcaattgtcaaagattgataagccagtgcttgagttacaagaggaaaaggtgcattcgctaatcctctaatctttatctaatgaggttttttattgggttctggctcgaattggagaaacttttcatgacaacatcaaagaaatattttgtcgttgctcttggtcagaatgactcctcatcgg

SEQ ID NO: 291051 - DNA, 394 bp, Glycine max
agcttatagaatatataataaaagaacaatgacaattgaagagtctatacatgtttcctttgatgattctaatgccattcttccaaggaaggattttttagatgatatttcagattccttagaagatacacatattcatggaaatgactctaaagaaaaagatgaaggaagcaatgaagattctcaagataatggagttagggcaaataatgaacttccaagagaatggaaagcctcaagagatcatcccctcgacaacattattggtgatatatcaaaaggggtaacaactagacattctcttaaagatttatgcaataatatggcttttgtatctatgattgaacctaaaaatataaaagaagccatactagatgataactggatcattgtc

SEQ ID NO: 291052 - DNA, 420 bp, Glycine max
taggaacccaaacttgtagcttcaatgcatgtaaacattcttatggctaggaatccaaaatttggttttagaattataaaaaacatgaaaattaggatttgcttgtgagagtcatcgctctattttgggctgccccatgtttgatactttacatagaggtagtgtggaaaacaccttgcaatagtgtgtatacataggtaaatataaggagcatgaaattcctagcaaagtgtgaatgattgtcttcctaaatgaatgtatgatagtgtggaatgcctttttgaaatgcaaatatgtgcaggatgtaatttgctttccaatatgcatataaataaatatgagtgaaaccgtaaaaatttgtatggtgtacttcaaatgtatgtaagtagttcgtgatagcaaatgtttaggatataaatt

SEQ ID NO: 291053 - DNA, 386 bp, Glycine max
  unsure (1)..(386): unsure at all n locations
agcttttgcaagctggaattatttatcctatctccgatagccaatgggtgagtcccgtccaggtagtcccgaagaagaccggcctcacagtgataaaaaatgagaaggaggagctgattcctactcgggtgcagaacagttggagagtctgcattgactataggaggctgaaccaagttaccaaaaaggaccattttcccctaccattcattgaccagatgcttgagcgcctgacaggtaaatatcagtactgtttccttgatggtttttctggttatatgcaaattactattgctcctgaggatcagganaagaccacattcacctgcccctttggcacttttgcctatangaggatgcctttcggcctgtgcaatgccccttgt

SEQ ID NO: 291054 - DNA, 402 bp, Glycine max
ttccacattgaattcagcacctaatgtcatattagattgtaattgggtatcttaacatatgagatttcagatggactttaatcctaatcccatagccgaccttttcacgagatctctacttaaccctttggttaaatgatcggccaaattatgctgagttctcacaaactccactgatatcacaccatgcatgattaactcccgaaccatgttgtgtctaacacccaagtgtctagacttcccattatacacttgactatatgccttagccaaagttgcctgactatcacacctgatagacatgggaggtataggtttgggccacaatgaaatctcatagatcagatttcttagccactcagcttctttaccagctgctgctaaagctacaaattcatattc

SEQ ID NO: 291055 - DNA, 377 bp, Glycine max
  unsure (1)..(377): unsure at all n locations
ttcatgacagcttatgactagcacacaatggggcctatgaagtgttacataagtgatggcttggcctcacaatgaaaatgggacaaagatggataagctaagcttatagctaagaggcctgaaacatgtcgaatgatggatgatggacaatgatgaatggacagcgttgatgattggacaatggacttgtgaattgtgactgcaaccatgtgaggcttttctgagtttcatacgaattattttagtagtgtgctgacatttggccatggatctcaatcttctgaggatatangatactttcatctgaataaagctaatacaggaccactcaaccaaacgggatactcaaggcagatactgttcaactatacatgtct

SEQ ID NO: 291056 - DNA, 417 bp, Glycine max
  unsure (1)..(417): unsure at all n locations
ntggccctactggggacactgttcatcagtttaattattcaaccacaaagtttagtgaacaaanaagtttttcaaatgattttactgaaaatgaaaaacccctcagttattctccacaatcaattcagggtgggcatcagtattcacatgcccctcatgttgggagatcatcagctggacgtccttctcatgctttggtaacttttggatttgggggaaaactcatcataatgaaagatcctaatcttttgagctcatcatacggaagccaggttaattcttgattcctcatttgagttttgattttttgctttatctggtttccgaaaggctttgaggttgctcaatattgtttcctttntatcgtctactttcttatgagtgatttatcaaaatgattaacactgtaaattcatt

SEQ ID NO: 291057 - DNA, 306 bp, Glycine max
agcttgtggtctattgaacatattaaacctggatagttgatggaaacatgaacagataactaatcagacgaccgatatgaaagacttcacagatcgaaataacgttaacttaaacaactgagttagtggctgaacttacaaaaattattggctgatgtaagaaaataatactaataattgacagtaataagaagagtgttaagagtacactatagactgtaactagtctctttaaccttgatggtccagtgtgtatcagtaatatctgagtgatacttatgaacatactaatttgaagcgagagta

SEQ ID NO: 291058 - DNA, 421 bp, Glycine max
ttagcttactgaggtttagaatacttggatgcgcatgttcatatttcatgatcttaacagtcctattgagccagagttctactatttgtattgcattactactaaagtgacctatactattggtatacaatataaatgaccattaggtatgtgttatgttttacatatcaatatcaatctcctgtcatgttgtcctttggttctcttttcctcctttctcagctatatatattttcaccaactataaatgtatgatgttaaaacttcttattaaacatattaaacaataccatacacatcatgatctggttaggcctgttaattttgcaatcattcacaatacaaaagatataataaaattctaacatgatttgatatttaagacttggaaaaatatctataatgtctctagcatgtgatg

SEQ ID NO: 291059 - DNA, 294 bp, Glycine max
agtgtgggatgatttatggggacccggtgacgagagaatcgaggatatgggctacataggactacgtgagactagttggatgtgggccacaggggatggtcggtttatgcgcacattgaggatgtggaagaactagttgtgcaccatcgcccgaccgcgaactattaccacatgtgatgggtacctcataatactacaagcttgagatgaggaagtgttgaagggtgagacttcctgcttttattgttgaccacagagtggtacctggatatatgtctcggtggtcatgagacc

SEQ ID NO: 291060 - DNA, 413 bp, Glycine max
agctggggctattccaagttcatttaccatacctttaagctttattgctctcttactccttcacctagggccatgtattctgcttcagttgttgaaacactaacaactgattgttgatttgctttccaactgattgttgtaccaaacaaagtaaacacatatcctgttaaggatttccttgtgtctacatttcctgcaaaatctgcatctacatatcctgtgattgctgcctcatgtgctgtcttcttgtaccttaatccagctatcaaagatccatatagataccttagtgttcacttcacaacttcccaatgcgcactgccagcatctcccatgagtctgcttattatacttacaacatgagccacgtcaggtctgctgcaaaccattccatacattatgctttacacacc

SEQ ID NO: 291061 - DNA, 366 bp, Glycine max
  unsure (1)..(366): unsure at all n locations
agcgtggaaaactctgctctngtttccngctggagcccatagatagacttcttcagtttataaacgagatgagaattggcagaagcgaaaccttctggttgctgcatatagacttcctcttgaatggtcccatttagaaaagcattgatgatgtccacttgtcgggtatcccattttctggtgactgtaatgctcatgattgtgcgaatagtggctggtttaataacaggactgaatgtctcattgtaatcaaggcctggtctttgagataacctttaagccactagtcgagctgtgtgtctgacttcagagccatcagcattgtatttcaagcaatagatccatttggagccaatagccttctta

SEQ ID NO: 291062 - DNA, 244 bp, Glycine max
  unsure (1)..(244): unsure at all n locations
acactcaagcttgggaaatcatctagcaccgcctagctcatcaatcgtatgtatgtgtntatgatcgcgaatggtgagggcattcaaggcgtggttatccacacaaaaccgccatgacccgtcatgtttcttcaccaacaacactggagataaaaaagggcttgttctcgattgaatgagacccttatggagcattaatgccacttacgcttccatttcacacttctgaaagtgtggatatcga

SEQ ID NO: 291063 - DNA, 402 bp, Glycine max
  unsure (1)..(402): unsure at all n locations
agcttcaccaagattcatattgaaataagctaaaaagaacttatacaagtcataaaccatattcataagctcaaataagctccataaaagctcttccaaatgccccctaaaccatatcgattagttataacaatagaaagagaaaaaagaaacaaacaagaacaacgctggttggtggttctgaaagcaaatgtaaacttggctgggcgagatatgtccattaaaaaaaacacattatggtggtatgtcccaaccatggttacttcattntgtcaaacatatttgtatccagtaacctaaaagggcattgttggtaggggtagccacgggtcagactggataggatctggggcattntttgatctgatccaatcaattttaaatggtttagatagaattttc

SEQ ID NO: 291064 - DNA, 406 bp, Glycine max
  unsure (1)..(406): unsure at all n locations
tttatggttctttntgtttgtttgttcacattattagggttagtttgatttttatgcagagatattcccttcgatgtgaattaatgtgttttcaacttcagtttcaagtgaaaagatgaagaataataaggttgttgtggctgatgtctcgttaagcgagacttgtgcgcttagcgagaatcatccgctaagctaggcactcagcctacttagcgagttgggagaatctggaggacaatctgccaagcatctgcacgcttagtgcgtcatcaactcgctcagtgagccatttgtcttctcttgcgctaagcacgtccagctcgctcagcggaaaatcacttactcgcacttagcgcgaaaatggcgctaagcgagccttcgagggacaaaaaacccttaatagatg

SEQ ID NO: 291065 - DNA, 402 bp, Glycine max
  unsure (1)..(402): unsure at all n locations
agctttattgatttcatgagaaagctcttcctcttccaaccaagagttttcaaaatgaaacctcttagctttacgagtttgataatgttggctcagcttcaatagaatagggaaatgatctatcctacaagaaataacgtttgatagacaacaatttgggaaagtatcagcttggagttgccaaagctcagtcaagcttttccaggatttcaatgggtgaacccttgctttttacccatgtataagaatagccctccaaggtaaatatcattcaaaccaaaatcaaacactacttctctgaaacctgttatgagataattcgggtgagaagtttgacccttcttttcatcataggagaggatgttattaaagtcttccatggtacaccatangagagagatg

SEQ ID NO: 291066 - DNA, 430 bp, Glycine max
taacaccatcatgagcagcatgtctgtacaaatttaagatgttcaagatctaatactgtataaacaatcatcatactttactagttacattttctcacataccgcaaggaagtatccattctcagagaaagatatggcagttactggcccagcatgtccgtcaaacctagcaacatttgcctacaaccaatggaggaaggtaagaacatagagaataacattgaatattaaaattgaactttaaacaagtataagaaaaaatgtttacctgactttttacatcccaaatcttgacaagagattctgtggtgccggttccaagaatgagaccatccggatgaaaagccgcagatgtgtacccttccgaagaacctgaagtgtcataaacctacacaactcatcattaattgtctgattcagaacttatgta

SEQ ID NO: 291067 - DNA, 399 bp, Glycine max
  unsure (1)..(399): unsure at all n locations
agcttgctgccacggagttttccgactatgctcttgtgtggtggaacaagctacaaaaggagagagcaagaaatgaagagccaatggttgatacatggacggagatgaaaaagatcatgaggaagcggtatgtgccggctagttactcaagggacttgaaattcaagctccaaaaactaacccaaggcaacaagggggttgaggagtatttcaaggaaatggatgtgctcatgattcaagcaaatattgaagaagatgaggaggtaactatggctcgatttcttaatggtttgactaatgatatccatgatattgttgagctgcaggagtttgttgaaatggatgaattgcttcacanagcaatccaagtagagcaacaattaaaaaggaaaggagtgg

SEQ ID NO: 291068 - DNA, 422 bp, Glycine max
  unsure (1)..(422): unsure at all n locations
tattgctgccggcacagagatgcaatgttctggctagttcccaaaggagaacctgngcatgtgtggcattatataagttaattaaaatccaaggagcgaaatagttagagtaaattgcatagaattggtcacattaataatgcaaagatgaaggttgcacgtatagtccctcctgaatatgcatttcctcagtcaaattagtcctcatgatacaaatctcgataacgaatttgactaatggaatataaattcaaggattaatttgactattcatatatatattcaaggaccttaaccttgatttctatcatttaagaactaatacgaggcgttgtactgtatctttcacgaactaatttgactatagactcanatattntaatatgagaaagaaattcagaagaaagttagtagcacaccct

SEQ ID NO: 291069 - DNA, 467 bp, Glycine max
ggcgcctgtgctcatacactgcggaccttaattctacgctccgcgctcatttgggaggctatgaactctattgatctctccatgaaaggttggatcaaatggggaatatagatcataatgattaagaaaggaggacaatagggaatgatagtgatcctagacaaaacctgcttgatggtatttaactcagcattcctccattcatatgaaagaatgatcctgaggcctacgatgcgtgcgagatgaaaatagagcatgtttcttcatgctaccactatgatgaggaccacaatgcgaagcttgccgccacggagttatccgactatgctcgtgggtggtggaacaagctacaaaaggagatagctagagatgaagagccaatggttgatacttggacggagatgataaagatcatgaggaagcgggatgttccggctaggtactcaagggacttggaattcaagccg

SEQ ID NO: 291070 - DNA, 476 bp, Glycine max
  unsure (1)..(476): unsure at all n locations
cgcgtgattgtgaatcgtgactacgctcctttgaaactacgcttcttactataaagctggaatgcgatcaataagtaaaagaccatccccgatcngagattggaggacttcataggaaaaagacagattcccgatcaaagatcggaagacagctaaagataatatatagaatggtcgctggaccacacaatatctgaataatgtacaaaattgtcacatgcaagaatgatatgaaaaacaaccatgacttgagacgcatgaagcaatccccttctttgttaccaaccaaatctttgtgctcgcatctgtttcacactgtgccaaaagaaaacagaaaaggataaggctgatatgctcagagccaaatttgccaccaaatacaccattcccgaaaaagtcatgttacgtcatgattgcgcatgttatctgtgatttgataggaaatgatttgcaaagtcaagtcatgacatatctat

SEQ ID NO: 291071 - DNA, 389 bp, Glycine max
  unsure (1)..(389): unsure at all n locations
agctttctccactatgttgcctgatgcctgaaatgtcttttctgatggcagtggtcctagatgcagggaagaatttctccatgaacaccctcttaaggtcattccagctgaaaatggacctaggagcaaggtagtatagccaatcttttgtcactccctctagagaatgaggaaaatcctttagaaagatatgatcttcctggacattagggggcttcatggtggaacaaaaaatatggaactccttaagatgcttataaggatcttcacctgcaagaccacgaaacttgngcagcaaatgtattagtccagtcttgagaacatatggaacaccctcatcaggatattgaatgcacaagctntcataagtgaaatcaagtgcatccatc

SEQ ID NO: 291072 - DNA, 423 bp, Glycine max
  unsure (1)..(423): unsure at all n locations
ctcagcttgcttctacaatgccgatgtatgaagaggctccctttatagattatgtaggggcatgggccagcaacaaaggccgtaagtgaatgaagcccctccatgccacatcaacaagagtttcgtgagtgtgggttggaggtgtgaagggcaagtcgccatgatacatgattaagcccgccaagagtgttcaagcttggtacattcgtgccttcctaatttccaattaggaaactagcgagtggttgaatggcctgaggtttccgtggtggagataatgtaattctttagttttaaccctacagctgggcctaggctttanggtttttctccttgttaaggcattatgtcttttgctattaagatatataatacaagatctttccttcatctattcttgcatcttcacccattctcattaat

SEQ ID NO: 291073 - DNA, 358 bp, Glycine max
agcttattggaacttaattatatacgtaactgaattatagttcataaagtaaccaattacatgtttgaatattcttatcctgccctatctatcttacagaagtctatcccatgccgaacatatcaacatccaacgtcctagactatctgcaatcaacaactatagatggtaatcagagtcaaaagacattaattaccttcttagcgagagtgttgttttgttcttgtagggccttatcctgcatcatctgaacataacatctaatccactaattgcatagatacaggatctatctacacacgactgcggtttgctatcataaaaacatgaattccacttgatctaaccattacttcta

SEQ ID NO: 291074 - DNA, 421 bp, Glycine max
gttaatggttgtattcttctcgaagctagttgtctattccgtgttcgtgtatggcttaactatcaagtacatagtccttcaggtgcaagggagtattactttgtcttttgggctcagctatttgccactcgtttctgctagatgtatcattaccaccgtcttcaaataacaccttgtcctcaaggtgatgaagggacttaagggttgaccattcttcccacgatgcttcatcaggatgaagaccctgccattgaactaacactgggtgctttgggcctatgtccgagggcacgatcttgtgagccaagatagctaagggaactggaaccggttggttgtccatggccaatgacggaaggtgcatagcttgttctgatgttggagatccgatgaagggttttaagatagagcaatgaaatac

SEQ ID NO: 291075 - DNA, 378 bp, Glycine max
agcttgtacagataaatataccaaggtgctgtgctgaaataagactaaaaatttgtgcataagcttagacgagcccttgcagttcataatcagtattttgtagatgtctacttgcgcatgcatatactatagttaaactattatacagatgatgggcataaacttattgaagcctaaagataaagagtatactgggtgcctgtgtggtgatgtgctatgctaaaagcacggaacttggtacccttggccaagttgtgttagattcacttaacctggttgtacagtgcatatacaagtctttactcatttaagacattattacgatgtgtatatgctagttaatatcttgagggtttctgggcttcccaatacaagaat

SEQ ID NO: 291076 - DNA, 375 bp, Glycine max
  unsure (1)..(375): unsure at all n locations
tctacacaaatcataagattcgttattnttttgtacactgactaactcttaatcatcttatagatggatgtacaatctcatcacttatcttttcttttgaggtgttcaaggtgttatcggagcttttttgaactatttaaaaatttatagaaagctttttatagaaagaatttaaatgagagagcgtaagttcataaccatgtattcaaagattctagtatttataggtcttcttcaacaagtgttcattgtttccatatggatagacttgagctcgcgtctaaagattgtggctgctagagaatttaatgcttgctctaaatgcatgtacttcttcatgccggaaaaccactcttgtgagcctttatgttactt

SEQ ID NO: 291077 - DNA, 381 bp, Glycine max
  unsure (1)..(381): unsure at all n locations
agcttcctttaccacaaagagcagagaaaaatgaaagatcgaagaaatacaagtgatgaggatgtctcctccacctctagaacctcacagttactcacaaactcatctcaagctctcaggacggcttcctcttaaagcttggttctctgcaggtcttcacacagcaaaatctctcaaaactctntggaacttggacctttctctctctagaaatctctaatcatgcaaaagcttcgagaactgcccaaactcctctccaaaatctgatttcagacttaaataggtggctctgtttatgcgtgcttgcacgcttagggcaactctgaaccgcttagcccgcattagtgaatntcggcttagcgcgtgcttttctcgctcagc

SEQ ID NO: 291078 - DNA, 418 bp, Glycine max
  unsure (1)..(418): unsure at all n locations
ntacacttgctagatagagcagggtaggtatgaaaattaaccaccttcattntgcttgatgcattagtcttttagattgacatgatgcataaaataggatgtttcatgctataaaactaattcctttttaggttatattttaattttaaattctgttgaatattttctcgctcccttcttgtgtggatgcagatgctgaaatcaatttcggccaggaactctgttaacagtgaccaaattaataccattgagcttgaactgcttttcatatacactntctgtgcttatgatatacaaggcatgctgaatgacttangatcacattgttttgtcctgatttaacttcaacaaattcatgctntatttgttgattctattgcagtataatgtttgttaacaaccaattagtggaaagtgg

SEQ ID NO: 291079 - DNA, 405 bp, Glycine max
  unsure (1)..(405): unsure at all n locations
agcttatcttcgttctaaaaaaattacacatttctattttgtgaggatgaaaaacatactgaaaattttgcaaggataaattccaaacattttgatatttataagaacaaaaaatatattttagccttgtttttattgttaaaaaaaaagagaaatgctactaacatactctttaacacactccttcatacacactttctcttatgtgttaaaatgtatttagttgaagaacaagttccacaaaatcttgaacctaccaagtgtgatggttgggattggtatgagtgggatcanttgccacaccctttggttgggcctcttgagaaaatggtcaaaggagctttcgacccatttccaatttgattctggtaattggtaatgatctttttgtgaggattcttggat

SEQ ID NO: 291080 - DNA, 419 bp, Glycine max
  unsure (1)..(419): unsure at all n locations
tggacgaatccgaacctaagtttctgatgtgtgtcctctaaaaactcagacactatcctactttttctttccctttctctctctctctctctctaatccaacgatcctagcctctcttccttctctttctctacccttcgccgtctctatttctactcggaacccttcttgcccttgcctttcctcctctcacctccatgacaacctcgatgacaagttgttcgccttcccctctttctttctccctccaaatctaggactccgacaatgacttcctcctcatcaagtcggtccttccacctcctctattggctcaaccctgacactgtgcaccactgtctcttcctccgatggatgcctctacatcgacaaccagatttgcgagggtgtanggtggaggctntgcgagggtggacttg

SEQ ID NO: 291081 - DNA, 402 bp, Glycine max
  unsure (1)..(402): unsure at all n locations
agcttatcacgattcaaagctgttgaagagagacttcaaaccaggacaacatgtattactttttaattcaagattgaaattatttcctggtaagttgaaatccaaatggtctgaacctttcatcatcaggaaagttcggccttatggtgcaatagagttgtatgatccacaatttcaggaccttgactgaacatggttggtgaatggccaaagattgaaactgtaccatggtggagagtttgaaaaggcaaacaccatcttaaatttgatataacccattgaggtatatgcgtcaggctaatgacgttaaaagagcgcttcctgngaggcaacccaactctgatttctttcattntgtttttcatgcattgcataagttggaatttgctntatgatcatcga

SEQ ID NO: 291082 - DNA, 429 bp, Glycine max
tggagaggatgcttcaatggaggaaaagaaagagggatataaagatagaggggggagcacgaaattgaaggaagaaaaagggagagaagttgaactttgagttgtgtctcacaagactctcattcatcaaagttacaacaagtcttacacatgcttctatttcgcggcccaacaagcccgttgacacgcggagatttacgtcatcttccgcgatcacaagatttgtcatactgacatttgagtcacgctgacaggcggagatacccgagtggttatccgtgtaatctttcttttgctatctctaagactcaaagcatgatagctagctgagtggataaacgtgcagatatatattatgcgccctttatcattcagattccgcaagttgggtgataaacgcgcagagacaaattctacgccctttgtcat

SEQ ID NO: 291083 - DNA, 391 bp, Glycine max
  unsure (1)..(391): unsure at all n locations
agctttctgttcttcttaacgagattctcgacgtactacgggacacaatcggacatcccagtcaaaagttatcgtcgatttgaatctgtagatagcttacgttttcaattatgagcgtcacgatatattcgggacacattcggacaacccagtacaaagtcattggcgatagaatctgctcatagcttccgctttaccatctcgatacatgaatggatgcattcggacatccgaataaaatgtcattgacggttgattttgctcagagcttctgttctgaattttgagcgtctcgatatacttcgggaccgattcggacatncgagaataaagcactggcgtaaaatggctaagagctacgttttcacatacgacatcgcgatacgtacgg

SEQ ID NO: 291084 - DNA, 250 bp, Glycine max
ggatctacgtaccctacaaccaatggaagcaatttatttctaaaatattattattattattattattattattattatggttgtcgtccttaaggatgtcaacgggataaggcaaggcaaaaagtacttacctgctccccatccccatccctgatcctcgtcgaggacaacttatttccccatatttgtccttcgtgggaccatcaattttatatatatatatatatatatatatatatatatatatatt

SEQ ID NO: 291085 - DNA, 401 bp, Glycine max
agcttgtaggattatggggtacccatcacatgtggtactaggtggcggtcgggcgatggtgcacaacaagttttccacatccacaatgcgcgcataaacccaccatcccctgtagcccacctccaactgagctcacgtactcccacgtagtccatatcctcgtttctctcaacaccgggtccccatcaatcctcccaagcttccccaacatcaaagtaatgcaacattcaaacagcacaaactatcacagccaagaaaacagagcaaaggcagaatactctgccaaaacaccaaccaaaatcacagcttttctcacttaaagaccccagtaacaattccttcgttccaattcgttaaccgttggatcgactccaaatttttactggaagtctctagtacat

SEQ ID NO: 291086 - DNA, 408 bp, Glycine max
ttgagcaaattcaagcaaattatcactttttactcggttgtctgtttgagtcccgtaatatatcgagacgctcgaaatggaacaccgaatctctgagaaaattcaaacgacaataactttttactcggatgtcagattgagtccagaaatatgtcaagatgcttgaaattgaagaccaaagctctgagcgaattcaaacgacaataactttttactcggatgtgtgactgagtcccgtaatatatcgagacgctcggaattgattatcgaagctctgagcaaattcaaacgacaataagttattactcggatgtctgattgagtcccgtagtatatcgagacgctagaaattgaataccgaagctctgagcaaatgtcaacgataataactttttactcagatgtctg

SEQ ID NO: 291087 - DNA, 397 bp, Glycine max
agctttggctgtcttcagctctgatttcgtgagtatttatagaagatgacgcattgtaatcgattacaggtattggtaatcgattacaggcccaataagccttctggtaatcgattacaggatgttgtaatcgattacaggctgcctgttcatgtgtaatcgattacactggatggtaatcgattaccagagcctatcctaggctagtttctaagagaatatctatatttatgctcaaatacatcctatatgactaattttcactactaatacactaaattcaatcatccaattactatatacacaagaaatcataaattctatcataaaaacaagaattcaaacatgatcaaacaaaataatctacaatcaaaaggtaaaaagtaaatcaaccaat

SEQ ID NO: 291088 - DNA, 446 bp, Glycine max
  unsure (1)..(446): unsure at all n locations
tagaatactcaacgcttggatattntgggatgctttcatccatgtcggggcgttggtgattacgtgggcgtctccttcctttttcctcgcgcccactactagggctcttctgttgttgttgggggccacattgcaagcatattcgaacttgccttttcgtagtccgaattcaatcctttctccggcgaagacgagatccacaaagttagctggcatgtagcctataagcttttcatagtagaacgtgggtaacgtatctaccataattgtgatcatctccatttccgtcatgggcggtacgacttgggctgcgagatctctccatctttgggcatattccttaatggactcatgctctcgcttagtcatactctgaagctggttccgatcgggagccatgtccgtattgtactggtactgcctaatgaaggaagttgccaagtcct

SEQ ID NO: 291089 - DNA, 392 bp, Glycine max
agctttcaacattacatatttggcttgcaaccataagaccattagcttgtccactcttgaaggttatggctaattagttaaggtcattaatgataacataaatatttgaaacatttgacaaatgactaagtagcttaaatgtaccatattttttggatcacacaaatatctactaccacagtaattacatgttatagttgattccttcatttgatttttagaaataaccttgaattgattataaacaacaaaaatttaccttttaccacttgtatttgactttcatttttgtgttggttttgggagtgaacattagaattagcttttatagttacatttgtttcaattggttgtttattaggttagggttcatcaccaccacctcttgtttc

SEQ ID NO: 291090 - DNA, 425 bp, Glycine max
  unsure (1)..(425): unsure at all n locations
ntgaagacatgaaagagaactaaagtgctcattatacttattcttttggtaaaaagctctctgtgtaaattcttgtaaagtttagaaaaactctcaaaacatttgttcatcttgagggaaaggactaagtgctaaaattgcttatttgtctgtaagacaataaagtgctagtcattgtgcaatcaaccaacaaatcttttattttgtgttacagacaacaatgacttggtagattaaagaatattggttgtaacaagcttggagtaaaacttaggctaaggatctagaagtgatagtgataaatacttgtaacttgttgaagttggtggaacttagtggtttgccatggacagaacgtagtcttggtgattgagacgaatgaatataaatttcctacgtcttaatcttattattttctcttctgc

SEQ ID NO: 291091 - DNA, 392 bp, Glycine max
  unsure (1)..(392): unsure at all n locations
agcttctacttatgtggcagggcgggcttccttcaccttcttgtctccaacgcgaactttgaccattgttcttccttcccgcgatgcttcttttcatgtctgcctgagtgggcttatagcctaaaccatacttcccacgattaccttgggtatttatcagtctagttatgccgccgttgttttttcctaaacccatcccgggctcataaccgttccccaacataactcgggccatcattaccgctgcatcggacagactgggctgcccaaagagggagtccacggaggaaatgttgaccacctcaaaagactgganagcagtttctaacgattcttctgcggcttccacataaggcatggaggatgggcagcttaccaagatatcttcctcg

SEQ ID NO: 291092 - DNA, 427 bp, Glycine max
  unsure (1)..(427): unsure at all n locations
tgccgccacggagttttccgactatgctcttgtgtggttgaacatgctacaaaaggagagagcaagaaatgaagagccaatggttgatacatggacggagatgaaaaagatcatgaggaagcggtatgtgccggctagttactcaagggacttgaaattcaagctccaaaaactaacccaaggcaacaagggggttgaggagtatttcaaggaaatggatgtgctcatgattcaagcaaatattgaagaagatgaggaggtaactatggctcgatttcttaatggtttgactaatgatatctgtgatagctgcangaagttgttgaaatggatgatttgcttcacaaagcaatccaagtggagcaacaattaaaaaggaagggagtggctaagaggaagtttaccaactttggttcttctagttgga

SEQ ID NO: 291093 - DNA, 382 bp, Glycine max
  unsure (1)..(382): unsure at all n locations
agtttgtagcctgttccaaggttcaatgtttgctaaaaaaataattgagaggaggtatctgggctgtagaaccatgaattgtaattggtcaaagattacaatttttttaaaaaaattatacggtcacttagaatttttttaaataagaaataaaaactaaaaatctaagtcatgcaatcttatatgaatgattaagatattaagtttataatcatatatgatacttaaaagagtaattacatttcacataagtatataagtagcgataaacacaaccgtaaatcttataatacaaggtgataacaaatgaggttagtttactattgcccctctaatactcgagattttntttcttctaattactacatttgcgaaattgaac

SEQ ID NO: 291094 - DNA, 374 bp, Glycine max
aactacgcttactctaatatataattaaccgcattttctctactattataagaaagaataaggggctaatataatgtgaaaacacaatactggaatttgttcactgtttatgttgttctgaattttctttttttgaataatgctctcaatatttttccatgcttgatttttgcatatcgtgatgtttcaattaattaaactcgttcagcgtccagattttaaaaaatataactgatacatattagtatgaaagatgtattataattgtatatttgtatggtcgtcgagagagactgacattaagaacaattcttcttagtacacatttggattgggtctagcttgtttaatgtatcagaagtgtactataattg

SEQ ID NO: 291095 - DNA, 384 bp, Glycine max
  unsure (1)..(384): unsure at all n locations
agctttntagctcatgctacaggaattggcaaccaacgtggcttgtgatgtttctctcccagccgacaattatcccttttggttggcccatacaagtgagggacattccgtgtatttcactgtgcctgaggattgtcgcttgaagggaatgattctatgtgttgtatatttatcaacccctgaaatcatggcatccgaatgtctaattagtgtcttgatagttaattacacaaagtgcaccatccagatacacaagcgagacacagtaatttcctttaatgatgaagattggcagggcataatatcacatttgggacctggagacgaagtggagatttttgtgacttttgngcatagattggtggtgaagaagacagctgtcta

SEQ ID NO: 291096 - DNA, 377 bp, Glycine max
  unsure (1)..(377): unsure at all n locations
tgtaggttatagtgacaatgattgngctagatatgaatatgatttataaattactagtggatttatgttttcaaggggaatacaaccttcacttggatgtcaaaaaagcatttgatagtcactttttcgacctgtgaggtgaaatacatagcagctacttcatgtgtttgtcatgcagtttggcttaagaatttgttaaaagagttaggcatgtcacaagaagagccaaccaagatctttgcggacaataggtcaggcattgctctagcaaagaatccagtgttccatgatcgaagcaaacatattgatacctgttaccactacataagggagtgcatagcaagaaaggatgtacatgtagaatatgtgaagtctca

SEQ ID NO: 291097 - DNA, 387 bp, Glycine max
  unsure (1)..(387): unsure at all n locations
agctttgagccaaaatcctgactcaccataaaccttgacccagggtgagaatgtcaatccttaccctcggaagcaaaaaagaatagaagggaaatttccaatcaaagaaaaagagaaggaaaatttccaatgaaagcaaaaaagaaaagaaggaaaattccccaatcaaagagtgggagaaagcaaaaagaaaagaaaggaaattcccaatcaaagaatgggagaaagtaaaaaagggaaggaaagaaagttcttgaaggaaaaacagaaggaatatgcagagaggtctttggaccggacaatatctgaacaatacagaattgtcaccaaatgaacgaaaaaagaaagatagggaaccacgacctanaatagtcttctccctttgat

SEQ ID NO: 291098 - DNA, 415 bp, Glycine max
  unsure (1)..(415): unsure at all n locations
tacctttgtgagaatttgagccattcatcatcttaatcttttggtgtgttttgccccattgattgcttgcacaatagccttggcttaattcttgttcatgcttcctaattcacatgcatatttggaaatgatttaggcaattttgttcttataagcttctagccaaatggacttaccttgaattaattcctttgatagcccctttgagcctatgttcccctttctttgttttgaagctcattacaagccttaagtgaaaaaccatgatatcaccttacccttaaggaattttggagctttggaattgttttgggaataagctgggaataagtgtgggggggtatgtttcattggaagatatgatttttggccatgcttaatgttntaatttggtcatgcttgatgtatntgtata

SEQ ID NO: 291099 - DNA, 380 bp, Glycine max
agcttttggttttcttttttgatttctcagtataagtgaactccttcatgagtggttttgtagagcataaaaatatatcatcaagagtggctttttttttaaaaaattgtcatcttattatgtcttttgtaaaattcttaatatagctttcaacaatattagtagcgacgacatatattatttactatgaggaaattcctattgcctccctgttgattgaattcaaagtttgaagaaactgttgctgacatgggaaatgtggacaaagacaacaagacaggataaaaggttatggttcattcattgacagaagataggacaaagtttatggggggaaaaagtgggtgggatgtttaaatatatatctggttttctcaata

SEQ ID NO: 291100 - DNA, 365 bp, Glycine max
cttgaagagctagcttccatcgtcaaattctcaccgttattatcagctttgttgatttccacattactcaccactatttgttgttgttgttgtagttgtgggaccaatggctgcacttgtggggcctcacgaactgttgttgcttgtgcttgttgtggtgttggagttgatgttggtgttgcttgtggcactggttgctgtggaacaacagtgatgctgctgttattcaatgctggttcaagattgatagtttcttgttgctgatgttcggctatcttttgcataaatgtcataacagcagcatcttttgctgcggcaatggacctctcttgtgctagaatctccctttcactgttgatcctttg

SEQ ID NO: 291101 - DNA, 361 bp, Glycine max
tttcatgcaagcttggacactttcaatatgattgtcctacgtgggaaaagaaaccaaattatgctgagatggaggataaagaggaacaagaggatgagctcttgttaataaccttcatagattgcatagaagggaagaaggatgagtggtttctagactcgggatgcggcaaccacatgagtagtaacaaggagtggttctcagaattggatgagaactttcggcacaatgtaaggctgggtaatgatactcacatagctgtgaaggggaaaggtagtgtttggatggttgtgaatgagattatacatgtaatcacacatgtatattatgttcttgaactcaagaataatttattgagtat

SEQ ID NO: 291102 - DNA, 472 bp, Glycine max
gggccgactgttgttgaaacctcgctttcgtgacctatgaaactcagcttgaggagttgatgcataggaacaatttacttttaagtgggtcctaattggattcctaattttcaacttacctatttggatgtgacatcatggcatataggtcccaactttccatcgtggattcagtcacaaaacaaacttcaatatgttggactgtctaacacggggattttagattctattcccacttggttctgggaaccacactctcaggttttgtatttaaacctctctcataatcatatccatggtgagcttgtgactacattacaaaatccaatatctatccaaactgttgatctaagcacaaatcacttatgtggtaaattaccctatctttcaaatgatgtgtatgacttaaaccttttcaccaattcattctctgaatccatgcaagattttttatgtaacaatctggacaagc

SEQ ID NO: 291103 - DNA, 375 bp, Glycine max
  unsure (1)..(375): unsure at all n locations
agcttgtagggttaaagtctcactattgtcacgtgctcatgcaacaattgttagccgtggctatacgagacatcttgccaaacaaagtcaggttagccataactcgcctgtgctttttcttccatgctatatgtagcaaagtcattgatcctatcaagtttgatgagctggaaaatgaggctgcaattatactgtgccagttggagatgtattttccccctgttttctttgacatcatgattcacttgattgtgcatctggtcaaagaaatcaaatattgtggtcctgtttatctacggtggatgtacccggttgagcaatacatgaagatcttanaagggtatacaaagaatttatatcgtccagaagcatcta

SEQ ID NO: 291104 - DNA, 430 bp, Glycine max
  unsure (1)..(430): unsure at all n locations
tgatattaaatntaagtaaattacttgcaattcaaaatgttaaattaaatttaattgctattatgtatcacgcagtttatatgtaatttactttttacttaatgattgcaaaataatgcaagttatatttaatttaatgtttagttaatattttgtaagagttttgtttagctgatatatacatggaactagattgcattaaagttagattttttaacagaaaaggttatttaagtattttgattttagaataaaataaaaggaaatgtaattggcccttgtgcttatttaatgtcaaaattcctaatattttttagaggcatttggggaagctttccttgaacacaaggactgttctagggactcaaaagtgaccaagtttttggtttggttgtggctggaggcttctttgttctgttctttgtgagac

SEQ ID NO: 291105 - DNA, 488 bp, Glycine max
  unsure (1)..(488): unsure at all n locations
ggcatgggattgtacgtagctatgacgtgacctatagtatgctcaagctcactntaagactatatattgatttctttagtttgcattctatgtgttcctttccctcaactgagaacctcattggttggtccatataaacattctcctctaaatctccatttagaaaggcagttttcacatccatctgatgtagctccaagtcataatgggctactaatgccatgataattctgaaagaatcctttcgtgagaccggtgaaaatgtctctttataatcagttccatatttctaagtaaatcccttagcaacaagtctagccttgtagcgttcaaggttgccatgagagtcacgtttagtcttgaagacccacttacaaccaactctcttacaaccctttggtaattctacaaggtcccaaactccattatgttccatggaatttatctcttctttcatgacatttaaccacttctcagaattatcgcan

SEQ ID NO: 291106 - DNA, 403 bp, Glycine max
agcttaaacattttatttcgagcgtctcgttatattacgggactcaatcagacatccgagtaaaaagttattgtcgtatgaattggcttaaagcttaaacattcaatttcgagcgtctcgatatattacgggactcaatcagacatccgagtaaaaagttattgtcgtttgaattggctcagaggttcaaaattcaatttcgaacgtctcgatatattacgggactcaatcagacatccgagtaaaaagttattgtcttttgagttggctcagaggttcaacattcaatttcgagcgtcccgatatattacgtgactgaatcggacatccgagtaaaaagttattgtcgttcgaattgggtctgaggttcaacattcaatttcgagcgtctcgatatattacg

SEQ ID NO: 291107 - DNA, 414 bp, Glycine max
  unsure (1)..(414): unsure at all n locations
tacgacaataactntttactcggatgtctgattgagttccgnnaaanatcgagacgctcaaagttgaatgtttaatctttaagccaattcatacgacaataactttttactcggatgtctgattgagtcccgtaatataacgaaacgctcgaaattgaatgtttaagctttgagccaattctaacgataataactttttactcggatgtccgattgagtctcgtaatatatcgacacgctcgaaattgaatgttgaagctctaagcctattcaaacaacaataacgttttactcggatgtccgattcagtgacgtaatatatcgagacgctcgaaattgaatgttgaacctctgagccaactcaaacgaacaataacttntactcggatgtctgattgagtcccgtattatatc

SEQ ID NO: 291108 - DNA, 403 bp, Glycine max
agcttcttcacatttccgcctttgcttgaccttctttatgcttaaaaacagaaacattatgcataggcaaaagatcaagaggagttagtgggttaaaaccataaacaacttcaaaaggagaacaattagtggtgctatgaacagctctattgtaagcaaattcaacatggggtaaacaagcttcccaagtttttaagttcttcctcaaaactgtcctaagcaaagttcccaaagtcctattaacaacttccgtttgcccatcggtttgtgggtgacaagtggttgaaaataacaatttagtgcccaacttgctccacaaagtcctccaaaaatggcttaagaacttagagtccctatcactaacaatgctccttggcaaaccatggagtctcacaatctcctt

SEQ ID NO: 291109 - DNA, 423 bp, Glycine max
  unsure (1)..(423): unsure at all n locations
cacatgagtttgacaaaccttttaccatatagtttttactctctggtaatcgattaccagattattgtaatcgattaccagtagcaaaattgttttgaaaaagttttcaaattgaatttacaacgttccaattattttcaaaaagctgtaatcgattacaatgtttgggtaatcgattaccagtgcctttgaactttgaaattcaaattcaaatgtgaagagtcacattctttcacacaaaagctttgtgtaatcgattacactaatttggtaatcgattaccagtgactgtttctgataaatcaaaagatgtaactcttcacaagggttttgactttntcaaattgngtttaagttgttctaaaagttataactcttctaaatggtcttcttgactagacatgaagagtctataaaagcaag

SEQ ID NO: 291110 - DNA, 401 bp, Glycine max; identical to SEQ ID NO: 291020

SEQ ID NO: 291111 - DNA, 418 bp, Glycine max
  unsure (1)..(418): unsure at all n locations
tctatcaagtggtaatcagagcacaagagcttcaagtatgtgctccttaaacctccattaattnttttgctttaccttctcttccattggtgtttcttcattttttctccatgtatctcctcacatgtcttgtgctaaatgttgttaacatgattctttagagtttccaccgattaaacttgctacagaagctagatttgattttctatggttcanatttcttgttcttgttcttgaaccgtgaattgtgttgagtttaagttcctttgagttttgtcttgttatttttgtggctgagacctaaacaatanaattcttacaaaaatattatagtagaagaaaacctcanaaatctagagtgactttgttcacctattgtagtttgtcatagaagtcatgtctagtcatgaaacttatc

SEQ ID NO: 291112 - DNA, 354 bp, Glycine max
  unsure (1)..(354): unsure at all n locations
agcttagttagtagggggcctgatgaccttgctaagagcaatgggcactctgtagaactgaccgcattcacctgtccctttggcacttttgtctataggaggatgccctttggcctatgcaacgcccctggtaccttccagcggtgtatgcttagcattttcagtgattntttagagagttgcatagaggtttttatggatgattttactatttatggatcctcttttgatgcatgtttggatagtctagatagagttctcaatagatgcattgaaactaaccttgtgctaaattttgaaaaatgtcactttatggtaaaacaaggtatagtcttagggcatatcatttctagt

SEQ ID NO: 291113 - DNA, 426 bp, Glycine max
  unsure (1)..(426): unsure at all n locations
tcctcggggccattcctgcgaaggcaaacatttggaatgttaattntaccagtgggacactatccttaaagcaagaatggcatataacctcctcccataaatacaaacatcaatgtaaatttagagcaagcttatgcgcatatttccttacgaacgttctcttgcacaagacattctattaactaagaaaaatgcacccatacacaatcaaggcagcttcgttacctagattatttacacgtatttccaaggtgtatttgttacttacatcacacacatctccttggctaaatttacatacatgcatactcaaagcattttggggtaccaaaaattgcacatgcgcacatcttggtatttctaacacctatacatacacaaacttcatgatgaatcttgactatcttcacaaaaaggtgctacact

SEQ ID NO: 291114 - DNA, 383 bp, Glycine max
actcaatattgattggctgagtgatattttgttttgattcttgagtatgtgaatgatgtgaaaatgtgtgacacgtgtagtgttgagatgtgatgccacacgataagtcatggaatgacgtgagatgtgtttcggtaagctgatgtagctccatgtagagcttgtaagccttggatcttcatcattaatggagtcctttgcttcttgaagatgaatggcagcggaatggagaaagaagatgattggagacgccacttcaacgagatgagtcaagaagatgctcaccaccatacgaagccatggataagagcttgaaggtatgacaagatgaatggaggtggagggagaggtatagaatggccctcttccttgtttcattaacg

SEQ ID NO: 291115 - DNA, 407 bp, Glycine max
  unsure (1)..(407): unsure at all n locations
tctggtgggacatcttgacttgctgtccaatctgacattctcctcttattctgccttcttctattttcagattgngaatgcctctaacagcacctttgtcaatgattttcttcatgcctcttaagtgcagatgtccaaatctttgatgccatattttgacttcatcttctttggagaatagacatgtggaggagtaactggtttcttgaggtgtccataggtagcagttgtcctttgatctgctgcccttcattagaacttcactcttctcatttgtcactaagcattctgactttgtgaagtttacattgaatccttcatcacacagctgactgatgctgattcaagttgtagtcagtcccttcaccagcagtactttgtccagactatgaagtccatcatggact

SEQ ID NO: 291116 - DNA, 395 bp, Glycine max
agtctttttacatctttgggttgttctaagcacgagaaggtgacgggaagaaaaggggaaaacactacgcatttcctaggtttttctatttgatcactttaaggtaaatgtttatgacccattatgttagatgagtatgttataacattgattagtcatgggctgtgagaaaaagagttggaaactaagtattagagattattatgattttctcaaaaccctaggcttgctaaaattggggattttgtctaatcccttgttccattatttaaatgcttaggttctgtggaaaatacagtggttgaccttcctaacatcggtagaagtcaatgattggcgttattaggtgagtagctaatatacttagcgattttcttatagttcaattatggaga

SEQ ID NO: 291117 - DNA, 418 bp, Glycine max
  unsure (1)..(418): unsure at all n locations
gaattacacaatanaacatgccttggtcgtttaaatttatttccctcccttgctacaattatatttcacttaattggacaaaacttatgtacaattttattatgggtaatggtattattactctatgtcatattgctcggtttttttttttttaaatacaccttttttttctaatttattgtaatttaatttccaatatacttgagactttttctctcctttttgttttttttactttaaaatattatcaaatataaatattatattatataattttttntaattggnttaaaattacttatttatcaaattaaattatataattatgtnntttaatttttttactaagatggactaataataaaataaacaagataaccanatataattgtttacgtttgtattgataatcaatata

SEQ ID NO: 291118 - DNA, 385 bp, Glycine max
  unsure (1)..(385): unsure at all n locations
agtctctctcttttcttcggttgccgagggcggtccttccgtggacaaaactattggttgtgtcgcgatgttgggttgaggcaacgtgctgggtgccggcccttcggggatcgggggatagaactcgacatcccttcgagcatagtcttgagggtctttgtgggcctcgtcgggctgttgagaaggttctctttcaaggacgggagaagcaatatggaccgcatcgtcttgcaagacgggtggtgagtagttaggcggcaatccataagggtaagccgctcggttgtatcccaggtgagggctgccatcgtgccctagtgtgtcatttccctgtcctactatgttngagggaggatggtgcgcagttgccaagagagttgggtct

SEQ ID NO: 291119 - DNA, 398 bp, Glycine max
  unsure (1)..(398): unsure at all n locations
tagcgcacaggcgcgcttagcctaactactaaagcttattaactgtgagagagttgagcatagcgcagcagggcacttagctcaacacatgacaaaggcttagcgcacagacacgcttagccttattcaaaggaaaacttacaaaagcatagtggcgcttagcctgataggccaggctttgcgctgaacaaaaattctcaaaatcttaatgtctgaacactagttctgcttagcgcatagacactcttagcgggctcatcacttacgttcatcagtatggatgaacgcgcgtancgtgacatgatccgcttagcgcgttcatctggaaatgtaatattctaacaattgctatgaacaggctaagcgcagcacgtgcgcttatcacgttcattgcgatt

SEQ ID NO: 291120 - DNA, 381 bp, Glycine max
agcttccaaccctacccctacccctctcttaactcattcccaattatggatgttaacaaatccgcattgaaagtatgaccaatgatattttataacatgtttggggtggttgcatatttttagtttttgattttcaaatgtaatttttgaaataaaatgtgcttgacaacaatgattgaaataatttataactcattcaaagataaaaaagatttataaatttggtttttagttttagaaaaacacatttttcttatatttgacaatgaccattttcgctaccaccaccagcacggttggtctgtcaccaccaccattggaactacttagtggcaaagcacggcccaattagttaaaggggccaaaatagttaagcaacca

SEQ ID NO: 291121 - DNA, 413 bp, Glycine max
tgccttgtcccttgatatatttgatggactcatggtttctatgaatgacaaattccttgggataaaggtagtgttgccatgttttcaaagcccacactaaggcaaacaactctttatcataagttgaatagttaagggtaggaccacttaacttttcactaaaataagcaattggatggccttcttgcaacaacacaaccccaatcccaacgtttgaagcatcacactcaatttcaaaagatttttgaaagtttggcaacgcaagtatgggggcattagttagcttttgcttaagaacattgaaagcttcttcttgtttctctccccatttgaaaccaacatttttcttgagcacttcatttagaggtgctgccaatgtgctaaaatccttcacaaatcgtctataaaaactt

SEQ ID NO: 291122 - DNA, 377 bp, Glycine max
agcttgctagagaagccatggctttctgtatgatgagttgctactaatgctttggctttgatatgttgcttgaatctcatcttcattgccacatggccaacttcatttatttgtgtagaatttgcaattcattcatgtcatgccatgtggtttcaagatgaataagcctatccacttagttgcatctctttgaaagataacatactacgtgtgctgattgagcggcaaggtatgagaagatgcattatttttatacagaggattagcttatacaacttacgtaaattgatttacatgttaatttgatatactgtcagttacagatatgtatactattaattaattaatctaacttttgaaggactaatcataaaaat

SEQ ID NO: 291123 - DNA, 402 bp, Glycine max
ctcagcttaccatcgatgggacaatggtaccctttgactctcaacagacccagaattctgacaagctgccttctcaagctgtccaaaatcccaaaaatgtcagtgccatttcattgaggtcgggaaaacagtgtcaaggacctcaacccgtagcaccttcctcatctgcaaatgaacctgccaaacttcactctactccagaaaaaggtgatgacaaaaatttacctaacaatttctgtgcaggtgaatcttcttccacaggtaattctgatttgcagaagcagcacattccccctcttccattccctccaagagcagtttccaacaaaaaaatggaagaggcagagaaagagatcttggatacattcggaaaagtagaggtaaacatacctctgctggatg

SEQ ID NO: 291124 - DNA, 360 bp, Glycine max
tcctgcttcatgcaatctttaacaacggtggcacgcctccttcgatgatgagtttcccgtaacggtcgttgtcgcgagcaagggagacgagggaagcggctgcgtctgaacgttcgtccaaggaagcaccggagagaagaatggcgacctgttcccagatgatgcagagaatgggctcgttggcggcgatgggagggaggcccaggtactcgtcgtagcgctcgtcggcggaggcacgtgggacgctcgtagaggtcgttgctgttcctggcggcctggcggatgaggcccgccaacttcttcagtttggatttcagctccagacattcctgtcggaaattctggtcctcttccgcaagc

SEQ ID NO: 291125 - DNA, 400 bp, Glycine max
  unsure (1)..(400): unsure at all n locations
ntgatgccttgcttggactcttgtttgccgtttaagttggtcgaagatttctcgaagtttttattttgaccgacgtattttcgacatatttcgctatatttcatgttttcaaaatttttttctttttttcttttttctttcttctttaatgttgatgtattgtattctccaaactaaaagtgttttcaacacattctagcttatgggggtattagacaaaattaatttagttagttactagaagttattttctataataatttttttctaatgtttaaaattggcaactaataacatgtttatggtgatttatttggaaaagtggaagtcccacgtatattgngtgcatcacataggtatgcattgttaattangataagggattatgaatgcaaaggaa

SEQ ID NO: 291126 - DNA, 376 bp, Glycine max
agcttgttaaattaaattttacaataataattacctaaaagtcataagtagtatttattacaatttttagtagttttttttgtgaatacaatttttagtagttgaaagtgtaaatattttttatattggttgcatataaaaattaaactataaaatgaataatataaaggaaattatagatagtagtataatacgtattgccttaataaattagcacgctgggcgtgtatacatattacatagagtggagaggaatcaggaaaccgacgtttgtggaaattatataaaaggtatgcaatagggttgggttagataaaaacccaaaacacaacacggcagtgaagttattagaatctgtgttgtgttgtgttgtgtt

SEQ ID NO: 291127 - DNA, 424 bp, Glycine max
  unsure (1)..(424): unsure at all n locations
tccaaatcttanacagttgtctgaacctcctcatacttaccaggtgatgtctaatttgtattcctcgtatctttctttgtttgcatcattgagctctgatggcttgcttatttgaaaccaattttcgattttgtttttcatatatgatttgcttttgtactagtttgaaacaagtctcactgtttttcttctgtttttcattgctttttctttcgcctcctcttgctgtctgcttttttttgtttttttagttaatgagcttatccagaaatgttctacttctccccattggtgtctgatctgatagtgtgtctcatcttttatgttacctttaaccttatgatgaaatattactatgctaaatttcttcccattttaatcttatgcctaaaattggaaacttcagtttcggctttaaaaagtt

SEQ ID NO: 291128 - DNA, 374 bp, Glycine max
agcttgttatgtatgcctacatgcagcgaatccaaattaaattcttatctagctagtgaagcgagtgaccatccatctattaataagatttaatcattttcaaattgaactgtacgtccaactgaacaatcctctatgtcttttaagttcggtgtttctggaattgtattgcttgtctttcacgtttgcacgcacttggagaaattgcgaattgtttacctgagaatcatatcatatatgacagattgaataatagattttgtgtcaagcacaacctttcagtctaacatcaatagacatcaagtatggtacgagtttgtgtaagtatgcaattcgccgattctaacattatttttacaagacttattgtaaag

SEQ ID NO: 291129 - DNA, 422 bp, Glycine max
agacaattacaaatggccagttagtggaaaacatattttactgtgattatattccacaaactggtgttaggaatgaaacaaacttgcaaaatgtatttctgaaggccttgccaaatttggtgcacatatggaaggaggacagcagtgaaatacttaaatataataatctgaaaagcataagcattaatgagagtccaaatttaaaacatctctttccactttctgttgccactgacttacaaaaactagaaatccttgatgtatacaattgcatggcaatgaaggagattgttgcttggggcaatggttcaaatgaaaatgctatcacgtttaagtttcctcagctaaacactgtatcattacaaaattcagttgaacttgtgagtttctacagaggaactcacgctctagagtggccatcg

SEQ ID NO: 291130 - DNA, 374 bp, Glycine max
agctttgtatgctctattcaatggagttgacaagaatatcttcagactgatcaacgcatgcacagtggccaaggatgcatgggagatcctgaaaaccactcatgaaggaacctccaaagtgaagatgtccagattgcaactattggccacaaaattcgaaaatctgaagatgaaggaggaagaatgtattcatgacttccacatgaacattcttgaaattgccaatgcttgcactgccttgggagagaggatgacagatgaaaagctggtgagaaagatcctcagatccttgcctaagagatttgacatgaaagtcactgcaatagaggaggcccaagacatttgcaacatgagagtagatgaactcattggtt

SEQ ID NO: 291131 - DNA, 427 bp, Glycine max
tgtagccattagaagagaatgagcatgtgattggaagtatgactaataatgttagtcagtttgtcagattgattgtgaaggaatgcattgactgtatcccggtgagagtgtgaactttaaattttgagagaaacgattatcatttagtactgatttttgcatgaatctctgaagtatggactggatgcatgaaattgaggatgatgaaggccatgtttgattgtgatagccacttagccaaaaagcttaccacgtgcttgaatgatttatcccttgcacccagtttgagctgaatgaattattgattgattgaaccttgagcctatacagtgttatctcttgctaccttgacttaggctgtaggagagcatcatccacaggaagcatggtgcaaggtaaatttgttccaaatttatgggaggcactg

SEQ ID NO: 291132 - DNA, 379 bp, Glycine max
  unsure (1)..(379): unsure at all n locations
agcttatcaaacttagaaatcaagtgatcatgtattccgaaaaatagggggagtaaacgaatgcacattttatctatatacaattgtttgttgcttgcttgaatcttgatttcaggtattgtattgtcatcatcaaaaagggggagattgtagatgcaattggctttgatgttttgatgatgatcatgatgatgtgttgcaattgatgcaaatgggcttttcaagattaaaattcaagacaatacttcaagattacaagtcacaacatcaagatgatcactagaatattaggaagggaattcctaattgaattagcaaaggtttggccaagtgatttaaaataaaaagtgtttttcaaaggttntactctctggtaatc

SEQ ID NO: 291133 - DNA, 430 bp, Glycine max
tgaagggactcccacatttcctggtcctaatatcccttctaacaaaatctttcttcctacacctatactcaccactcctttcacaaccaattaacacaaatgaaatccttcctctactaccagtgtttgtgtcagacctcataatgactgtcataaatccgttttcatgagcaacggatcaagcccactgcaaaacatcatttcgggtaccaaacacctataacgcaacccacaccattttagtcttctaagggacattgattttatgaaaataataacaaaaatcaacattattacctaagaagtattgaatgcattcgaacaatcaacatgctgctcattcacaccacattcctgttcattttgatcatccatatcaacttcttcaaacattatactgtcatacatccattgatctccatccatctta

SEQ ID NO: 291134 - DNA, 382 bp, Glycine max
  unsure (1)..(382): unsure at all n locations
agcttcacacaggctaatgtttcatcttaattccaaatcacatatatgtcataaatggattttgcaagtcatttcccatcaaataaaggataatgtgcataatcatcatggatcaataggattttttaagatcggacttgtaggaaattttggatttggttgctttggtctttttttttgtgtgtgtgtgagtaggagagtaggcacaaagatttggttagtaacttaaacggtcgatcacttcctatcccttcacgtcttgaccaagttactatcgtttcccttcctttttactctttaccacaactctgtacatggtttagacattgtttgttccaaagaactcatttttctttaccattccctattgntcttctccatt

SEQ ID NO: 291135 - DNA, 441 bp, Glycine max
tagaaccctagcttatgctacaaacatttataatacaccccctcagtagcttaaccaacaatagcagaataattatgatctttcaagcaacagatacaatccaggttggaggaatcatccaaatctgagataggcaagtcctccacaacaacaatagcatgtccctcctttccagaatgttgttggtccaagcaagccatatgttcctcctctaatacagcagcaacaacaacaattgtcacaacaaagacaatcggcaactgaggctcctcctcaaccttccttataagagatagtgagacaaatgaccatccagaatatgcaatttcagcaagagacaagagcctccattcaaagtctaacaaatcatatggggcagatggctactcagttgaaccaaactcaatcccaaaattatgacaaattgccttcacaaactgt

SEQ ID NO: 291136 - DNA, 372 bp, Glycine max
ttgcttgatggaaacctacacgcctaggttcccctgagacactaactggctataatacaaaaatctgcacatgtctctagacacacaggtttatgctcctgtgacgaccaacacacagactgttgccctcctgtgcaacattatgtatcaattgaacagactgaagctgatgctgcaaacatctacaatacacctgcgtcatctaagaatcgcacgctggcccagcataccaattacgacctgtggagcagcatgcacaatcctacgtggaggaatcatacctaccttgtatgcacgaaggcttggctacagaaaaacccataacaccaccctccttattagcataatgaatctggcccagcagccatacgt

SEQ ID NO: 291137 - DNA, 298 bp, Glycine max
tgggggagacatcgagtgagaactgaaggcgggcttgtttgaaacctactccgactattgctgtgtatacacagactagctctggatctatgtggaaacaagaactgccgatatggatcagtctaataatggtgtttgttgtaactccatgaatgaaagctgagtgcctaaatcaatgcaagcatggggtatgaatgaatgaacagccatgctccctatggatgaaggctcttctagaacctaaacttttttgcattcctttatccttatgaggaacacaatggaggctccattgctc

SEQ ID NO: 291138 - DNA, 375 bp, Glycine max
tagctttgagggtgcgcagcccaccatcttttcatagtagagtaccgataatgtgtctaccatcacgattatcgtctccctttttgcacatgttctgtagttgcatcctatctggaaccatatcagaatagtactgatactgcctaacgaaggcaaccattaggtccttccaagtatggactcgggaaggttccaagttagtgtaccaggtaacaactaccccagtaagactttcttggaagaaatgtattagcagttcctcatctttgcgtatgcccttatcttccgacaatacatctttggatggttcttggggcaagtagtccccttgtacttgtcaaagtccagcaccttgaacttgggaggggtgatgat

SEQ ID NO: 291139 - DNA, 419 bp, Glycine max
tgtagaatggctagacatgatacatgttacggtttgttttggttcacagatttaggggatgccccacattatttccatgacacaaatgcaaagatgatgatttggaaacttcatgcaaaactggtcatgcatgcacctatgtggacactcaagtgtcaaacttttatggtcatgtgatgctagggctcaggatttaaatcaacccaatgtttccaaaatatgttcttttatccatttgtgcattcatccgagtccatttccggcgtccggggaaatttcacagtgttcacccttcaggtgtagacacattttttttcaaaaactagttatgatcaatgaacttttttcaaagataagttggaagtcatctcttttcaaaagcatgtcggcttttcagctaaacaacttattattatttt

SEQ ID NO: 291140 - DNA, 375 bp, Glycine max
ttgcttacataatactgatacatgacatgtttattgcacgctgccctacaagtttattattggaacagggtataaaacttggggaaattccatgctaataaaaggtgtgtataaatcatattaataactcacaattcaccctctactggacattagagcttcccaatggatggtcaccaacctgatattaatatcttggactcataagatcaggatcacactaagctatatttgcagctagctttcagattatatatcatgtgaaagtagatatagctcacgcattatagccggttataccatctaattattagatcttccatatagactatgctcaagttcgagcattccctattccgttctggaccttggata

SEQ ID NO: 291141 - DNA, 396 bp, Glycine max
tgctgatggcagggattcaatctctttcataaaccattatctaactaatacaccttgtaaacagatatatacaagtcagcaacactgacgaagagaatgtattgtaatcactggttattattgttataatgtgaacactgctttccatgtccatgtcaatgccaataagaacaccaggatcatatttacgtagtaattgcctttaatccacattatgtgtgacagtgattggcatacaatgaaatatgtcagagagataccttaaccaatgtaaattgactactcccctggcacacaggaaaataatcttgacagcaattcttgctgcctccatcctgtgaatatttattggccatatatacaccgcttagatctcaactttcggcactctgacca

SEQ ID NO: 291142 - DNA, 187 bp, Glycine max
atctatataggttcggtggttgctagccagcatcttgtttgcaggactagcctagtcgttatcaaaatggccgtgattgaaaacgcaatggacactgctgatgtgatgatggtcatgatgatctggagaaatcgttgcaggctggacttgtccatagctgatgaaggactatgcttcatgactctgg

SEQ ID NO: 291143 - DNA, 492 bp, Glycine max
  unsure (1)..(492): unsure at all n locations
nttgacacctagttgttcccgctagccattctgagacactatcgagtactggacctcgaccagtactgatccgtatgggctttatgacgaattctggttgttctcacgctgcaggcgacgacggtccattacgcggccaccatgacactgaaagtaactctctggcgatagctaccatggaaagtgtacagacgctcggaatgacttgccctaatattctgagagctgtatcagaaagagctgaccacagtgattaccacgactatatggtgcctgacagatgtatatacggcggcgcgagaataaactgtcgaaggacattgggcttatgaatgtacgagctataaacagcattgtgacctatgaagcacgaatagattgcaacaactgacatgctgcctatatccaacacatgcccggcttgtccgatcattcatataacctatttgcaacactatactgtcgtacatacatcggatctcatgcctctaa

SEQ ID NO: 291144 - DNA, 379 bp, Glycine max
agctttcctacaagtcctaattgacattctaaactagaatcaactcactttagactccaatttccactaaccccaaatttggcttttccaaccctcaaaatctcacacttttccactcacaacattaccattctcacatttaaccctaggttaactctccccatcatctctacatgttttctatcaacattttcaacatacatatatcacaaagcatcatcataaaaccctaaatcagcatgggtaatttagctcacatcaaacatgtcaagtttagcatgatttcaacaaatttcttcacaaataactaccctaagacaataacctagtagaagtacccatcatagctcccaaaaacccaacacccacgaatttcaag

SEQ ID NO: 291145 - DNA, 411 bp, Glycine max
tctacttatgtggcagggcgggctttcttcactttcttgtctccaacgcgagctttgaccactgttctttcttcccgcgatgcttcttttcatgtccgcctgagtgggcttatagcctaaaccatacttcccacggtttccttgagtatttatcaggctagttatgccgccgttgtctctgcctaaacccatcccgggttcataaccgttccccaacataactcgggccatcattaccgctgcatcggacagacaaggctgcccaaagagggagtccacggaggaaatgctgaccacctcaaaagactggaaagcagtttctaacgattcttctgcggcttccacataaggcatggaggatgggcagcttaccaagatgtcttcctcgcctgacacgatgaccaagtgccc

SEQ ID NO: 291146 - DNA, 335 bp, Glycine max
ttggacattggtaaacctttcatctgagctccttatttgaataaaatctcccataatacactacagccccccatccattaatggctcaacttttttactggatcccacaaaattcttttattgtgtatggcacatggagaataaatagtaacaagggtgaccagttgtgcttcttggacccattccccaaccagtaaaataaaatcattaccagtgatttccctctgcaggttaaaagatttatcactccacaaacataatatacctcctgctgtattgatagctgtgaacacatttcaaattacctctgtgtgtgcccatatagactgagacat

SEQ ID NO: 291147 - DNA, 120 bp, Glycine max
ttcttgcaagcttgagatgacgaagtgctgaagggtgaaacttcctgcttttattgctgaccacagagtggtacctgcagatatgtcgcgggggtcacgacaccttgttgacgttctgtg

SEQ ID NO: 291148 - DNA, 406 bp, Glycine max
  unsure (1)..(406): unsure at all n locations
ntaatgagatatgcgagaaatgagagaatagcacatttaaaaatgttaaaatgaatatatgattatacaaaaaggaaaaataataattataaaaaaaattggaatattaccaattgaggaaacgatgataaaaaaatcgatcaagataatttgatcatgtatgaagaaggcaactaaaggcatcaatcaaaatagtagaaatagtccaaagagatcttatggtaaataatattcttaactttttttgtttttaaccttgtcaaatgacatcatgtaatctatatagtcaatcttacctattaggataagaattttctattattgttattggtttcaaattttcaaatatatacatgtatgagaattgagaatcatatacaaaatacctaacataaaatatgcttat

SEQ ID NO: 291149 - DNA, 377 bp, Glycine max
agttgtgagccaaaatcctgactcaccataaaccttgacccagggtgagaatgtcaatccttaccctcgggagcaaaaaagaaaagaaggaaaatttccaatcaaagaggaagcaaaaaaaaaaatggagagaaggaaaatttccaatcaaaggaaaggaaattccctatcaaagaatgggagaaagaaaaaaagagaagtaaaaaagaagagagctcaaggatcgaaagaaaacagaagaaatgtgcaggaaggtcgttggaccacacaatatctgaacaatacagaattgtcaccaaatgaacaaaagaaagaaaaggaaaccacgacctaaaatggtcttccccctttaattgccaaccaaaatcttgtgcgct

SEQ ID NO: 291150 - DNA, 282 bp, Glycine max
tgcttctgtacagactgtgatcaacacttgtgcccgctttatccttcgacagctttaagtgagtaggtgcacgtgttcttctatgactggcaatttccattccgaacttatttacgatggtctttgcattcttgctttgggagaagaacatgaaagctttccttttgttttgcttgggagccgaaaaaataagtctcttttccaacgagactcatttgaaattcatattgcatctgtggtacaaaatgtcaaaccatttctttcgacatccctccaaacaca

SEQ ID NO: 291151 - DNA, 346 bp, Glycine max
tgtctttctttcttttggtgaagcgcatgatataaagactaaacaaattattatactatattcgttcaaagcttgtattctacatggccgcatgctcgtttacatggaaggaattttaatttttcaacctgatctatacttataaatctgcgataatctctttttatgctttccaaaatacaacatgttccttattaatttatatgaaagttatattcttgtgtctatattccttgaaatactttttatttatatttattctaactcgtctgctgcttgatcattgttgtggaaagtcttcttcatttactagacgatatttggacccaaaaattatatatcacag

SEQ ID NO: 291152 - DNA, 163 bp, Glycine max
ccctttatctggagaccatcagggagcacacggggagggaccaaagaaagtgacaccagatgtcatgagctccactactgagccggaaggtcagcatatcgaatctctgcacaatcattcacgcctagctgaacaggccagaagggccaagatcagccctgtt

SEQ ID NO: 291153 - DNA, 380 bp, Glycine max
agtttatggtgaagagctcaagcgtgtatgtgaagggaacaactacaaacttatattagaaagatcaccagggttgttgtaacctaggtttgggagcttttatatgtgtttagaagccagtaaattggcctttaagcgtgcttgcaaacccataaaaaggcataacatacccttcaaccatagttttcttcaaagtccatcaaaagtgcataaccaacacataatccacaagcttcaaacactatcaaaagtgcaaagtcaagaccttaaaaacaggattcaccaaagtctatccaaagtgcaaagtccacatcaaaaccaacttctcaatcacaacctgttacacatatgtcttctgggactacaaagtccaccaactt

SEQ ID NO: 291154 - DNA, 422 bp, Glycine max
taattccatcacttaatttcctataatgttcaatcattagcaacactatctttaaacatctgaacctttaccgtaaatagcgcatacataccaatgttgtcaaaaacgccagttaactcggtgagtcgtacgagttacaagtttctgagcctttgtcgagcttaatcggaccaaagaatggagaaagttggagaatggcaatgaaatgtgagtttactctacagaacgaaagaacattaaccgtttttggcaactgctatttacacttctctttaatgctaatgcactcccctcctcacctttttgtccccaatctaccccacgtgtaacgcttatgaaaaagaatgatagtgtattggagtattagaataaagggggagtgttgtatcatctacttacttttaagtagcatatgtcttgaa

SEQ ID NO: 291155 - DNA, 362 bp, Glycine max
agcttttgtggagcttcaatggagaatgagggagaagaaaggcaacgtgagggagagggagagagaaggcttctgcaatgttttctgctgagtgaagagagagagagttgctttttggtttttaaaaggctttttcctcttttcttattattttattcaagctctgccacatgtccctatttgattggagcaaaaagggcccactttctctttttgactgtgacccatactcagtcacaaaagtgagaaaaatctgacctttgaaacgctaaaatcctgcctcggtttgcgtgccgtttctctggttccagtttctcgtgtttctctgcgtccgtcggcgccagttttcgaaagcaagcaat

SEQ ID NO: 291156 - DNA, 423 bp, Glycine max
  unsure (1)..(423): unsure at all n locations
agaggtgtgttgaaaccttctttatatctttatagttatttgtgtgataatgattttgtttatatgtggagactaatatagttttttttttctttggttaaggaatgggttttagcttccagaattgcagtgcctgacaacctgggtcttcgaatgcgtgggaggaccatggtccggccagctccaccatccaacaaacgagaactatcgtgggtcggcgatgttggttttgttgttgatgcttggtggcatgatggatggtgggaaggcattgttgttcaaaaggactcggaatctaattgtcatgtttatttcccaggtatgaatgtctgctctttctatgttaattagcttatgttggtaactgttcttttggtacttagattatgagctcgnttttttatttttgattaattcctatgg

SEQ ID NO: 291157 - DNA, 383 bp, Glycine max
  unsure (1)..(383): unsure at all n locations
agcttctcccccaattttctataaatagggggagaagtgaagtgaaaaagggttcagccccttaggcacttatctctctttcgaatttgcttggaaaaattgtttctgtgaagaaaatccaagccgaggcgcttctgaaacgttttcgtaacgtttccgtgaggaatttcgcgaaggtttcgaccgttcttcgacgttcttcattcgttcttcatcgttcttcgatcttcaacgggtaaatacctcgaaccaagcttttcgattcattctatgtacccgtggtggtccacattgtgtttcgtgtatttttattctcgtttcatttactttntatacccccctttgacgtgcttaagccattntatttaagtcatttctcgctt

SEQ ID NO: 291158 - DNA, 449 bp, Glycine max
gtgacactatatgaactcatgcttgccacccagctcgcccaggcgagctcagctagcctattcgagcagggttgcttcctccagaagtaacagccttctggagggcccaagtgggcctggttgctatttgcacccccatttttactaagtacaccccattgcctttttttttgtgattcttttttcgtaaagttacggaaacttatgaatttcgtaacgatacttgttttctttccgtaatgttacggaaccttgcggattacataatcatcccctttttgacttacggaatgttacggaacctcactaatcatccccttttttgatttccggtgtgtcacggaaccttacggattgtgcatcaatattttcttttgttttccggcatgtcccggaatttcacaaattgcctaatgatgggtgccaagcacctcacaaggaccaaacaa

SEQ ID NO: 291159 - DNA, 158 bp, Glycine max
tttcttactggaggccatgcctgcactagcagacctcacgaaagttccattacaagtgatgtgacaggctatcagaatcatggcccgaccttcctattctaggttggcatgactgcaggcgctctacatcataatatatttgaactcgtgcagatgta

SEQ ID NO: 291160 - DNA, 229 bp, Glycine max
tgtcgccaaagcatacggttaaagatgttacccattttggtagatacctccacagaggccttatgtctaactgacccaagcttatgaacgaccatcgatgtgcttcacctatggggactattcagctcataccaatgatctaagaatgtgtgaagatcctttgattggctgtacgggagagagcaacaatacctcttctgagggccttatccctcattagctaaaattt

SEQ ID NO: 291161 - DNA, 372 bp, Glycine max
tgcttgaagaatatatcatctttaacgctttagaaatcacttattagtgtttggaaaaattattggttgaagtagttgaaaaatgaaaaattatataaaggatgaaagtagtcaatttttactttaaatagaaaagataaaaaaaataagaatggtttaaatatatttttcatacttctaaaatagattattttcattttattatttaaatttcattttttaatctaagtattcaacatttttttatgtttcactgtagtatctattattagtcccattttgtaaagtgacaacatgaaaaatagagtgttgcattatctaacacctaatcactaacacgttaacaaatttttcacatcattttttattatt

SEQ ID NO: 291162 - DNA, 417 bp, Glycine max
tccacagcaactacaagcggtaagtccttctcactcttctgttatgaaggtttggggatgtcacatatgtggaggaacacatgagtcatgcttatgcatggtccaagatgaagcatccaatgaagttaactacatgggcagtcataatcatcaaggattccatcaaagaggaccaccaggattctatcagagcgataattttttgcaggaccacgattggagatattatccaagtaataacttcaaccaagggggttcaccctatcagcatcctagtcagggtccgagtcagcaagagaagccgcctatcagtatagaggaaatgctcttaagtttcatccaagagacaagggcaaacgctcaggagacgaaggcattcatccaggcaaatgctcaagagaaaaaaacattcatcca

SEQ ID NO: 291163 - DNA, 376 bp, Glycine max
ttgtcttaatggagtctatgccaacactaggagaactcacaaaattcccataggaagagaggagaaaggctaacagaatcatggcccgaccttcatattctatcttgacatgaatgctgtggagctccatcataatatatttgaactcgtcgatatgtacttttagtgacgtaccttctctcattcaaagaccaaacaaacctcatttcaaaagcaacttgttacaaattggtgttttcataaagagcttatctagcttgagccataacgcaaatatagtattcgcttcagaagcttcataaagaacttcatcagatagtgacaagagaatcaacgagtaacgattttcatgttgcaactgaagaactaactaatc

SEQ ID NO: 291164 - DNA, 254 bp, Glycine max
ctccacagaggccactgacttcctcacccaatattatgagctaccgtatgggtgcttcatctctgaggactaccacctgtcacccatgagtcatcaattgcataggatgaccatatgtcctctaggtggaacgagacactacctataattatggtgctatccctaattagctataatttatgatacttgccgaatttctggacaggaataagacctcagagatcaaatcgaatatgaagcggatggactacctc

SEQ ID NO: 291165 - DNA, 376 bp, Glycine max
agctttgcttctacaatagctattgagcctgaaagttcactgccaattttccatcctacggtgggtattttgtttcaatatttttctgggtgtaggattgacagatgttttaaactattattatatgatgacaaatttttccttatcatattgttgttaatatatatattgctaaatgggtccacagccatcgttgtcacagtccgctgattacgatccgggaaactcaacttgtttaactccaaccaaaaggattaattgtcagcaaaccagttctgattcggattctgatgagtatacacagtatcagctatcaactaacaaacatatcaaagctgagtaattagtggttacacaatcctgtggtatcagcctg

SEQ ID NO: 291166 - DNA, 418 bp, Glycine max
tatatgcaatgtgctaccatgtcagtttaaaataatattggagcacttaagattacataacaagacatgccacataatgggtatgttaggtcactctcactaagtaaaatcataaggtgaccagtcaaggtcactttgttttgtgagaatgtttcaaccatatgagatcaacataggtttaaaggagcactcaaactgagtgtctttaacactaaggcctagactctgaagaatccgttaggacctcaccttcctgattaaggtccaactcctaaaacaatttttgcacataaacaatgctcatgaattatacaatacacacgatctcagtcatgtttgaaacatgtttaacacattatgctacactttaacactttaggttcctaacttgggaccctatatttttcctttaacactt

SEQ ID NO: 291167 - DNA, 340 bp, Glycine max
ttgcttgccacccagctcgcccaggcgagcaaggttgcttcctccagaagcaacagccttctggacgaatcttttggatggcacaagtgggcctgaatgctatctgcaccaacattctactcaggcaccccctgccttttttggtgattctttcgtcaggaagttacggaaagttacgaacgtcctaacaagacttgcattctttcctcatcggtactcaaccttgaggagtaaataccatccacattctacttatggaatgtatcgaccactactaatcgcgcagcgatgcttgcatttgaattcacgtgtgacacacaaccttaccgaccgtgcatca

SEQ ID NO: 291168 - DNA, 321 bp, Glycine max
tgtaggatattcaaacgacaataactttgtactcctatgtccgattgaatcgggtaatatatggagacgctaaaaatagagactagatgctctgagcaaattgaaatgacaataactttatacacggatatccggttgagtaccgtaatatatcgagacgctccaatttgaaaactgaaactcttagaaaattcagacgacaataactattactcggatgccctatagagtgtcattatatatcgagggatgcttcaaattgaaaacggaagctcgtatgaaatccaaacgacgataaccttttactaggatgtctgattg

SEQ ID NO: 291169 - DNA, 347 bp, Glycine max
agcttacctaattaactagaaattgagagagaatgattattaaacacacaaaatataatttataagtatttattacctatctttaactaaaagaacttataacactacaaaataaccataaattggaggagtttgatacaatttacacaggttttatacacaaaagttagttgtattcatcgactaacaaaggaccataataatggtaccctaagggaatcaaagagtggatgctccttcctttcattgtatgagtggcaatgacttgcgaagtctgtgactcaagaagggtggcatatataacagggacaaaggaaaggaaaggctaacgaaacgagaatcggatg

SEQ ID NO: 291170 - DNA, 344 bp, Glycine max
ctccaggtattgatagctatatcctcagttggttcttcgtacatggtacttgatgtaaatactcttatatctatctaatgacgttgcatgtgtactctgcgctcagttaaggtcattcaacattgagaaatggtctgatccttataactagataagacccggctagattatcgcatatccactaatgatcgcggtaccgcaaccgaggagatggtacgaatgtcttaatgcacctttgggcaagtcctatttcaacatgatggatctgatgatgacgcttggatggattagactaaacatgcatgagacattgttgtttagccgtccaagagacaacgtcaaac

SEQ ID NO: 291171 - DNA, 547 bp, Glycine max
  unsure (1)..(547): unsure at all n locations
atgattgacnaccctggatgnacccttcganangatactanggacgatatgcgagactgcggccaccncgtgtgatagctcgtagcaggtacgagcactgcagagtcttgcgcatgtgtatcnattaagcacatgcngagacccanganaaagtgacagcatgatgcatatgtctctacatctactatcaggagaggtgctcnttatntcgcacaatcatactagtagttattgcttgtggatggtatcgtatctcgacaagtatgatctgtacaacataatctaataatatagatgagcaatatttgtgtcttatcacattgttgctgatctatatattgctccatgggtcctcggtcatcggtgacacaatctcgatgattactagccctgaaacttatcttgttaaatctctatccataacgactaactgtaaactcttgctttatcatgcatgcacggatgaggtgccactatactatacatatacgaacatacatatattagctcagaaaataatgcatgcacaatcctgaggatacggctc

SEQ ID NO: 291172 - DNA, 314 bp, Glycine max
ctttagacgctcacacatttcaggcacctattagatattttttgactttctttatctttattgggctatcaaatcgtatcacctatctgacatatatacttttctctctgctatgactcttactctctcaaggtgtcacataccgtatggaaatatatgtaggtttatactttttaaatgatcagtgaactcaatcaatgatgaatataggcgtcctctaaatattgaataccacgacatattatccaatgtattattagtagttccgacaatcaatactgctagaaaaaagatattctacgacgattagacct

SEQ ID NO: 291173 - DNA, 374 bp, Glycine max
agcttctttttctttggccaatgctggacttgcttggcagtgatttccttggcaatttgatgctcagaaatagcaatatccaccactccttcagttggtctgcccaggtacttgttgattacagcaggggagaatctaatacattttcctctgacaaacactttctgatactcatcactctttctgtttgctatgtcagagggaatgttgacaatgaattccctgactagactttcataacaatcacccatcttggtgacagttttcagcagtccagcagccttgatgaggtccatgatctccttgcaatccaaggcatctgtgtccagttctctttctaaggcaagtctgcgttgatatacaaatctccacct

SEQ ID NO: 291174 - DNA, 408 bp, Glycine max
tcggaagacagtgatgaggtacaagccctaaaagcttatcttgaaatatcccgggtagtcattgagaagttcaagtccatagccatcaaagtctgaagagagtatgatgaactaagggacgtcaatatggccacagctgaagccttggaacgagaaaccaagaaggcccgataggaagaacacgaccaaagcaaagtattgaggggctttatagggcagcaatagtgatctcaagctctgaataggtgaaaggaatcatcacgggtcaaaggcatgatcttgaaagacgagctaaaggtttgccttatgtcgaaaagaaatctgtcccaacagttaagcgagactgaatggaatatgtgggccatcatcgataagtgcaaagagaagctaaatctatcggcgactcac

SEQ ID NO: 291175 - DNA, 375 bp, Glycine max
agcttgcttgggcacactcctccttccattgttgacttcaaaatgacccagttccaaccattgtgtcacaatacctgcaacaacgtgcccaaatccttaatacaacaaaggataacctttgcttcatctgtcagagtatggagacacaagctaacaaacatagtaggactcttacctttgttgaaggagaatgagtttggcagaaactccaaatgtactaccaaaccttggtcagaagccaacttgccactaagtagaggcctcatttccatgggacttttcaagttaagtgtcatatagggacaatggcgtatgaactcactcttctaggctctgcttggattcatcctatggtgcatgtttccatacttcacc

SEQ ID NO: 291176 - DNA, 427 bp, Glycine max
tatgagacttccaaattctacaagaagaagaccaagattttccatgtatttttgatagctaagaaggacttcgtggttggacagaaagttttattatataactctaggctcaaactcatgagtggtaagttgaggtcaaagtggattggtccttttgtggtgactaatgtttttccttatggaatagttgagatcaaaagtgaatccacagataagagcttcaaggtcaatggacaccgactgaaaccattcctcacaaatcccttcttaatggatgtaatggtagaggagacctccttacttcaccctacttctcttctaccatgacttaggaagttctctcttctatctccttctttacttttattgcacttgtccaaatttattgattgatttgattgctcttgatcttatgattgtgctacat

SEQ ID NO: 291177 - DNA, 375 bp, Glycine max
agcttgtcttggttctactatggaggctggatctttgagctttagtgacgtcctttaatggtgattttccaccatggagatgcagcggaagacaaatgagacgaggttatacgcggcgccatccactagggaataatccatggaagaaggagcttcaccaccaagatgagccttggataaaaagcttggacaggatgcttcaatggaggaaaagacagagggagagaaagagagaggggggagcacgaaattgaaggaagatacagggagagaagttgaactttgagttgtgtctcacaagactctcattcatcagagttacaacaagtgttacacatgcttctatttatagactaggtagcttgcttgagaagc

SEQ ID NO: 291178 - DNA, 425 bp, Glycine max
tcctcggagccattcctgcgaaggcaaacatttggaatgttagtttttccagtgggacgtttttcttaaagcaaaaatggcatataacctcttcccataaatacaaacatcaatgtaaatttagagcaagcttatgcgcatatttccttacaaacgttctcttgcacaagacattctattaaccgaaaaaaatgcacccatatacaatcaaggcagcttcgttacctagattatttacacgtacttccaaggtgtatttgttacttacatcacacacctccttggctaaattcacatacatgcatactcaaagcattttggggtaccaaaaattgcacatgtgcacatcttggtatttcacaaacttcatgatgaatcttgactatctacacaataaggtgctacattttatgctcttttcaagt

SEQ ID NO: 291179 - DNA, 373 bp, Glycine max
agtatttgtactgtgactgagtctctagtgcctttcgacaatcccccaaacatcagtttgttagttttacaaatctctttatttttcttttctttttcaaagtatcattaattgaaaaagtgcaaagtcagttaaaaaacataggatactaaacaaagagcattacaataatgcatagctattaaataataataacgcaggggctcacgtccaaagctaactagaagtttctgcactgttgaatgaaagtttttaactattcaagtcaaaaacatagaaggaaggagtttgttagattaattttccattactccaactgaaaaacaaacacgcccttcattggatataatgttcgttgatattgggagaaact

SEQ ID NO: 291180 - DNA, 427 bp, Glycine max
  unsure (1)..(427): unsure at all n locations
agatgaanacttgctttatatgaactttntgcgagttaagcccagattaaaccatgattggattgattaaaaaattccatatttagtgctcaatattaaagcactaacccgatattccattggacaggtcgatcggcctggtatgcatatcaaatattaactctgatccaatatttaaagaacaattacctaatttattgatgccaataaaaatagttagatgggttaatgtcataaattttaattttattccatataatacaacaaccataaatcaataactataataacattaacaataataaccacaacaacaatacctagagtatctctaatcaatcaacaaatataatataaataacatggtgttaaaaagcagtcttctcctaatacttagaattcgggtgttactgaaacaagtagacaa

SEQ ID NO: 291181 - DNA, 381 bp, Glycine max
agcttcatgatgattattcaagttgattcaagtagttttgatgataacaaagatgatgataataagcccaagagaatgatttcaagattgagtcaacaagtttcaagaatcaagagaagtttgatttcaagattcaagacaagacgaatttatgattcaagagacgaaatcaagaagacttcacaagggaagtattgaaaagattttttcaaataatcatcgtagcacagttttgtttttcagaagagtttttctcaaaattttctaagttaccagagtttttactctctggaaatcgattaccagtttcctgtaatcgattaccaatggcgaagtttgatttcaaaagttttcaactgaatttgcaacgttccaattgat

SEQ ID NO: 291182 - DNA, 469 bp, Glycine max
  unsure (1)..(469): unsure at all n locations
ttgacacctgttattacgtgacactatctagtactcatgctagtgatattngttaatgtttcttactaattgtggttatttgattnttttattaatttcttttatagtaaactcacccctcgcaatttttgtaccgtgtggttagtacctgtgatgatcacgaacctttgttcgtaggagcagaatgacaacagtagagtaggagaagtgagattcttttgtggagctgtcgagccaacatgatgacgttgggattattttggtagagagttgtattttgttaatcaactcctctgtagttggttacataattcttttttttgaattgaggatgtaaatcacagatttaggtatatgtatgaacaaatttactttccattatgtgaatgatgtgtactgagttactatatatgtgtgtgtgtgtgtgtgtgtgtgtgtgtgtgtgtgtgtgtgtgtgtgtgtgcgtgta

SEQ ID NO: 291183 - DNA, 371 bp, Glycine max
tgtttttaacattgtttcacttacaagtgatcatggaggtgaatttcaaaatgagtcttttgaaaagttttgtgaagaaaatggaattcaccataatttttcagccccaagaacacctcagcagaatggtgttgtggagaggaaaaatagatcccatgaagaaggaactataacttttacaattgaaacaaagttacctaagtacttttgggctgatgctatacatactatttgctacactttgaacatagtaattataagacctacactaaatcttatgaactttataaaggaagaaaacaaaatatatctcacttgagggtttttggttgcaaatgttttattttaaacaatggtaaagattctcctag

SEQ ID NO: 291184 - DNA, 417 bp, Glycine max
tttcttccacaatcaatttgtctactgactaacagttctaattgcaagttctcattcttgttttttctttgtctaacatacacacttgctcaaactcatgaaaagaaacacaaactccatcacaatcatgcattcaattcaaaacgaagtcatacaccaattttcaaagattggacctcttgctagttgttattattgaataacttaaactcttgtgcttgagtgaaatagtagccgtgagactgtggtttaagatactttccttgatatctatcttatgtctaactccatctaattattcagattacattttatttttctctttggatactgcataccttgtgaaaaacaagcgatgagggcatttaatccattctcttatcatgcaatcagtaacttttgtagcatacacctttg

SEQ ID NO: 291185 - DNA, 285 bp, Glycine max
agcttctagccaaatggacttaccttgaattaattcctttgatagcccttttgagccttgtttccctttccttgttttgaagctcactacaagccttaagtgaaaaaccatgatattaccatatccttaaggaattttggagctttggaattgttttgggaataagtgtgaggggtttttgtttcattggacaacttgttttgttgactatgcttcatgatgtattttgggccatacttgatgtacattgtatattggataaatgttggacatgctgaatgaaat

SEQ ID NO: 291186 - DNA, 422 bp, Glycine max
  unsure (1)..(422): unsure at all n locations
tgaaaggtagtcatacctcacaaaatatatatgtatgtgtgtttaggtagcaagataccttggatatgcatgtatatagcaaaaatacctcacaaaaatatacatgtttaggtagcaaaatacctaaaaaaaaacaaaaacaaacaagaaaaaaaatatatctttcggctgaaaagccaacacatttttgaaaagaaataacttctagcttttctttaaaaaaagattcaccgatcaaaacaaagggtttttttttgaaaaaaatgtgtatacacctgaagggtgaatgctgtgaaaattttcccgaacacccaaaatggactcgaatgaatgcatgaattgataaaagaacatgttttggaaacactgngttaacttaatcgggaaaattaatcttgagccctagtgtcatgtgaccataa

SEQ ID NO: 291187 - DNA, 311 bp, Glycine max
tggcagctttttccatcgtcgctatagattggtgcttgtaatggcgaaacgtatgtaccattatttcttaccttttttatttggaccagtgttacttgttttttgagcatgacagttatgcacagctatgaaataatcataacatacgggctcacgtgcaaagctaactagaactttctgcactgttgaatgaaagcgattaactatccaagtcccacacatagaaggaaggaggtcgctagattaatgttccattactcccactgagaagcaaacacgcacttcattgcactatatgctccgctgatatt

SEQ ID NO: 291188 - DNA, 195 bp, Glycine max
  unsure (1)..(195): unsure at all n locations
tgttcccttttgggctntggagtttgctttatcccattaataacagtatgtttctatctgatatcatctataattattctttttggcagttttttccattgttgttaaagttggttgcttggaatggtgaaaggtatgtaccattttttcttcccttttttatttggtccagtttttttttttttttgggggggg

SEQ ID NO: 291189 - DNA, 373 bp, Glycine max
ttacatgttatggaatcagaccagagagcttaaagtaggcgctacataaaccagcataaaccaccaatcgggttagttcaatttactacatggaaggaaacacaagggaagtggtgaatggtgatagcatgatcctataaaactcccactgaagaaacccgctatggaatctagattagataatctataggccagagttcacgatcaagactatgaacaatgaatagccgagtataggaaactttgaaacgagaatagccagtaacatagagggagagacctaaacaaaataattctgacaaaaacattcaagcaaaacacaaccccaaaaatgtatagtgagatgttcacctatgggagaatcgtgatacag

SEQ ID NO: 291190 - DNA, 344 bp, Glycine max
gtgattatgttcacaccttgtcgaaaagcgagggactgttgacttatatcaaacctattgcatgtgtcagaaatatacccaataagaatgtagaatgcttattgcctattaatacacaggtacagcgtaaacaatcattaccgaggagtctgcttatttcacatggatgaccgaaggcacaacatctgagttagatgcaagaataagatgcataatgaaacatcttgttatatacaaaccattacgagactatcaaatgacaacgcatatttactttaaatccttacggcatacaatatgcccagctatggatttacaaatcgagcttacacaaaccttggcag

SEQ ID NO: 291191 - DNA, 380 bp, Glycine max
tgcttctttaaataaatttttacctaaaaaaaattattaagttaaaattaactcatatatgaactaattcatatgaatttgatcgagagaataaaaaaaataattaaattaaaacaaaatgtataagatatgaaaccttcctgagatctatattatttttctctactttttacctttcactctttgccaaagttcaaacacaagctaaaatatgagagcttttttataaattaacttgtgcatatgttaattttatctttaaaaaaacttgttttaatttattttcttatcttaaaagttttatttttttgaataaacttacccaaacacattctagtgttctagcagtgcaatgttaaaatgttaaaaaaacaacattt

SEQ ID NO: 291192 - DNA, 415 bp, Glycine max
  unsure (1)..(415): unsure at all n locations
ngatctcttanatatgcgacaatttttataaaatcatgtacaactttagatgtaacccttactaaggaatttagttggggtactgtttcatttcataaaagaatactatcacattattgttttgcaattgcaaattaaagaataattttacttgttgagtaacatcggtttacaatttgttttactcaattatatatataacttttgacaaacctaaattttcataatacaggatgtcttttgttctcattttcaaactacaatataacttgtttctccctctttacgtatccttgttcgctaacttttctacccttataaaccgatactgtctccatgtgcacatacgacaaatagagagctagtgaatgcctttattcagaatcatagaattcaacgaacattacatgttttt

SEQ ID NO: 291193 - DNA, 368 bp, Glycine max
tcaagcttgaagattttgtcagaaatctagtactctcatgccacaatggttttcttttagaccacaaataccttcttacagaatatattttatttgaacttgataggattactttaaatgatgcaactgtctttttaattatttaacatagttgaatatcttgaattcaaattcaaaacatctaattaaaccgaaataatttcatgtgaattgatcgagacttggtggtgtcacaatgagtttatacccatttaagttgacaagtttggaagttgaattagccagaactcttgcaaagtcaaatcgtactatgtttctttctctcttgtttttctgtaatcccagtgaatatacgatgaatttgtgta

SEQ ID NO: 291194 - DNA, 387 bp, Glycine max
  unsure (1)..(387): unsure at all n locations
tgttntacttaaatggagcataactccattgggtgttagaaaccaatacaacaacaaagccttatcccactacgtgaggtcagctatatggatcatacaatgccatttggcatggctaaaaaccaaagtcttagtaatattttttagcatgagatcttctctgacaacttcctctaacgtcttgttagaaaccaattttaaaattgaagtaaacaataaaagcaactagaatcatttttgggggcacaaggtaattgcttccttttatgttttcaaaggtaagaaaatcaacttcttaactcttttaagtttccaaagattctcattagaaaaaaaaccgattccaaacttggagtttttgttaccgctgtttgcccctataatcat

SEQ ID NO: 291195 - DNA, 363 bp, Glycine max
  unsure (1)..(363): unsure at all n locations
agtcttatgatgaatcaagattgattcaaggagttttgatgataacaaagatgatgacaaaaagctgaaaagtcaagctcacttcatggtaacaaagatgatgacattcaagaatgagttcaagattgagtcaagaacacttcaaggatcaagagcaaatttgatttcaagaatcaagattcaagattcaaagattcaagaataatcaagatcaagattcaagactcaaagattcaagaatcaagagaagacttaatcaagataagtgttaaaaagtttttcaaaatattgagtagcacaagaagttttttacaaaatcattaccaaaaagttntactctctggtaatcgattaccagattat

SEQ ID NO: 291196 - DNA, 403 bp, Glycine max
tgtaaaattaattcagtttggtcaaaattatttattttaggaaaatttatttttaccaaaatgtgtaggctcttattattctttttattacaaatcatagggatgcaatcttggttttgtaaagccatatgtccactcgtatgttctttagttaattttggaattatgcttttttcaaaattttcgtaaagaaaatctacagttttttctatttggttcaatctgatttccaaagtggaaatcctattgtttataattttatttccataatcattttctttcttaaagtctggaaattctattttcaaaatagtttgtacacaagtcttgcaaaaattcttgtaccataaactacagtgagctcttaatgttttgtggagatatcttttacagaaataacatt

SEQ ID NO: 291197 - DNA, 377 bp, Glycine max
agcttacggattacgaatcctaagtctcttatggattatgaatccgtttattggtaggggtaattttggaaaaaataaaaaagtgttgagtatataagaaaaacgttgggtgccaaagaaattcccaatccctcatgtcctgcaattctctcatttctgggtagaaaaacatggaacaactttaaggataaggaaatcaagcaatccatttgacataaatcatctttctctatttttttttatagtatagttgttgtatgttggttcattaacaaccattagttagttctcttactctttaccaacttagtatttttctgttttttgttattctgttataacatgtaacagttaattagttttaagttggttgggtt

SEQ ID NO: 291198 - DNA, 430 bp, Glycine max
  unsure (1)..(430): unsure at all n locations
tgtacgactatggggtacccatcacatgtggtactaggtggcgatcgggcgatggtgcacagcaagttttccacatccacaaatcacgtataaacccatcatcccttgttgcccacctccaactgagctcacgtactcccacgtagcccatatcctctttcctctcaacgccgggtccccatcaatcctcccaagcttccccaacatccaggtaattcaacatcccatcatcacaaactaacaaaccaagcaaaacaggcaaaggcagaaaactctgcccagaacacaaaccaaaaatcacagctttttcacatacaaatactccagtaacattttcttcgttccaattcgttaaccgtcggatcgactcgaaaattttaatggaagtctctagtacataagtctacattntgaccgttgggatctacta

SEQ ID NO: 291199 - DNA, 275 bp, Glycine max
agcttgtttagaaagtgaattaggccggaagtgatggaatagtcatggaggacctctggttgttgatggagtgcgccatgtaatacgtggaaagctggggataaggactgtgaatggtatatatcacccatacaatctgaatagagaactcagagaataaagcattggccttcggaggtagacccgataatgatcatctgctgctgcatagtcggagccaccactgtatagtaaggacttaaccatgatactgctgtagctacagagtctggatt

SEQ ID NO: 291200 - DNA, 437 bp, Glycine max
actcaagcttaaaggaccactcaaaccaggtgtatttacccccaatgtctagactctgaagagtctgttagggtctctccctcctgattcaggtccaacccaaaaaacattttagcacacacactctatctatgaagtgtacaaaacacacgactcctcaattattctcaaaataattttttctcgttgcgcttgtgattaaactcctcgggtccccacagtggttcccatcacaatactcttcgcatattaacttgtcgcccttaaagggtcttatagtcgtgtgattatacgtttcatagctcacaactcaatgcacacaacatctcaatgcacatatatattacaagtcaatacatactcaatttatcacatacactcagtctcaatcacaatggtataattccaaagtagcatgttatcacacctcatgaatc

SEQ ID NO: 291201 - DNA, 545 bp, Glycine max
  unsure (1)..(545): unsure at all n locations
ccaccgcactcctcatcacccattcgtgtaagagaaatatccaatgctaacacgacaagttgactanaananacaaagaaaggagananctgatgcctcgtgaatccctcgcaaanncaacgcggaacccggcgatgctctagagtagacctgacagcatgcaagcttacatattgttttctgacgagaggccagcgactccaagggactgaagatagccaacaagaagaaaagaagcagagaagcgaggcacacatcgtgggcaccaaaaaggtgacaatgagcatagagagcacgattgaacctataacaccgaatggataaagagcgaacgtgatactaacaaccagtaaccgagagataaagatcacaaaacgataagaaaaaacatcctaggatcatacaggcgacattcataagcccagataaagtagagaaccgcaataatgccgaccacaaagattacgccacgagaatgtcgctgcatgataatcaaacatgaagtaacttctgttgaacctcacaaactgaggatatacacggag

SEQ ID NO: 291202 - DNA, 536 bp, Glycine max
  unsure (1)..(536): unsure at all n locations
cgccgccgctacccccacccntaaaaagatanatatcgctgtgtgattaattagccaacacccccccgcgccgggcacttgaacctgtagacctcacactgaacctccaatccagtaccggacgaaacgcgacatggaagtttatggacctgaccacatatagtactataagaacactggaatgtaacaacacgtgcaagcccctatcaatcgctattcaccaatgcaaagcacagcatacaggtcatgtaaagccaaaagaacacacttacgtgcattagcgaaccttggaaatgcgccccaaaaagcagtgcgcgcaaacaaagtacagagtcatccatcaggggcacaccgtataccaaacagaaacaacacctgattcacagaaaaattccaacacatcactatcccatcacaatatggacaactcaagacaacgatgggacggcaccggcactagaaatcaaacgagagagacacacctccgagagaacatcaacaggttggggcgagatcccagacagacaaacccaccn

SEQ ID NO: 291203 - DNA, 382 bp, Glycine max
agcttgcattgtgttggagtgtacatccaccttttaagtatttgatgaagagaaatattttcaaatagaaacaaacttatacaaataattgattcccagatttctaaagatgtagaaaaaagtattaaaaaaaacaaaaaacattgtttagattttttaacgtgtacattattttatatatcatttgtttaaaaaattttatacttgtattatttgggtcatttttttgtattaaataggtaaaaaattctactcatgtaaaacacaaacttttgtaagttttgttatttgaaataaaaaaatttattgggtcccatatctcatttaatgtttgtctcttgatattgtagttttaaaaaaaaatcatcggtttttggataat

SEQ ID NO: 291204 - DNA, 429 bp, Glycine max
  unsure (1)..(429): unsure at all n locations
tatgaatgatatgagtcgaactcatttgctatattcaatttctatttataattattatccatactttatttatttatttattttataaaaaaacatttaatgtgaatttaattgattaaaacacatcacttaataaatcattaaaatttataccttaatttatatttttgtattaaattaaataatataataatgaaggaaaaatccctcgagaaaaacataatttgtagaaatgaaccactcctctcacattaaagttctaccaacacatgtatggggcgtgtacagatattgtttttatcaggcgtatgagaatggttctatagtacccttttgagatcctatccattgttatccatattgatgatccatttttgtgttcaagagctactcatattttttatactagtaataggtataattntattt

SEQ ID NO: 291205 - DNA, 384 bp, Glycine max
  unsure (1)..(384): unsure at all n locations
agctttgagccaaaatcctgactcaccataaaccttgacccagggtgagaatgccaatccttaccctcggaagcaaaaaagagaaggaaaatttccaatgaaagcaaaaaagaaaagaaggaaaattccccgatcaaagagtgggagaaagcaaaaagaaaagaaaggaaattcccaatcaaagaatgggagaaagtaaaaaagggaaggaaagaaagttcttgaaggaaaaaacagaaggaatatgcagagaggtctttggaccagacaatatctgaacaatacagaattgtcaccaaatgaacgaaaaaagaaggaaagggaaccacgacctanaatagtcttctccctttgattaccaaccaaaatcccgtgcgctagcga

SEQ ID NO: 291206 - DNA, 424 bp, Glycine max
ttgaatgctctattcaatggagttgacaagaatatcttcagactgatcaacacatgcacagtggccaaggatgcatgggagatcctgaaaaccactcatgaaggaacctccaaagtgaagatgtccagattgcaactattggccacaaaattcgaaaatttgaagatgaaggaggaagagtgtattcatgacttccacatgaacattcttgaaattgccaatgcttgcactgccttgggagaaagaatgacagatgaaaagctggtgagaaagatcctcagatctttgcctaagagatttgacatgaaagtcactgcaatagaggaggcccaagacatttgcaacatgagagtagatgaactcattggttcccttcaaacctttgagctaggactctcggataggactgaaaagaagagcaaga

SEQ ID NO: 291207 - DNA, 372 bp, Glycine max
ttgcttctacttatgtggcagggcgggcttccttcaccttcttgtctccaacgcgagctttgaccactgttcttccttcccgcgatgcttcttttcatgtccgcctgagtgggcttatagcctaaaccatacttcccacgatttccttgggtatttatcaggctagttatgccgccgttgtctttgcctaaacccatcccgggttcataaccgttccccaacataactcgggccatcattactgctgcatcggacagacaaggttgcccagagagggagtccacggaggaaatgctgaccacctcaaaagactggatagcggtttctaacgatttttctgcggcttccacataaggcatagaggatgggcag

SEQ ID NO: 291208 - DNA, 405 bp, Glycine max
  unsure (1)..(405): unsure at all n locations
ccgcttgctctaaatntacattgatgtttgtatttattggtataggttgtatgccattgttgttttaagagtagcatcccttggtaaaactaactttccaaatgtttgacttcgcaggaaatggccccgagcaagcttgcctcaaagaggtccaggaaggataaggcggctgaagggactagtttcgctcctgagtatgacagtcaccgctttaggagtgctgtacactagcagcgcttcgaggccatcaagggatggtcatttctccgggagcgacgcgtccagctcaaggacgacgagtataccgatttccaagaggaaatatggtgccggcggtggacatcactggttactcccatggccaagttcgatccagaaatagtccttgagttctatgccaatgct

SEQ ID NO: 291209 - DNA, 372 bp, Glycine max
agttttaaaatttgaattaaaatgttctgtaactattggtaatcaattaccatccatgtgtaatcgattacacattgtaagatttgaattcaaatttctaatgactgttgtaattattttcagctgcttgtaattgactacaatcctcatgtaatagattacatgccttcaaaaatattcaaaatcatttttaaaagcgttttaggaagtgttttggccactggtaatcgattacatcctctggtaatcgattactagagagtaaatctcttgtaaaaatattttagcttaaattcattggccaaacctcttgtcgtttcaacttggaattcccttcctaaatcactagagattttcttgatgatgtatctt

SEQ ID NO: 291210 - DNA, 390 bp, Glycine max
tctagccaaatggacttaccttgaatttattccttttatagcccttttgagccttgtttccctttccttgttttgaagcttactacaagccttaagtgaaaaaccatgatattaccatatccttaaggaattttggagctttggaattgttttgggaataagtgtggggggtttttgtttcattggacaacttgttttgttggctatgcttcatgatgtattttgggccatacttgatgtacattgtatattggttaaatgttggacatgctgaatgaaatgttgtttctcaaaggctaaaaaaaaaaaaaaaaaaaaaaaattcgaaaaaaattcggaaagaaaaaaaaaaaaaaaagaaaagctataaagttgagtgaataagatctt

SEQ ID NO: 291211 - DNA, 371 bp, Glycine max
ttgcttctttatttatttatatatatatataataaatagaaaatattttgagccttgtgaagaaaaagatcattgtaaacaggtgtagcatttgttgctagagaaatgattatttggactcaccaggttcactatagcagacttggctttaactttttcagacagcttcaaattaattccatttttcattatcaaattgatatgaagcacatgatcaaatctttcacagcttttattatagtacagagattatcttcacatgaatggatgttctttttaatataaccaatgatttttattagatatatgtttcatagttttaattaaaaaaatcaacatgtcattatttattagaagaatctgatgacaaa

SEQ ID NO: 291212 - DNA, 408 bp, Glycine max
tggtacttctactgaagctgagtttctaccctccttctgtcctgacatagaatctctagtgcagctgaaggatgctatagggttcttgatccttcagattcagtctttgtttcttgtttgttctttttcttggatttatctctcattaaaaaaatatcaatgaaaaatatgatggattaactggttttcctttttctggtatcggagaaaagataatgattttcattggtctcattattcagtatttggatttgtacattttttattggttattatctattcattcattatattagtaaattttagttgtttttaaataacaatatttgatgccaaaataaaataaaatgattagaactcaaggtattaattaataactattatttcatttatcatttataattattt

SEQ ID NO: 291213 - DNA, 353 bp, Glycine max
tgcttatactttttattaaaataccactaatcaaattttagatgaagttgaacaacatcctgtggtaccttacagattcattatgttaattagcatatctttaaataagtgggctaatgtaaaattattcacaattatctatttgaagatgatgatacgtatatattttaaggataaaaagagaataaaatattctaagctaacaattaatattgcaacaaatactactttatgtatcattccaaaacatatgagtgattaccatactatattatttattgaattctgaaataaacttttagatagtggaacatagttaaatgctagctaaaatgactcctcagatgtagcta

SEQ ID NO: 291214 - DNA, 420 bp, Glycine max
  unsure (1)..(420): unsure at all n locations
ngtatgtgttagtttaggatgggctctgtcaaagattatgtctatttcttgctttcaccataggtggcaagaagggttattatgtgtctaggcctgtgactcaatcctacatgaaggttcataacaatgacctattatcattttgtttggtgctggtgtagactattctccaaaaaatataattatgaactctacaatagaggccacgtaactgaaggcagctaattttcatagcctgaacaagatttggttntaattgacactatttgagtcccattcttaaatatatgatatgtgggtccaatgataagcaagactacctgtcactttatcagtaaatctggaggtatctcatacactagtctttattctacttcagactaactgctgattttattcctgactaatatgtatttcatg

SEQ ID NO: 291215 - DNA, 370 bp, Glycine max
ttgcttggtttgaggtacttacccgttgaacactgaagaaaaccaagaacgaacgatgaatcttgaagaacggtcgagaatcttcgcgaaattactcacggaaacgttacggaagcgcctcggctaggattttcttcatggaaataatcttcctcagcaaatgcgatagagggagaagtgcctaaggggctgaacccttttcttcttcacttcttcccctatatatagcaaaatatgggagaagctagcctgccagctcgcccaggcgagcaaggttgcttcctccagaacgaacggcccaagtgggcctggttgctatttacacccccatttatactaaatgcaccccctctctatctttttgtaattc

SEQ ID NO: 291216 - DNA, 408 bp, Glycine max
tgaagttatgtggattctttgctttttcatattctgtttattttatattgaatatccgttatgcaaaattcaggctaaacccctgctatcattcgttatgttgaattgaatcattgttaaatttctcttgttctagctgaggttacgaaatccttgaatatccctagaggtgtaagccacgtgcttttcagaactttaaacactgataggtgagttgtgtaagttacatgaatcatgattgctgtcggaagattttcttcctgtctttctaccataaaataaatgaagttattaaagtttcttcagtgattctctgacgcagcttcattggtcttgcagatacatgaaatgtgtattgtacaatattatcttgagaaccatatctatgaatcgaatgctagataagat

SEQ ID NO: 291217 - DNA, 310 bp, Glycine max
ctgcttgctagctttaggagaaaccattctatctaccgttgtcctagactaaaatcaattggtgaagcttccgcgcgcattccccttgataaacctttatgtcatgccttttattgctagcgctaatgctactcgactaattacggaactgaaaaaaactatattcttaatggctggcgaccgtgacaacgatagggaattactattcatgattggtagatgacttattgccattccagatcctccccaacccttagatcatacttacgcaatggtaacacgatgtgcctccgagataattgctgctata

SEQ ID NO: 291218 - DNA, 255 bp, Glycine max
tgcctgcggtacatacggtgtctaaacaccgcctttagcgctaaccatgaccgaatgttgacgcatactctgcgtacgataaactccatattccggtggcatatgctaacttgcggccgtatcgtacttaattaagccacggctgccacagtttctcaacctctatcttttcaaggatactactcgagcgcgacatgtgcatataatggatgaggtccgagacatgtgcttgattacttgctaacctcgcaatcg

SEQ ID NO: 291219 - DNA, 369 bp, Glycine max
agtttcaagaaaaggccaaactcctctcaaaaatatgaattcaggcttaaataggtggctttgttagtgctcatgtgcttagcgcaattctgaaccacttagggcgcattagtgaatttcggcttagcgcggcttttctcgctcagcggatggaccgaagtggtgtgcttagcggtatggcccttcgctcagtgaacaagcacaactcatccttcttctagattcttccttgcgcttagccgaggaatgttgcgctcaacagatagctggctaagctagcagattggcttagcgagagggtgaaaatcatcacttcaaaagttgcctaattattctgaaattgagagaaaatgattattaaatacacaa

SEQ ID NO: 291220 - DNA, 400 bp, Glycine max
  unsure (1)..(400): unsure at all n locations
tctcccccaattntctatatttaaggggagaagtgatttgaaaaagggttcagccccttaggcacttctctctctttcgaatttgcttggaaaaattgtttccgtgaagaaaatctaagccgaggcgcttccgaaacgtttccgtaatgtttccgtaaggaatttcgcaaaggtttcgaccgttcttcgacgctcttcattcgttcttcatcgttcttcgatcttcaatgggtaagtacctcgaaccaagcttttcgattcattctatgtacccgtggtggtctacattgagtttcgtgtatttctattctcattttctttactttgtatacccccttttgacgtgcttaagccattttatttaagtcatttctcgcttaaactaaagataacataaatt

SEQ ID NO: 291221 - DNA, 377 bp, Glycine max
agcttgttattattgtttggattaacttctctatcaacctttataggagaataaaattaaaaagtaaactaaccgaacttttttcacaaattaaaattaacgtatgcactttttttcaaacgcttatttaacttctctaaaaactgaagtgtataagttgattttcacaaggactcaagaccgcggggttgtattgagtcttcaatttattttttttaaatgcaacatttcaatcaaaaaaccgcagaagcatataattcaaatataagcaaaagtaagacaataagagttagagaagaatgcatctagattatacttagtttgattaacctaacttatgcagtcctttaagtcttgtctgaaatcttttaaccgac

SEQ ID NO: 291222 - DNA, 427 bp, Glycine max
tgtcagcagctgagttgcattccctcaaaacatggttagttagtgctagctataaggatgagagattaagaatgaccgaagtttgacacatccttgctcacaaaattatactcaataaattgtcaaaactaaaaattggaggaaagaaaaatctaaaacacaacttaaacattctcaatctagtatacaatggaatttcagtttgtgtgtgggacatctcaatgataaagatgttgtatgatcaatggttatcattatatgcttaaagtgcatttcctcattataagtagaacgactgaacttttgatttaaatggagtatcataaccaattcttctaagtctattgattctatatcacgaattctatattttcaagaagaaacaacagtgaaaattctgccttaaaagatgtttacgtttgaatca

SEQ ID NO: 291223 - DNA, 372 bp, Glycine max
agcttattcaggatatgggatgtcactctgcaaatgtttgggaatggaagcttgaatggagaagacacctttttgacaatgaggtgcaagcggcaaccagtttcttggatgatatctcgcggggtcatattgatcgttggacatcagactgctaggtttggaaaccaaaacctgatggccaattttctacaaggagcgcatactatatgctactagaagaagcagcagatcagactgtggatgaggctttagaggacctatggcagctcaaaatccctttaaaaccaacaacatttgcttggcgattgatcaaagatagaatcccaactaaagggaatttgcggagaagacaactggagaaaggctatgctt

SEQ ID NO: 291224 - DNA, 425 bp, Glycine max
tatttgtacgacaccttgtacgcaaattgactgttaattctctcttgattcaatgaaatttttatggatggatcttctctgatcatgcctgtgaatagaataacataatttaaatgacaattaatgctaaacaataacataatatgaacataaaatacgtacctactacacaagtgacaattaaatatgaatcaagtatctcgtgatcttgggtcatggtcatattgagacatgtgtgtggtccaccccattgagtgactttccatgaataagtttttttagatagaattgccctcatgtacaaagggcaaggacaatctgcatatttattcacgcaacaaaccacatacttgtctcatttgctttcaaccactttgaaactttgatgcaccttcataacatattgtttgaccgcattcttgacc

SEQ ID NO: 291225 - DNA, 378 bp, Glycine max
agcttcagaaatttttagatagtagatcttccaaaatcaataggcgtgttgcacaacttagaaacattggatctaagagaatctcgtgtgcttatgatgccaagagagttctacaagcttaaaaagttaagacaccttttagggtttcggcttccaatagagggtagcattggagatctaacgtccctagaaacactgtgtgaagtgaaagcaaaccatgatacagaataagtaatgaaagggttggagagacttacacaattaagggtgttgggcttgacccttgttccgccacatcacaaaagttctctgtgctccttgataaacaagatgcaacgcctggacaagttatacattactactccaaggtcattactt

SEQ ID NO: 291226 - DNA, 424 bp, Glycine max
tagccaaacattaatttaaaattcttacaagtattgcttaaattatctacgaattatggattgaaatcttgtaaattaatgaatccacttttaccaaaatttattgcttcttttcttactctaaatgtttgcataaacttttataatatttacataacctttaggtgatatattcaattattcattataatttttttatctagaggatttataacaacaactcatgtacctttatttaactaattgaactaaatttcttgacatccattaacattttttataatataaaactaatagcagtaaaaatatattatcaactattcagtaacaattataaactgccttttgtttccctaatttttgtttgtttttaaaaaaatcttataaaagcacaaatagactcagattatgttaccaaaatgat

SEQ ID NO: 291227 - DNA, 379 bp, Glycine max
agctttgaagcctaagagacttgaagaaatgaagaacaaaattgggatgcacaaattgatagatttgaattaaggtggtgtgttaaaagtagtataattcaaatgtaattgtccaattttgttagtctgtgaaatgcattagaggttagctataatagttaggttgttaactaacgatggttaagtcttatttagtgtataaaaatagcatgtgatttttttgacgcttaattcatgttttccagaagttactattttctgttattcactatctttctcccttgttcaatcttttccaaaatactaccaagaaatcttgatcatttccaacaattatgtgattgtaattggtatcaaaatagctagtgtagaaaataaa

SEQ ID NO: 291228 - DNA, 427 bp, Glycine max
  unsure (1)..(427): unsure at all n locations
tattgctattcagaagatctagttntcatggcttaatttgattatgttaagttctatatatagatcagcaaactgaataaacattcggggaaattaatccttctaattattggcttgttttaagcgtgtcaaattaatctccaaaataacatggataatatcattttcaacaaagacaaattgattacttctacactttattttattttttaccagctatatacttcacatgttaatcatgttttttgatagtgacggaccaatcaaaagatgaatggatttatgggagacgaatttaatattcaaacgattcatcgtatggcagatcaaacacgaaaaacacagtactatcttttggttctccgccacagcttgcttgaataattaatacatatacagtaacctcttatgttgccttgtatttaaa

SEQ ID NO: 291229 - DNA, 336 bp, Glycine max
agctttataattcaatttcgatcgtctagatatattactggactcaattcgacatctgatgaaaaaagttcttgtcgctagaatttgctgacagctccaacattcactctttagcgtattgatgtattacacgacttaaccatacatcctaggtaaaagctatcgctgatcgaacatggtgacagcttcaacattcaatttccagcgtttagatattttacgggactcaatcatacatacgaggtaaaagttattgtcgattgaacctgctgagagcttcatcattcaattacgagcgttcggatattatacggcacttactttgacctccgagta

SEQ ID NO: 291230 - DNA, 373 bp, Glycine max
tggggttcccatcacatgtgggactatgtggcgatctttcgatggtgcacaacaagtgtttccgcatccacaatgcgcgcataaacccaccatgccctgttgaccacctccaactgagcacacatactcccacgtagcccatatcctcgtttctctcaacaccggggcccgtaatatatcgagacgctcgaaactgaattatgaagctctgagctaattcaaacgacaataactttccgctcggatgacagattgagtcccggaaactatagagaccaccgaggatgagctgagcacctcataagacatgcaaacgaccattaccttttactctgatgtctgcacgaatgcagtggtagatggggacgctcgc

SEQ ID NO: 291231 - DNA, 342 bp, Glycine max
ttgcttcgggagaaacgctgtacaaagacgtcagtctactttttagcttctccacttctccgacattggtaggattgtgcatttgcagtatcatcgtacactcgtcaatgatggctttaatccccttgtgggtgatcatgaaccccacgaattttccactttcaaccccagacgtgtactcttcaggattgaggcacatgtcatacttgtgaatctctacgcacacttcctcccaatctattaagcgttgggctacactatgagactggacgaccatgtcatccacatagaatttgacatgttggcctatatgctgtttaacgacccggtccatgatccttt

SEQ ID NO: 291232 - DNA, 415 bp, Glycine max
tcccgtgtccgcacttggaaagatcttattaccgcctttctaaggcagtatcagtacaattctgatatggctcctgaccgtactcaactgaagaatatgtttaagagagagggtgagacctttaaagaatatgcgcagcgatggagggatttggcggcacaagtagctcctcccatggttgagagagagatgatcaccatgatggtagacactctgccagagttctactatgagaagctagtgggttacatgccgaccagcttcgcggatctggtgtttgccggggaaagaatcgaggttggattgaagagaggaaagtttgattacgtttcctccacaaacgtgaacgctcaaagaatcggggcatcaggggcaaaaaggaatgaaggagatgcccatgccgtctcttctacac

SEQ ID NO: 291233 - DNA, 372 bp, Glycine max
tgcttgacttgtcttgttaattggtatacttaaataccaataagcataagatattatttctaaattttaaccttttgaagctctagatgctgacgagcttgacttgttaggttgtttatttatataaacaataagcgtcagaggctccatgtgaatgtgttgggatgaatgatgtgatacattaacatttttggttggaagattttcagtactaagtgacaacttggacttgccactgaaaatgtaatagaataatatgttgcaagtcatggttggtcttaaaatataaaaccagaggggtaaatttaaagcaagttaccttgactgaaaattgcctatccaggtatgcaaatctggtcatttacatgcaat

SEQ ID NO: 291234 - DNA, 402 bp, Glycine max
tgcatgcatgtgaagagaaagccagatggaaagtgtatcattcatgagtttataaaggaacataatcatgaacttgtaccagctctggcatatcattttcggattcatagaaatatgaaattagctgaaaagaataatattgatatcttgcatgctgttagtgaacgaaccagaaagatgtatgttgaaatgtctaggcaatctagcagctgtcaaaacattgggtctttcttgggtgacataaactatcagtttgacagaagccagtatttggctttggatgagggagatgcccaagttatgcttgagtattttaagcatgtacaaaaggagagtcccaacttcttctattctatagatttaaatgaagagcagcgcttaaaatatctattttggattgat

SEQ ID NO: 291235 - DNA, 353 bp, Glycine max
ttgtttctatccaaatagacttaccttgaattaattcctttgatagcccttttgagccttggttccctttccgtgttttgaagctcactacaagccttaagtgaaaaaccatgatatcaccatatccttaaggaattatggagcttcggaattgtttagggaataagcatggggggtttatgtttcattggacaacttgatatgttggctatgcttcatgacgcattatgggccatactcgatgtacactgtatattggttaaatctaggacatgctgaatgaaatgttgtttctcaaacgccatagagttctatgacataattatccgaaatgagatagtcgatcatagaaa

SEQ ID NO: 291236 - DNA, 382 bp, Glycine max
tcacaaataactttctaaggcagtgttcagtgcccttactgttagcctctcgtaaagcactaataaattcttgatcacttcctagaaatccttttgcaaagcatgctttcctaaatgtatcatacaccacattatcaactgttctaatgtctttgtaagactgtggacctttagcagaggaaagcattattctgaagtaaaacaattcgccacttgaaggtgggacccatatgaacatgcctattgcatttccttgctttcttggatgccagcatcttttgcatagcaacataaacaaattatgacacatattgaggataagacacatcccgtccataacggtatattttgttataatgcatccaggctgtgaacattgatt

SEQ ID NO: 291237 - DNA, 546 bp, Glycine max
  unsure (1)..(546): unsure at all n locations
cccgccacacccgcgagtgaacacgaatcagaggaggtgagtggcaacagaccaacggctcatgcgtgttgnataaannaannaaganagagtgtatgttgatgacgtcgtagaaccaacgcgagnganaacgagcaacgcgcgggaggcaccaagacagacggccggcaggcaagcttggtagcacaaaagaacggacgaaagggagaccaaagagagagaagcacgagagagaagcaacagcgaaacgtgacgaggcgaaagaagagaaacgcagagggagcgcacaccagaaaccgcaaagcaaagaggcatcacaacagccgggcgagacagcgaaggcaagtgctgcaacacagcgagaggcagcacgcgacgggcctcgacgccgaagcgcaagccctacagaaggagactgagaccgcataggaacgcaagacccacaccgaggacaggactaaaacaaagaccaccaagagaacacgaccatagaccacgacaagggggaggaaaccggaacagcagagcgcagagagaaaagaaacg

SEQ ID NO: 291238 - DNA, 333 bp, Glycine max
cagctgcttcattttctggacgtttagtagaaacacgaattgagcatatatatccatatcgaaaaagaaacggtgtaagcttatgcagaacgattctacaactatcatgagcgatttctaagcaacgtgactgactcacactacacattggcatcggtgacagatatcattgctagccttggtgccagtttccttcggacatcgataccacccgtggagatgaccacacattctactgagcgccctatgaccagaattatcatgaggacatgactaccattatacacactcatattattagtattatgagcctaagttgactcatggaacgac

SEQ ID NO: 291239 - DNA, 381 bp, Glycine max
cgtcttgcatagccgctcttggtgctcataagctccttttaacaaatcccccttttgtactcctatggagaattccctaggaccagaatgtacaaccttgaaactggagatagctcccctctatcttttctgcactaaacataatcaaatgctgtcaaaacatggatgaagggctgagaaaatctacatcacagaagacatggatgagatcacacttaaaaagcacaacgccctatctttcagagaccctcggctgatgagtcctgtgtccttatgtaggggggtagcgtataacacacgtatacttttgccttccaaaaaaaacttatcactattcctcttttcgttgagacaaccctgcatgttattgtataaaagatc

SEQ ID NO: 291240 - DNA, 205 bp, Glycine max
aaccattgccgaggatcgaccttctgcaaccatacattcccacaatcactgactcgataggatgctcatctatgcacactccactacggatatgcccacagctgaaagagctgccaccgctgaagtataacactatcaccagccggatgaagatgcacaagggtaagcaacaacagagacaagccgctctatcggtcttaaaaga

SEQ ID NO: 291241 - DNA, 58 bp, Glycine max
gacactataaaactccgcatcttacgatgcgactctatcggcatgactatttactcaa

SEQ ID NO: 291242 - DNA, 369 bp, Glycine max
tcagctttgagggtgcgtaacccaccatcttttcatagtagagtatcgataatgtgtctaccatcacgatcatcgtctccctttccatcattgggggtaccacttgggccgccagatccctccaccttttgggcgtgttctttgaaagatccgtccccctttttgcaaatgttctgtagatgcatcctatccagaaccatatcaaaattgtactaatactgcctaacaaaggcaaccattaggtccttccaagaatggactcgggaagattccaagttagtgtaccaggttacagctaccccagtaagactttcttggaaggaatgtatcagcaattcctcatcttttgcgtagtcccccatcttctga

SEQ ID NO: 291243 - DNA, 366 bp, Glycine max
taaggctgttcaattgctcttgattgctgcacagataggcaaaggtctatatagtggtcgtcagaggagcataaaccatagagtcttgcgacaggtgcagatttttgattcatgggcagttgggttaccaggttaaccaaggcgtctggtttaccttcaagcttcttagtttcaaatgatgcagctgagtttgtggctacctcatgcactcctctaatgactatagcatcacttttggtgctaaactattgggagttggatgccatcttctctattaaatttcgagcttcaacaagggtcatgtctccaacggctccaccactggcagcatctatcatactactcttcatgctactgagttcttca

SEQ ID NO: 291244 - DNA, 369 bp, Glycine max
agttttgttctttttataaaatgagaagttctgaactcatcacgttatctaaaaaacccttggggtggatccaagtgctccgatcattcatttgcatattcatgttttggtggcatactcacctttgtttatttctttaggaatttcatcataactaagaaaacaccaaggcacccctataacactcgatccagaaaaatggatgatgaagagggcgtgcaggaacagatgaaggccgatctatcggccttaaaagatcaaatggcttccatctcggaggtcatgttaaaactccagaaaactatagaggataaagccacgacaaccgcctccagtacagttagggaagcggagccggtgctgcaaccc

SEQ ID NO: 291245 - DNA, 417 bp, Glycine max
acttccttgagaagcttctttgagatatctttcttgtgaagctagaggttttctacacacacccctctcataactaagctgacctccttgagaaacttccttaagaatattcctaatgaagctatagcttagttacacatacctctgtaatagctaaactcacctccttgagatgagaagcaagagcttagctatagacaccctataatagctaagctcacccccatgacaaaaaaacatgaaaatacaaaaaaaagtccttactacaaagactacttaaaatgccgcgaaatacaaggctaaaaccctatactactagaatggccaaaatacaaggcccagacgaaggaaaaacctattctaatatttacaaagataagcgggctcatacttagcccatggactcgaaatctaccc

SEQ ID NO: 291246 - DNA, 372 bp, Glycine max
agcttttatctcggaggcccgattcatgcgcataatatatcgagacgctcgaaattgaacaacggaagctatcgagaaattcaaatggtcaatacttcgaactcggaggtcctattaaggcgcataatatatctagacgctcaaaattttacaatggaagctctttggctatacaaatggtcataacttttcactcgaaggtccgattaaggcgcataatatatcgagacgctcaaaattgaacaatggaagctcttgagcaattcaaatggtcataacttgtcactcggaggtccgattcaggtgcataatatatcgggacgctcgaaattgaagaatggaagctcttgagcgattcagatggtcataact

SEQ ID NO: 291247 - DNA, 409 bp, Glycine max
ttgatgtaacattaggagaggttaatgaaacaacgtgatgatgcgcttcatgagaggttggatcaaatggagaatagagaccatatgaattgctcaagagcttccattgttcaatttcgagcgtctagatatataatgcgcctcaatcggacctccgagttaaaagttatgaccatttgaaatgctcaagagcttccattgttcaatttcgagcgtcacgatatattatgcacctgaatcggacctgcgagtgacaacttatgaccatctgaattgctcaagagcttccattgttcaattttgagcgtcacgatatattatgcacctgaatcggacctgcgagtgacaacttatgaccatctgaattgctcaagagcttccattgttcaatttcgagcgtctcgatata

SEQ ID NO: 291248 - DNA, 379 bp, Glycine max
agctttaggctgttcaattgcttcagattgttgcacagaagggcaaaggtctgtgtggtggtcggcagaggagcataaaccatagagtctggcgacaggtgtagatttttgattcatggccagttgggttaccaggtttaccaaggcatctagtttaccttcaagcttcttagtctcagctgatgaagatgaattcttggctacttcatgcactcctctaatgacaatagcatcacttctggcactaaattgttgggagtttgaacccatcttctcaattaaatttctggcttcagcaagggtcatgtctccaagggctccaccactggtagcatctatcatacttctctccatgttactgagtccttcataaaaatat

SEQ ID NO: 291249 - DNA, 425 bp, Glycine max
tctatataagctgaaccattttatcaataaacacaagttgagttttattcagaaaattagagtttatctcttttatcttagtgagagtgattctcctaaattcttgagtgattcaagaacaccctggctgtatcaaaggactttgacaacctttgtgtgttgccctcgctggaaagagtgattctttccttcctttcatcttcacccttgttctttcaaaccacaattccagaaaatccacctctgcccagaattatctcgtggccataactcccattttacgcactcaaattaagtgattcttgagcctaaattgactttaaaaacgagacctttcacctcattttggaatcacctcatttggagccctgtagcttcagttattgccatttctatatttctgtccagccaccacttaacctaca

SEQ ID NO: 291250 - DNA, 379 bp, Glycine max
tgcttgttattaaagaaaagataacaaaagagggcagacatgatgaggtcacactcacacccatatgagccgaatgtattgaaaagaagtccctacataacgagggcagcgcctttaaatctaatacgctcttcaatctttattttttaaatgactggcttgattcaatatatgtgttatatatctttcattgtcaatggttcaagactttaagatgggaaaccctcatatggttgactctaatactcttagacctttcctatgtaaaaaaaaatgaactgcattgggcgtactctatctagaagatagaaatattatggacatctgtcttcttgctagttactaccactgatgaatgtatatatttccaatctactaa

SEQ ID NO: 291251 - DNA, 360 bp, Glycine max
acagtattgggaactatatactagctatttttacgtttgcattctgcttatctcatactaggacaagtcatttaatgcttttaccaaacattttcttaatgcccttttgcactcattagctccaggagaatgaaatacatacttattctggtgttttctgtcacttgaccttgtgggagaacctttgtttacacaggggatggagaatggggaaatctgtataagactgtatgcattgatggatacttagaaggtgtgccatcagcctacacttgctaccttcatgtgtgaatagataattccactagaacttgcactgtctagctgaagcgccttagtgtcttaagcattaacaattga

SEQ ID NO: 291252 - DNA, 381 bp, Glycine max
agcttgtctaattcatttctcttccattttcttccctttcatctcacttttatatttgtaagtctctcatgacaatcagaagctaaaactacccattattgggagctttgcaaaccaaactctctttgatgtaatgattctaaactatatattaatatgatgttgatattgttatttatctttgtgttcattcacatgtcttcgatctgatcatccattttcataaactgttttaggatttaggcattggaaaatatttatatgctagaactggggaagaacatttaggtaatccatctctagggatagagtgacattgtctagcctatgcatgcatctttgctcgtaatgcaaattatttaatataacttttaagggatt

SEQ ID NO: 291253 - DNA, 428 bp, Glycine max
tctagaacttggtacgaaaaactaagttcattgttcttgaaaaatggttttaagtgaggaatagttgacataacactctttcgcaaaaactaagattatcaatttttattagtgcaagtatatgtagacgatatcatttttgatgctactaatgaaatgctttctgaagatttttctaagttgatgtagacgaaatttgaaatgagcatgatgggagagcttaaattctttcatcgattacaaataaaacaaacacccaaaggcttctacattcttcaaaccaagtatgtgaacgaattgctgaagaaattcaacatcgacaatgcaaaagaaatgaaaactctaatgcaccccatgacatacctcggactgaacgagtaatcaacaaaggaaagtttgtctatgtggaagcaatgattcactcacta

SEQ ID NO: 291254 - DNA, 388 bp, Glycine max
gtcagctgcatgcatgcatgtttgtagaacaccaaagatgtaagacgaaattctgaaagaagtgtaaattttgaaacaataagagctaatatacaatcagatacctgaaagtgataatgtatgttgctatgatccctaacaatgtataattagtccctgttagatcacatctatctttacatgatcttgtatatattattacacataaacttatgattctgattgatatgtaattacctaataatcagtagttgattgatatgtaatcaatattgattctgatttctccattataaataaggatgagatgtggtcatctaagacacataattacagtctaactaatacactgctgtatggtatcaaagcttagggtattcttgacaga

SEQ ID NO: 291255 - DNA, 410 bp, Glycine max
tgttaataattttctttgcctcatattttgaaggatgaaacttttctttttcaaatgtgtcatttaacaaatccaatatcatagtcattgccttgttgcttaatccacacaaaacttttatatgatataatttgattataaattcaagttttgtgtacttgcttccttcatacaatgtttgactcccatcgtttagaagctcataaaagccattatgatcttctcttggttcatcatttactatttcatcttcatttaatggttgtgatgcacctacattaaggtcatgttgcctatattgttcaaatgcgtcattgatcatcatttccattgggttttgaggttgaacaccactatctcggaaaacatcttccacttgagaagattctaatgcttgcttttcaccatga

SEQ ID NO: 291256 - DNA, 375 bp, Glycine max
ttgttttgaatagtgttgattttcacttctcgctaagccaatctgctggcttagcgagcgtccgctaagcgcaacactcatgggctaagcgcgaggaagactctagaagaagatgtgctatacaagttcgctaagcgcaccacttcatctcacaaagcgcactgcttcagttcatccgctaagtgagaaaggcacgtgctaagccaaaattcactaatgtgcgctaagtggtccataagttcgctaagcgcacgagcacgaacaaggccacctatttaagcctgaaatcagatttcagaaggggagtttgaactaggattcaaatctttgcatgtctagggtttctagagagagaaaggtccaagttcgagagag

SEQ ID NO: 291257 - DNA, 415 bp, Glycine max
  unsure (1)..(415): unsure at all n locations
tataatgaaattataaacttcaactttattnttgcttataatcgaaacaacataatgtttgtaaaccttaagatatagaacataagtaagactcccactaagctaaggtactatcaagaattaaacccatattatcaatgtgctcatgaaaaactttaagtgtcataccattagtaagtggatcagctagcatcaaatgagttcctatatgttatatacaaatctgtatttttttgaattctttatttaacaacaaaatactttatttcaacaaacttttacttggttgaatccttaataataccactaagatattgttccaataaacacccgatgactacttaatgttggcaacaacaggcaagcctattacaataatttagcaataataaattctagtatgatgtctcatagc

SEQ ID NO: 291258 - DNA, 378 bp, Glycine max
  unsure (1)..(378): unsure at all n locations
ttgcttctcatggcctttntatgactccaaatgaatatttagttatgttatttattggcacacattaatttgaagcctagaacattaaataatgaagcaaatactccaaagcaggcccaaaacaacaacagtacatgtaaatgcaaaagaaagcagtgtttgactgtttatatatactatcaaaacttggatttaattcatgggtccaactatttgacaccctcctttattttcttcataccacttgtattttttaaactcctatactacccatgtccctttgtacctgcaatcccttctatttctctcctaccctctagtctctcccaaattcacacccctaaaccttttgatgctcttcttcttcttcatcccgtg

SEQ ID NO: 291259 - DNA, 415 bp, Glycine max
tcgatctaattcttctctaaaacaacttgggaagctatattacttcttgggaattgaagtcaagtctatggctgatggctctattcttctaactgaaagaaatacataagatatcttctacagaaaactaaaatggcagaggctcaacctatatcttctcccatggtttctggatgtaagctcactaaaacaggagcagatatattctcagaccccactctgtatagatcagtggttggagcactccaatactccaccataaccagacctgagcttagttttgctgtgaacaaagtatgtcaattcatggctaatcctcttgaaacacactggatagctataaaaagaatcctcccatatctaaaaggctcgttacatcatggtcaagtacttgagctatacacgagctgagtat

SEQ ID NO: 291260 - DNA, 377 bp, Glycine max
agtttgtatggttaaagtctcacgattgtcatgtgctcatgcaacaattgttagtcgtggctatacgagacatcttgccaaacaaagtcaggttaacaataactcgcttgtgctttttcttccattctatatgtagcaaagtcattgatccagtcatgtttgatgagttggaaaatgaggccgcaattatactgtgccagttggagatgtattttccccctgctttctttgacatcatgattcacttgattgtgcacctggtcagagaaatcaaatgttgtggtcctgtttatctacggtggatgtacccggttgagcgatacatgaagatcttaaaagggtatagaaagaatctatatcgtctagaagcatttatt

SEQ ID NO: 291261 - DNA, 421 bp, Glycine max
cagcttgtaagctaaagtctagaaagaatattgatagttttttgaaaattctccggtttaataatggtcaagtcattaatggcatacatgtaaataatttgattttattctagaaatagaaatcacaagattgaaagaagaaaattagttattaatgtaagtaaggttagaaattaagtagggataattaaggttgactaatgatgatttagatttcatggaattagaaaaagggtgattaagtcataagagtttaaagtggagggcattttcataaatcactatacaattagttctaaaatagaattttaatttaattagttctgactaattaaagtgtctaattatatgatgaagaataattaaaataagttaaagttgtaaaaccctaaaaaattacaactcatattaatagacaaaa

SEQ ID NO: 291262 - DNA, 368 bp, Glycine max
tgcttatagcttacagaagaagaagaagcatcatcagcaactttcacaatactgatccaaccagacactctattttggttaccaacaagcttagcagcgagtcctgtttctggtagaccctcgacgatagtccacttggaacgtgggtcccacttagaacgaattggacttgggggacaccctggactgagtgtggatggaaacacaccgaactgaatgctcttgaaaagctggccttgggtgatgaaagcgactcctgctgatcgagatgcaatctttatcggtaacccctcacagagctcgttgccagattgctccacagtcagagggcatgtttcgattggtgctgttgctacttgtattccacc

SEQ ID NO: 291263 - DNA, 363 bp, Glycine max
gtatcgctggaattagaaagctgaaagctgcccaccactatgatagagagcaagacccatgcttctgagctcattcgggacttaatcatagaataatgcctggagaccaaccatagtaaaaacattcgaaattccgaaaaagaaatattggggaaccaaccaccacacactcattggaatggttgcatttggtttatcaactggaccatactcttgcgctgtcttcaatctttgcctcaacaattgcagctgacttaatcatagaaagagatcagtttaaatctctcaaacattaacactctaacaaaactaacaattaagatttgctaaaaaaacaatatgctcacatgacacaagtcgttc

SEQ ID NO: 291264 - DNA, 375 bp, Glycine max
tttttgcaagtcttaagaaaaggcctaactctcgtaagaaatctgatttctggcttaaataggtggctttgttcgcgctcatgtgcttatcgcaattctgaagcggatagcgcgcattagtgaattttggcttagcgcggcttttctcgctcaccggatggactaaagcggtgcgcttagcgggatgccccttcactcggcgaatatgcacagctcatcctccttccagattcttcctcgtgctcagccgagaagtgttgcgctcagcggatggctcgctaagctagaagatgggcttagcgaaagggtgaaaatcagcacttcacaacttgcctaattaacctgaaattgagagaaatatgattattaaacaca

SEQ ID NO: 291265 - DNA, 394 bp, Glycine max
  unsure (1)..(394): unsure at all n locations
ctatgctgatttttcttcacttgaactcctcaacctctgtagcgcaatcagcctctgctgaaccaccatgacctctccagcgcttggctcaatcccggacggcggaatcatcccctccttacatggtcgaatccttcacagcagcagcaacaacaacaacaaccttattttcaaaatgctactggcccaagcagaccatacgttcctccaccaatccagcagcaacaattgcaaccaccctataaaccagcataagatgaagctgcttcgcaaccttcccttgaagaactcgtgaggcacatgactatgccaaacatgctgtttcaacaagagaccagagcctccattcacagctnaactaatcagatcggaccaatcgctacacagctcaatc

SEQ ID NO: 291266 - DNA, 377 bp, Glycine max
tgctttcaagctttactcgtggctctattgagaagctctctcgagaggcttctttgacaagctagattcttatctatccgcacccctctattaactaaactaactctcttatgaactattacggacgaatataacgcatcaaataatcgaacatcatacataattactaataatatatatagatatatatatcacggtgttacaggaatacttatatgtgcaacttgctttatgacatccttcagttcatcgatggtacatcctgaaagaatatcaaatgtctttggattgtttactgtgaatgcgtaacctagaaagatgttctggcgtggcatgttccacctcccgttgtaatacaagagcgcgtcatgagtatg

SEQ ID NO: 291267 - DNA, 415 bp, Glycine max
cgacactaagaaactcagcttgagaagtttagacatgttacatgtcacggttttgtttggatcaaggataaaatggatgccccacattatttccatgacacaaatgcaaaaatgatgatttggaaactttatgcaaaactggtcatgcatgcacctatgtggacactcaagtgtcaaatttttatggtcatgtgattctagggctcacgattcatttcctctattatagtcaacccaacgtttccaaaatatgttcttttatcaatttgtgcattcatccgagttcattttgggcgtctgggaaaatcttcacagcattcacccttcaggtgtatacacattttttcataaactaggtatgatcagtgaatttttttcaaagaaaacgtggaagtcatctcttttcaaagcattg

SEQ ID NO: 291268 - DNA, 373 bp, Glycine max
agtcttaagaaaaggcccaactctccttagaaatcagatttcaggcttaaataggtggctttgttcgtgcttgtgcgcttagcgcaattctgaaccgcttagcgcgcattagtgaattttggcttagtgtggcttttctcgctcagcggatggactaaagcggtctgtttagcgggttgacccttcgctcagctaatatgcacaactcatcctccttccagattcttcctcgcgctcagccgagaagtgttgcgctcagcggatggctcgctaagccagaagattggcttagcgagagggtgaaaatcagcacttcaaaactatcctaattaacttgaaattgagagaaaatgattattaaacacacaaaatg

SEQ ID NO: 291269 - DNA, 430 bp, Glycine max
tccacaacatccaagtaaaacaacattcaaacagcattagctatcacagccaagcaaaacagagcaaaggcagaaaactctgctcaaacaccaaccaaaatcacagcttttctcacttaaagaccccagtaacaattccttcgatccaattcgttaaccgttggatcgactccaaaattttactggaagtttatagtacataagcctacattgtgaccgttgggatctactagcaaacttccagaactcattctgtactactctttccacagcctaccacacacaagcatttttctgcacaaagccaaaattctgctgcacctattttaacagcaaaattctgcataagtgcagatttcgaaaatcatccttcctctcatccaatcttgcccaaatcaattcctacaagtcccaaatcatgtatcaatca

SEQ ID NO: 291270 - DNA, 374 bp, Glycine max
agcttgtatgccttggatcttcttcatcaacggagtcctttgcttcttgaagttcaatggaagcggaatggagaaggaagaaagatgattggagatgccacttcaaggagaagatgagtcaagaacaagctcaccaccataagaagccatggataagagcttgaaggtaggagaagatgagtggagggagaaggagagaaggagcacgaaatttagttcctcaaatgaggtatgaactttgaagtgtaattctcaaatgatcaaagttcaaaaaatacacacatatggcctttatttatagcctaagtgtcacacaaaattgtagggaaatttgaatttctattcaaatttcacttgaatttgaaattgaattt

SEQ ID NO: 291271 - DNA, 427 bp, Glycine max
tcctcggtgccattcctgcgaaggcaaacatttggaatgttagtttttgtgggacattactcttaaagcaaaaatggcatataacctcctcccataaatacaaacatcaatgtaaatttagagcaagcttatgcgcatgtttccttacgaacgttcacttgcggaagatatcctattaaccgaaaaaatgcacccatatacaatcaaggcagctttgttacctagattatttacacgtacttccaaggtgtatttgttacttacatcacacacatctccttggctaaattcacatacatgcatactccaagcatttggggtaccaaaaattgcacatgtgcacatcttggtatttctaatacctatacatacacgaacttcatgatgaatcttgactatctacacaataaggtgctacatttcatgc

SEQ ID NO: 291272 - DNA, 362 bp, Glycine max
tgcttattccgatctttatctctctattcattacagcagagatgaacttaattgctgaatgacagtcttcacatatcctaaggatcttgacaatcctgagagtcactccatcgccagttttcatcagcccaaatgccaccgcaagcttctcactgtggtacctgacggcatactccctttcttccccttacaactcgtgcatcgcggactctggcacgggtgcatagcctgcatccttgcacctccatatcaactcatccaagaaactataaatctcattagtctcacggtgagacttgtcacccatgctaaaaagataactactattgtcaacatctatggtgctataacccacttgcttc

SEQ ID NO: 291273 - DNA, 169 bp, Glycine max
agaacctgcttattattatagggcaccactactgaccggtgatgggctccattctgataacgatccccctactactgacaacaccctcctattttatttggtggcaaccattctacagtaccgcaacaaccactttctaaccattaatcacgacatattttggctcatg

SEQ ID NO: 291274 - DNA, 363 bp, Glycine max
  unsure (1)..(363): unsure at all n locations
gaatacggaggtagttaaggttgggactggaaccaatcaccaatggctttcttggggagaaaaacatggaagactggatgaatttttctgggaagagggagaatccacttgttaaccaccacacccacctttgttaatacctggaaaggatcataaaacctggggaagaagtttttattaatcctttttagcaaaggatctggcactgtaaggattccatctatgagaacacccaacttaccgactaacatattctatgtcccggcggcgcctggtggcaattgctcgcatgatatcttgagacttccacaaattttcttaaagtaaccaataattcattctgagcaattgtaatttattgcn

SEQ ID NO: 291275 - DNA, 426 bp, Glycine max
agcttatgaagtttcaatagaggctggatctttgagcttcaatgatgtccttcaaaggtgattttccaccatagagatgcaacagaagataaaggaaaagaggtgagaagaggcgtcatccactagggaataaactatggaagaagaagcttcaccaccaagagagtgccttggataagaagcttagagaggaagcttcaatggaggaaaagaaagagagagagaaagagagaggggggaacacaaaattgaaggaggaaaagagggagagaagttgaactttgaagtgtgtctcacaagattctcattcatcaaagttgcaacaagtgttacacatgcttctatttatagcctaggtagcttccttgagaaaatttcttgagaagcttccttaagaaacttccttgagaagcttctttgagaagc

SEQ ID NO: 291276 - DNA, 382 bp, Glycine max
agcttcctagaatcaagatcaagattcaagactctagattcaagaatcaagagaagacttaatcaagataagtatgaaaaagttttttcaaaaaactgagtagcacatggatttttctcaaaacatgtttaccaaagagtttttactctctggtaatcgattaccatattgttgtaatcgattaccagtagcaaaatgtttttgaaaaagttttcaactgaatttacaacgttccaattgatttcaaaaagctgtaatcgattacaatgttttggtaatcgattaccagtgtgcttgaacgttgaaattcaaattcaaatgtgaagagtcacattctttcacaaaaaggctttgtgtaatcgattacactaatttggtaatt

SEQ ID NO: 291277 - DNA, 427 bp, Glycine max
  unsure (1)..(427): unsure at all n locations
ntatggataagtaaacaaggtttgcaagtgttaaatttattataggatgaactgaatgcatgctaaagtgattgatcataattctgatttctgaagacgtgttactaaagagaaatttatagttctagcttgccccataatattcttttaagaaacgtggaatgaaaaggtatttaattttaaattcgactttgctgaccattacgtaccaaatggatatttagcaatcattgaggaaaacttttattaaaaaataaaaagatggaatatttaatgttgttattaatagtgtctccattttaattttaaaaataatatatatataatattaactntatttgtttactggcaatattatgtcacaaaaccttgaagtgcttatggatntacaagttcaaagaaaatgctttcatttcatccgtttcgt

SEQ ID NO: 291278 - DNA, 418 bp, Glycine max
agctcggtacccgggatgctctatagtagtctgctgcatgcatgcttgcttatcatggtccgccctcttcgttatagactaatatttcgaggcttaaagattgaggattaggtgcagcttgcgcactggccgcaatatcgaaccgctaaacgagcaatgaggatggcggcgtctaagctcgatgactggatacagggatggtctaatccggtccgttgatcgcgatgactgtgagttaatatattcatgtctgctgagtctggtgtcatatgactactttcacttaatcgatgcttgtttcactcaatggatggctcgctaatgcacatgattggcttatatagacggtgattgatcacacttcaactctatccaatgtgacttgttgttgagagaaaatgatattagactgcgaatt

SEQ ID NO: 291279 - DNA, 405 bp, Glycine max
tatgcacggaaagtgtaattatgattctgatatgctcgaagaaacaccattttctaggtaaccatgcattatgtaccatgttcaattattctgttcttaagtgaaacgggattatgatcccaacaccgttggctcgtggagcctaacacatgaaactaataatgtattgtgaagtttcacgcttcccccttctttcgttgtgttttgtagaggaaaacgcttggatgagcctacatgagaacaaatggtatgcacatttgcacatcaaaaagtgctttgaacgcatatgcctgacgatgccatgactcatgcaaaatgtgaggctggaatatgataatggacaaatgcatgatatgtccattatgatgttatgaagagatgcttatgctatgcatgatatgaatg

SEQ ID NO: 291280 - DNA, 375 bp, Glycine max
tgtctttgtggttgattgggtggtgggtaatgagaagggctgatattggctgagtaatgacattgttgagctggtgagaaatttggccatgtaggaacgacagtcacaacatgggttccttcttccttctcatcctctctatttgccccaggctttttatttgtcaaagcaggatgatcaaatttgcctttttttagacccacttcgatcctttcaccggcgaaaacaaaatccgcaaagcttgaagctgtgtaacccaccattttctcaatagtagaacaccggtaacgtgtctactatcattgttatcatctccctttctatcatcgggggtgccacttgagctgccccagtaaggctctcttgaaaaaaatg

SEQ ID NO: 291281 - DNA, 419 bp, Glycine max
tgagatgaggaagtgtagaagggtgatacttcctgcttttattcgttgaccacagagtggtacctggagatatgttgcgagggtcaagagaccttgggaacgtcaggtggggtgctattgcccaaaaccaagcttgaccaatcccgacccaacccgagcatagtcagtcagtgagaacctgtgatgtacctaaacaggcgagctcctggcagtcaacagataaaaggaacaaagaccacaaagcaaggaggcttgtggtggctggccagctgtgaatcttgtgtgatatatgggttatggcctctgctaatcgattaccaagggtgggtaatcgattacaaggcttaaaaatgaagacaggaggctaagatggtctctggtaatcgattaccaagggggtgtaatcgattaccaggctt

SEQ ID NO: 291282 - DNA, 378 bp, Glycine max
  unsure (1)..(378): unsure at all n locations
tagcttcccgaatccgtacttggaaggatctgattaccgccttcctaaggcagtatcagtacaattctgatatggctcctgaccgtactcaactgcagaatatgttcaagaaagagggtgaaacctttaaagaatatgcgcagcgatggagggatttggtggcacaagtagctcctcccatggttgagagagagatgatcaccatgatggtagacactctgccagtgttctactatgagatgctagtgggttacatgccgtccagcttcgcggatctggtgtttgccggggaaagaatcgaggttggattaaagagaggaaagtttgattacgtttcctccacaaacgtgaacgccaaaagaatcggngcaacagggg

SEQ ID NO: 291283 - DNA, 418 bp, Glycine max
tgccacccagctcacccaggcgagcattgttgcttcctccagaagcaacagccttctggaggaatcttctggagggcccaagtgggcctggttgctatttgcacccccatttttactaagtacaccccccttttctatttttttgtaactctttttctgtaacgttacaaaactttacgaacttcgtaacgatacttattttttcttctgcaaggttacgaacccttacgacttatgtatttactcttttttagctttcaaagaagttacagaaacttacggattgcgcaaaaacacctctttttgacttccgccacattacggaagttcacggatcgcacaagcctgcttccttttgatttctgagacatctcgaaacttcatttattgcatgtcatcaagtaataatccccggacg

SEQ ID NO: 291284 - DNA, 358 bp, Glycine max
ttgtcttgcactttattgaactatacagatgcaaagtgaatgccttacattatttttccaatatcatcttcaatgaaagactattcgtgattgagtataaatcgcactgtacaactgtctggaactaggtatattaatggcttacttgtgttatgagagatgtgccaaataacttagtacagttgggcttgaaattttttgacttatgggagcgatctgactgagataaacattatataataaagaccaataaatatcaagaaaacccacttgccgaaaaaatgcacttcctacatcatctaacagaggactcttgatgaatagacgaggtatccttactatggagataacacttatg

SEQ ID NO: 291285 - DNA, 276 bp, Glycine max
ttcagctcgctgggtcagctgctaccttgggaatataacgagaattgccctcttcacgctcttagattttgcttacttggacacagtgaccctccttggaatactcttagaagatctaagcacatacaccttgttttgtcctgatcgatccagagtggaaggagtacagaagagtggagactgcaccaagctaagtgcgtgaggaacattcttccagatcggttcaaaatccatattgaagtcacagtctccagttttaagtcctctcctggctta

SEQ ID NO: 291286 - DNA, 333 bp, Glycine max
ttcatgcaagcttgggtgatgatgcgcggacagatgggtaccatgaggtgtttgctggggtttgacccatgcgggcgttgaaaagagggcatggagcatctccttccttcctttttgcccctgctgccccgattcttttggcgttcacgtctgtggaggaaacgaaatcaaactttcctctattgaatccaacctcgattctttccccggcaaacaccatatccgcatagctggacggaatgtaacccactagcttctcatagcataacactgccacaggtgtaccatcatggggatcatgtctctctcaaccatgggaggagctacttgtgc

SEQ ID NO: 291287 - DNA, 336 bp, Glycine max
tcctcggcttcctatcttgttggtgatgaacacaattgcaacacggaatcaaaaagtgccaagaaggatgaccctacggctgcaaactcgacaatcccgtgggtatggcttttgaaaggggggaaaagaagtttttgaatgcaaaaaacctccccccttatgacattcttataattaggtgcaggggtggctcgaccagacgagctaacctgcacatatttttttttttttttgagaacaacatgaaccatgtcccctcccttttaatggattatcatctggcctaacttgaacttacttacgttagaaataggggttgattacttatttttactt

SEQ ID NO: 291288 - DNA, 348 bp, Glycine max
tttcattcgagctttaacctcatcggctctcacgagatgtagattagggagccaatccagaccttgtgttcggactctaaaccactgatgatagccgaccatgagcccattacgggttcccctaagctttctgactcttcttaacggcgcatgccatgccttgcgaactcgttggaggaccctaccgttgtggtcactgaccccccgtgcgacgaaaggcgggaagctctagtctgatggcgctcgtatcatgaagaaccaccgctgtcttatggctaagacagcattatagtgaatactatcactggatccatcaagggaacatctacacatgcttcgaatgaagat

SEQ ID NO: 291289 - DNA, 375 bp, Glycine max
ggaagcggttatccgcctgaaaagatatgaccattttaatttctcaagagcttcagatgttcaatttctagactctcgacatattatgcgcccgagtcggacattcgcgtaaaaagttatgaccatttgaatttctcgagagttttcgatgttgaattttgagcgtctcgatataccataagcctgaatctgaccttagtgtgaaaagttatgaccatttgaatttcacgagagcttgcgttggtcaatttcgagcgtcactatatgtgatgcgccaaagatggacattcgagttaaatgttatgagcatgtgaatttctcaagagctgtccgtgatcaattctgagcggctcgatatgttgatttgcctgaatc

SEQ ID NO: 291290 - DNA, 370 bp, Glycine max
  unsure (1)..(370): unsure at all n locations
atctttgaagaagcaagacataaatcatcctgtgtaaatatattttttcattcattcttgtaaagcttcatgaaatccttgtatagatactaagctctcaaacaccttgtaaaccttgagagaaaagactaaaatgttgagtatttaatccgtctataagatgatcacgtattagtcagtgtgcaatctttcaacaaatcttgttgatttatttagagttagcgatgacttggtaggacaaagaatattggattaagtcaagcttggggtaaaatttgcatgtgtaagagccaaaagtgacaatgaaaaatatttgaatacttgtagctntgtgataagttagtaaaaacttggtggtttgtcaagaact

SEQ ID NO: 291291 - DNA, 393 bp, Glycine max
tgtgttgtgtgtagtttcagttgtgctgttcttctgtccatatttggttgtctcaaacttggtaccttagttaatatttttggtgttctacttattctgttgttgataattaaattatttgttttaggtattataaaatttgtatgctatatttgttctacgtattctaagtttgtatgttattatttgtgttacatatatatggtaccttagtttgtatgttaatattatttgttttaggtattctaaattattattcaaatatatggtacgttagtttgtattaattttgtatatatattgtttaaatttttctttgcatattaatttatgttattcaaatatatattgttttatttatttaaatttgtctttgcatgcattttaatttat

SEQ ID NO: 291292 - DNA, 377 bp, Glycine max
agcttgatggtaaactagatgtcttggttaacttggcaacccaactggccatgaatcaaaaatctgcacctgtcaccagactctgtggtttatgctcctctgccgaccaccacacagacctttgcccttctgtgcaacaatctgaagcaattgaacaacctgaagcttatgttgcaaacatctacaatagacctcttcaacctcagcagcaaaatcaaccacaacagaacaattatgacctctccagcaacaggtacaatcccgggtggaggaatcatcccaaccttagatggtcgaatccttcacaacagcagcaacaacaaaaacagccttattttcagaatgctgctggcccaagcaaaccatacgttcctcca

SEQ ID NO: 291293 - DNA, 376 bp, Glycine max
agcttgttagaagttgtgatatgaagttcatggtgtgacatcctctaccccgacatacatatacttaagaaaaacatataaaaatctggaatttaattaaatcaattttattgaaatcacttaaacaaattcatgtgggtaaaagggcaacattcacttcactattaccaaataaaacttattaaaaacatctccggctcaaaactgttggatcaagtggtctcgaaataattaagaagagggggggttgaattaattattaatgtaccttgactaattaaaaatcagaccttcttaatgttactatatttaattaggcttttactacaaagttaagaaagtaaagaaaaataattgaaacttaaccaaaattaaa

SEQ ID NO: 291294 - DNA, 438 bp, Glycine max
actcaagctagtgaaactctttgagaaaaaaaagtccaaattatgtattgagatagttacaaatgctagcaaaaaagatacccttcttaagaacttttaggagttggaaaacagactgaaagatcttcaaaaggatcggaaggaacttaatgaactacacattaataagaaagaagaaagatatgatctttggagatagtgtgcacaagcacacaaagattttgatgaactcaaagtgagtaaacacaatctttgggtggaatgtgaagaactaaagaaaattgcaagtttcctaaaagatgagcttctaaagcatcaataatttataggtcaacctcaagatgttgtaaaacttcacgaggaaataaaaaccttaaagactacattatccaagtttgtcaatggaacaaacaatcttatcaagttgttaggaaactg

SEQ ID NO: 291295 - DNA, 378 bp, Glycine max
agcttttatgtgatttgatgtgacacttcacatttaaatttgaatttcaacgttcaagggcagtggtaatcgattaccaaaacattgtaatcgattacagccttttgaaaataattggaacgttgtaaactcagttagaaaactttttcaaactcattttgctactggtaatcgattacaccaatatggtaatcggttaccagagagtaaaaactctttgacattcaaagttttgaaaaaaaaaactttttaatacttatcttgattgaggcttttcttcattcttgaatcttgagtcttgaatctaggcttatttcttgagtctagaattcttcttgattcttgaactcttgacttattcttgattcacttgagatg

SEQ ID NO: 291296 - DNA, 412 bp, Glycine max
ttcctcctcatatgaaatgttaaattgttatttattccctaaatgcttatatgtgattcaatttggcccttaaatctaaattacaaaaaaaatcatattttgagataattcaaaattgttattaaatgattttaaactgctacaaaatgcatattttttaaaaaaatgaacttattttgaaaattagaggaccaaattgaattgcttttaaaaattagaggactaaataaaaaaaaaatagaaaaccaaacctaaataataaattaaaggaaacaaaaactaatttaatcttaaaagaaactaagaagcttattaaatgaataaaagccatatttaaagcattgatgcatacattgagtttgaaatactctgcatagcaacaaattgaccaaatacttatttgagttcctag

SEQ ID NO: 291297 - DNA, 377 bp, Glycine max
agcttgatgaatctcaagaaactactagagatatcactatcattgtcacaatacacacgtgaacccgcttagaggtaagggatgagtttatcacaattgggattagaataaacatgtgtagggatccttagaagattaaattgagtttattttgggatgtttattgaacttttttcctttatgattataaatacaatattgatgtcctgatgtgaattagttgataaaattgagttctcttggtgttttcgttttttatacctatgattttgatataattatgcgaaattatttgaggggttttacttctcatgttgtgataaactgttatattgagattctgaaattgtgattcaaattatgagtatgtgataaat

SEQ ID NO: 291298 - DNA, 428 bp, Glycine max
tatatctcactgtgtgcaagaggaagagagctgcatatagatagatatgaaagtgttcatttaagctctacctctcaaaataagaaaagaaagaaaactaagggtgctgctgaagggttttctcagcaaaagaaaccaaagaaggatgaggaatttaccagctacttctgcaagaagtctggacacatgaagaaaaagtgtcccaagtacgccacatggcatgtaaagaaaagggtttcttgtgaagctgactgccaagtgatgatgaaagattcatatttgttggcgatggcaaaaaggttacggtgaaggctataggaacttttagattgcagttaaagactgaattttatttggatttgtttgagacttttgttgtatcgccttttagacggaattaatttctatttctagtttgaacaaaattg

SEQ ID NO: 291299 - DNA, 239 bp, Glycine max
agcttagcagcctttctttcagtgtaatgccccctttccacaatcctatcaaacaactcaccccctgcacagagctccataacaacatgaaccgcgacagcgtcctcgaaagcctccttgatggagatcacgttaggactcccagccaagtggtgcattatttgaatctccctccttacatactgcacatcctgatatgtcaaaagcttcctgctcgataatgacttgcgtgcatactc

SEQ ID NO: 291300 - DNA, 400 bp, Glycine max
tctggtgggtctttcagctatttgcttaactaattttcccacctgcacctccagattcttgatggctgactcaatgctcttgtggtttgacagggaaacttgcatgaactgcatcagcgtgtcttccagcttggtggttctctcatatagattgggcccttggttgggaagctgattggatggacctccttggtctttttcgaagctattccatggatgggatctccaaccttggccctgagagaaatatcctccctgatggtaccctgacagtcctccttgatggaatccttgacgattatgattggccatgtagttgacctctattgatgcgtcgtcttgagccattcaaaagcctgactcatgagccccaccatagatgttgcatcccctaatgtgc

SEQ ID NO: 291301 - DNA, 372 bp, Glycine max
tgcttgtctagcatttcacacaaaagtagaaataggcaagtatttgtcgtcaattcaagattgatggaaaatattaatgtgattcaactcttttaaaccttaacgcctgtaatagctcctaaatcatactctttttgtagtgatcaattgtaccttaaatggatatgttaagtttagatttaattggatcaaaataaataaaaaaatgtattcaaacctaaggatatcatcaaagttatggattttctatcgtctaaagactaaaatcgtataataaatgagacaaaatcacgaatcaccaattacaagagattaaattataatctagctttataaaagaaaaaataatgatttgtaattagatcacaatac

SEQ ID NO: 291302 - DNA, 234 bp, Glycine max
agaaaaccgcatagaggccgtgggaactctatcgattagatgaacagccgtgataaaggcatgatcccaaaactttggacgcatagacccatgactaaaaaatgcaggacctaactccgcactgcgaacctctccactacaccatctcggtgatgagtgtgaggacaaacaagttggtgaataacccctagatctgtgagaaaaatgttgataggtctgaactccccccccccc

SEQ ID NO: 291303 - DNA, 374 bp, Glycine max
ttgctttaggatcaaattcttttctctcttttttctctcaattgttcttcattctttttcctcttttcagttctcttcttcctttttcttgcttaatttttgtggcttttccattggtgatgatcatggaaggctaaatactcaatcaatccaatgaatttgagttcaggtttagtatttctattttgtatgattgttcattttttctcctatctaattttcgattttcatgattataaatatgcttaggattgaaaatggattaggttatggattcatttcctaattgcgaaatttaatcatagattgtttggatgatattctaacctaatttgcggtttcaatgaatttagggattaattcgattgaactaa

SEQ ID NO: 291304 - DNA, 418 bp, Glycine max
  unsure (1)..(418): unsure at all n locations
ntataggatactagggtgtctcctagtatggcctcctcaacgtgcggagctagtcgagggatgatgatctgctgaccaccagcctaatgcctgctcgtacccgtccccgagcatctgaaagcgggaaatggcatttatgcagtgaaaatatggccacgctaccacttaccttggttcatccctgtctaggatttgatgttgtattaaccacctctcgaaatgatcatgtccttgtctaccgattcacaaggtccaaaatgcatgtgcctgcgtatgcatgaaaagtttcaaacgcaataattctttagcaaaaacccattgggttcagttataaataagcgcttatggcatccctatgggtcgagcgaaaaggatcggatcatttaaaaagaatatgctccttataggaacaaaacga

SEQ ID NO: 291305 - DNA, 380 bp, Glycine max
ttgcttgacgtcttaaactgagttataattaaccttctctgaagcgatcaatctagatagggataaacaccatatgatgcccagattttacttccataacaataaatttgttgattactaactgaatctatttcagttgattaaaaaatgtatgatttgttgtacatttttagtattgaagatcgatcatccctttaaataaaaaatagcttatttatttttataataattaacttaaaaatcatactaataaacatctagttaattgataatataaatatatattaactgtgctcttatatcaatattattattattttatcatgattacataatatttttggcaattaatttcgtagatatatatatatatatatata

SEQ ID NO: 291306 - DNA, 389 bp, Glycine max
aatactcaagctggcatgttgaggaatatagcacttttattaaccatctataagagttcctctactcataattattcgcattttatcttcacataattcttaagttatttaaactaagtcactttaagctttattcaacaactaatgaagatgtattgaacgtatggcattattaacttatagtactctatataaatgagagaaacatgtaccatactgtgatgagttttttataagtttatttaaatatttgtcgtggacctatacgaatatataatatatcacacctctgctatattattattctttttatttgtatttgattctaaacaacagactatttgagttctttttcataaacatctattgtgtataaggaacatgctcca

SEQ ID NO: 291307 - DNA, 358 bp, Glycine max
cagctttcactctgctcgagctatcacagccatgcaccacatatcagggcatggactatgctctacacatcagccattaaacacaaacatgtttactgatacacacaagaatcaattgcttcgatccagggatgtatacggagcatcgactccttaagattactggaactctatagagcatctgcactacattgagaccgttgggatcgactatctaacatccataactcattatgcactacactttgcacatccaaccacacacaagcatgatgtgcaccaagctaaaagtctggtgcacttattatgacagcatacttctgcataagtgcagattacgaaaatcacgacttactct

SEQ ID NO: 291308 - DNA, 421 bp, Glycine max
  unsure (1)..(421): unsure at all n locations
aatactcacgctgagcgcaagaagaagagagctgcattatatacatattaaagcgcacatttaagctctacctctcaaaataagaaaagaaagaaaactaagggtgctgctgaagggtttctctcaacaaaagaaaccaaagaaggatgacgaatctaccagctacttctgcaagaagtctggacacatgaagaaaaagtgtcccagattctccacatggcgtgtaaagaagagggtttcttgtgaagctgactgcccagtgatgatgaaagattcatatttgttggcgatggctacaaggttaccgtgaaagctatacgaactcttagatngcagctaaagactgactccatccgtatttggatgagactattgatgtctcgcctatgagacggaattacttactatttctagttagaac

SEQ ID NO: 291309 - DNA, 371 bp, Glycine max
agcttcatctgatgtgttagtaggtaatttctaatttgcatattaatcattatagaataaaatatggtgtatgcttttgcgggacaattttagatttattatcttctttttctaagtagatgtgattaactacactaaacattggcattggtgacaaatatattgttcaaccttggtaccagtttctcgcggacaatgattttagccatggagatgaagttacattttactgtaggtattattattattattattattattattattattattattattattattattattattattattattatttagtttgtttcatgtttttcctgcattactgatatttcctgttttttctttctttctgattttcc

SEQ ID NO: 291310 - DNA, 403 bp, Glycine max
tattgtatgcatgcttgtggtttgatcatccattgttgtgtgctgttaggaactttagcattgacaaatgtactgtttccttggaacttgatagagcagggctagataactgtagtgctagacatagtgtgcagggttctagtttttattatgttgtgcttataatgctgtttaaattaggctaagttcaacaagagacatctatgaacgaagcttagtttaaattagtccaaactcatgagacatcggtgttggtatttttgtcctcagcatagaacacaggaataatttcaaatagagaaaaaccctaattgcatcaagtatctcggtggaaggacccaacacttttatttagttgttttcacactcaattgttcacgtttactgtttctttgattacaat

SEQ ID NO: 291311 - DNA, 365 bp, Glycine max
agcttaaaagaaaataactaaaataattgcccaaagtccctacggcatcactcaaataagcaaaaaggaaataacataaatagaccatataggatataaggtattctctctaattataatcacccatttgtatcctttatgtactggcttagaacgctagagtctttacaagtatatcaccagaatatggttcgtgcgtgttgaagaaattctgtccgaatattcaagatgcaggaaccagagctgaatactggtaacgatgcaacgagtaatgaactctaaactaaaatacttgagtgattttttgaggcagatgcataccatatcattaattgctacattatacttcattaattactgaaagc

SEQ ID NO: 291312 - DNA, 392 bp, Glycine max
gatcatatataataggtgtactttaattgattaagtttatccatttttgaactttgagaatcgatgaatgttcagatgatcactcaagtcaatagatgacaaactcaaaacagcaagattttggagttcaaatattgaatttggaaaattatcttacagtttgttcttaaagagtgtgacaagtatttgaaagaataagatgagaattcaccaattggtcccatgagctggttgttgctaagatctaaaatggagagttaagttagattaaacaatgataagggaaccattccatcaaaattgcaaataatcggaaatagttcgttaagagacttcaaatggccaatggaagaaagcggaataagagagattcgagagtcttactggagtat

SEQ ID NO: 291313 - DNA, 370 bp, Glycine max
agtttgtagcttccaaatctttaaaaaaaaaaaaaacatatagggcattaggagaatgagccttgaacctctcgcaccctaggcacgactttttggcttattttttgcttttcttatggaaaaggagaaactggccaaaaatgatttttcattagaataaatttattttactaatatattttattttcataaaagtttttttattagatgagataaatatttttaaacacaataaaaaaatttgaatttttttgccaaataacttttgagtaaaaaaaaaaggccaaaacacacttgagatggaatgacattgtccaattctctatatatagtttttgtaaagagaagctcagcatcttttgtatctttc

SEQ ID NO: 291314 - DNA, 331 bp, Glycine max
aacgtcaatagcggacttcctctgaaaaattacaacaccatctcctgactgagccacctcaatacctaggaagacttctaatgtccctagtctttggtctgaaaatgactgaataagtgctcctttagctaaccaatcttagtagcatcattccctgtcatcactatatcatcaacatatactatcacataaacacacttctcagaggatgaatgacaataataaacagaatgatcaacctcactacgtttcaatccaaaaagtcgaacattatgactgaatttaccaaactaagcccgacgggattagcttcacccatagagagatcaac

SEQ ID NO: 291315 - DNA, 483 bp, Glycine max
gatctctcacgccggtcccattcatcctccaagctttcccagctccatgctatcgaccttcagacagcccagctatcgagccaagcaaacgagccaagctgaaactctgctcaccacatctcccgaatttcaaattattgtcggcttaaagaccacagtaacaattccttctatccaattcgttacccgtctggatcgactccaacattatactggatgtctatagtgcataacccgacattgtgaccgttgggatctacttgaacattcggacctttctgtctatttttcccatcaacccacacagctttttgaccagctgaatctgtgaccatttgcgcaaatctctacggaattcgaataccttcctaacatctggaatgatctcacccatcttttaacagctacaaagactttcccagcccgatcggtgccccttctctggttttgtgaagaataaaagaattaacacccctccatctc

SEQ ID NO: 291316 - DNA, 405 bp, Glycine max
acctatagagcccgctaagcctaacaccaaccgcaatgatatgcgcttagctctccctgagccgcgcttagcggtattacatagtaaaattttcacatattttactaagtaaaaggagctcagcgaactgggtcgctcagctcattcactgccgctaagaatcttgcttagcgcagggatattggtttagcgtgcagctctcaaaacaatataaaaattttctacgatacctgtgcttagcgaatcaccctcactttaccacaggtacatatcaagaggatgaatatgcatcctctacatgttacatcgcttaacgcgatgaacacgctcattgaattcttttgaagactacaactactattgagacactcactcagcgcgacatgtgcgcttagcgaggttctt

SEQ ID NO: 291317 - DNA, 203 bp, Glycine max
  unsure (1)..(203): unsure at all n locations
catgttctgtagttgcatcctatccgaagccattatactgacacagcctaacgaaggcaaccattaggtccttccaagattggactcgggaaggttccaagttagtgtaccaggtaacagctaccccagtaagactntcttggaaggaatgtatcagcaattcctcattttttgtgtatgcccgcatcttccgacaatacatc

SEQ ID NO: 291318 - DNA, 347 bp, Glycine max
gtatctcaagaaatgcacagatcgttatcacaacaggtgcgcttgctctggagccatgacggagatcatttgcttaggaagattgcccgcgcgttcctgaaccttctactactgtgggccccatactaccatcgacaacactatggctaagagttttatctcacacgagacaagcagatatccttatgacagcgtgtgagatacctgggcgtgtctaatccgtgttctacctcgatggcgctctctatgatctgcctccccgatgatgcctctgcatgcatttcaatatgcaggggctaatttagatagctgctgagaattccattctgcgtgcttttactctgaaa

SEQ ID NO: 291319 - DNA, 379 bp, Glycine max
  unsure (1)..(379): unsure at all n locations
ggtatgagcattgtcctggtattcactaaattaatgtggctccccctttctttgatgtatgggcattgaaataacaagaatgttgctacatatggatctgtatttgaaatacctccatgaaatactattctctatttggggaagtttctggtacgttatatttttctttgagacattactacttcgaatatatttttttccagctacctggcttgttagtataaaatcacaatatacatcgactgcgataatagatatttttaacatggccatccacctcataagtacanacatgacttagtgccttgataggctggaagaagattgtccttacctctattttcctctctactgcagctttatttacttgttatttact

SEQ ID NO: 291320 - DNA, 432 bp, Glycine max
taccactatatttcgtccatcatttgtaatgactgttattgtctctgtcaacaaccaaaagattcagtaaaatatagcaactactagcatggtttaaggcatatctcacagaaacacaatttgatggagaactggttcctaatgcttcattaacttaaataattgtcattaataagcgcagcaaataatataactatgtatagaattccaaacatcaaagcaaaacataaagatttaactatgtagagaattccaaacatcaaagcaaaacataaatatttacagatgacttacgatctacaagagattcaagtccaggcccagctgacatcttgcgtttatagatagatcacacacttatccttgcacctgtagaagcttcagtgtcaaaatatcaattaaacaatgcaaatgtacacattgagaaacagc

SEQ ID NO: 291321 - DNA, 256 bp, Glycine max
  unsure (1)..(256): unsure at all n locations
caacaactacaagaatctgacattttcttgttagaaatagtagagatatgaactttttcatttggtttagaaattgagacttcatttctaaaatgatctaattctttgtttaattctaaaatttcattttctaacattgaaattgttttctttgaagatgaaactaactttgcaagtttaattgactctttatgcaaatcagcaaatgcatctngcaattcatcaaaaaaatagataaattgttgaagatgtacct

SEQ ID NO: 291322 - DNA, 367 bp, Glycine max
tctcttctctccaaaccttcccttctctccaaaccttccctcccatttccattcccgttcctctctccgaaccactccccattctccctctccttcccccccatgcgccgcgtcctctccacaccgttatgctgcaccttctgcccctccgaacccaatctcagcccctccgaaccggaacacgaagccggttcagccaacaccgaagagccgggtataaattcaaccgaagaaggtgcagcttcagtttcagattctggtttggaagaagaagaaagcgccgaggcagtgcttcggagtggcgcggattcggagaagatagttgttgcgagtggaaggctctcgatagtggtgtacattgaggggc

SEQ ID NO: 291323 - DNA, 296 bp, Glycine max
  unsure (1)..(296): unsure at all n locations
attgattctcatgcagaatttgaaggccaactatcatgtcttgcagaagtattgtcatgaagtcacagtcagtgtgctttgtaatgcccatggtgagttcaggttcaggccattgtggatagtattgacccaaaatataaagtgcctcagcgcagtccatttctttgaagtaagaagggttaatgccaagagcctctgacaatagctcanagattgtaatgcccaacacccttacttttttggtatattcagccacaatatctctgcgaaagcatgattatttcatcaatgacaag

SEQ ID NO: 291324 - DNA, 412 bp, Glycine max
tgagctatcagaagacttttattcatttagtgctaagttctctaccttcacagtttagtcagtttaagatctcttacaactgtcagaaggagaaatggtctcttaatgagcttatttcattctatgtacaagaagaggaaaggctgaagcaaaaaaggactgaaagtgctcttgttgtgagtacctctaaagacaagggcaaaagaaaaaggattaagaagcccaagaatgaagttactaagggtccaggacaaaagaaacaaaatcaggatgacaactgtttcttttgcagtaagcctggacatgtaaagaagagaaatgtaccaaatatcatgcttggcatgcaaagaaaggtatgtttcttactttggtctgttctgaggtcaatctagctctagtacctagaaacact

SEQ ID NO: 291325 - DNA, 324 bp, Glycine max
aatcaaaactctgacatctatcatgggtggaatggatgaatgcatgaagaaatgcatatggcacatatgcaatttatgaatacgggagcccgggaaattgtctccatatttaagaaggtggcacagaccctccgttggttttccaaagagaggggatcaaaaccgaatccatgcatgatgcatatgcgaaaggcgcaacacgagaatgtacagtatgacaatattcacgaaatataagccaaagggtacgtgacacttatgcatggcagtgtgaaaattgcacacagcgtgtccgcttctgcccctattcagggactatatggg

SEQ ID NO: 291326 - DNA, 419 bp, Glycine max
  unsure (1)..(419): unsure at all n locations
tcttatccaaagctcatcttggtggcgaagctcattcttccatggcttattccctagaggatggtgcctcctctcacctcttctcctttgtcttccgctgtatctccatggtggaaaatcaccattaaaggacctaattgaagctcaaagatccagccttcatagaagccccacaagcaagcttccatcaagtggtaattagagcacaagagcttcatgtaggtgctccttaaacctccattaattttttgctttaccttctcttccattggtgtttcttcatttttttctccatgtatctcctcacatgtcttgtgctaaatgtttttaacatgattctttagattttccaccgattaaacttgctatagaagctagatttgattntctatggttcaaatttcttgttcttgttcttg

SEQ ID NO: 291327 - DNA, 291 bp, Glycine max
cagatcaagatatcttaatgttgaaagttttccaaatcatctagaaagggcaccaccaattgagttgttgtaaaaatctagcatgtcaatatttttaaaaactccaatttaatccgtcaaattgggttattttatcatctatggacaaattttttctgttcttttttctcatgtgggtacttttcatatcatgccccacaagtgaataagtggtattataatatttaagtacaagtccgatatgacttttttttttttaacttaatcgaaaaatattatgcctctttttta

SEQ ID NO: 291328 - DNA, 420 bp, Glycine max
  unsure (1)..(420): unsure at all n locations
tgaaggagtttattgcatcagggaattatttcactttaaaagtgggtcctaattggattcctaattttcaacttacctatttggatgtgacatcatggcagataggtcccaactttccatcgtggattcaatcacaaaacaaacttcaatatattggactgtctaacacggggattttagattctattcccacttggttctgggaaccacactctcaggttttgcatttaaacctctctcataatcatatccatggtgagcttgtgactacattacaaaatccaatatctatccaaactgttgatctaagcacaaatcacttatgtggtaaattaccctatctttcaaatgatgtgtatgagttagacctttcaaccaattcattctctgaatccatgcaagaattnttatgtaacaatc

SEQ ID NO: 291329 - DNA, 517 bp, Glycine max
  unsure (1)..(517): unsure at all n locations
ctctagggactccaaacctgcaaaacaaattagatctaacaaaacccacaacaaccttagcatcgttagttctggtgggtttggcttccacccattttgaagcataatcaacaacaaggagaatataaacaaaaccaaaagagacagggaaaggccccatataatctataccccagacatcaaacacctcacaaaatgacatgggttattganggcattgctgtctccatgaaagtgagccgcctgctctctgacaaggctcacaaatgctactgattctccatgcatacttgaagatggtgggccaataaaactgtagtcagcaccttgcgagctgtctctgatgccaaatgacacctgtgcgaagatgacagaatgctgaccgatcatctatggctgaatgcattctaatactgtactgacatttcacaaagggtatccaaatatgctactactctattatatcaacttaagcaggagaaacaaacccatattctttacaccagatgaagatcaa

SEQ ID NO: 291330 - DNA, 426 bp, Glycine max
taaagtatgcccgagtcattcatccctatgagatgttgttgaagtattggcgatcagaattgccattccttggattatagggttgaaccaagctcatgcttttacaaaaaggttcatcaagtcaagttgaaatatggaagtaaccgtcttgcaaaaatggggcaaaagatgaatcgagtcacatcactgcttcgtctactgccaaacatatttaggattgttgatgtccttgttacttccagtttcaccttgacaaagatgtcatggaccatgttgaaaatctaaattgattcaacctcatatcctgcgtaaaaattcgcaatacttcaactgtacttcattcgcatacatccatgcttttcattgtttgcattgctcattgcattctttccttgaaaaataagataaaataaaataaaatgaact

SEQ ID NO: 291331 - DNA, 87 bp, Glycine max
gagatgatgagtactgggttgagagaggggggggaggaatatcctatgtattgtcatgattgaagacatctaagctactagcttaag

SEQ ID NO: 291332 - DNA, 422 bp, Glycine max
tatgcttttctttatattgtcacacagatttcatattcttaatggctgctgttttttcagacacttcctatttttcttgatggccttgttactgcatggggcgctatcctaatttctgtgacattaattcttttgtttggtgaggtgagaaagttctgtccttatatgattttaagtataatacattcatgtcacagattaagtgcttgtgttgtttgtttagaggttggaacctggaacaaaaatctggtggcacagcacccgttttgtttggttcacgttttttccatttgtgaaagacattttttgttaattagaatcaattccagttaaagtgggaaccagtagcttctcattcctctaatgttatgtctggcaataaaaaatgttcagatgctattatcgatcaatgtaatgaatat

SEQ ID NO: 291333 - DNA, 327 bp, Glycine max
tcatcctctactccaaaatgtattgaatgcaatcaacctggacatctgagggttgattgcccaattttcaagaatagaatagacaaatctgaaaggaaagcttttaatgaaaagaaagctaagaaagccctactctacatgggatgacaatattatggactcatctgaagattcagaaaacgaaggtgtaaccctactctgatggccagattttgaaagcatgaaaggtacatttttgatacaactatcatttattgagatttcagatgctttgtgattacatataatcagcaactgaaaatggttcatttctaaaaacttttattt

SEQ ID NO: 291334 - DNA, 416 bp, Glycine max
  unsure (1)..(416): unsure at all n locations
nttgtcactccacccatatttggccttcacattaatttaacttaacaccaccgacaacagcgtcaatgaattgttgcaccttggatacaaaggcttctttgaatcactttgtaatgtatcatacataggggcatgtgcttgatgaaaagactcttgtccaaggtcacgaatcatatcttccaagcgatcttccatttctacatcaaacggttcagattggggcccactttgcatgtttgtcatttcaccatgccatatccacgtcatataactcctcttaattccatcacacaacagatggtctcatatgtcgttgaatttttccgtctcccgttcaaaaaatttatgcacggacaaaaaaacttcccattttcattcggtcgacttttttctgaagcaaattgtaggaactgttc

SEQ ID NO: 291335 - DNA, 420 bp, Glycine max
tgtagtcaaattgaagaccctattttgcgtatcacttctccttttatgcttcttttgcacattgtttatccttcgcactcgttagaggtggcctagctgtcaacgccaaagcgagtttatgtagttgctatgtttttccttctcatttgtcaaacacaaaacttgtcactccctttatttctcctattgctacctccattgctttggctgccacccgtcaccacccactgtgacccacttctattgtttctggggcatctcatttgccgcgataaagtttgctttctatatgataaagatagatccttgaaaatgttcgcatggaacttatatatatgctaaacaatgtacattttcttttctatcccatcctatcattcatttctcttgaactaccatatgttcgtttttgttgagtgg

SEQ ID NO: 291336 - DNA, 343 bp, Glycine max
  unsure (1)..(343): unsure at all n locations
tgcatgtatgcttatgatttggatgtttaagtgcagcaatttaaacaggtgttatcgtgttcaatttttacttaaacgcttacggcaccccattaattgagaaagatggctccggattcagtgngcaaaattgacagtgtatgttcttaagaagtaaaaacacaacacaggagatntagatgcanatcattaatccaatatttattaatgttgcggtcattggttacaaaggattttatgactatgaaaatcccaatgagtccttggagaacaaacatgtattgagccttccagctgccccaggtacaatgcataatatcatttgacgatatcgaaattcaca

SEQ ID NO: 291337 - DNA, 438 bp, Glycine max
ttgagccaaaatcctaactcaccataaaccttgactcagggtgagaatgtttatccttaccctcggaagcaaaaaataagagaaggaaaatttccaatcaaagaaaaaaaaaagagaaggaaaatttccaatcaaagagaaagcgaaaaaaaaaaagagagaaggaaaatttccaatcaaaggaaaaaagagaggaaaggaaattcccaatcaaagagtgggagaaagcgaaaagaaaagaaagaaaattcccaaccaaagagtgggagaaagtaaaaggaaggaaagaaagctcctgatcaaggattgaaagaaatcacaagatatgtgcagaaaggtctttggaccggacaatatctgtacaatacagaattgtcaccaaatgaacaaaaaaaaaagggaaaggaaaccatgacctgaaagtggtcttcttccttt

SEQ ID NO: 291338 - DNA, 346 bp, Glycine max
tcgattacattgttcttgaatagttctccaatctttgggaagaacactttaatcaatcaaaatggtaataatcaattacttctttgaaataattgattacattgtatatttaattgattacaggcaggtattacgagctggtataagctagaataacattattagataatatgttctttacatcggttatttatgactttcaacatcgtgttttaaatcgatgttgaaagtaccgacgttgataggattattgttaacatcggtttcttaataactgatgttaacgaaaattaccacatcgatatataataaccgatgtgctatatgaatacaccaaaaatgttat

SEQ ID NO: 291339 - DNA, 414 bp, Glycine max
tggtaatcagagcacaagagcttcaagtatgtgcttcttaaacctccattaacttttttgctttaccttctcttccattgatgattcttcattgttatccatgtatctcctcacatgtcttgtgataaatgttgttaacatgattctttacagtttccaccgattaaacttgctatagaagctaaaattgattttctatggttcaaatttcttgttcttgttcttgaaccatgaattgcgttgagtttacgttcccttgagttttgtcttgtaattttttgtggctgaaaccaagaaccataaatacttacaaaaatattagagtacaagataacctcaaaaatctagagtgactggttcacctattgtagttttgtcatacaagtcatgtctagtcatgaaacttgtcacata

SEQ ID NO: 291340 - DNA, 332 bp, Glycine max
cctcataactttaacgaaatatcatcacttaattatatatgtctttcatttataaaattcaaaattaacatcttattttaaaaaaaaaaatttagtaccactagtactctaatcaaattgtgatgttctttgtctaatattcactttggtcttatataataaataaatatttcgaatgtataaatatataatctgaatcatataaataaatatttgaaacatcaaatacattgagaaaacggtgatttagaattataaaagattaaatgttgatttttttcttagacatttcatcatataaactctgagaactatcataaaatacctctaaa

SEQ ID NO: 291341 - DNA, 427 bp, Glycine max
  unsure (1)..(427): unsure at all n locations
tcaacattcttagtctntacctgcttaactaacactttactcttcacgcctttgttaatctagaattgtgaccttttgttagttctttcaccttttcattttaatagttaatatgctttattctgtttctcagatagatcaactagtcgccagatccaaagaaagtataagaagatcgttcataacaagccatatgtatatgtgttaaggttttctttccagttttgcagtctgtctttttctttctcaagcttgtgaatcaagtttgttctgtgcgactatgtactattgcttttatttatttatttattagtaatgataaggaacctaacatgcagattgaggtgatgcacattgcacaagatctcgtcgacataagacactaattcttttcctttatttatagaaaagtcgaattcgatgatct

SEQ ID NO: 291342 - DNA, 316 bp, Glycine max
ctcacaaatcactctacagtatataaacctatttgcacttaactacatatacttatggtccttctaacaggaatgcaagctctgttggatctcatttttgcagttgcggagtctgtctcacaagctgcaaaatatcttgtgtatttgatatagtgctataagtatgactttctgctctatgatgtaattgagcatgtgaaacctcattagttactttgattatgacattcaggacttacacatttttattcagagacatccttttgggtgagaaatatctttgcctgccatcacatgaatagttcgttttactgct

SEQ ID NO: 291343 - DNA, 415 bp, Glycine max
tgtacaagccagaatctgaaagcaatgggttgcattgctgatcattgagcactttctcagctgagatgttttggtgaacaagagcttgtttctttgctatgtatgcatgtaaatatgctatacctggttaagaaaacaaggtttcagtatgcacatgaagattggaaaccatgagaatatgaattcaaatgaatgcaaattgatcacagcaatgttgaaggaaatttaatctacaattaggcaagaggtttgtcattaagccagcaataaaaaaaagaaaccaagaatatgtttatctatagatagaaatagaataaaatataatgtgtgacaaaaataatataatatatatatactatgtaagtggtgttggatctcttgaagcaccatgataacagtgagataaagatgctct

SEQ ID NO: 291344 - DNA, 221 bp, Glycine max
cgtccgccggacgtttcaaccggggactacagggttttgtgcgcctcgaggagcgcaactcagcgcaactaaccgctgggccaggagcttgcccacgcgccgtcacgcaaccatttcgtgcgcgccatacgccggcgcgtgaccaccacgcgccggccttcccttgccggaaacgcgcgcgtttgctttcggccgtctcgtcgggctctgctgagtccata

SEQ ID NO: 291345 - DNA, 421 bp, Glycine max
  unsure (1)..(421): unsure at all n locations
aactcagcttgnatgaggaagtgtagagggtgaaacttcctgcttttattcgttgaccataaagtggcacctggagatatgtcgcgggggtcaagagaccttggggacgtcaagtggggtgctattgcccaaaaccaagcttgaccaattccaacccaacccgggcatattcagtcagtgagaacttgtgatgtacctaatcaggcgagctcctggcagtcaacagataaaaggaacaaagaccacaaagcaaggaggcttgtgtggtggctggccaggagtgaatattgtgtgacatatgggttatggcctctgtgaatcgattaccaacggtgggtaatcgattacaaggcttaaaaatgaacacatgagactaagatggtctctggtaatcgattaccaaggggtgtaaccgattacc

SEQ ID NO: 291346 - DNA, 360 bp, Glycine max
  unsure (1)..(360): unsure at all n locations
atagagagaagcttatatatatttttgtccatgtgaaccaagtgaattctaattttagttcctaaataattttttttcatctctctgatctttgaaatcactatttgtacaaatgaattttaattttaattcctataagaaaatttcctttgatctttatctgtcaaaaatttgaaatcactattatttgtccttaacatttantttagaataggaaaataacatttattttgtgatcttgaattatttctagagatgtacatgatgtcttatatatagacacctgggagtgcatatggatagctctgacattgataaacattgccgtaatgagtgctatgtatactaggacaaacaatg

SEQ ID NO: 291347 - DNA, 431 bp, Glycine max
gaatactccagctgacctaaggttgagatctcacttactaaggttaagatcctatatatcaaagatatggaagaaggagtctgcaccaacaaaccacttctgttcagagggataaagtatgattactggaatgagtgtatgatagcccacttagaattgattcatgtaaatctatgggacatggtggaaaacaaagattatattccacatgatgactagctgaatgagattcctagaggccagtggacgagcaacataagctcaaatttttgctaaactccaaagctcagaatatgatgtcgtgcattctttcaaaagaagaatacaccaaggtacccaatttcagaagtgccaaacagatgtggggcaatttggctgtaacatacgaaggcacatcataggtaaagaggaacaaactcaatctcctcact

SEQ ID NO: 291348 - DNA, 199 bp, Glycine max
ggttaagctcaacagctgggctgagcgcatatccatcgctaagcgcagttctagcgcgcttagtgcggaagattatttggcagagcattagcatcaaatccacacactaagtgcgagatcagtgcgctaagcgtagcaggtgccttcagccaggctaagctcgagactagcgctaagcccaatattacttactcgcgct

SEQ ID NO: 291349 - DNA, 414 bp, Glycine max
  unsure (1)..(414): unsure at all n locations
tgggaggatagatggngacccggtgttgagagaaactatgatatgggctacgtgagaggacgtgagctcacatggaggtgggcaacaagagatagtgaggttatgcgcgctttgcggatgtggaaaacttgtatggaccatcagaccgaccgccacctagtaccacatgtgatgggtaccccataatcctacaagctcgagatgaagaagtgtataacggtgaaacttcctgctgttattcattgaccacagagtggtacctggagatatgtcgcggaggtcaggagaccttgcggatgtcaagtggggtgctattgcccaaaaccaagcttgaccaatcccgacccaacccgggcatagacggacagtgagaacctgtgaatgacctaaacaggcgatctcctggcagtcaac

SEQ ID NO: 291350 - DNA, 328 bp, Glycine max
  unsure (1)..(328): unsure at all n locations
ggccaacaggtttagccttctcaatgtattctgaacaaaatttaatggcttcttctgcaacgtacctctcaacaatagatgcttctggacgatatagattctttttatacccttttaagatcttcatgtatcgctcaaccgggtacatccaccgtagataaacaggaccacaacatttgatttctctgacctgatgcacaatcaagtgaatcatgatgtcaatgaaagcaaggggaanatacatctccaactggcacagtataattggcagctcattntncaactcatcanacttcacaggatcaatgactgtgctacatatagcatg

SEQ ID NO: 291351 - DNA, 425 bp, Glycine max
  unsure (1)..(425): unsure at all n locations
tgaagaggatgctctaatggagganaataaagagagaaggggggagcacgaaattgaaggaataaaagaaggaaagaagtggaactttgaagtgtatctcataagactttcattcatcaaagttacaacaagtgttacacatgcttctatttatagactaggtagcttccttgagaagctttcttaagaaaacttccttgagaagctttcttaagaaaacttccttgagaagcttctttgagaaaacttccttgagaagctatagtttagctacacacacccatctaaaaactaagctcacctccttgagaagcttccttgagaagctagagcttagctacacacacccatctaaaaactaagctcacctccttgagaagcttccttgagaagctagagcttagctacacacccctataatagct

SEQ ID NO: 291352 - DNA, 323 bp, Glycine max
gctcttggagggaatggaagagggatatgctgcttctctttagattcacctgcatataaattgttaggtaacttactctttaaattgttgtcatcatctttctctggagtacagtgaggttgggcacgttcatttgcggatgacgaagatgctactggttgaggtccttgacactgctttcctgaccttaatgtaatggcactcacatttttgagattttggacagattgagaacgtaatctatcagaaatctgggactgttgctgatctaactgtgtagccaactatcccatctattagttaagctctaatggaggctttgg

SEQ ID NO: 291353 - DNA, 422 bp, Glycine max
ttgcgaaatgcttgtcgctggagttgtctcgatcaattgcccttattcttttagacgggtggttcctaagctcttgaccttgacttgatagaacctctttttaagcgaaggcgcttgactcgatcccatgtttactaaagtgaaacaaaacccagtgcgaatcaaaactccgacatctatcatgggtggaatggatgaatgcatggagaaatgtatatgacacagatgcaatttgtgaatacgggagcccgggaaattgtccccttcttagatacaacatttgggcagcatggcgcccgacatatgtatttaagaaggtgacacgaaccttccgtcggtttgacaaagtgaggggatcaagatggaatctatgcatgatgcatatgtgaaaggcacaacacggtgatgtacatagcacgaca

SEQ ID NO: 291354 - DNA, 333 bp, Glycine max
ctcaaagattcagcctccatagaagccccacaagcaagcttccatcatagtcccttattttttagctaatcaaacgcaccctaactctctatgtgaaacataataccgcaacccttgacatctagaactttgcaaacacgcacagtggcaagaggctgaagaagttgttgcagttgattttgatgtcgtccatgatgtagtggaggtcctccaacaagatgtcagtttcgagatatcgaagcatgttgtcaagcttgtcggcaaagatcttgtcattgtggttggtgttgaagaatatctctaactcatttatgacttcgaagtacgaaaagg

SEQ ID NO: 291355 - DNA, 418 bp, Glycine max
  unsure (1)..(418): unsure at all n locations
tcttgtatttaaggaaaagttaatatggtcatgtttggcagcttcttccactttcttccttcccacttcccttcacgtacttattctctttaatatgattatgaactcactttggtttggttgtgtttaatttagataaaagaattagagaaatagagtagaagaaaatataagagaaataatttttaaaaaataacagaataaaaaaattattatctattttaagagaaatggatgagatataataccgtgtcaaagaaaatcaatattttttctaaaatattgattttatttcctaaaaagttaattntttgacaaacaaaaaataatttttactgtttgtaaagaccaaatttacaaacctaactctcttctaaatcgtgctacataccaaccggccctcaattgcatctatagt

SEQ ID NO: 291356 - DNA, 317 bp, Glycine max
  unsure (1)..(317): unsure at all n locations
tgccattgaggcatttcaccgaacacgtggggggcgcgcattcatacatgaacaaaaggggaatgggggcaatgtgacatgccccatcattttagaacactccttaggcctaaggccatcccctacaactcccttattcaacaaaacaagcacaaattcaaggatgaattggatcttggattcaagcaaatacaatacaatntgcacaatgttggccaccccattatggtatcaagccatagccaagaagccagtgtcgaattgctnttttacttcctctttgatttttaggacatccctggcttcatccttcaatg

SEQ ID NO: 291357 - DNA, 419 bp, Glycine max
  unsure (1)..(419): unsure at all n locations
nttctttgtgggttgatggtgttttgtcacgtagaatggcgtgatcactggttgacattctcaattagcttagttgcttcttcttgggtctttagctttattttccctgctgcagaaacatctaacagttacttggtttgtggtctcagcccatctatgaacatattcaattggattggctctgaaatcccatgggtgggagttcttctcaataaacctctgaacctctcgaatgcttcactcagagattcatcacggaactgatgaaatgaagagattgcagctttccctttcgcagtcttggactctggaaagtatttctttagaaacttttcaacaacttcttcccaggttttcagactgttacccttaaacaagtgaagccacctcttggtctctcctaccaatgaaaatgagaa

SEQ ID NO: 291358 - DNA, 143 bp, Glycine max
  unsure (1)..(143): unsure at all n locations
ccatggtgaaacggtgcgagaagttgccatttggcactttaaacaaaactgagatctccccaggattggtggacaaaaactatcttataaccctatggataggaagttccaccaccgcccatttcatattgttaatctgcgcn

SEQ ID NO: 291359 - DNA, 458 bp, Glycine max
  unsure (1)..(458): unsure at all n locations
tccagtttaacagttgatctagttttcaagtagtttaaattccagacccatttcataaaccagtttttaaattggatttaaaaccggttttccttttttttcttattttggtttcatatatttaaaattttaatacccatcccatccccgttgtgatttatcgagttcgataaattntaatttacttttatattttgacataattaagttctgcgatactctttntatagttntaatttaattntatattntgaaataagttatttattaagtttttaattataatataattcanacaatatataaaatgtaatgaataacagagaaaggaaagataaaaattaagaactcattatgnttttagtaatatattttcaaantataacatananctattatattattatatatatatatatantannaattatataatatatatatatatatatatttat

SEQ ID NO: 291360 - DNA, 445 bp, Glycine max
  unsure (1)..(445): unsure at all n locations
gaatactcacgcttctccttcttttccctataaataggggaaggagggtttaacaaaaatgttcaaccctcctggtatctgagaatcacttaaaattagtgagaaaaattgtttccgtgaagaaaatccaagccgaggcgcttccataacgcttctgagacgtttccgtgggtgatttcgcgaagattttccgtcgttcttcgtcgttcttcgttcgttcttcgatcttcaaccggtatgttcccgaaatcgaacatttcaattcattctatgtacccttagtggtccccacttgtttggcatgcttttattttcatttcatttactttctgtacccccttttgacctgctttagtcgtttatttaagtcattttctcgcctaatcaaaaaataaaataaatntccaccgatcttttgaattgtaacatattttaatttctggta

SEQ ID NO: 291361 - DNA, 290 bp, Glycine max
ctcagtagccattccccttaatcgatacaaaaaaaaaatatatatattaataacaaaactatcttatatagcttggttgtcatcaaagagaaattgtgtttttacagttaagaaatgttacttttatgtttttaatttttaagaaagttagtttttgacatgccttactatcaatactcatggctctcattttaacaaaataaaaatttgaattatgtaaaacaagataacaaagcctgtgactttccatgcttcaagttcataaaactcctgcatgaactaggaatgcg

SEQ ID NO: 291362 - DNA, 435 bp, Glycine max
  unsure (1)..(435): unsure at all n locations
taggtctatccactaggattgaaagatggatgtttcttgatttgtttgataaattaagtagtcaatcttatatatggtgtttgtaaagttggactcattaagaaaggttaatagaattatttgattacaaatagacaattatttataacttttaaagtaataataataggatttaattatcattttggtcttgaaatttgattgatttttaaaatttttaacataataaattgatactttagaataattnttattatgacaattttaaaatacaaattcaaacaattaaaaagtaaaaattaatttatttcaactaaaaatcataaaaaatgtcaatttattataccaaagataaaaaagtaatttataaaaaataagggcaaaaaaatatacaaaccccaaattcaaggacttatgtctaataataataaaaac

SEQ ID NO: 291363 - DNA, 199 bp, Glycine max
tggggggccaaagagggaccaactcccttatttgcgtgggctcattgcctccttccagcctggaaacacgctggccatctgcctattgagtggcaaccgaactcttgggtttccgggcgttgaaaaattatgtggacactatattaattttggcattttctactttcctttcaggtgagcacagcctttaggacatagg

SEQ ID NO: 291364 - DNA, 432 bp, Glycine max
  unsure (1)..(432): unsure at all n locations
ntgaggaaattcaaacgacaataaatttttactcgtatgtctgattgagtttcgtaatatatcgagacgctcggaattgaatgttgaaggtctgagcaaattcaaacgacaataactttttactcggatgtctaatttagtcgtataatataacgagacgctcgaatttgaatgttgaagctctgagcaaattcaaacgacaataacattttactcggatgtctgattgagtcccgtaatatatcgagacactcgtaattgaatattgaagctctgagccaattcaaacgacaataactttttactcggatgtctgatatagtcccgtaatatatcgagacactcgtaattgaatattgaagctctgagccaattcaaacgacaataactttttactcggatgtctgatatagtcccgtaatatatcgagac

SEQ ID NO: 291365 - DNA, 436 bp, Glycine max
  unsure (1)..(436): unsure at all n locations
gaatttccatggataagaagcttgaagaggatgctttaatggaggaaaagaaagagagaaggggggagaacgaaattgaaggactaaaagagggagagaagtggaactttgaagtgtatctcataagactntcattcatcaaagttacaacaagtgttatacatgcttctatttatagactagatagcttccttgataagctntcatgagaaaacttccttgagaagcttctttgtgaaaacttccttgaaaagctagagtntagctaagcacacccatctaaaaactaagatcacctccttgagaggcttncttgagaagctcgagcttagcacacatccccctctataactatgctcacctctcaagagagaggtagagctatctcacaccctatatactaacgcaccccctacgatactgaaatacaaaaaag

SEQ ID NO: 291366 - DNA, 442 bp, Glycine max
  unsure (1)..(442): unsure at all n locations
aaactcagctngcttctacactatggtctggacatgattaatgtattatgtatattgttccctttctaatcaatgctaagtatttattctatgtacattcgaaggtggtgcatgatgtggctgtgcagcatctgcctgtaatagtaactcatcatttattaagatatgtatgccatggtgatcaacatttattaaagtgtcaagttttgataacagcattactttgtaaagtaaagaatgaggatatgagtgatgtcactgtgtaacgacccgcctcgtcgctacgatatcaccattctaaatcgggattatttcaaattttaaatgaaaactcagttaatttgcttataaaaaaaatgaaagtaatttttgtctcaacatacattcaccanacaacacacattacttaagtggatacatatatattagtatagtaactcag

SEQ ID NO: 291367 - DNA, 244 bp, Glycine max
ggtttacttggaccttgtttttgaaaaccataaatgaagctttggatgcttttcacaaacatgccaaggtgattcaaaatgaaaagggtctcaacattgtttcaattatgaagatgaatctcaaaataagtctttagaacacttttgtgaagaaaatggaattcaccaccattttcctgccccaagaacaccttaacataatggtgttgtggagaggaaaaatacatcccttgaagaatgtgca

SEQ ID NO: 291368 - DNA, 424 bp, Glycine max
  unsure (1)..(424): unsure at all n locations
actcaagcttagagaggaagcttcaatggtggaaaagaatgagattgagagcggtgggagcatgaaattgaatgagaaaaagagggagagaaggtgaactttgaagtgtgtctcacaagtttcacatttatcaaagttacaacaagtgttacacatgcttctatttatagcctaggtagcttccttaagaaacttccttgagaaacttccttgagaaacttccttgagaagcttctttgagacacacccctctaatagttaagctcacctctttgagaaaaaaagctagagcttaactacgcacacccctctaatagctaattagctcgcccccatgccanaatacatgaaaatacaaaaaggttcctgctacaaagactactcagaatgccctgaaatacaagggttaaaaccctgtactact

SEQ ID NO: 291369 - DNA, 287 bp, Glycine max
aaagtgccttggataagaagcttatagaggaagcttcaatggaagaaaagacagagagagagagagggaaagagagaggggggagcacgaaattgaaggaagacaaaagggagagaagttgaactctgaagtgtgtctcacaagactctcattcatcaaagctacaaatcgtgttacacatgctcttatctttagcctaagaagcttccttgagatacttctttgagaagcttccttaagaagcttccttgagaagctagatcttagctatacacatcccctaatac

SEQ ID NO: 291370 - DNA, 416 bp, Glycine max
taatggaccgattcaaggcatgatcctatatgtcatgtgccaattgacccgaccgggacatgtagatcccactatactgcgttattagtgttttgtatgttgaatccaataaatcaatccgatcatattctaattatattcttatcatatcttaataatatcttatttccgaaatcaatgaagaaatttttttattagatcttcccatgattaaagaattactgtataatctaccctcactataaaaaaagagagatctaacggcgattagttttggccttacccacaattttaacctccgttaaacacatttcctgcggttctcttgtcattagaaaagcttccatgacaaacgctctacactttactagcggcttttaccagtcctcgaaggcgcaaatattccctccattttt

SEQ ID NO: 291371 - DNA, 292 bp, Glycine max
tcccataaacactcatttgataaagtctagaaagagcgttgattggttcaggaagtgatttcagttctgcgaaagatgacacgaggaaattgtttatgtatggagagaccaatgatccgctatcgggaactgtctccagcttcaaacacgcgtgtatggataaactctcaagacgcatgagactctgccatgatgaacactgcatgacgctaatatgtttaagattcttgcaacccagaatgtataagcttttgtaaacagggaatggacacggagaagatgcatgagtaca

SEQ ID NO: 291372 - DNA, 424 bp, Glycine max
tagctaacattgaggtcctctcatcattatccaccttagagttgaatgctacacggacattgttggtcacacagacactctttcttaatagatcaaaagtatgtctagcctatctgcgttagggtctatcatcagataataaccaaattgtagcttcagaattcacctttctcaatccctcaattgctttgttaaaaagaattttgctgtaagccatgacacatttccaaaagtgagttgtcagcaatcaagatttgatccttttttgaaatgattaagcatatgattgacacaaaacctgccctcgaaaacagaaacgataaagtatataaacacattcaatttaattaagcagactggaatgaaaaataaaaatgtttgaacaataaagtctgaaattgctctcaattaaaatgaaatgata

SEQ ID NO: 291373 - DNA, 397 bp, Glycine max
  unsure (1)..(397): unsure at all n locations
tttaatctaacaattactattctaccagatttggtcaagtatatttcactcgtttgctcttagaaaatgtttgataaaaaagaagctgagttttctgagaattttgaattgaaaatagtttctcatgtttgatatttaataaaaaaaaataagattcctgataaataatgttcatcgggaatatnttttaacaatcttcccacaaaactttctaacagagaaggtgtcgtaaataattaagataactattataaatatcacgtaactcttccattctataaaattatctaaatatcttatgaccactaataaatctactattctagggattgatttcaccttctatgtccacaaaaaactattctccaccaactatgacactatccttctttcttgt

SEQ ID NO: 291374 - DNA, 433 bp, Glycine max
  unsure (1)..(433): unsure at all n locations
aactcaagcttaccaaggcacaactttaccactatgtttagctcattctcaatcatatagataaaggtgatnttatttgggaaaactcaagtcccgcataggctagagatagtgcaaagatagagtatataagtgagggacaacccttatcttatgagctagcttttggggttaagttagacccaaactcacattctaatagattataaaaaatttaaagcatatttcataattggccctttataatttaaagtgtgtcatgataaagacatgatataagttatttcggtattaaaagattctatacttctttctttctgatgctattattcttatgatcccctggacacccaaaaccaaaacttctagatccattactggtatctaccatatggattatatgatactttccaaaatgaacacattgtagata

SEQ ID NO: 291375 - DNA, 286 bp, Glycine max
cattttgaaacaatgggacatgccacattgtccccgttctcttgctattgttacctaaacgcgcgcccaccaagtgttctgtgaaatgcctcaatggcattagcgcgtgacttttgtaaggaaacaacccatggggcattttggtttgtacatattttctttttttttgggacatgtattcattcccgaaaaaggctatagtaattgccccacatatatcccaagcctatgaaccgaagttttatgctaaagaacacataggaggtgcatgttgggtaaagtatcc

SEQ ID NO: 291376 - DNA, 311 bp, Glycine max
actcagcttcatgccacacttggcataggcatgttattactatcttgttgcatggcaccggcgcggggcggtgtcgtggagtactcccccgctctctaaccccgaatcttaccctacttctcgcccccgctttttgtggtgggggtatcattttgacccatctccgtttcccggcttcgcgcggagacatgtgaaaacccgctgtatattagaaaaaggcaaagattatagaaaaaacctataattttttgttatctctattatacaacaataataaatttaatgtttaattgtaagtataaaacatgact

SEQ ID NO: 291377 - DNA, 301 bp, Glycine max
ctctgatggtagtcatctttacaactggagagaagatctttgtgaaatcaattccttgtttctgctgaaaccctttcaccacaagtctctccttgtatcttcttctaccgtcagattcttcctttagcctatagacccacctattctgaacgctttctttccttctggaaatttagttaaagaccacgttctattcttctgaagggatgtcatctcatctttcatcgctagctcccacttaatagtgtcattcccctgtgtaggctcactgaaacattctggctcaccagcatcagttaac

SEQ ID NO: 291378 - DNA, 415 bp, Glycine max
  unsure (1)..(415): unsure at all n locations
tgttaaagaacttaggaaaaatcaagtacaagcttgttcgcacatcgttcacgtgtatgatatccactcgacaaggtttgaagtagaggagaccttcaatcctataacgcaacgtggcggacaaaagtgggcagttaacttgaatgaccattattgtcaatgcggaaggaattttgcgcttcactatccatgttcacacattattgcagcttgtggttatgtgagcataaactactaccaatatattgttggatcgagtggcctcagaataattaaaaaggggggttgaattaattattcctaaacatttaccaattaaaaaattactctnttaaggcttttactaaatttttaagagaatgaggagtagaagagaatcttaacagaaagtaaaagcggaaattaaatgcacaac

SEQ ID NO: 291379 - DNA, 501 bp, Glycine max
tacagtctccgatactcacgaaaccctgaacttgcggcataacacagatgcggaccatggttaaatccttgctcctatcctttgtacttgcaaggacttacgatcaatacattccgtgaacaattttacatactaactattaaccaatacaccccggaacagttctacaatgtagagggactcctataaaaaatataggacactagggaggactgtcttttgatagagaaaaatccctaaggaaaagaaagttccttttcactttctgaccccaggggtaaaatagtaatccccccttctatcttttctacgagagacgacaggcacgaattgcaagttctattcatctctctgataagttactgaagtctatgtgccctcgacttgtgagatccaaaagctgaactcatgtgaacttccgatgcggtaggactgttactccgaagtaaaatacctttcacattataataacatacgctacgcgcctattaaatgtagccg

SEQ ID NO: 291380 - DNA, 325 bp, Glycine max
tgttgtctgccatattatactcaggatgtgttaattatgttatatgcctctgcaagcaatgcaactaattcaagacgacggccaatcaggtgaaaaaaggactacagaaggccgacgttgtaatcactgagattctgatccctgagaaggtatgttaagaaagaagatataactgtagatcatgtaatgttggttcacactttcactgacccttggaagactgtttatgtcagtgatctattgttgaaattgctagggattgcgtacttagcaccgctttgtttactactcccttctatccacacgggaaatcgaatgtaacctt

SEQ ID NO: 291381 - DNA, 385 bp, Glycine max
tgaagccccttacagacccttctgcttctgccctagcctcttcccacatgcccatgtggtcgcttcttctccaacaaccttcatttccagcgacccggaaactcaagtgaccagcccactccggcaatcccacctgagattaggttttcttttctttttcagtttttgagcttatacatacatatatatatatatattgaaagagttacactctaaccacatgaaccaaattgacaaaaaaaatgtctctttggtcctgagacctatggcacacccaatggccaatacccatcaaaaacgccaataaatgattgttcatggagaaacacaatagaacagtgtcaaaagatgtggagccaattctgagccacacatgacatgcata

SEQ ID NO: 291382 - DNA, 416 bp, Glycine max
  unsure (1)..(416): unsure at all n locations
ntataagcgcggctctgggagacgaaggtcaagtggtcgcgatatacgaggatgatgttccgagtacattggatttggtacgaccatgccctcctgatttccagctgggaaattggcgagtggaggaacgccccaacatttacgcagcgagcataatgtaaacctttacggttttaaaagctctatagttgggcctaggctttagagtttttcttttggttaaggctttgtgtattttgttttttttttaaatttataatacaaggatctttcttcatctgttcctacgtctctacccattctcatccatttgcatgtttacttcttttctgaaacggcagatccgatgacgagtcccccgaaggtactaatacctgngacccgcctatcaacttcgagcaagaaatgaatcaaac

SEQ ID NO: 291383 - DNA, 427 bp, Glycine max
  unsure (1)..(427): unsure at all n locations
ccaatttcataagctattgatcgagcccactgcaaaatatcatctcaggtagcaaacacctacaatgcaagccacataattttagtcttcaaagggacattcattttattaatttaataacaataaatcacattattacctaagaaatattgaacgtataagaataatcaacatgttcttcttcattcacaccaactntgttttcattntcatcattcatatcaacttcttcagacattatactttcaaacaaccattgatctttgtccatcttaacaacacattcaanatttcaacatcacagacaaacaacacctaaccgcaccatanatatatgatcacacaaagccctacgtaatttttactgcataccatttataaacatttaaatgatacnctattattaaaaccatacatcacttttatc

SEQ ID NO: 291384 - DNA, 425 bp, Glycine max
  unsure (1)..(425): unsure at all n locations
gaggctttgcatatataacttatacacactcattaatatgaccagattaattacaaagtgtttaactatcttagctgagaatgaagggggtatcttattgaccaaaaataacgtaatgcttatcttcctagctaggccctaagtccaaattctaagatggtatcaaagttatcctagatccattgctgggccatctacattgccatgctctaagccgatgccttgggcatgatgagagagttctaaacccaccttaattgcggtcactcgttacctactctagctgtggcctttttggggtctaccttaattgtagcctcaagggtggcgtttactcccacattgattacagatattccttanataaaataagcgttacaagtgcgtgaaaccctcactcttgagctaactattgtggtcgagtc

SEQ ID NO: 291385 - DNA, 306 bp, Glycine max
  unsure (1)..(306): unsure at all n locations
gggatcgactccaaaattttactggaagtctatagtgcataagcctacattgtgaccgttgggatcgactagcaaacatccagaactcattctgtactactctttccacagccaaccacacacaagcattttctgcaccaagctaaaattctgctgcacttattttgacagcaaaattctgcataagtgcagatttcgaatatcacacttcctctcatccaatcttgttcaaatcgaatcctacaagtcccaaatcatgtatcanacatgtctaaaccaaagccaaacttcanaccacagtaacac

SEQ ID NO: 291386 - DNA, 425 bp, Glycine max
gcttcctccagaagcttcctcgtggcttgtttgagaagctttctcaagaggcttctttgagaagctagatccttatctatccacacccctctattaactaaatgaaattccttaaaaataattacggatgaaaataacacaacaaataatcaaacatcaaacataattactaataatatatatatatatatatatatcagggtgttacagacagccatattctacttgccatatacaaacaaaacacatattagatcatatcaaaactcaagtcacactaacaacataaccaatacaaacaaaaattcaattgttagttaattctagtggcacataaagaccataataaaatatataattaataggatagaagctccactcaaaacctttttcaatcttcaacatcttgagacacaacttcattt

SEQ ID NO: 291387 - DNA, 283 bp, Glycine max
caataaggcttgcaaggtgcatggcattgggactgtcagactgagaatgtttgacaacagggaaatgctgctgcaagatgtgaggtatgttccagaactcaagataaaccttatctctataagcatgtttgaccttataggatacactacaaaggttgaggatgggatgatgaaggtgtccactggagcctcaatcattgctaagggaagccgaagcaatgggttgtacatcttggaaagatccacagttattggacaagcattctgttgcaagtcaaacaat

SEQ ID NO: 291388 - DNA, 417 bp, Glycine max
  unsure (1)..(417): unsure at all n locations
tgactatatatattctcttatatcaagtgaaagttgtcatgctgatttcaatacataatgggacaattagtagtcatttagtgtacactgtatagcatctttaagattttccacagcttatgttataaaggaatctttcttcggacagaatttgtgattaatagtttgatactattactcatctactttagttttctttatattttaaaaattaaaataaataatttaccatctttcttgattttgtctgattgtatcttcttgctttccaccgttacttttcaagaagcatagtgtcatgaaaattgtatgaaggcagccatttgcgattgatagtttgatactattgctcatcttctactttagatttctttatatgntaaaaattaaaataaataatctatcatctttcttgat

SEQ ID NO: 291389 - DNA, 370 bp, Glycine max
atgttttagacctagtaattgtcttagaatgggagctattctaagatgatttcgttgtcatagtcatcttatgtaacacccttattttttgtaaaataaattaaaacagattttatttaaaaataaatagggtttacgaaaataatgaggtttctgaattaaataaaaaggaggaataatttattaataaaaatggtttaagggaataataaattatttctagaaataaaactgttattattattaataaagtaataagtctttttaaatataataagaaatgagtatttcgtgaagttctcactataaaagaccttgcatttactacatcgccttctttttcttaatcttttctttcttcaaccttttc

SEQ ID NO: 291390 - DNA, 429 bp, Glycine max
  unsure (1)..(429): unsure at all n locations
tgacacattctggcattgtgcaccaggtgattcaaattcatgaattcaattattgcaactcagaacaatgcaacagcaaaaaggtttcccactgaggaaactgttgttgatggggaagacataattagcaagttgcatgaaagcattcttggtcacattctgtctttccttccaacaatggaatcagtccacactagtgtgttatcaaaaaggtgggttgatgcttggaaatccataactggcctacaatttaatgatactttgctttgttttgggaaaaagatgcaaaaagaacagtttgtgtgttttgtgaacatggtgtttcttcaccttgccaattcaagtatccacaatttctctctttgtttaacacgttatcagtatgattcaaccttgataagtgcatggatctcctttatctntaaaagg

SEQ ID NO: 291391 - DNA, 248 bp, Glycine max
ataaattattaccatgcatcaatatcctcaatacttctatgcactagacagaattcatctcctcattagttactactcctcacaacatcacccccatgcaatgcaagtcctcatatattgagtgattccttttgctaatgttgcttattgtctataacccacaaatataaaaattctatattgaacataagcacataatatataattggtatgtgagacgaagatggtaacattgtacatgcatacat

SEQ ID NO: 291392 - DNA, 339 bp, Glycine max
taataaagaggacaattatataagagacctcctcttttacaatattctcactttcatcaatagccctccttgtcctgtcttgcatcttcaactgttccttttatttcacttgtctgcttcgctttcaatacagacatcgatgcgcactcagaaattgttgaacattgttgtagatggaaactcacccttgagtcctattgtcccaaaattgctttagataatttcgaaaagactgtcacgtttgataattcttgctgcacatatattaataataccatgatctgctctatatcatatgcagtattaaccatcatatgcatgaccttaactatatatatc

SEQ ID NO: 291393 - DNA, 329 bp, Glycine max
  unsure (1)..(329): unsure at all n locations
tggttgtcgccttgaacttttccttgaccactcatgttctttcaagctccgctttcaaggcttgcacttcctcactctcctcaggggtttcagcctcttcctcacttgaaatctttagttgcgggagccaagttttccattgcgtccaagccttcaaccattgatgatatccaccaataacatcgttgctgctctttctaagctccttatcctttctttgcacggaattccatgcctttcggactctctgaagcactattgcattgnggtcactganacctcgtgcgatgaaaggcgtaatactctctaccgacggcactcctcttatg

SEQ ID NO: 291394 - DNA, 444 bp, Glycine max
acactccccaatactcaagcttcttagctagaaacttgtactgtgcctatagtgcatcttgtgaggaaagctctaataggcttctctttgtaggaatatgagtccgatcacgtaaaatagcatgatcactaacaaccatattctcaataagctccatagcttctttaggggtcttcaatttaatcttccctccagtagaagcatctaataactgcttggactgtggtctcaaaccatctataaaaatatttagctgaattggctcacagaatccatgagttggtgttttcctcagtaagctatggaatctctcaagtgctttactcaaagattcatctggaaattgatggaattacgagatagctgccttgccttcagctgtcttaaactcaagaaaatatttcttcaaaaatttctctacaacctcctcctaaggcttcaagc

SEQ ID NO: 291395 - DNA, 226 bp, Glycine max
ggagaaatgcctaaagggctgggatccttttcttcttcatatttctcccctatctatagcacaatacgggagatgcttgccgcccagctcgcccaggcgagctcagctcgcccaagcgagcagggttgcttcctccagaagcaaccgtcttctggaggaaccatttggagggcccagatgggcctgggtgctatttgcacccccatttctactaagttcaccccct

SEQ ID NO: 291396 - DNA, 427 bp, Glycine max
  unsure (1)..(427): unsure at all n locations
ntgctgatttagttttcacttacgaaaggatcgaaatgggtctgaaaagaagaaaatttaatcatcttgcttggacgaatgagaaaactggggcgaatgaaaaggatgagagtgaaggagaaacccatgctgtgactgtcattcctatacggccaagtttcccaccaacccaacaatgtcattactcagccaataacaaaccctctctttacccaccacccagttatccacgaaggccatccctaaatcaaccacaaagcctgtctaccgcacttccaatgacgaacaccacctttagcacaaaccaaaacaccaaccaagaaatgaattttgcagcgaanaagcttgtaggattcaccccanattccggtgtcatatgctaacttgctcccatatctactcgacaattcaatggttgccataaccc

SEQ ID NO: 291397 - DNA, 351 bp, Glycine max
  unsure (1)..(351): unsure at all n locations
ggagatggctaggtgtttgcttcatgaaaaagaattgccaaagagattttgggcggaagccgcaaatattgcagttttcatgcttaacagactgccaacaaaagctttgcaaaagaagacaccatttgaagcatggtatggctataaacctgagttgctcaatctgaagatatttgagtgcttgtgctttttcttacattcctcggggtaagaaggacaaactagacatgagagcagaacctggaacctttgaggctatagcttaatttcacaggcctacatgatctanttgccacatcatgacaagtattgtagcagaatatgagattctggactggatantggaactgg

SEQ ID NO: 291398 - DNA, 417 bp, Glycine max
tgctgaacaaactttgagattcttatgatcctatattatagaggatgctcatatactttggagagcaaaagggagttgtgtttttcgtttttatctttttcaagtgcaaggttaatcaggttccagagaagaaaaaaaggaaagagtcttaaagttgaacatgaacaaagctgttagtgtttatggccttttgggactttttgcaggtgttattttcagctcatgcatttgtgggactcccaggaattttaatgtggagaatgattccggtctaatggtcaaaattggtgagttcatttcagccttgtacaatctggtcataataattataccagcattatttcatctcacattacattcatcatatacaagcatgctaatatctttctatctgactgcagaaacatcactcaacaa

SEQ ID NO: 291399 - DNA, 161 bp, Glycine max
ttggtcagatgagaattgataatgactcacgctggaggaaccagatgaatatagaaaggcaatatgatgtttagaaggatcaccagcatggtggaacaatgctcatgatccttaatgcttcttttacctaaagctctcaaattctatgacaaaaactatat

SEQ ID NO: 291400 - DNA, 423 bp, Glycine max
  unsure (1)..(423): unsure at all n locations
taaagttgaaaaataatataaaagtcctaatacaggttcagcatgattccactcactagtacaaaactcacctactaaaatgtgtgctaaccagtgtatcatacagtggcctccattcaatagttagtgaaatctttttactatatttgttgagtagtctaactaataaatttccccatctaacctaataaacaaaaaatggcacaatcatttaagagcaagcagagacatatagagaacaagaaaactcagcatctcatctaagacaaaatgcagcagcacctaagcataatgcttattacgggacacatgaaatatctcaaggcccttctgaataaggttgtgaacatcctccaaagctacatcacttttttcctttatgaaattgcacaacacacatatnaagttagatttcaacccaac

SEQ ID NO: 291401 - DNA, 299 bp, Glycine max
  unsure (1)..(299): unsure at all n locations
atagacacagtgggatcaattaatgaagatgctgcactagatccagagaaaatgacgctggaggaagcagctacaaaggcacaagctgctttcaggggttatttggtatacaactctgttttattgaatactctactgattaaaaacacttcactgatgaaattgtatgtgtcctttagttctaaaacaaaattgaactgtaaatatgaaaaatatgttttaatctgtactgcanaagaatagtanatgagtggaattgattctctgctatgattcgcaattatgttaacatctgactt

SEQ ID NO: 291402 - DNA, 424 bp, Glycine max
taccgagaagaagaaccatcaacagcactgacccattcatcatgtaaagaagggtcttcctcctttcgtggggccacagcccttgtgtactcaacttccaatatcctttcctgtaattgatcattgaagacagttagctatgatttcctatgacatcataccaaaaggtaacaatggtttcacactatcaccataacaagcaaagcatttatttgtttgattgagatacacacgctcacgctatgaaagagtgcccttaatataaaaagaaattaaaaactaaaatgaatcattggaatccaatggacaaatcaaacactcctagactcctggttctactacttatccaagcacctatccagttcccaagttaaatttccattccatgaaacttcattcagaataactccagtccccattttct

SEQ ID NO: 291403 - DNA, 196 bp, Glycine max
gtgcccaatacctcgtaagatgtttaataccacacccaaaaggggtacacatgaaaacctagtaggatttaacaaataaaacggcaactaaagttcattaagtgaaataaacaagcgaaatcccaggaaactgaaacatatctaatctcccccataagccggattttagtcttgtacataaaaatgcccaagagat

SEQ ID NO: 291404 - DNA, 420 bp, Glycine max
  unsure (1)..(420): unsure at all n locations
ntcttttgtaatagccccaacaataagatttggatgttgatactctaccctgtgtacaccacacgtactgatactaagcaataatattttgttgaaataggtagctcaaaatttaatagctaattagtggattcatttaaaaatagtgtcagaaagattaaggatattccaaaaatattgtccaggaagaacaacttctgatatctataagtattaagtagttccaaaacacaaatggcaggaaaaaaatgaggaaagactagaggctttctttgacaaaagttgcaaagtatttggtggcataccttgagaatagccgcaatatctcacaatgtaatttagaagttgagtaagcataaactctaaaatttgtttccacaaccacaaatccctgaaaatattaaatagagtgacactttt

SEQ ID NO: 291405 - DNA, 357 bp, Glycine max
  unsure (1)..(357): unsure at all n locations
ggcaatctctgaaaaatgagttataataattatcaggtttgcgcttaaagtagacgttaagtgaggaaaggtatagatattattcaaagccgctgcatggatatacaattatacataatgctgatctaattaagacataaattaaaaaacatttatacctaaaaaagtcaggcactgaatgtcttactccaaaagaggggaagcactgcggctagctgacaaagccaatgcaccaagtccaaactcacatcgcaaacattttatgtgtgagtaaatcaattttctaatacttattattccacanacaataaattcacatttacttaataaataattctacaaatcacgtgtttaaaa

SEQ ID NO: 291406 - DNA, 412 bp, Glycine max
  unsure (1)..(412): unsure at all n locations
tgtgcaccaatgcactctccatgagaccattcgtgtaaaaagtggagcctgggatgacaatggtgttttcatctacacgacattaaatcacatcaaatactgccttcccaatggagatagtgggataataaagacattggatgtccccatttacatcactaaggtttctggaaacaccatcttctgcttggatcgggatgggaagaaaagagccatagctattgattcgactgaatatatttttaaactctccttgttgaagaaaaaatatgaccatgtcatgaacatgataaagaattcgcagctttgtgggcaggctgtgattgcttatctccagcaaaaaggctttcctgaggttgccctccattntgtgaatgatgagagaatacggttcaatttggcgttggagagt

SEQ ID NO: 291407 - DNA, 360 bp, Glycine max
gcatgtctaacacagggattattgattctattcctacacagatgtgggaagcacaatctcaggttttgtatttaaaccactctcataatcatatccatggtgagcttgtgactacattaaaaaatccaatatctatcccaactgttgatctaagcacaaatcacttatgtggtaaattaccctatctttcaaatgatgtgtatgggttagacctttcaaccaattcattctctgaatccatgcaagattttttatgtaacaatcatgacaagccaatgcaattagacattctcatcttgcatcaaataatctgtcaggagaaatacctgattgttgaataattgaccattttagtggaag

SEQ ID NO: 291408 - DNA, 127 bp, Glycine max
tagattgcaagatcatcttcctgacaaccttttaaactattgttttaatacgcagagatgactaattagagagtgatccaatactctgaaatggattactcactgaatctactcatagactgatcga

SEQ ID NO: 291409 - DNA, 287 bp, Glycine max
aaaagtttcttgaggaggaaaaagttctctatgttaatcgattacatcctgtatcgtaatcgattacacaagttgtcttaagtttgcaaaggtatgtctcgtatcgatctaattgattacaaccttattgtgattcgattacacacgtgtcttgagacaatgactaatttattcagagtctttgtttaatcgattacccagtgatatattcaatacctttcttttataagagttcagaaggaacaggattactttatcgatacattgagtattaattgatacattgt

SEQ ID NO: 291410 - DNA, 212 bp, Glycine max
gaccacacagcggcaccagcagatatgcctcaaggggtccaggacaccttacggacctcaagtggggagctataatccaaaaccaaacttgaccaatcccgacccaatccgggcatagtcagtcagtgagaacctgtgacgcacctaaacagacgagctcctgccaggcaaccgatcaaagaacacagaccacacagcccggaagctagtgt

SEQ ID NO: 291411 - DNA, 184 bp, Glycine max
catgcatgtgctcgatctatttaattcctgcgcttccaatttacactataactgagaacactactatctggtataaaattgtttaattcccctgcgggttttaacttgtttacataatggccttttaatgtctattttatagcaaaattctttccttttccacaggagttgtccttttgagtta

SEQ ID NO: 291412 - DNA, 432 bp, Glycine max
tctttccgagttaatcacgtctctcaccttagaattttaaaaaccattgtatatattgtttatattctaattaaaactagacttttctgtcattaaaaaaatcgtgtaataaatagctgatattaatgtttgatgtttgttattgaaattgtcgaaaaaattccaagctctacatcaactagaaataatgagtatatacggactccagtttagaagaaatatgaatattctgtattacaaaagatattctccatttagtaaatcttcattttattaaaagatactactattttaatatatcgaactacaaaatatgaaagaatacgcgatcaaagccacttattataaaatagtactactacttccaagttccaagtattcttcaacttttgccattagtaatatgtattatccgaatcttgactaagagta

SEQ ID NO: 291413 - DNA, 62 bp, Glycine max
gctggtgaaaacactaatgccaagctgatataaatgtgaatgaagattgtaacgggcgagtg

SEQ ID NO: 291414 - DNA, 493 bp, Glycine max
atagaacgtcatgcctctatcaatagatacgaacatccatgattctattgtctatcgacatgttacaaaaccgaaattgaagatgcactgggactatgagagatcgtcataaacaaactccacaaccgattcatccattatctcaccacgctgcaaatccattatacatacagccccactacggccgaaagagatgattgcctatggctcgagcaatacgaattcaatttatgtatgttagtcggggacaatgcgaacaacaaccactcaatcaatcatctttaagaacgtttgaaataacgttatcattcaacgcaaaaaaattgcctgactcttggacagatttcaaacggaccctttacagatgtctgatatacaagaatcgagatttccatgtatcatcccgcaacttgtattatggttcacaggaggaagtaggaaacaataattcggaacctcgctattctcataatagacagtagaaattccgtgg

SEQ ID NO: 291415 - DNA, 382 bp, Glycine max
cagcctgaacaagtatatatcttcgcttcctgccattcttccattctcctgcagagaatgggattcttaaagtcttaacatgccgtgattgcaagcataatgatgtcaccttttatcggctttcttgctgacagtattgacttgtaagactatcctgctcctagtggaagtgactgatgctcatcttcttgccctaattgaaacttactgccgagaatcagaggtcaggacccttcacaagcacatagagaaaatttaccgaaaggtctgtgataagtttcagtcactaacacagtgaaaatgctatatggtgtatatggtctgaacagagaacccgtcatgactagccgcttcaatagtttatgctgcattagtgcattac

SEQ ID NO: 291416 - DNA, 338 bp, Glycine max
tcagcccatctatgaacgtattcaattggattggctctgaaaacccatgggtgggagttcttctcaataaacctctgaacctctccaatgcttcactcagagattcatcagggaactggtgaaatgaagagattgctgctttcccttccgtagtcttggactctgggaagtatttctttagaaacttttcaacaacttcttcccatgtttttagactgttacccttaaatgagtgaagccacctcttggcctctcatgccaatgagaatgagaataggctgagtcttatagcttcatctggcacaccaacaatcttaacagtgtagcatatttcaatg

SEQ ID NO: 291417 - DNA, 321 bp, Glycine max
  unsure (1)..(321): unsure at all n locations
tacaaaacaagaaatgaattgaaagtctcggattttaaaacttacccgttgaagaacgaagaacggatgaagaacgatgaagaacggacgaaaaccttcacgaatttgcttacggaaacatctcggaagcgttacggaagcacctcggcttggattttcttcacggaaacaatttttttcacccaaaacagctgaaatacatagccagggggctgagggatccttcgaacagcccccttcagcctttttataggaaaaagggggaggaggttgccgcccagctcgcccagncnaccttatctcgcccaggcgagctgggcg

SEQ ID NO: 291418 - DNA, 334 bp, Glycine max
aatggggtgtccacttaagaagccacaaaggaggttctcactgaagaaaacttggagccagactaagaggtggaggaaagagaggtattggcatctccctaggttaacattcctttccctcaaaggctaaaaatgaacatcatgatacgcaatttaacatttcattgaaataatgaagagattgacatcgacattcctttcattgaggtatttcacaaatgcaaaatatgctcagtagtaaatatatattccctataacgaaaagtggtagattttgattggtgacttaatgaaaatggatgctatatctgagaaatacccaaagttaaaacct

SEQ ID NO: 291419 - DNA, 410 bp, Glycine max
gtaggatacaccttcaccaaagcccatatcaatatgaaggttctaggaaattttttaaaggtgtgggaactaataataatagtcatccaagaagctagaaacatgaaaactctatcttacgataagttgatgagagtgctatgtgtccgtgagattcacctccaaaacagagaccatctgccacaaaaattttactgccctcaagtctggagagacaaacttgagaagagaagaaaataagaacttatccaaagctcttatagtttagatgactaagtctgaagcttcaaacaatagctctagagggtccacagatgatgaatcggctctaatgttcaaaaagttcaagtagatgttgaaaaagataggaagaatttagcactcctctagaaagaaggacaacacattca

SEQ ID NO: 291420 - DNA, 164 bp, Glycine max
aaaatttaagtggccctacccttaactattcaacttatgataaggagttgttgccttatacgtgctttaaaacttggaacactacctttatcccaaggaatttgtcattcatagcgaccatgattccctcaatatattaacgggcaacgcacgcttatacaaaa

SEQ ID NO: 291421 - DNA, 264 bp, Glycine max
tatggatggaatacttacttgttggtgatgaacatttgctcataacggaatcaaaacatgcgaaaaaggatgaccctatggctgccaattcgtcaattccgtgggtatggcttttgaaaggggggaaaagaattttttgaatgaaaaaacgccccccctttcgtcatttttataatttggtgcaggggtggctcgcccaggcgagctaacctgcacctttaatttattttcttctttatcttttagagcttgaggggaacatta

SEQ ID NO: 291422 - DNA, 422 bp, Glycine max
  unsure (1)..(422): unsure at all n locations
tgtgcgaatcaaatcactcctgcattttatctctattatgcattctttctttctttacccactcctcacgtttggttttttagggaaaaaacaccataactaaacgcgccacaaggcatccctatcgcaccagatccaaatctagaacgatgggtgatcaagaggagacacaggaacagatgaaagccgacatgtcggctctgaaagaacagatggcttccatgatggaggccatgttaggaatgaggcagctcatggagaaaaacgtggccaccgctaccgctgtcagttcggctgccgaagcagacccaactctcttggcaactacgcaccatcctccctcaaacatagtaggacggggaagggacacactgngacacgatggcaaccctcatctgggatacaacccgagcggcttaccc

SEQ ID NO: 291423 - DNA, 140 bp, Glycine max
tatgaacttcagctgccaagattgtctcgattcttgcactaatacgcgtattccaaatcatgtctgccgcgactgtgatcatgatcagcagctctccaaaattcaagcccagatcatagaaatggaccgaaagctacttg

SEQ ID NO: 291424 - DNA, 392 bp, Glycine max
tgctgctagacgctttcagaatcccaagatatgtttataacttgatgggtctgatgataatggtgatgtgccttccatggatatgcgttcatagtaaaaataagtttcctttctctttttttttcatctgcggatgttgtctttgagtttctgacaatttctctgctatggcagtaccgagtcccctttattatggattacagcagatcctgatatggagtaccttgctgaggttcattttaaccaaccagttcagatgtgggtaaggataaaattgtggtagactggtacgggggcagtcaattgattctgtggagttgctattgtgacatagtactttgccaccctatgagaggcactgcatatgttcaattatttaagtccttctttct

SEQ ID NO: 291425 - DNA, 150 bp, Glycine max
taatgaatgagcgtgcataaaaaaatgagtaattcttcggaaagaattacgtgcagtaattttgtgaagcagaggtgaaagatttagctgcgcttacgacacgggctcttatggcgaaagaaattttactggtctgaattgtggaaaaga

SEQ ID NO: 291426 - DNA, 416 bp, Glycine max
tgtatggctgtgcgagatctgtcatcgtattccattttgccttagccagaatctgaaatctggacgaattcccttcccacctgcatatatggcatatacagcatcgccgatcataggatcttttcttgattcctttatgcttgccctctgatacgattcaactccaatcacaacctaaaccacaagtcggattgctctgtactaaaaatcataactgctacttgtaataagaactggtccataatatgcataaattccatagacatatgtgcgtcatctacaccggccattaagacactcatacatcccactggtctaacatggaccactttaatctttatcctgttcttttcctttctctgtacacacagaccactttttatctgttttttactaaaaaacccatgctaaacgct

SEQ ID NO: 291427 - DNA, 322 bp, Glycine max
  unsure (1)..(322): unsure at all n locations
tctcaattagcaaactaaacagcttttcaacagaagacaagtgcctcgaggattataataatgagtaatcctttgtattctaattctaatttcagaattacataagcatcanaattttgaggcataaaaattcagattatagaacanaaacgataaatctttatgtcgcacaattataagaataaatataaagaattcaatctagtctcaatatatattcataaatttcacaactaattgggtttatcatttagttcttaacctctctcaaattggtctaagacctggaagatgaagaaatagttgattgatgaatgagagt

SEQ ID NO: 291428 - DNA, 390 bp, Glycine max
gctatcacgagcgacatccacgatatgtgcttaatttcttcttgtgggaaacgtcagccttgccggtggcaagatagacattgaccacaggtctttctgccccaagtggtctagtggccaatgatcgtagccgtgtcaccttgcgtgtctacttcaacggacatggagacgctgatgcctctgcatgaggacgaggaagaggaggaggatgcgatgcacgtggagtatccatggtcctttaaagagaaaaagttgagttagggaatattatcagaagacattgtatgagttatgtaaatgaatggaccgaaatgaaatactatattagaaaattacgctagacgatgtctaataattctccttcatcatgatcattacgattagcatgaa

SEQ ID NO: 291429 - DNA, 186 bp, Glycine max
gacgagtatactgattttcaggaggaagtagggcgccggcggtgggcaccactggttactcctatggccaagttcgatccagatatagtccttgaattttatgccaatgcttggccaacagaggagggcgtgcgtgacatgatgtcctgcgataggggtcagtggatcccgttcgatgccgacgct

SEQ ID NO: 291430 - DNA, 407 bp, Glycine max
  unsure (1)..(407): unsure at all n locations
tgagaactgtaactaagcttaatatcattgaaatttctattaagaacaaaaataattatcctagtttaaatgagccattgactaccatggatcaccagtaatggacctgatttccctttgtagtgtcaaaaccatcaaatcctgagatgaagtgaagtaacagtgacgaagtgaaaatgtctacaatcaatggaattatatttctcaataattcttaatctactatgtaccaagactatgaaataaattataaagaaagaaatctatgacagaggagcttaaatttgaccgaaagaatcacattgtttcaaaagaacaccttctgacaaacaaggcttatctaattatcagaactntctactatctctctcccactgangtcaaaataccagtgcacatgtttaagt

SEQ ID NO: 291431 - DNA, 338 bp, Glycine max
aggtgatgacattggaatatgtgaatgtccattaatctgatgcatgactaacgagaaccacccttacaactacgtagactcataaccggagataggtttgaggtcaagatctaatctagagaattagttggtagatgtgcacaccaagcttgaacattcattccggaccctttatgtgagcatcaatattatggatcggctcctagcagttaggacaggtgcaaggttgggaatgttattggttggcatcagagtcatgctgagggcatgcaaaattgaagagatctgatcccttctgatcccttgaggtaataaagatatatatacgcgtcgatgtt

SEQ ID NO: 291432 - DNA, 365 bp, Glycine max
  unsure (1)..(365): unsure at all n locations
aacctgttccattttactgatcgttgatagacatatattataacaaataggcgacatataaataaatgaattaaatatgtttgttttaataaatgatcgaattgtattctggatctctaataaaagaatctattattttgagtcattaatatattaaaaatcttgttttgaatctctcttatcagntatgtgatgatgtgatatcatcacaacccattaataaaatttgaaaaattaatttgtaaggtgatacgtcatctgctcactaatgataaagattaaaaataatacttatattatcaaggacttcaaacaccatactaaatcattacacatgtgtaataaaataatcatttattattgac

SEQ ID NO: 291433 - DNA, 429 bp, Glycine max
  unsure (1)..(429): unsure at all n locations
tgaaatgcanaaagactcnttaaaagttcaatcatgtgtctctgattggaaaaggtaaaaaaggatcatttaacataatgtaaaaacaaacaaaccaaataaaataaaaggactaacctcaatttacaaccggtaaatcaacagtagaatcatgaaaaagagaattgaatcaatttttattttttttttaacagcaaataattgaatcaattgatactgttgggaaaattattctcaaaccaaccaagaaagaaagatggatttttattattatattattatcatatactacaaggtaagaatgaaaaattagcatacaataaaagagaatctagcctataataattggaatctgccacatcccaaataagaaaaaccactcatagtctcatacagtgcaaacaccagcatactggctaaccagcaaaa

SEQ ID NO: 291434 - DNA, 249 bp, Glycine max
tttttgctttagcaattctaatgtgtaggactccatgagctgtttataacacaacttaaaatttaactctgttgtggcatacaaatgaatcaattgatcatcttggtattggaactctttgcttaatatataatggtaaaatagtttgaatgacaagaacataatgaattggcttataccaattttcagtatgatcattccttatatagaatttgaacgctggagtgatgttatctgagtgatttttgt

SEQ ID NO: 291435 - DNA, 396 bp, Glycine max
atgcattttatctgatgaatagtaacaaaggcatttgggagatttataggtaaaacacgcttgtcatcgcgagacatctggggcaacgtaatctaatatatgagggtaggataaatctacctgattaataaagaaaaacctaataatcatacatcttaagcaaacaaggcatgctacgtcctaacattctcatcccattgaatcctctattgattattctgcttcatattatgagctttgtctacaactatctgctattaattcctagaccctttatttatcctgtatctctctttatttcttttcttataaattgaacatcatacaatacatgtaccatactgagtccctggggaattcgacactctgacttctgagttttatactacttggaca

SEQ ID NO: 291436 - DNA, 430 bp, Glycine max
  unsure (1)..(430): unsure at all n locations
aaatgtgcataaagaacaataaagatgtcatagatacagaattatctttttacaaggaactttattttgtcttttctagagatttggtgcaaaaacaatattgaaggggaagaccaatcatatttggacagcagataataaattataaatgaaaaatagaaataagatatgcacacttacccactgtctctgatgcctttaaaccaatttcgaatatctgattcattgggttcagcgtatccttctttattcatgtcaatcttagatccatctgtgacaccctttatagcaataacaagataaggttacttacanatatcaacagagtattaaacaaanattaacagaattatctcttttgtttgatccttacccagcagaagaaagacataacaagaaatgcgttcgcctaaagtatatgctctccctg

SEQ ID NO: 291437 - DNA, 423 bp, Glycine max
tctaatttctatttccaaaacaaaatctaattattataatctcgaccattaatgagttgaccattatttgaccaaagaattttctctgaattattcttattctttctaggctttaggttaaaaacttcaaagtttaaccatgcttaggtatcctatgggtaacatctcattttctaccactccaatagtctaaaaacactactcaatcacacaaaaaagcaataacactatctaccacacacatggaaaattgggatgttacactcaacatctaattatctaggactaccttgagatcaaagtaccgctccactcttttgacctatctgaaagaatctttcccaccgaacaatggtatcttgagctttctctgatgattttctcttgagtttgaaacttaaggtgttcttcctcttcagtcct

SEQ ID NO: 291438 - DNA, 99 bp, Glycine max
tagcttaagacgaagttatggttacttacggattgcgctgtagcacctctatacgacttccgccacattactgagttacactgatcgagcaagcctgct

SEQ ID NO: 291439 - DNA, 421 bp, Glycine max
tgcttgtggggcttctatggaggctgtatctttgatcttcaatggggtcctttaatggtgattatccaccatggagatgcagcggaagacaaatgaaaggaggtgggaggaggcgccatccattaaggaataagccatggaagaaggagcttcaccaccaagatgagccttggataagaagcttggagaggatgcttcaatggaggacaagaaagagggagagaaagagggaggggggagcacgaaattgaaagaataaaaagggagagaagttgaactctgagttgtgtctcacaagactctcattcatcaaagttacaacaagtgttacacatgcttctatgtatagactaggtagcttccttgagaagctttcttgagaaaacttccttgagaagctcttttgagacaacttccttga

SEQ ID NO: 291440 - DNA, 189 bp, Glycine max
tttaatgaaatataacacgtaacctaacttgtaactttgcatttgtaggttacgctattttacagtgcatttagctgcctgcatttttctattttcttgctttagatcgcgacccaagtcaacatggcttagcctggttctgatgacgctcaaagcagtgtttggaagcgctatgtaacatcaatgact

SEQ ID NO: 291441 - DNA, 423 bp, Glycine max
  unsure (1)..(423): unsure at all n locations
ntgtgtacactgagagcagataagcatgttagagattagaggctacatccttatctcactctctgcagactacagcatgccacaattntgaagggtatatgttatgaatatgatgccacatttaagaggacagaatataaatccaccaagagaagtaacattaattaaaataacaataaaataaaaaagattactcactgtgagaggccaccctttcaaagtcaaattattgctacctggatttgatcctgtcacaagaaaatctcttgtttactccatttatgcgcaaaaatagtaattaaacatcataacgaaattaacactaaatcccaaaatatcctcaaccaaccatgaataaattgcaaaggaaaaaaaaattccatcaacttgcagcaaaacagtttcaaaataataaaaatcagt

SEQ ID NO: 291442 - DNA, 337 bp, Glycine max
tcatactcaccaataacataatgctcaggatgctcaaaaggtacacaatgttcagggtaatcaagatgcacaatatgcctaactaatctatgaaatgtcctatctattttaggatgaaagggttgtaagtcacctgcattgcctctagtcatgcactatatgcagcagttcatgcgtttctcacacagggcataagaggtgggttaaaactacagctctactaagaaaatattcaagtgtgctataattttgtgagcaacaccctagaatcataaaacgatagcacacatatgtttataaaaatattcaaagtctaatcatggaaactacctaagga

SEQ ID NO: 291443 - DNA, 420 bp, Glycine max
tctttgagaaaacttccttgagaagcttgagcttatctacacacacccatctaaaaactaagctcacctccttgagaagcttccttgagaagctagagcttagctacacacacccctctaataactaagctcacctccttaagaagagaagctagagcttagctacacacccctataatagctaagctcacccccatgacaaggctaaaaaatcctacatttctagggtacccgacctacattatggagccctaaatacaaggctaaaaaataatgaaatcctagtctaatatgtacaaagataagtggacccaaccttggcccatgtgctcagaaatctaccctgacgttcatgagaaccctagggccttcttcagtagctctagcccaatcctcttggagccttttgctcatggctct

SEQ ID NO: 291444 - DNA, 302 bp, Glycine max
  unsure (1)..(302): unsure at all n locations
taaaaagagagagagcaaaagcatccgttgctatcaagtcacttcgacaaaagatggaagacaaactgaagacagaactagaacaaaaggtgcacaattagtttttttgttggttttacacgtactattttcccactttctcaacatgtatgctgttagtgttatcagttactatatagtatttgttaaataaaatgtatttttggtaattgcatgaaattgaaactaatttgaagttgaaacaaactcangaattagcagaggtagacttaaatgcagccataacaaatgagaacacaact

SEQ ID NO: 291445 - DNA, 420 bp, Glycine max
  unsure (1)..(420): unsure at all n locations
tgatcctcatcatcaatagcaacatctatattttctatatcaagaatcagtttattaaacaaatccaattgttctactactgatctatcttcaatcattttaaacgaatacaaagactgctttaggtaaagacgattaactaaagatttggtcatgtacaaaccttcaagctttaaccaaatcccagcagcagttgtttccttagagacttgcctcagcaccttgtctccgagactgaggataattgcattgtgtgccttctgcagtagtgctttcttatccccatcagccatcatcttttcaagtttggcttctccatcaagtgcttccaccaggccctgctaaacaagaatagctctcatcttcaatcgccatagcccagaatcattttgccctgtgaatnnntcaacctcatacttg

SEQ ID NO: 291446 - DNA, 289 bp, Glycine max
ggaggaaaaatcaagttgaagactctagaggaagcaatggagctcattgagaatatggtagctagtgatcacgctgttttgcatgataggacacacatccctaccaaaagaagtctgttagagctttcttcacaagatgcattgttggcccagaacaagttgttggctaagcagcttgagacactcatagagacacttagcaaattgccaagactgctgcaagtagctcaaccatctcactcagcagttatgcaggttgggggctgaagtatttgtggaggggctcatg

SEQ ID NO: 291447 - DNA, 416 bp, Glycine max
tcttatccaagacactttcttggtggtgaagcttcttcttccatggcttattctctagtggatggtgcctcctctcacctcttctcttttatctttcgctataactccatggctgaaaatcaccattgaaggaccttattgaagcttaaagatccaacctctatgatgcaatcctaccccgcaagggcattgggtagaagactcaaagtagattgggctagagatccaagggaaggccctagggttctcatgagccttaaggtagatttcgagcccatgggctaagtatgagcctgcttatctttgtaaatattagaataggttttcccttcgtctgggccttgtactttggccattctaatactatagggttttagccttgtatttcgaggcattttgagtagtttttgtagtaa

SEQ ID NO: 291448 - DNA, 354 bp, Glycine max
  unsure (1)..(354): unsure at all n locations
tcttctgattgagcaacctcaataccaagaaaatacttcagatatcccaaatctttggtctggaagtgactaaacaagtgttctttaagttgggcaatcttagtagtatcatttcctgttatcactatatcatcaacatatacaattagataaacatacttctcaggagatgtatgacaataaaaaacagaatgatcagcttcacttcatttcaacccannaagttgaacggtatgactaaatttaccaaaccacgctcgagggattgcttcaacccatagagagatcgatgtagcttacatacgagaatactcccnctgagcaacaaacccaggaggttggctcatataaatc

SEQ ID NO: 291449 - DNA, 418 bp, Glycine max
tctacttatgtggcagggcgggcttccttcactttcctgtctccaacgcgagctctgaccactgtccttccttcccgcggtgcttcttttcatgtccgcctgagtgggcttatagcctaaaccatacttcccacgatttccttgggtttttatcaggctagttatgccgccattgtctttgcctaaacccatcccgggttcataaccgttccccaacataactcgggccatcattaccgccgcatcggacagacaaggttgcccaaagagggagtccacggaggaaatgctgaccacctcaaaagactggaaagcggtttctaacgattcttctgcggcttccacataaggcatggaggatgggcagcttaccaagatatcttcctcgcctgatacgatgaccaagtgcccctccact

SEQ ID NO: 291450 - DNA, 356 bp, Glycine max
  unsure (1)..(356): unsure at all n locations
aataaaacacaatatccataggtggatctcctattaagtataggtaataatctccttataccctctattctcaaactctaatccatccttttactagtgatcctctaagaaatattagaattctgttgttagatctatcaaagagtaatactagctaccgtgattagtcacaacacgaccaaaaaaaaaacattactactaacatgggattatacttaaatgactagtaaacaatggcattcanagatcagcagagccagtcaatttggtgaggccaaatgttatggccatagccatccaaccttcaaccagaaccctaagacaagacctcgtcactggagtttttccaagaacta

SEQ ID NO: 291451 - DNA, 404 bp, Glycine max
  unsure (1)..(404): unsure at all n locations
ntcaacaagttccttcacaaataatcatcacacagcttaaaactaacaaaaccacccatcatatctcccaaaaccccatacccacgaaattcaaaggagaaagaagtccagccaaacctgaattttcgaagtcccactcgtagccacgcacttcacgactccgaaaatgctctcctttcacgatttggggcagaaacgggcactaaaggttgaagctttgtatggagctttaatggagaatgagggaggaagaaaggcaacgtgagggagagagaaagctgtctaaaaaaagaagtgagggctgagtgaagagagagaaaagctttntggttttaaataaaaagggttttccctttttccattattttattcaagctctgccacatgtccctatttgattggag

SEQ ID NO: 291452 - DNA, 282 bp, Glycine max
  unsure (1)..(282): unsure at all n locations
cgacgagtatactgatttccaggaggaaatagggcgccggcggtgggcaccactggttactcccatggccaagtttgatccagaaatagtccttgagttttacgccaatgcttggccaacagaggagggcgtgcgtgacatgagatcctgngttaggggtcagtggatcccgttcgatgccgatgctatcagccagctcctgtgatatccgatggtattggaagagggccaggaatgcgagtatggccagaggaggaaccggtctgatgggttcgatgagga

SEQ ID NO: 291453 - DNA, 434 bp, Glycine max
  unsure (1)..(434): unsure at all n locations
tgatcaaaacaattatctaatcattccaatccacttttatcatacaattgctcattcaaatcattctcaaacactcatttcatgcaaaacaatccactacatatcattttcaatcaattcattgttcaaacacgcttttggtacaaacaaacaactcaaagtgctgaaatttatataattgaaatttaaaaaaattgaaatataaaatctgaaattaaaatgactgaacataaatcataaaataattgaaaataaactaaaatgttcgagatgcacaaatttaaatgtcctgctcctgtggttgctcctatgcatgctcattaaagtccaacacctgagcagctggtgcagatggtgtggcataatcaagtatgggtgctanggatggctttgggatctggtttgtagaagcatcctcctcttgagccctgttg

SEQ ID NO: 291454 - DNA, 186 bp, Glycine max
  unsure (1)..(186): unsure at all n locations
atttcaagtttcaagttttcaagaatcaagaatcaagaatcaagaataatcaagaacaagattcgagactcaagattcaagaatcaagaaaagactcaatcaagataagtactaaattttttttcataacattgagtagcacatgaatttttcacaaaaccttttaccaaagagtntgtactctct

SEQ ID NO: 291455 - DNA, 387 bp, Glycine max
tggtgcctttgtcgggcaaattcttgccggtaacgttgagggttctcttcttgctctgaatcgactccctgagcttgtgatcgggaatagcggagaggtcgtcctgatcggcggaggaggaggccggcaggatgtcgtactcgcgcggaggcgagtcactttggaactgccggctccagtcaatggggagaggactctttggtttttgttgttgccgctgttgttcctccatcgtgcattcgacaggagagtgagttgaaagtgttgggtttttacgttacttgtgaaattggtgagagcagaaatcgaacatagaaaatgggggcagcgagtggcgcgccaccaccacacaccacacttgtgtgtggttggctgctcgtctactct

SEQ ID NO: 291456 - DNA, 379 bp, Glycine max
  unsure (1)..(379): unsure at all n locations
tcagacaatccaaataattaagagacattatttttctgtcatgagcatctttaatgttaaacattagtatatcttcgctattaaacatcattagaccaatagagttgcctaactttatttttatgagctctattatataacatctttaataaatntaacaacttttttcactttttaataatgtaactcttcatatctaacttaaaatagatctaataaattattgtagatgtttatatttttttaataaggaattattttaatattaaaaacaggttcttgcaaaagaagaatatgtgtagtctcttgtcatctanataactctaatagtanaagtggtataaaattaattgttaagttaataaagtcttaattaaga

SEQ ID NO: 291457 - DNA, 427 bp, Glycine max
  unsure (1)..(427): unsure at all n locations
ntatagtttcaaatcataagataacatagtaagactatataagcattatttacacacacaaaaaagtgtccccgacccccacaacaacgttgtttcacccatgcttcttcatcttttgtttctgcctccatttttttgaagctttttcttgaaaaccaaagaaacaaattgaaatattcccttcaaatcatggccataactcttgttcgcttgcgaacccaaatccatggtgtccttcattgcctctggtgtctcctttgcctccacctctaattcctcctctatgatttcatttcctttgatttctcttgttcctctatcttcttcaacttcttgaacgatagaagaagatgaagcgagattaagcatttcaacttctggttcctctctgggaatcttgtattcatcatcttggctgaagagagac

SEQ ID NO: 291458 - DNA, 259 bp, Glycine max
gtcctgtggtgcagaaggggaaaaatccatggttgtgacatcatcctcatcctcagagagctccagcacaggcgtgcctactggtgatgcctgtggggaagtcaactccagcacaggtgtggtcactggtgatggttgtggagtcgagtcaggagtagcctccacaacgtcctcctgagtagctgggtcagtctctatgatctctggctctggaatctctaagtcagcctctggatcaacatctgtatcagcttactga

SEQ ID NO: 291459 - DNA, 426 bp, Glycine max
  unsure (1)..(426): unsure at all n locations
gacactcagagtactcaagcttgttagtttgtcatccctttcattagttntttttttatacctaaaattgatttccagtgcctgttaatttatgcaggatttaccaagtagcaaatgtgaaatctgaatggaactgtatcaaaaccttccctgatttatctggaacaggttttatacctttttcccattgttcattattccttgagggtttgatgatttcatgtttgttcagttactaatacacaactcgaactttttcttctcagggaagaacacgtgtgtaaaatttggtccagattctaaatacatagctgtgggatcaatggaccgaaatcttcggatattcggcttgcccggtgaagatgctcctactgagtcataaaatgcctcagttgtacaagccanagtcttgctctggagtaaaca

SEQ ID NO: 291460 - DNA, 252 bp, Glycine max
ctgctggttataccggtcttttacaagagagatccttcttatgtcagacaccataaaggtatctatggagaagcaatgactaaacatcacgacaggttcatagacaagatggagaagctgcaggaatggaggatggctttgaaacacgtagctgacttgtctggctctcatttcacagatgggtatacaatcatactaatatatattactttatggcttttattggattacgacttacttgtctattgattt

SEQ ID NO: 291461 - DNA, 377 bp, Glycine max
ctaagcttcagatttataatagattcttaaaattattatctattaaactatgacaaacagtgaactggtgggacctttcagaccttctactatggactttattaattggggcgcataatacatgcatacagatattatacacttacaaaatatatcagagatgaacaaacaatttaacatttttctttagagctagcaagtgctgggtctcttgctaacagtttcaaaagcttaccttttcttccactttcttgaataatgtggatatagtagcctgaacaagtgaaccacgattactggacttaacttcagtagatgcactcgctgaagcagattgagacacttccttacattttgatcgagaagcaaactcatta

SEQ ID NO: 291462 - DNA, 455 bp, Glycine max
gagaccactgatgataatcaccacacgataatgcattgctgtgattgacactattattctttccttaggaatactacaaagcttactttgtcgtggcagaatacgcctgtgcatagatagcaccggcgagcgtccttgctcatagatgccttgtgtgagagtgaattattatcactaggccgaatcctacagacttgtgttttgccataaaatgaagacagaaacatgccgacagcatattgtacgcttgactgatgaggagtgcactcccagatctcaactggatatttgcaaataaggaggatagaacaatgaacaaatgtacaaaattgctaattagtatcttcttaaatgaccccatgataaacatctgggatcgattgagccaacaacgtacaaagggtatacgcatcctgatttggtgccctgcctctgctaaatccagatggatccct

SEQ ID NO: 291463 - DNA, 287 bp, Glycine max
catacgaggtacttacgcgttaatgccattcaaatcatgctatttcattgacagacatgaccagagaagatccctcaatagaagtttctttgatacacgacaggatgaacaatgaatatgcctacgaggtgttgtacgagacagcttactttgggaaacaaaaagccatcgcaatacaatatggagattgagaacacgtatatgcgaaactatcttcgaatctaacacacctgctaaagcagttctcctgcatcatatcttcgaatactacatgaccgatctattat

SEQ ID NO: 291464 - DNA, 271 bp, Glycine max
atttgataaatatccccaatattttgtgtttgtgtgaatataattttgtttgaattttgggtaggatttcaattttgacaacctttggtactaggatcaatcagatagagtatatctgttacaaccttttttttttaaaacaaaataaaactccctaaatttgatcctccaatgtgcacactcttatcacattacattagtgcctcataaaaatatggttaccaaattagtccctcgaagatactattcttaccactttagttctcttaag

SEQ ID NO: 291465 - DNA, 424 bp, Glycine max
tgtattgctcgccctcaacacccaacacacaccaaatataaagaagaaaaaaaatctacattgctctaaaataaaagcataagttcattccccgccaaagacagcactgattctttacaaaatattacatctgtatttctttcttctagataacgcgagagcataaaactagaactacgtttaaactatatatatatatatatatatataagaacctagaaaatcttgaattaaaagccaaagaattcacacgacaaagattatacaaaaattgatgaaagcagaggaacaaaattgaaggccacagcaagcatttatagacacaaatgattgctcacgcaaaagaggtgtataaatctccactagactgaaaaatatctgctccttttcctcaagctgagtggtggaatatgttagcaatcaa

SEQ ID NO: 291466 - DNA, 251 bp, Glycine max
atatcgagacgctcgaaattgaatgttgaagctcttagcaaattcaaacaacaataaccttttactcggatgactgattgagtcccggaatatattgagacgctcgatcatgaatgttgaagctctgagcaaattcaaacgacaataactttttactcggatgtctgattgagtccgatatatatcgatacgctcgaaattgaatgttgaacctgtgagcaaattcaaacgacaataacttatttctcgga

SEQ ID NO: 291467 - DNA, 418 bp, Glycine max
  unsure (1)..(418): unsure at all n locations
tcaacatcagaccacttccagggtgctggaactacttcacatggacttgatggggcctatgcaagttgaaagccttggaggaaagaggtatgcctatgttgttgtggatgatttctccagatttacctgggtcaactttatcagagagaaatcagacacctttgaagtattcaaagagttgagtctaagacttcaaagagaaaaagactgtgtcatcaagagaattaggagtgaccatggcagagagtttgaaaacagcaagtttactgaattctgcacatctgaaggcatcactcatgagttctctgcagccatcacaccacaacaaaatggcatagttgaaaggaaaaacaggactntgcaagaagctgctaaggtcatgcttcatgccaaagaacttctctataatctctgggct

SEQ ID NO: 291468 - DNA, 330 bp, Glycine max
ccgccaagaggacaaaggataaacagcctatgaactatttctgctgttaatgaaggcatttcatttatgcattaataacatcatagttagctcgaaggcatttcataaacttggaaagccatcttagctcactgaaaccactgcaataaattcttaaacaggcaagcattgaaagcgatgactacagtatgatattaaatgcacctgaacaaagatgggatgataaataggaggattcttcccatcaataaggaaaaactaaacgctgcataactcttctcttaatacctacatgaaaacaaagtagtgcaaaaacattctgcttttctt

SEQ ID NO: 291469 - DNA, 359 bp, Glycine max
tgtaacgatgtctagctttctttacgttgtttattatgacaccagatctagttcggtcatcacgttgcctaattctctttacattgcaaatttcactgcttgcacaattaggactatttcttgagtggcttgtcaagttgacctcttattatattgtgtcccacacgccaatcactctcgtatctacgtatgatggtgagcatgatgtatgctgtgggagattccctaacaccttctataaaaaaaagacctagcttataacatatattgctgcacctaatgaaattatgctgcttacttgcactgactagagactcctctccattgcttattctattattcttatgcccaactcaact

SEQ ID NO: 291470 - DNA, 425 bp, Glycine max
ggacctaagaatactcagcttagacaaatggatgatgtgagaaatttctgttatgttaatgaagagtttcaggttatttatatttacctcgctatctaatttggagtctgattcttcctcttttgggtcttcatcgaatgatgtgtcattcaatacttcctatgtgttcatcaatactttcttgtcccttggtttggagtaccttttcttgtgaactgatatatcaagatctggacattctgacttgaagtatcatagattcttttactcatagcatatgatgaagcttgtatccttgtcttttctttctttttatgaggcctctaggatccattccagtttgatccactccctttcttccataagatccttatcatccttgagatgaaggctaactgatcatcttcatcagagctttcatcatt

SEQ ID NO: 291471 - DNA, 306 bp, Glycine max
gaatttatgccatcccatgtagccatcattaccttcttctttggacctcttcttttgaattctttctttaggaaagaaaactaagacttgatatagcgagacttgttgtattcaaagcatttgacttgcccagaggtttctccttgttggaagtctcttttgaagtagttccttcttgctccttttctccttttgagcaattttgaaccctttcagtcgtaaaggccaattcttctttatcttcttcttcttcttcttcttcagagagctcggcatcactatactcaacatcaaaattggatacta

SEQ ID NO: 291472 - DNA, 415 bp, Glycine max
  unsure (1)..(415): unsure at all n locations
ntattcataattgtcgtccactctacaattaagtatctatttttgaaaaaaatagtatccagcatctaacatgctgctaatagaacaaacattgaaaactaaaggatcatccactacacttttatcacacatccaaaaggactcttaaacacttgcataaatttttctctcttttataagtgtagttcaataatgagtggatttaaactaatgtttgaatctagcatgattaagacagatttagaaaagacttattctagatcaatccactattagaatggtgaagagcttgacttatttaaaaagattcgcaccttcatctgctaatgcgctataaagactaacaacaatcaaatattgaatgacaacaatcaagtgaaaagagatcaagtcgagaatgcaaaagataatcaaa

SEQ ID NO: 291473 - DNA, 303 bp, Glycine max
  unsure (1)..(303): unsure at all n locations
gacgctcgaaattgaatgttgaacttctgagcaatttcaaacgacaataacttttttctcggatgtctgattgagactcgtaatatatcgagacgctcgaagttgaatgttgatgctctgagccaattcaaaccacaataactttttgctcggatgtctgattgagtcccgtgatataacgcgacgctcaaaattgaatgttcaagctctgagttaattcaaacgacaataactntttactcggatgtctgatagagtcctgtcatatatcgagacgctcggaattgaatggtgaagctctga

SEQ ID NO: 291474 - DNA, 421 bp, Glycine max
  unsure (1)..(421): unsure at all n locations
tcaacattcaattntgagcgtctcgtaattntactgtactcaatcagacatccgagtaaaaatttattgtcgtttggattggctcagagattcaacattcaatttcgagcgtctcgatatattacgggcctcaatcagacatccgagtaaaaagttattgtcgtttgaattggctcagagcttcaacattcaatttcgagcgtctcgatatatgaccggactcaatcagacatccgagtaaaaagttattgtcgtttgaattggctcagagcttcaacattcaattttgagcgtctcgatatattacgggactcaatcagacatccgagtaaaaagttattgtcgtttgaattggctcagagattcaacattcaatttcgagcgtctcgatatattacgggactcantcagacatccgagt

SEQ ID NO: 291475 - DNA, 371 bp, Glycine max
  unsure (1)..(371): unsure at all n locations
agtgttttgagaagcttagtatctatacaaaaatttataaaaagctttacacgaaagaatatgttcgcgtagatgattcatgtcttatttctattccatatatatagttttcattttcatgtatctattgtctcacaatggttaaactcatcactgtgctcttcatctaaagtcttgagcccattggagcatttacgtcctttctttaagcaaagtccatgttgataggctagtgtgtcttgtactttagtaggaaagtcacttctttcttcatagtaagtcagcaacaacagaatgcacacctantgatanggatcaacttcttctagactatggacttcatgtattcttcataggactttgacaaatcc

SEQ ID NO: 291476 - DNA, 414 bp, Glycine max
  unsure (1)..(414): unsure at all n locations
tcttagtttcagatgatgcagttgagtttgtagctactctcatgcactcctctaatgactatagcatcatttatggcgctaaactgctgggagttggaagccatcttcacaattaaatttctggcttcagcaggagtcatgtctccaagggctccaccactggcagcatctatcatacttctctccatattactgagtccttcataaaaatattggagaagcaactgctctgaaatctgatggtgagggcaactggcacatagttntttaaatctctcccagtattcatacaggctctctccactgagttgtctaatacctgagatatccttcctgatggttgtggtcctggaagcagggacatttttttctaagaatactctcttcaagtcatcccaactcgtgatggacctt

SEQ ID NO: 291477 - DNA, 330 bp, Glycine max
  unsure (1)..(330): unsure at all n locations
aaccaaagtttattgagaagctgtcattgtttgtacattaaccactgtacttttaaccattgctttaaacacaaattctgcccatctggcatgaggcatgctggatgatatccaatatattactcttgttttgtttttttgtctgtgtgtgcgcgcgcactttcaatgtttattttattgtttgattntaaagcatcattcatgtggaacggtggaacccttatgaggaggcanagcatgaatttgcggcgagggacaaaaagcatgagatacggttagaagtgagaaagtgaccgctgaaatnttttgtggcataataatttaaacatc

SEQ ID NO: 291478 - DNA, 433 bp, Glycine max
tgtttcaagttttttttacaaattatttgcggttttctattaaaatatataataaataaaaataattttattacattttaaattgattttttaatataaaatttgacataaatgaacaaaagtaacgaatattcataactaaatgatttttttattatttttgaatgaatctttattaagaactaaaggcatttgggaaaaaacaaatataggcaaagtcggctaataaggcattcgaaataaaagctggaaccacataaaaatatgaagataaacttgcattatcagacctgccttagctaaagcatcaataacttgatttgcctcacgccacgtaggacaccaaacagtctgacccttctgctggtggacattatgttgcatcttaaagtgaagtttaatttactgttactagaaaaataataaatatata

SEQ ID NO: 291479 - DNA, 296 bp, Glycine max
  unsure (1)..(296): unsure at all n locations
ggatggggacaatgtggcatgccccattgtttcagaatacagcataggcctaaggtcttctcattcaaatccttaactctaagaaaacaagcataaaaacaaaccaaaactgccccacaaatacaagcatattcccacaatttggagcaccaaaagatgaagaaaatataccaatgggaagctgaaaacatcaaggattgaatacttacttgttggagtgaactaaagcgtgaaaagggaagcanaaactcaacaatggaagcttgggggctgctattctcttagttcccgtgagc

SEQ ID NO: 291480 - DNA, 429 bp, Glycine max
  unsure (1)..(429): unsure at all n locations
ntggtacctgagcatgacggtggtggaggcgtgagaaagaggaattaagagaaaggaggaaagaggaaaagaagaagaaaaaagacaagcggagagttgccgcagctgggaatcgcctccagtggtgactaatggcgacgaaggaagggtggtgactgctgaagggatttggtgatgatggtctagcataagattgtgcatcctagattgatctaagggttgaaacttatggtgcataatacaccacttaaaatggtggtccatggccttcaatttaatgtgtgaatcccattaattcactccaactaaaaaaaaaggagaacacatggtgcttccctcaacaaaacattggttgaacatatctatgcaaaaaatggtgtctaagagaatagataggtagatctcagcaaaaaccagcatttgaaagaa

SEQ ID NO: 291481 - DNA, 360 bp, Glycine max
  unsure (1)..(360): unsure at all n locations
ctgtcatcatgccgagactcaggaaggccaataggtttagccttctcaatgtattctgaacaaaattcaatggcttcttctgcaatgtacctctcaacaatagatgttgctggatgatatagattctttgtatacccttttaagatcttcatgtatcgctcaaccgggtatatcctccatagataagcaggaccataacatttgatttctctgaccagatgcacaatcaagtgaatcatgatgtcaaagaaagcaaggggaaaatacatctccaactggcacagtataattgcggcctcattntccagctcatcaaacttgacaggatcaatgactntgctacatatagcatggaagaaa

SEQ ID NO: 291482 - DNA, 430 bp, Glycine max
acactatcgactactgctgcttgactatgcgagtcgcagttatccttaatttcactttaggaatctagacaattcaattacacacatgacatatcctatagcagaaacgtccgattgaaatttcactgtattatactataaggtatatatttgattattatataatcatttacctctttttttgattaccaacgcgaatgcggcacgaccgatcgggcataattcatttcaaccatcattaacggatgatacaattcaaacgatcggtggaaatccactttatttttacattactcgacaaatgacttaactaattggcttacgcacgtcatatgggggtctttctagtaattgacagcgagaataaaaatccttgattccacatgtcgaccaccacaggttcttacattgtattaaacagcttgacttg

SEQ ID NO: 291483 - DNA, 254 bp, Glycine max
tgctccacctcaaagatccgtccccgcatgaactaccccaactgaacatagtccgtcataccctagccttacccacacccgtaaaagaatatgttccctttgcggaagataatggaaagattgacgcgcttgaacagaggttgacagcagtcgagggccttggctattacccattctcggatttagcacatttatgtctcgtgcccaacatcgtcttccctcccaggttcatagtaccggactttgataagtac

SEQ ID NO: 291484 - DNA, 419 bp, Glycine max
tggagaggatgctccacggaggagtttaagaggtttacgacgagagaggggggagcacgagattgaatgaagaaaaacggagagaagccgaactttgtgctgtgtctcacaagactctcattcatcaaaggtacaagtgttacacatgcttctatttatagactacgtatcttccttgagaagctttcttgacaaaactttattgagaagcttctttgagaaaacttctttgagaagctagagcttagctacacacacccctctaataactaagctcacctccttgagaagctttcttgagaagattcctaaagaagctagagcttaagtacacacaccccctataatagctaagctcactctcatgccaaaattcatgaaaatataagaaagaagcttctattacaagactactctaa

SEQ ID NO: 291485 - DNA, 387 bp, Glycine max
  unsure (1)..(387): unsure at all n locations
acaacaatgatccgatacttgtccatgttactgtttatcatcatttttcgtcattttataatatttatgatatcacccacaactagatctcatgagccttaccatattctaggtggtgtgtatatctcaaatcgaanagtttatcgattctttttgtgttgagttggtattgtaccaaaaactatattatcgggtgttgttctatcaagatagcatctagtgctagtgttggtttaagaaatttatgtgagaaacttgtagaggctatacgaatacctatatctttaattaatcactgaaaaaatctcactactctatcgagaaaactagnataaatggaatataatacaaggggttgaatatgtgtaacaanagtaaatttttctc

SEQ ID NO: 291486 - DNA, 386 bp, Glycine max
  unsure (1)..(386): unsure at all n locations
tttagctaattntatcgaacatatcttatataagctaataactaaaaaagttacaagctactactagtatgtttggtacacaagcttattttaataacttgtttttcataagctactttaaataacttattttcattaactgctttgaaataacttatgaaaaataagttataagctactggtttttttcttctcaattttatctattttatttgaaattttattttatcatttcattcaactaaaaatccctcatcatcttttattttctgtctggaaaaatgctcttatcttttattagtttgttgaatgtcaaactatttatgtcaataaactattacattgcttattgtaatttattattaaaatattttggtactaaacaa

SEQ ID NO: 291487 - DNA, 313 bp, Glycine max
  unsure (1)..(313): unsure at all n locations
gctaatattttttttaatcaagtttgtgaatcacatgtatgtgaacactcttagttcaacgatttttttttttttttttgtttaacgtttgtgttgtacttaaatgtgaaacacacctataaggacgaagagactagtaaatataggaacaatctagaggtatgaacttgactttgggagcattaatggttgagttttgaagcattttaagatggaatagttcacatgtcttaaggcacacaaatctaaattaagagaaaatattgattgcacgttatattttcatttcttggcagngccgtgactgaacctc

SEQ ID NO: 291488 - DNA, 416 bp, Glycine max
  unsure (1)..(416): unsure at all n locations
tctgtcttacagtttaaacaaatataatatttcgacttatgaaaagaacaaggtttgccgaaaaaaagtgaaagatcttagtttataatataacctanactggatactgcatgagaatttttagaacatcttaccaaacatgattgcacacttaaacagagtaatgaaataatcatgtcattttggacccctttccttcaaaggttagagattaatagaatttgcatatcaaatgataaataaatagatgtatgcaagccagatgacataagtcgctgattctgatttctgagcccataaggaaaatgatgacagaagagtgatgggttttttacaacacaactcccttttgtggatacaatctttgtacagatatgttggtcaattgatcattagacattgcatttgcattaaat

SEQ ID NO: 291489 - DNA, 254 bp, Glycine max
cgcagaaccaccaccaccaccgccaccacaaccacaaccactctttctggtgtgaaaaaacgccactctcttttttccgagatcggtgcagcaacacttactagctccaccaccactcgaacctgaagaaagcttggagcaccgaagctgagccagggctccgggcctgaggtacttgttcttcccggagctccgaaccttaacctatcaaccttgctctttcggcgacaccttccccattattatttcttctc

SEQ ID NO: 291490 - DNA, 405 bp, Glycine max
cttattatagacatagcaataaaaatatatttactattagaatttataaaagaatttttaggtcttactagtaagcatgctcagtgcaaatgactaattggttgaaattgacaaacaactcatctaccaatttattgcgagacactgtaataacaaaagtaggtataataatcattaatccaatcgacatcatcttaaatgcaccatataaagcgtccttcatcagtatcaaaaaggaaaggaagaaagacccatctcattaatagtgaagttggtcatggtcaagaacaccgttagcattagaaaaagataaagacaaggccaaataaatatcaatcatttcatacgcatggtccattattattaaaacgtacaactcggataagtccaggggttcacgagtct

SEQ ID NO: 291491 - DNA, 409 bp, Glycine max
  unsure (1)..(409): unsure at all n locations
aattttaaatgacagtggtggaattacgtgagttatgtttaagtaagttgtatctcatttatatgactcactccctgtgtgctatttgtgtttggatcctatgatgatctcgaactttgtgttcgggggagcagatgactaggtgaattgctttaaagaaccttatgctgaaggacgtcgggacacaatactctgataggatgtgacattggggcataagtttctatattattatttattccttatattattagtacatatacgtatggngtagagggtgtcacaacaagcacaagctatagcaacaaaaagttcagcttctattgcttgacaagtaactattgggtgcttcttagataaccatganatgacaccgggttccaacataaagacataactagaagtactc

SEQ ID NO: 291492 - DNA, 413 bp, Glycine max
ttagcgaattactattgttattgaaaaatatgcttcttgtagataacatgctaccgaagaatcattatgaggcaaagaagatattatgtcctattggaatggaataccaaaagatacatgcttgccataacgattgtattttgtataggcatgagtatgctgaattacgcaattgccctacatgtggggtgtcatgctacaaagtcaattccaacgattgcagtgaacatgctagctcatacaaagatcgtccatccaaagtgtgttggtatcttccagtaataccaaggtttaagcgattgtttgctaatgcagaagacgcaaaaaacctaacatggcatgctgatggcaggatcaacaatggattgctctgtcatcctgttgattctcctcaatggaaaataatagatcag

SEQ ID NO: 291493 - DNA, 453 bp, Glycine max
gtgcttaattgttaaacttatcaaaccatagataccgttgattactaaaaatacccattttctctccccctttggcaacgccaagaagccaaagtgtgcgaaatggaatatattagtggcgcgtcaaagactaccgaacattgatcaagaatcaaccgatgaccacctttttatctaaatccctacatctaaagacaagtttctttaaaaaaagaagttcctttggaaaggtttgggaaatagtcacaggcatttaattctccaatttaaacacatcccttttaaaacagtccctaaaggagcatagcctatatgttggcaacacgtcggatttgataatacggctggaagtacgtctgacacaagggttggacaaaaatgttacaatgggttcctaaattggcacaaccggaaagttctaggggaaaactatttgttgggcaacaagatacc

SEQ ID NO: 291494 - DNA, 410 bp, Glycine max
  unsure (1)..(410): unsure at all n locations
tgatcaaaacaattatctgttcattccaatcctggagctgctgatgaatcctggataggatgctctagctccgtgactggtgtagatggctgggtctcctcaagaacaggtgcagaggatggctcacgtatctgatctgtggaggtaccctcctcctgagccatgtgtgcatctgtgtcaaaataaaaaggctcaggaggggtgagtgtttgaacccggcaagtgcaccggatcacgcaatttgtataaaacgataagaactgagtatcgaactctcggggaacttgtgttacttggtaaagctatattcaatgaataagtgtctagtatgaaaagagatgtgttgactatgaataggtatgtaaattaactattaagagganaatcacatgagtaatgatgcgtgaaga

SEQ ID NO: 291495 - DNA, 269 bp, Glycine max
atcatgcgcctattgccaccgtcataaatataggtattttgagaatacatcttaaagaccaatggttaacgatggctctaatgggcggttttgcttgaataaataataatgagatcattgctttagtaaatgatgcggaaaaggatagggacattgatccacaagacgcacagcaaactcttgaatagcaaaagcttatttgaataggcggaaggcaagagacaaacaattgaagcaatctagctcttgacgagctaggacacgataga

SEQ ID NO: 291496 - DNA, 416 bp, Glycine max
  unsure (1)..(416): unsure at all n locations
tctcaaggaggtgagcttagttattagagggtgtgtgtagctaagctctagcttctcaaggaagtttttctcaaagaagcttctcaaggaagttttctcaagaaagcttctcaaggaagctacctagtctataaatagaagcatgtgtaacacttgttgtaactttgatgaatgaaagtcttatgagatacacttcaaagttccacttctctccctcttttattccttcaatttcgtgctccccccttctctctttcttttcctccattaaagcatcctcttaaagcttcttatccaaggcaattcttggtggtgaagctccttcttccttggcttattccctagtggatggtgtctcccctctcctattctcctttgccttccgctgcatctccatggtgaanaatcaccattga

SEQ ID NO: 291497 - DNA, 408 bp, Glycine max
agcttgcagtttgagatttcctgttctgtctgactaccttccaaagtttatcaaccataaattgtaagaaatgcttatcatggaattgtgccaccttgttatactccactgctaaaaaaatttaccacataaagagtagtagcatgctgcaaccacaagaaaacttattcaaatgattttaaatgtacaggttcttaactttcaaagtaaataatacttaattttgtcagaattttttaacaacgtaaaatggaagaatttctcctatcaaggaatatctaatgccaaaaagcgaataacatgttcagaagtgaacaataacaaatgataaatagaaggcaagagagaatatcatttacacgtttcagaatttaattgttcacgcaaccttgtacaagtaagcatgtg

SEQ ID NO: 291498 - DNA, 390 bp, Glycine max
  unsure (1)..(390): unsure at all n locations
taactctcaaattccncttcatcccaggctctntagtataagctttccttcattanggacaacaacctcagcaccaggtttgacaatatctgtcaatgggatcatgagactccttccgtccaatgtggtgagatccaacgttntaccagtaaaggcctcaagaaaggttatctcttggttgatcaccanatcattaccatcccttctataaagagcatgcggcttctcatctatcacaaaaatgagatctgctgggatgacaccaagctcacggntacctttctctggaaaggtaatttttgttcctttcttccagccaggttttatctcgatagtcaaaatctcctccacatccccacatttgctgaaatggaattgcatgtgtcaaat

SEQ ID NO: 291499 - DNA, 409 bp, Glycine max
agctttgatgttgcgtagcccaccatcttttcatagtagagtatcgataatgtgtctaccatcacgattatcgtctccctttccatcattgggggtaccacttgggccgccagatccctccaccttttaggcgtgttctttgaaagatccgtccccctttttgcaaatgttctatagttgcatcctatccggaaccatatcaaaattgtactgatactgcctaacaaaggcaaccattaggtccttccaagaatggactcgggaagattccaagttagtgtaccaggtaacagctaccccagtaagactttcttggaaggaatgtattagcaattcctcatcttttgcgtattcccccatcttctgacaatacatctttagatggttcttgggacaagtagtccccttg

SEQ ID NO: 291500 - DNA, 326 bp, Glycine max
tcctctatcataacctttctatgagctcgcgactggtcccagtcttgccttcgcgacttgagttcattattgctaccccatagagctccgcaaaattagttgcggccatactcttgcttgagagccctcttggtctcttggtcaagggctcttgcgggaattgcaatctcatcccgtaacccggcacactccttccgaacgtgtgtagcagccaacttgaacttctcttggcgagtgttgcctttccttactcggttttgagagcttggacttcttcgacctcttccggtgctgcgaaaatctcttcgctggcgacctttaacttg

SEQ ID NO: 291501 - DNA, 347 bp, Glycine max
agcttgtcgttaattgttacgacaaaaattcggagctaagattgccgaataaattccgtagtatatcgagacgctcgaaatgcgaagtaacctctcaccgaaatgaaacgacaataactttgtactcgaatgcccgaatgaatcccgtaatatatcgagacgctcgtaactgataacagaagctctgagcaaagtcaaaagatgattactttatactcgtacgtgcgattgtttcctgtagtatatcgagaccctcgtgattgaaaccagaagcccgtagcaaactcaagcggcaataaattgttactcggatgcccgaatgaatgccataaaatgtcgaggcgatc

SEQ ID NO: 291502 - DNA, 408 bp, Glycine max
agcttttgttcaaagaagaaaaagaagttcaaagagattcaagacttgtaaaggattatataagattgattggaaaagtgtcttgaaaagaaaatcaaagccttgcttttatagactcttcatgtctggccaagaggaccatttagaagagttataacttttagaaaaacttaaaaccaatttgaaaaagtcaaaaaccatttgaagagttacatcttttgatttattcagaaacaatcactggtaatcgattatcaaatcagtgtaatcaattacacaaggcttttatgtgaaaggatgtgactcttcacatttgaatttgaatttcaacgttcaaaggcactggtaatcaattaccaaaacattgtaatcgattacagctttttgaaattaattggaacgttgtaa

SEQ ID NO: 291503 - DNA, 95 bp, Glycine max
gggccccccggggtgtggctgaacggacccaccccggagcacacacaggacaggccattgggccgcgcaagaaggggaaacaccagccaccccgc

SEQ ID NO: 291504 - DNA, 410 bp, Glycine max
  unsure (1)..(410): unsure at all n locations
agctttagtttcctatattntgaagcaagatttgacattcctataatgtattcactgtcatttcctctgccttgatacttcatggaaatcaagttctaaaggagagtacttgtttccgccttatcgctttttgcatagcgcttttcaatttcatcaaggaattctttggcactagttatatcatctgaaacagtacccctaacgacctcaggaatgccacgcttaatgatcataagactcatgcgatttgagtgatcccacttctcatgaagtttcctctattcagaggtacttgaatccgtaggagaaggnggtttctcaatccttaatgcaaggtctagatccatgcagccaagaaaaatntacatgttctcttttcggtccttaaaatntgcaccattaagaactgg

SEQ ID NO: 291505 - DNA, 421 bp, Glycine max
  unsure (1)..(421): unsure at all n locations
gagttggagtgcacattgtattatttattgtggagagccatgaaagaagcaaagcaactagtggaaaggaatgagaggaaacaatatgtcaaagtatttgattatgcacatgaattattgaggagcaatcctggatcaacagttaagatcaacatagtgccaagcccagaaggtccaccacaatttcacaggttatatatttgtcttgctggctgtaagaaggggtttgttgctggatgtagaccattcataggtctagatggatgtttcctagagagtgcatatggaggaaacttgctctctgctgttgggcttgatggcaataaccacatctttgttattgcttatngtgntgcggacattgagaacaaagacaattggaaatgagttttaactgtgttgcataaagatcttggggatt

SEQ ID NO: 291506 - DNA, 332 bp, Glycine max
tagctttcagcaaattcaaacgacaataacttttttactcagatgtttgattgagtcccgtaatatatcgagacgatcaaaattgaattttgaggttctgagctaattcaaacgataataagtttttactaagacgtttgattgagtcccgtaatatatctagacgctcgaaattcaattctgaacctcagagcaaattgaaacgagaataaatttttactcggatgtctgattgagtcccgtaatatatcgagacgctgtaaattgaatgttgaagctctgaccaaattcaaacgacgataactttgtactctgatgtctgattgagtcct

SEQ ID NO: 291507 - DNA, 357 bp, Glycine max
  unsure (1)..(357): unsure at all n locations
ncaacattcaattgccaaggtctcgatatattacgggtctctatcanacattcaagtaaacagttattggccgttgaatttgctcaaagcttcaacatctcatttttgacggtgctcgatagaattacaggactcaatctggacatgccgagacaataatgtaattgtcgtgagaatttgctgagagcattgactttcaatttcgagcgtgtcgatatattaggagactcgatcagacattcagtaaaaagtattgtcgtttgaatatgctcagaagcttccggattcaatatcgagcgtctcgatatattacgggactcaatcatacatccgactagaaagtgattgtcggttaaa

SEQ ID NO: 291508 - DNA, 369 bp, Glycine max
tcaagggtgaaacttcctgcttttattgttgaccacagagtggtacctggagatatgtcgcggtggtcaggagaccttggggacgtcaagtggggtgctattgcccaaaaccaagcttgaccaatcccgacccaacccgggcatagtcggtcagtgagaacctgtgatgtacctaagcaagcgagctgctgccaggcaacagatgaaacgattacgagactcacaagcatggacgcttgaggtggctggccagctgtgaaacttgattgatatgtgagatatggtctctggtaatcgattaccaagggtgggtaatcaattacaaggcttacaatgaagacaggaggctaagatggtctctggtaatcg

SEQ ID NO: 291509 - DNA, 227 bp, Glycine max
gactaaaaaacattattgaacaacataattaaaaccaaaacttaatcctcagatccctcttgtaagactaagatgcgatcctgcttcaatcaagtgctaaggcaacagtcattttccaatgctaaaggcacctagctatgcacacagatggatgatcagaccaaaagcatacaaaaattaagcagtggaggaagcattgaacacagagaacataatcaataggatat

SEQ ID NO: 291510 - DNA, 409 bp, Glycine max
  unsure (1)..(409): unsure at all n locations
tttagcttgtaggattatggggtacccgtcacatgtggtactaggtggcggtcgggcaatggtgcaagtcgactatccatattcacaaatcacacataaatccaccatccccagttgcccaccttcaactgagctcacatactcccacgtagcccttatcctcgttcctctcaacaccgggtccccatcaatccctccaagcttccataacatctaagcaatacaacatccaaacatcatgaactatcaaaaccaagaaaacagagcaaaggcagaaaactctgcccaaaaacacaaaccaacaccgccgctttccttactcaaataccccagtaacattctcttttttccaattcgttaaccgttggatcgactcanaaattttaatgaaggtcccaagtacataaat

SEQ ID NO: 291511 - DNA, 417 bp, Glycine max
  unsure (1)..(417): unsure at all n locations
ctatgaatattntacactaatgtcatggggacataaaataaatgtctcctcaaattaacatacaaataagttaataattcaaagcactaaatcctacaaaaatagtttcaaacaaatatatataaacaaaaaagggatatgattattgcatttacgtagtctagctaattttttttgtcttaaccctctggttcatcaggagaaagagaccataactaatccaaagttcggtcaagagataagtaaagtctgacaaagaattgttttcatcaatgatcgaacttgaatagtacccaaacaatctaaccttaacttcaacatattaaccatttgtgctcaatcacttggttatgtagtctagttaatttgtgtgtgctnttgattntagattgacatggtaagataatgatccaagac

SEQ ID NO: 291512 - DNA, 399 bp, Glycine max
agcttcaccgtatgacgccgatcgaacatttcctaaccgacgtcatgcaaatttcgttcagggattgaattgaaaactcgttaggcgacatctgtcgtgaagtagcgaccgatatttttcagccgacattgcacaattctttttagaaaagctcgctggtcgataatggtctttttacggcagagtaagttttcttgttttggtgttgcataaaaaagttacaatgtacttcggctaggtttttcgtgcgagttcaaccgacattttgtttcggccaggaaaacattagcccacctctgcaaaaaaaatatttgctaaccgtcttcatgcatatttcattcaacgattgaatagaaaactcaatagccgacaacggtcgtgaaatagtcccgactgata

SEQ ID NO: 291513 - DNA, 427 bp, Glycine max
  unsure (1)..(427): unsure at all n locations
tctttgttagacctcgatcggtcatctttccaggccgtagtcgaccgtcattnttttcgatccatttcggtgaataatatttttttgccgagatgggcaaaatgccagtttcggccgaataaatgggaaaatgccagtttcggccgaaacgataagtcggttgggctcgcacataaaaacctagccgacctacattttaaattttttatgcaacaccaaaacaagaaaacttcctgtgccgtaaaanaaaaacactacatgacagcgagcgttttgaaaaacaaaattgcgcaacgtcggctgagaaatatcagtcggagctgtttcacgaccgatgtcggctattgagttttcaattcaatccgtgaacgatatttgcatgatgtcggttaggaaatgttcgatcggcatcatcctgtgaagtttc

SEQ ID NO: 291514 - DNA, 410 bp, Glycine max
  unsure (1)..(410): unsure at all n locations
tcaagcttcatgatgatgaatcaagattgattcaaggagttttgatgataacaaagatgatgacaaaaagctcaaaagtcaatatcacttcatgataacaaagatgatgacaaaaagcccaagagaatgagttcaagaatgagtcaagaacacttcaagaatcaagtttcaagaatcaagaatagacaagttgaagattcaagaatcaagaaaatactcaatcaagataagtactaaaaagtttttcanaactttgaatagcacatgaatttttgacaaaaccttttaccaaagagtttttactctctggtaatcgattaccagtttattgtaatcgattaccagtagcaaaattgttttcaaaaagctttcaactgaatttacaacattgtaattaatttcaaaatggt

SEQ ID NO: 291515 - DNA, 434 bp, Glycine max
tattaacaattccctcccgagtgtctgcctttatctatgattgaacttcaacaatttaccctcattggctaagattgaacaacaattcaataacaagttatatggtgtatgttaaaatttattacatctcgggtaagtggtaaatttacacttacgcgatttacttttatcattttactgccaagtaccctttcaattgaatacataacatattgcttgagtcttttctcttgagagctcccatccttataccggaagcttccccgagccactttggtgatcgcagagactccttttattgagcttatgcttccccttagggtctttaacgagagggggaatggacctccgttggcaacaatttggctcctgcgggccaggcagaaggcgttcatgtcgacaccaacttgagtcatgattcctataaaataaca

SEQ ID NO: 291516 - DNA, 390 bp, Glycine max
  unsure (1)..(390): unsure at all n locations
agctttcaaaatagacaaccaacattccattcatttcccccttaagattttggatgttgattatcaaggcagttataatgttattcatgatttcacgtagataaagtctagcaaatctagaaacggacataatgaattgaagtcaataattcactttggtatgaattatataaaaggaaaaggtaaaaagccacagctgcatcgcaccagtaacacggatatatgctggaaatgagaaatggtaactgtagtttgtttttgtataacttctgtatgaaagaaaagagagatgagaagaaaagaaagagaagtttgtgatgagcgatgcaataaagataaaaaaaaggataanaatgctatanagagtattgtatgaataatataaatcgt

SEQ ID NO: 291517 - DNA, 413 bp, Glycine max
  unsure (1)..(413): unsure at all n locations
tgtaaatgagctntatataccataagttcttaattatttaagggacattnggataaatactttaattaagcacttatttataagtttttatcaaaatttaagttaataattgtccccctaactattaaaataagttataaaaaatcttataaaaataacataaataacttttattagctcgaataaaccttatttatcaaaatagcttaccttatcagtataagtattaattacctctntcccatattttttaatatttaaggttattacacataaactaaanaatgatatattaaatacatcgatgtttcatacttgtactaatagtaataatgatattaattagactctaaaattctaaagtatcaattattttgaagagaagatgaaaagttagaatgtctaaaaataca

SEQ ID NO: 291518 - DNA, 393 bp, Glycine max
  unsure (1)..(393): unsure at all n locations
tttgcatgtagcttgccgcccagctcgcccaggcgagcaaggatgcttcctccagaagcaacagccttgtggaggaatcttctggagggcccaagtgggcctggttgctatttacagccccttgtttactaaatgcacccccctttctattttttcgtaattctttatctgtaacattacgaaactttacgaatttcgtaacgatacctatcttccttccgcaaggttacgaatccttactgaatatgtatttactcttttttagctttcgaagaagttacggaaactcactgactgcgcaaaaacaccgttgttcgatttccgccacattacgataattcacgaatcatgcangcctgcttcctttgattgctgagacgtctcgggacttca

SEQ ID NO: 291519 - DNA, 341 bp, Glycine max
  unsure (1)..(341): unsure at all n locations
tggttcgaggtacttacccgtngaattgcgagtaactttgaagaacgaatgaagaacgccgaagaactgctcaaacctttgctagattcctcacggaaaacgttacggaaacgtttcggaagcgcctcggcttagattttcttcacagaaataatttttccgagcatattcaaagagagagaagtgcctaaggggctggaccccttccttcttcctttcctcccctatttatagcaaaataggggaggtggttgccgcccagctcgcccacgcgagcaaggttgcttcctccagaagcagccgccttctggaggaatcttctggagggccctaatgggcct

SEQ ID NO: 291520 - DNA, 410 bp, Glycine max
  unsure (1)..(410): unsure at all n locations
agctttatgatgatgttccaagcaattttgataatgccaaaagcccaagtgattgattcaagacttcaagatcaagcatcaagaatccaatccaagattcaagattcaagagaagaaatcaagaagcaacaagtcaagacttcatatagaataagtattaaaagaatttttcaaaaaccgaatagcacaattttgttttacaaaagaattttctcaaattttctaagttaccagagtgattactctctggtaattgattactagttactagtttggttttcaaaatgttttcaaatgatttgtaacgttccaaaatgattntcaaatagtgtaatcgattacattatattagtaatcgattacaagtgaatctgaacgttggaattcaaatccaattgtgaagagtcaca

SEQ ID NO: 291521 - DNA, 375 bp, Glycine max
  unsure (1)..(375): unsure at all n locations
ttgatgggcaacactggtggatggacgnaacacaattttgctgcgttagagagagagagagaatacgcttctgaatttctactttggctgagtgaggagagataaaaactctttggttataataaaagggttttccctttttgcattattctattcaagctctgccacatgtccctatttgattggagcaaaagggcccactttctctttttgactgtgacccatacctcagcacaaaagtgagaaagatctgacctttgaaacgctacaatactgcctcagtttgcgtgccagttctctgattccagtttctcgcgtgtctctgcgctcgtcggtgccacgtatccaaagcatgcaatatatatatcaaaacgc

SEQ ID NO: 291522 - DNA, 411 bp, Glycine max
agcttgcactcaagattctccttgcctggcacttcaaaaccttctggttgggtcatatagatgtcttcctctaaatccccatgcaagaatgcagttataacatttaactgctcaaagtgaagattctctacagctgctatactcagaataactctgatggtagtcatctttacaactggagagaagatctttgtgaaatcaattccttgtttctgctgaaaccctttcaccacaagtctctccttgtatcttcttctaccgtcagattcttcctttagcctatagacccacctattctgtaacgctttctttccttctggaaatttagttaaagaccacgttttattcttctgaagggatgtcatctcatctttcatcgctagctcccacttaatagtgtcattcccctgt

SEQ ID NO: 291523 - DNA, 413 bp, Glycine max
actcagcttgtaaagaacttaagataaatcaagaacaagcttgttttcacatcggtcacgtgtatgatatccactcgacaaagttgaagtaaagaaaccttcaatcctataacgcaacgtggcggacaaaagtgggcagttaacttgaatgaccattattgtcaatgcggaaggaattttgcgcttcactatccatgttcacacattattgcagcttgtggttatgtgagcataaactactaccaatatattggtggatcgagtgggctcagaataattaaaaaggggggttgaattaattattcctaaacatttaccaattaaaaaattactcttttaaagctttttactaaattttaagagaatgaggagtagaagagaatcttaacagaaagtaaaagcggaaattaaat

SEQ ID NO: 291524 - DNA, 307 bp, Glycine max
  unsure (1)..(307): unsure at all n locations
acaagcaaacgacacacgcgaaagancaacatcagctgacgcaccaactacaacagcaactcaaagaaaacagttgatcagtttcttaaccaatcacatgaaaaccgaaaacaccattgatgcagtagccacgaatgtaacaggtatctgtaagaatgatgatgttaataatgattaccacacttggatcattgacactggggctacttctcacatccgttgcctcacagagctgtttaattcatatactaccattctgaactctcatgttcttctgcttagtaccacgaaagctcaagtagaagga

SEQ ID NO: 291525 - DNA, 476 bp, Glycine max
  unsure (1)..(476): unsure at all n locations
tgccattatnccttagacntnctaagnacntnacgaaactctcgcngatcctcagaagaatgatgatgactctcctccctattcccttttgcaggaacgaggagaacggtgatagcattaacagccttggccatacatcggaactataatgactttgcctgcttttcacaagtgctaccaaatgatggctatcttgtaagatgttagaagtaggatcagagtgcattccgctcctcaatgagacaaagctccctcaactctgggtcctccctagagattgtagaacacagtgaagatgagagctcccactaactacaacagtgctgggaggattcttacaaactaacgaactagactgaactacattgagagtgatgttatctgtactcgctctctttttacttaagctggtccttagaccacagtgcatgtatatgctggttactgttcttttgcccttacatccatgtcaatcn

SEQ ID NO: 291526 - DNA, 399 bp, Glycine max
  unsure (1)..(399): unsure at all n locations
agcttanagtangtcnaatnctaaaangacgaaattggaattcttaaatatgaagactatgtcaagaagatgaagtaagtctcaaaatttaaatttagttttttttaatagaaaatgacaaacgatttactgcataaggaccattcatatatcttagcattatatgtatacaaagttactttctctaacataatttcaatagtaattcaaatgatggcattacatttgaaacataaatctctattaaaacaaaaataaggttcaaatatattaatgatcccttaatttgatttttttataattatctaaagtttttaaatgattccctcacatgttagtactttaaacaacctattgtttgtaattttcgggataattttgattgttaaacttttttat

SEQ ID NO: 291527 - DNA, 308 bp, Glycine max
aatcctctctagcacattaatgtccaaagatctccatattatgtagcattcttaggaatatatctctttatgattaatactagaaagtaagacgtgacgataaaaaatcctactctggttatatgcgactaaaagtggattctaatgcccatcgagactttagaaggagatcaacacacagttcaaccgactcacgacacaatttttggttcagtggttgatacgcaacacagactactttgttctattaggcgttcgttatgcttaagtattaaatagaacattgcacacgtcaaaaactctactat

SEQ ID NO: 291528 - DNA, 248 bp, Glycine max
gctcggacccgcgatcctcttagtcacctgcggcatgtaagctactggaggccatgcccgcacaggcagacatcaggaaagtcccataacaagagacgtaacaagctatccgaaccatggcccgacaccactactcatggctgaaatgagtgcatgcgctctacatcataatcatattgaagacgagctgatatacgactcatgcacaacccgacacgcacaaatgagcgtgacacatcaatctactc

SEQ ID NO: 291529 - DNA, 407 bp, Glycine max
  unsure (1)..(407): unsure at all n locations
taagcttgnccttcnctaaagcanaggggattattatttttctgttctcgcaacaccaaatgtctccccttgtacactttgtatatccactttgaaccaacatacttgtacctttatgatgtcatctcccccatagaactgatattgacaacaacaaaaggtacaaatctcacatttgagaaagtttgaatagcacaattatgtaacttcatgctcacgctccctatgccttcaaccttcattgtttcatcattttctaacatgaaatgaccgaattttccatcggttattaaagtgtcaaacatttctcgatctctacaaatgtgctttgagacaatagaatccatcacccattctgttttatcaaccttatcatatgttgccaaaaacaagtcatcttcatcttc

SEQ ID NO: 291530 - DNA, 404 bp, Glycine max
tcaagcttgtatagttccccagtttatggttattttgtagtgatttttgtaaataaatcttttggttaatgttgtctctagaaaatttccattggatttaatcatgaaatatgttcattttaaggtgaaaaggaggctaagttttgaattgcaaaatgtagcagttgggttaagctcaacagctgggctaagcgcatatccatcgctaagcgcagttttagcgcgcttagtgcagaggataatttggcagagcattagcatcaaatccacacactaagtgcgagatcagtgcgctaagcgtagcaggtgccttcagccaggctaagctcgagactagcgctaagcccaatttcacttactcgcgctaagcacgagggtggcaatcaatgggagaggaccacttc

SEQ ID NO: 291531 - DNA, 399 bp, Glycine max
atgggacccgggttgtttaacttggatatgggctacgtgggagtacgtgagctcatatggaggtgggcaacaggggatggtgggtttatgcgcgctttgtggatgtggaaaacttgttgtgcaccatcgcccgaccgccacctagtaccacatgtgatgggtaccccataatcctacaagctcgagatgaagaagtgtagaaaggtgaaacttcctgcttttattcattgaccacagagtggtacctggagatatgtcgcgggggtcaggagaccttggggatgtcatgtggggtgctattgcccaaaaccaagcttgaccaatcccgacccaacccgggcatagtcggtcagtgagaacctgtgatgtacctaaacaggcgagcttctggcagtcaac

SEQ ID NO: 291532 - DNA, 407 bp, Glycine max
  unsure (1)..(407): unsure at all n locations
agcttggattttcttttagtaaggaatctatccttcctaagatagagccaaacccaatccccctcattaaaaactagctcctttcttcctctattgcccttagttgaatacacctttgtttggttctctatgtgggtcttaaccctctcatgcaacttttttacaaactctgacctagattccccttcttcatgtataaaaagaagtgtcaagtgggaggggaatgaggtctaggggtgttaggggattgaacctatagacaacctcaaaaggggattacttagttgttctatgaacccccctgttgtangcaaattctacatgaggaagatactcatcccaagacttatggttgcctttcagaagagcccttaaaagggtggataaagacctattcactacctctg

SEQ ID NO: 291533 - DNA, 418 bp, Glycine max
cttggagagaacacaaagtggtaggcctatataagtctagtttagtgataggggaaaggagtaaacgtccaatgagtttgataaattttgcgaagaagaaggtgtcaacaggcagttgactgctggctatatacctcaacaaaaaggtgtattcgaaaataagaatcaaaccgttatggagatgactaggtccatgctttttgagaaaggaataccaaaataattcttgtccgaggctgttaatatagccttgtacctattgaatagatgcccaacaaaagtggtacggaatatgacaccatttgaagcatggagtggaagtgttgatggattggcaagtgcaccaatttgtaagaaatcgttggctacacgaatcattgaggtggggaggactataagacatgactgatgggatgga

SEQ ID NO: 291534 - DNA, 404 bp, Glycine max
tttagctgatcatcgagttcatagaacatcagagagtcttactttgaagatacacaggtcacttgatcattataaagaggctgatattgtggaagcatgttgaacggagtaacagagatgctaatgccagtcttttatcacatgtgattatggtgaaaattgtcgatattgatgaacatgttacctgtgaccatagagaggaaatgcatgatccatcagtgggagatggatgttatccccacgaaaaagaggatatgaatagtatgactaccaatcttatcaaggatgtgatgagcactcttggaactagctatgatgacaataaaactggaaatgcagaatgtaacgtactcatgtgaatgtacatgggactatgtatttctttgagatgtcatgatatcatg

SEQ ID NO: 291535 - DNA, 398 bp, Glycine max
agacgtcatccttgaccagtgatccgctcttttaccttctctctttcctcccaactcatgcccaatagacgcaccaccacctgtggagaccttaacagcatccactccatctccatctcctcccaaaccaccaccaacaacagcacccacgttagctccgcctcccttggctgtttcccaccatcccgaactcaaaatagtcgcacccatggctctgctaccgcttttacgctttcattcgaccaaccgccacatctagcttagttgtctgttgcctccatcacttcgcaccgcccaccgttgatactgtcacggccattgccacgaaatcccttacggcaatgacaccatcctgctcagcaacgctgccatcaagcatcagattcatctgcgctcag

SEQ ID NO: 291536 - DNA, 408 bp, Glycine max
ttttcatgcaagcttgtgcccgaaacactacatcatccaaactgcagataataactcaagttcttgaggcttgtcattgcatgtataccgtacaaaacctgaatccaaaatttccttcctaggtagcaactgctgagtatcactcacataagaactgctgccatgagtctttatctgcatcctttttctttatctgtttttcctgatgagcttaaaagtatccatctaaccaagaaccattgaaataataaacaatgggcagataaattaataaattaggatccaatatgaacagcagttaacggatgggatgatattgggctgatattctctttgggggcaatttgcgcaggatgtagaggactaaagctgaaggtaggacctcaaccagctgtattttgaaaagtg

SEQ ID NO: 291537 - DNA, 332 bp, Glycine max
ggacctaaaaactcaagctagcggtaaataggaacgcaacatctccctgcatactatagacagacagggaaatggaggctgcaaacttagtaccgcaattccttacaccaaattccacacttcgatataccagccacttgggaatgactttgtaaagcaagcaacgcttaggacaataaagagagtgactctggtggcaccatttggggcgtgctttgattcaagaaccattggcaagaccggtactggacccaatgtgccgacaattgatctgagtctcaaggggggagttcaatggagaatctatggtgccaattcaatggtcaaggttc

SEQ ID NO: 291538 - DNA, 400 bp, Glycine max
agcttccacaaccccaactatagtcctagtaagctccgctgcctgtctctcggtataatgcccacgctgaataatcctatcgaaaagctctccacctgcacatagttccatcacaacgtggacagccatggcatcctcatatgcacccttgatggatataacattaggatgcccagccaagtggtgcattatctgaatttctcttctcacatcctcgacatcatcatcggtgacgagcttcctctttgcaatagatttacaggcatactcctgtcctgttgccttctccacacacaagaatgttgtcccgaactgaccctgtccaagttttctcccaagagtgaagaactccttgaaattatctgtctctctttgcaacacagaatcaacacgaagccct

SEQ ID NO: 291539 - DNA, 411 bp, Glycine max
  unsure (1)..(411): unsure at all n locations
acagcttactaaaacaggagcagacctcnnctttattttatttttatagatcagnaggtggagctcttcaatactccactataaccagacctgaactaagttttgctgtaaacaaagtctggcaattcatggccaaccctcttgaatctcactggacagcagtgaaaacaattctcaggtatctcaaaggctctttacaccatggcctacttctcaaagctgccactcctcccattcccattaaaggcctttgtgatgcagactgggtgtctgaccctgatgatcacagatctacttcaggagctgctatttattttggtcctaatcttatatcttggtggtctaagaaacaacagattgttgcaagatcaagtactgaggctgagtatcgaagcccagcacaagccttct

SEQ ID NO: 291540 - DNA, 412 bp, Glycine max
  unsure (1)..(412): unsure at all n locations
agctttgttctttnttataaaatgagaagttctgaaactcatcacattatctaaaaatcttgaggtggatccaattgctccgatcattcattagcatattcatgttttggtggcatactcaccattgtttgtttctttagggaactcacaataactaagaaagcgcagaggcacccctataacacttgatccagaaaaatggataatgaagagggagtgcaagaacagatgaaggccgacctatcagccttaaaagatcaaatggcttctatcacggaggccatgctaaagcttcagaaaactatagaggataatgccatggcgaccgcctccaatacagctagggaagcggaaccggtgctacagccagcaataaacttgggccgagatagaaacacgacggtgttcggtc

SEQ ID NO: 291541 - DNA, 331 bp, Glycine max
gaaaaaccctgatattaccatatccttaaggaattttggagctttggaattggtttgggaataagtgtggggggtttttgtttcattggacaacttgatttgttggctatgcttcatgatgtattttgggccatacttgatgtacattgtatattggttaaatgttggacatgctgaatgaaatgttgtttctcaaaggataaagagcaaaaaaaaaattcgaaaaatgaaaaagaaaagcaataaagttgagtgaataagatcttatatggacaagaatgatagactcttgggtctactttcatgttaattttatcttactcctttattt

SEQ ID NO: 291542 - DNA, 407 bp, Glycine max
agcttgcagtacttgctctaaagctcttcttctactgggacagtgggtgcctgaactctcattctccttctccgagagtatcctgagcttgcttacggtcgtgcacattgcggatgttccctagccatctgaagctatgtaacagaatacatgtagagagaagcttacatacatcttcgccatgggaaccaactgaattctaaggtgaggccctaaataattattctccatctctctgatctgtggatgaacaattatgccagatgaatgatacttctacatcctataagacaatatactttgataggcatctggcacaaactcgaaatgacgtatgtttgagcttaacatacattatagaatgcgactatacgattagtgaggaccttgatactgatgatagagat

SEQ ID NO: 291543 - DNA, 227 bp, Glycine max
agcttctatgtaggcttgatctttgggcttcaataaggtccttcaatgctgatttttcagccatggagttgcagcggaagataaaggagaagaggtgaggggaggcgccatccactagagaataagctatggaaggagaagcttcaccactaagagagtgccttggataagaagcttagagaggaagcttcaatggaggaggagaatgagagggagggagggggggg

SEQ ID NO: 291544 - DNA, 440 bp, Glycine max
  unsure (1)..(440): unsure at all n locations
tcaacaccaaagccctgagccaaaccttcagccaaacttgtatgttttttactcgcacacaatcctaactcccaaaatgcatgaacatcaaccatgaaggcacacaactcatgtgatcaccctcaacacccacacattcctagacaagaccatccacgacatcaatgacccacaaattgctaatcctaacccttttgtggtaaagtgaggcataacgtgtgtaagaagaagacatagatcatttttgtgatgaggttgaggcaaggctgattaatttggcctttctaaattagcaaaatgacacaagtttttgtgttacatcaatttttatttaaaaccttagataaattataattggaattgctaatttcattntacattgataattaattaccagagaacacttcttatctaaaagtttgacttagtcttggagcata

SEQ ID NO: 291545 - DNA, 382 bp, Glycine max
  unsure (1)..(382): unsure at all n locations
agctttccatattcctctagaacaactcaatttcatttctgaaactctagatacagggtctagaatgaactcatcctattgatgaaatttcattttgagtgtgttgcatcaatgttgttcttcatgtcatgttcattgggcagatctctgcaatatttttcttgtcctctatcgattacttcttatggctttgaattttctcttaatctattgagcatgttgacttcttcattgcagtacacaaccaaaggcactctaagtcttcttttgagatttaaaccctatcatcctttttgagtgactcatgagaacctcacgtttactttaatntggtgtcctctatagaacttgccttttttctgaatacacttaaaccaactca

SEQ ID NO: 291546 - DNA, 439 bp, Glycine max
  unsure (1)..(439): unsure at all n locations
tactcaagctttgctggtgtcgagaagatatcacatgttngncatcattataaatgggttagaatgcgaatgtatgtatacatgattttgatgatgccaaagaaaaatcaaacaaggttgcttcaaatgataagcatttgcttcaagaataattcaagagtgcttcaacaaacaaagccttgtttcaagattcactaaagaccaagccttgccttaaaacaaagtgctttcaagacatgcaaggctctggtaatcaattaccaggaagtgtaatcgattaccagaagacagggttgagaaatagctgttgaaaaaggttttgaatttgaattttcaacatgtaatcgattaccatatgtctgtaatcgattaccagcaacgaaactttggaaattcaaattcaaaagtcataaccctctcaaatataactgtgtaatcg

SEQ ID NO: 291547 - DNA, 399 bp, Glycine max
  unsure (1)..(399): unsure at all n locations
taagcttgtggtcaatatacttatgaatcatagctacaaccttatgattaaggagctcttattcattgtccttcgtcccctccgacttattatcgtgggtgattagctcgtgcaaatccttacagcgtagatggtcatccatcattggcttccaatatgaataactttttgcggttagctcgaacatatctacatcatgagtgacaactccctcaatattgaatcacacaggatagtagctcccctcaaaccagtcgagctttgatactacttttagganacaccagtactatttccctttctgtagtttcaaaataggaacttagcataaaacaaaaatagaatagaatgtaaacgaatgacacactaaattttaacgtggagaaccctttccgtgtg

SEQ ID NO: 291548 - DNA, 235 bp, Glycine max
attcaagagaagttgatttcaagattctcgataagacgtcaggaagaatcaagattctagagatgatgaattcaggattcgagagaagaaatcaggagggaacaagtcgagacttcccaaggataggtttgaaaagggattttcaagagaccaaacatagcatagttgtggtatacaaaagagttttctcgaaattttctaaggtaccagagtatttactctctgggatcgatta

SEQ ID NO: 291549 - DNA, 401 bp, Glycine max
  unsure (1)..(401): unsure at all n locations
agctttatttttaaaatttggtagagcagttcttcaaataaagtttgttatattctttataaactctagctgaaatttttgggaattccttatttcactttagatttttatttcacaagtagagtaaaagtagtacgcaggtgattaatcagtgttaacaagtatgatatttatagaatgtgatttggagagaaagctaagtatgggaaaagaggagtgaatcttgttcgccttgtatgaacagttaagcttaatgcatcaagtcatgtgactccaaagtattgtgtctatcatttttaaaaataactaggttatgttgagaactaatattagaggatcctagttccttcactctgttntttggcatattgtctggtcaactgaagggatttatatcacct

SEQ ID NO: 291550 - DNA, 342 bp, Glycine max
tatcgagcaagcctctccctccaattaacattcgaagtctcttcttagggtttctacgaatattttctcgtgattgtgaattttagatccgcggaagacttgtttaattctagaggtttttgcgacattgcttggatggttaggttcatctgattttaagagtgtgctttagacttttagaggataaaatatggaattatggttgttagttttaaagttcatggttgagattttaatagttccatgatttggtatgtgtgtgtgtgcatattattctattacgatttttaatgcggttataacttccctctttaagtggattccatacttttggttatattt

SEQ ID NO: 291551 - DNA, 406 bp, Glycine max
  unsure (1)..(406): unsure at all n locations
tanagctttataatcaaacaaacccnngcggtctgggtccctcaactgtactgcattcccctcccttcgattttgttttactccgattctacctattgctagaaaaaatatcagggctcttccactggtgatgatcatggaagcccaaagacacaatgaatccgaggatccactccaagcaaggctaaaattgagtgatggctcagcaattcaatgttgtgcgaatgggcatctttatcttcaatcctattttcaaaataggttatggatccatttcctaatttataaattcaatcatagattggggggatgatattccaacctaattngcgatctcagtgaattcagggatcaattcaatggaagtaactctaatggcgttgattgaacttacataacatgatca

SEQ ID NO: 291552 - DNA, 285 bp, Glycine max
  unsure (1)..(285): unsure at all n locations
aagccaaggaccacccaaacgggacagngcaaacgcagaaagcaccgccaaagaccaacgggcacacaggcgcagggccgaagcaaagaaacaaaaccccacgaaagccacaacaagcgaaggacgcacgagccacacgcaccactaaaaaaaccaaaacacgcagaaaagcggccaagagaaagcgaaagacggcaacgcacaaccgccgaaagaacacggaaaacaaggacgacaccaacaagccgcaggccnaaaaacccaagaacgacaacaaagagccac

SEQ ID NO: 291553 - DNA, 408 bp, Glycine max
ttagcttcctcatgaactcatcaccaaagtcttcaaaatcaaaagagatggtaagggggctactgggaggtgtagaagagcgacaaggcttccatccatatgctttcttgtaaaagaagtctccaattaaagaccatttatgagccctattcttagcaaaggaatgatccttcaaggcttctctagttttgataagttctttcttatgtagttgaacatagttgcgagaaggtgaaggatcgtacacttgaacaaccatggaactagacgcaacatcaatgtctaagtcaacttctttaagtgggatcaacatgatgaatgaaaaagaattgagaaaaagggcaatatcaccagaaaacaaaacgtgtgatcaaacaatgcatagaaatccctttgtcatgggtagat

SEQ ID NO: 291554 - DNA, 428 bp, Glycine max
  unsure (1)..(428): unsure at all n locations
agcttgacaaaatctgtgttgccgtgcccggaatgtaggtcgtgcataaacagagggaaaagatagaggcacaagagcatcaaagtgctcaaattaattcagagtatgcagatgcgaaaaggcttaactgcagctcactagtaatagatctgcagtttacatccccacctatacctgtcgatattcctgagagaaatagaagtcaaaataaggaagaactggttgtattagcttccaatctggagtcacatgtttcccaagaaggacatgttgggagtattactgatcatagcttggtggtnagtactaatgctgaggctggtactgtcatggtaaataacacatgggtgaagaatatcatggggaaagcaacacgagtgcatctcaatactaaacctgctggtggagtgcctctcaatagcatgggg

SEQ ID NO: 291555 - DNA, 388 bp, Glycine max
  unsure (1)..(388): unsure at all n locations
tttgctttgttatcttgagataataggtggtcatcctcatttgaagttgatggtgcaacatatttctttggcctaacaggaactccaatatttttacagcttctaatgttatgattggtttggccataccttccacatgtaaactaagccaatttcctctttagcttatgtcttgtgacattgtcctcatctacagatctccttccatttttctttggccttcctctttggacccttttatgtggtggaacagggtgtgtatactgtgtctgggcccaatattgtggtccttggagtggttcaataaaatgctggtatgtcttattataagcttctattgataactactcatgacacatgtcctcagngcttccttctttgtgagtta

SEQ ID NO: 291556 - DNA, 436 bp, Glycine max
  unsure (1)..(436): unsure at all n locations
tgctaacccatggaagctcctaatatctccctcactttttgtggtgggccattcttggatggccttgattttctcaaggtccaattggaccccatttcttccagctacaaaacctaagaaaactatattatctacacaaaaggtacacttctctatatttgcatagagggtgtttttcccaaggactgaaagaacttgcctgagatgtcctaagtgatcatctaggctcctattgtacactaaaatatcatcaaaataaacaactacaaatctacctatgaaatcccttaagacatgatgcataagcctcataaaggtgcttggtgcattagtgagcccaaaaggcatctctagccattcatacaaaccaaacttggtcttgaaagcggttttccactcatcactctctntcatcttgatatggtgataaccactt

SEQ ID NO: 291557 - DNA, 395 bp, Glycine max
ttgtcattctagctttgagccaaaatcctgactcaccataaaccttacccttggaagcaaaaaaaggaaagaaggaaaggaaatttccaatcaaagagaaagcaaaaaaggaaggaaaggaaattcccaatcaaagagtgggagaaagagaaaaaaataaacgaaaggaaattcccaatcaaagagtgggagaaagaaaaaagaaaagattgaatattcccaaccaaagaatgggagaaagtaaaaaagaaggaaaccatgacctataagtggtcttctccctttgattaccaaccaaaatcctgtgcgctagcgacttttcgccccgcactaaacaaaaacagataaggaataaagccaaccaaatatcaaaagccaaaaacacacataagcca

SEQ ID NO: 291558 - DNA, 390 bp, Glycine max
  unsure (1)..(390): unsure at all n locations
tcaagcttattaagtatatgtatataaatgtattaacataacattaaaatactaacataattatatatataaattatattaatgtaaaaaaaattaatatatatatatatatatatatatatatatatatatatatatatatatataacagacatataaattcagtacttttgtgcttacgagtcaaagtttttatacaagaaagtcgaagtatatatcttatttgatacaaactctnttttttttttgcagatccattgtaataatgagaaaaatttcggcatatccaaaaaaccggtcaataatatcaaaattagataaattggcccacaccggcttacaaatgggatggccaaatacattacaaaattntgctttcgccaatgatct

SEQ ID NO: 291559 - DNA, 393 bp, Glycine max
  unsure (1)..(393): unsure at all n locations
agcttgcaatcaagttcaaacaaattttttgtangtttatatcgggaacccggcgcatggtgtccataagagcaacagcttctgcctcttggataggaggattacctatatggatagagattgtagcagcgatgaactcttcatattaattgcaatgcatgttacagtaccgaacttgcatgattccacaaacaaagatgcgccaatggttcttcttttcatcagccccatttcaagctctgaccattgtgatacaacactatcatctggtgctctcggctgaatgcaatggccttggggcttgatccgactgccctccattggtggatataatccctagtagaattgaacgatatggcgattggattctgcacatcatcctacactctgaca

SEQ ID NO: 291560 - DNA, 411 bp, Glycine max
agctttgatggtgcgcagcccaccatcttttcatagtaaagtaccgataatgtgtctaccatcacgattatcgtctccctttccattattgggggtgctacttgagttgccaagtctctccatctttgggcgtattcttcgaaagattcgtgcccccctttttgcacactttttgtagttgcatcctatccggagccatatcaaaattgtactgacactgcctaatgaaggcaaccattaggtccttccaagaatggactcaagaaggttcctaagtcagtataccaggggacagttgtcctagtaagactttctcaggaaaaatgtatcagcagtttctcatcttttgcgtatgcccccatcttctgacagtacatctttagatggttcttggagcgagtagtcccctta

SEQ ID NO: 291561 - DNA, 437 bp, Glycine max
  unsure (1)..(437): unsure at all n locations
agtgaccatttgaataactcaagagcttccattgctcaattgtgtgcgtctcgaacattatgcgccttaatcggacctccgagtgaaaaggtatgaccatttgaataactcaagagcttccattgttcaatttcgagcgtctcgatatcttatgtgcctgaatctgacctccgtgtgaaaagatatgaccatttgaatttctcgagagcttccgttgttcaatttcgagcggctcgatatcttatgcgcctgaatcggacctccgagtgaaaagttatgaccatttgaataactcaagagcttccattgatcaattacgagcgtctcaatatattatgtgcctgaatcggacctgcgagtgaaaagttatgaccatatgaattgctcaagagcttccattgtccaatntcgagcgtctcgatatataatgcgcctga

SEQ ID NO: 291562 - DNA, 412 bp, Glycine max
  unsure (1)..(412): unsure at all n locations
agcttcattttgaatcaagattgattcaaagaagttttgatgataacaaaggtgatgacaaaaagctcaaaggtcaagaacacttcataataacaaagatgatgatctcaagaatcaaagaatgagttcaagatgttcaagattgaatcaagaacacttcaacgttcaaagagaaaatttgatttcaagaatcaagaatcaagtttcaagattcaagttccaagaatcaagatcaagattcaagactcaagattcaagaatcaagagaagacttaatcaagataagtatgaaaaagttttttcaaaaactgagtagcacatnggattttcttanaatctttntaccaaagagtttttactctctggtaattgattaccagtagcaaaatggttttcaaaaagttttcaactg

SEQ ID NO: 291563 - DNA, 527 bp, Glycine max
  unsure (1)..(527): unsure at all n locations
cagcagggaacgaaggcgcgcgggcaaggggaggcaacggagggacgacancccccaggggagcgtgaatgagccatgagaccgngcatctcaaaccaagccgcccgagcaaacaccgcaggaaaggagaagattagggcgancaagcgaccaacggcgaggatagggnggaaccaagctcaagcggcgacaagaaagtgcatcangacaaggcgaaagaaggaaggaacccgcctgcaaaaaagaggcaaaagaagaagcgagacacagcactgctgcggcgacggccaaacaaaaggaggaaaatggacgacccagcgacgcccgagagcacctggacaaagaaggcagggaccaagtggaaaaccgaaattgagacaaccccataacgggcggagaaaggcgcaacactacaactgcacagcaatcgcgtgcaaccaagccggacaaaggtagcagtggggggtgcatacctgccgtgaaacaaaacaggaaatggaccccagacagggccaaaaaaagaaagg

SEQ ID NO: 291564 - DNA, 408 bp, Glycine max
  unsure (1)..(408): unsure at all n locations
agcttctcttttggtttggntattnccagtttcctgaaaatatctaaaaatctcaccaaatgacagtccttctccttcttggaaggtaccacaggatatggtactttcatactttcgttcacaactttatcacttcaactcttccttccttttcatttttttcatctttttcaatttttttattttctttttctttttctacttctttttctttttcttggtcgttaaattcttttttcttgaccattatttgtttctttntttcctgattgctttcacctctcacatcatttttcttgtcatcagtacctttcttttcagcagctttcttcttatgcacaacactctcctcatcctcatcctccacaaaccttntactccttatcatcacagctttgtaaattaaac

SEQ ID NO: 291565 - DNA, 423 bp, Glycine max
  unsure (1)..(423): unsure at all n locations
tcatctatgtttcttggttcaatctgagaagcaaaatttatgctattgtataaaatcttgagtctagagcaagtagatactccttttgatatttcgccaataatgttgtccacggagaggtctttntgagttctccattctctgggagatctttaagaggtgtgatagtgatttctttgctttgttctagctcttcaactttagtttcatcttcaagtgcaatatccttatcctgaaaacctatatcttcatcttccaaagaaatntcttgaacaatagagttagtttcatcacacacaacatgtataggttcttccacacacaaagttctcctattaaacatctatatgctntgctntgcaatgaataaccaagaaaaatagcctcatcgtctttagcatcaaatttgttgagatattcttt

SEQ ID NO: 291566 - DNA, 408 bp, Glycine max
  unsure (1)..(408): unsure at all n locations
agcttcagattaaaataactcaaaatctaggcatctaaaccccctcaatttagtggatttttcaaggtttgagaagtgaaaatgagaatggggtaaatttggagcaaactttcacctcaaacaagtctatatcatcaatctaaacttgctcaaactggttttacgcctaaaattccaccgaatcaaaatttgactcctcaacacccaatttttaccctagaaatggttcttgccttcactttggtcatttgttttcctctcttgcacagcccaagctttctcataagtcctaaatgacatttcaaactaggattaactcattntaacctccatttaccactgaatccagatttggccttccaaaccctcaaagcatcacactnttccactcacaggactacattctca

SEQ ID NO: 291567 - DNA, 263 bp, Glycine max
accagtctttgacccatgaacaataactagtagaggacttcgcacaagcctacaccgagaaggaagcaagagggagggtgattgatgcattgcatcaagaagcgaccatgtggatggataggttcgccttgaccttaaatggaagtcaagacctcccgcgactactagccaaagcaaaggccatcgctgaagtgtgttcagccccagaggaaattcacgggctaatcaattactgtcaacatatgatagaattaatgggccat

SEQ ID NO: 291568 - DNA, 378 bp, Glycine max
agcttgctgccacggttttttccgactatgctcttgtgtggtggaacaagctacaaaaggagagagcaagaaatgaagagccaatggttgatacatggacagagatgaaaaagatcatgaggaagcggtatgtgccggctagttactcaagggacttgaaattcaagctccaaaaactaacccaaggcaacaagggggtaactatggctcgatttcttaatggatgtgctcatgattcaagcaaatattgaagaagatgaggaggtaactatggctcgatttcttaatggtttgactaatgatatcccgtgatattgtgagctgcaggaagttgttgaaatggatgatttgcttcacaaagcaatccaagtggagcaa

SEQ ID NO: 291569 - DNA, 439 bp, Glycine max
tctcgatatgttatgcgtctgaatcggacatgcgagttaaaattatgaccattttaatttcccgagagcttccgttgttcaatttctagcatctcgatacgctatgtgcctgaatcggacatgcgagtgaaaagttatgaccatttgaatttctcgagagcttccgttgttaaatttctagcgtctcgatacgctatgcgcctacatcgaacatgcgagtgaaaagttatgaccattttaatttctcgagagattccgatggtcaatttcgagcgtctcgatatgttatgtgcctgaatcggacatgcgcatgaaaagttatgaaccatttaatttctcgggagcatctgttgttcaatttctagcgtctcgatactctatgcgcctgaatcggacatgcgagtgaaaagtataaccatttgaatttctcgagagcttc

SEQ ID NO: 291570 - DNA, 410 bp, Glycine max
  unsure (1)..(410): unsure at all n locations
taggttgatgtagtaatcccatactcgtacccgtacctgacttttgattattggggaaaactcaaacccgaacccatactcgatcaacttgggtattacccgtcaaagtcggaacgaatacccacgggtatgggttttcttgcaatgtctaagggggagagaggaaagagaaggaagaagaaggtggaggggaggggaagaaggaaagttaggagagaaggaggggaaaaaaaagaaagaaaaggaaaaagaaggtagtgtacacaatgccgaanaagaaagaaaaaagaagaaaaaaggaagcttaacggtggggttaggggagggagaaagataaaaaaaatatttaaaagtgaaatctacgtgagacctacaaaaaattgtttaagatctcaaaatgagatctacta

SEQ ID NO: 291571 - DNA, 373 bp, Glycine max
  unsure (1)..(373): unsure at all n locations
ggaccttgatctagctttataaatgcctattaatagacaaatgctgttttccgtatttatttggtttgaattcatacagggttgatcgagactgacttatttgtaatgaaatggaatttaaatttgtaattaagaacctgggtagaaagagtgaaagatagatctcactaaagtggtgagtaattntaccatcaaatttaatcattcataaaatcgatatatattaatttcatactaataatataaagaaaaatatcactcatttatgaataatcacacttaactaagaagtgtcaaaattatagcattaattcaaataaaaaaaataattaaggaatgtaagtatanattattaaattaaaaacttcatatg

SEQ ID NO: 291572 - DNA, 408 bp, Glycine max
  unsure (1)..(408): unsure at all n locations
agctttntaatcacattgcatgtctgtcagtgagactacctaaaggaaaccatgaaataagttgaataatgataagctttatgatgatatcctattcaaatatttgaaaacaagaaacaaatgaaaacaaggtgatatttttataataattaataaaaaaaaaagtgttctgattttcgattcaaacaggaaaatatttcacagcagataatgaaaaattataacaagcaggtaaatccatgccttgtgaaaaaccatcactttgctgcgcaatctttctttttcaccatggccttctatagcaagcagcaaggatgttgaaggaggaaaagcgaattgtgaggttaacccgaaagaataaagtgactggttaatgaaatgcttcgcaacatccttgactgtggagag

SEQ ID NO: 291573 - DNA, 393 bp, Glycine max
  unsure (1)..(393): unsure at all n locations
taactgtaaaagaccatggatgacanctgtaaagaccttttgaaatttcctgctcatgaaatcactaaaatctttaaagccatttcatgcatatacttggggcgaagtctctttgataaatctggcataaattaaaaaaaaaatgaaagaaaagggtagttcccaatgcaacattccaatgactttttcttttcaaaatacaaatggacaaaaatgccctagtgagttagcctaagcagagttcagtccccaccacaaggcccttcatttccctccaaaaatttgtttttcgctaacaaaataatgaattgccttccaattcaatcacctgagttgtggagtcagtaagtgcttgcagcaactacctttgctttgtttaattgaatttttttt

SEQ ID NO: 291574 - DNA, 407 bp, Glycine max
  unsure (1)..(407): unsure at all n locations
tttagcttgtagaatggctagacatgatacatgtcagggcttggtttggttcaagggtaaaagggatgccccacattatttccatgacacaaatgcaaaaatgatgatttggaaattttatgcaaaactggtcatgcatgcacctatgcggacactcaagtgtcaaatttttatggtcatgtgatgctagggcttangatttatttcctctattttaaatcaacccaatgtttccaaaatatgttcttttatcaatttgtgcattcattcgagtccatttcgggcgtccggngaaatttcacagcattcacccttcangtgtagacancgtttttttctcttcaaaaatcggtcatgatncaatgaattttttttcgaagaagagttggaaatcatctcttttcaaa

SEQ ID NO: 291575 - DNA, 340 bp, Glycine max
tgagatgaagaagtgttgaaaggtgaaactttctgcttttattgaagaccacagagtggtacctggagatatgtcgcggcggtcacgagaccttgaggacgtcaggtggggtgctattgcccaaaaccaagcttgaccaatcccgacccaacccgggcatagtcggtcagtgagaacatgtgacgtacctaagcaggcgagctcctggcagtcaacagataaaaggaagacaagaccacagagcaaggaagcttgtggtggctggccaactgtgaattttgtgtaatatgtggattgtggcctctggtaatcgattaccaagggtgggtcatcgattaca

SEQ ID NO: 291576 - DNA, 407 bp, Glycine max
ttctgcttgaaattgaaaacggaagctctaagaaaagtcaaacgacaataccttttaactcggatgtccgattgagccctgtaatatatcgagacgctcgaaattgaaaacggaagctctaagaaaagtcaaacgacaataaattttgactcggatgtccgattgagtctcgtaatataccaagaccctcgtaattgaaaacagaacctctgagtaaattcaaacgacaataacttttcactcggatttccgattgagtcccataggatatcgagacgctcgtaatttaaaacggaagctctgagaaaaatcaaacgacaataacttttaactcggatctctgatcgagccctttaatatatcaagacgctcgaaattgaaaaccgaagctctaagagaagtcaaac

SEQ ID NO: 291577 - DNA, 460 bp, Glycine max
  unsure (1)..(460): unsure at all n locations
tgccatgacttgtgtcgtacattncnggacactatgaaactcagcttccgtttaattacgagcgacccgaactttagtttcatatcggcatccgagtcagaaggtttgtcgatgatttgttacagcctccgagcccatttcgagcgcctggatatattatagggctcaatcggacatcctatgcaccagtcattgaccgctgacctttctcagagcttgcgctttcacttaccagcgtctcgatatattacaggactcaagctgacatacgagtcaaatgttattgccacttgactgatcttagagcttccgttgatccattacgagcgtctagatctactacaaggcccaatcggacctcctagcttaaatgtattgtcggctgactctactgaaagctccgcttaacattccagcgctcgattattacaggcggccccggacatcgagccaaaggttt

SEQ ID NO: 291578 - DNA, 391 bp, Glycine max
gctgatctttcaacatcctccatcttttagaatttccaaagcatattttctttgcgaaatgaatatacctttcttggatcgagaaacctccatgcccaaaaaatacttcaagtcacccaaatatttaatctgaatcattaccagttatgaggatgtcatcaacatagatcaataaggcagtaaatgatttgcctttcttacatgtaaacaacgaataatctgcttttgattgaataaatccagcaccttgaatagttgtaaagaacttggcagaccattggcgagaggcttgttttaatccatataagggattgttgaggtgacacacaatgttctcccgctgtcgctgaacactaggaggaagagacatataaatttcttcagaaagatc

SEQ ID NO: 291579 - DNA, 426 bp, Glycine max
  unsure (1)..(426): unsure at all n locations
tgtccctgacaccaaacattgctcaatattttatttttgatttttcaaaggnaataactaatagggtgaaatatattttcaatccccacattccttccggtactttcagagaaagttagttttagtccttgaacttcaactttgatcaatttgatacccctgaactttacaaaaggcattggtttttctcctcccaaaggtgaaatctgtgggacaaaaaccactgttgttctaagattcatgaaccaaattgatcaaagtgaaagtacggaaactaatacgagactaaaaacatatttgtcccctcaacttggtttgagttctagaactttgatcaattcggtcccctaaactttacaaaaaccattgttgtttcctaaacttcagggaccgaattgatcaaaatcaaagtacagagactaatac

SEQ ID NO: 291580 - DNA, 398 bp, Glycine max
agcttgtgtattgctgcattctactaatatatggaattgcccactgctttgcctgagaataacaattgcttgaccacaacagcgctggaggcggcaagggacaatggtctttcaaataaacctgttgtacatgaacaaacattatatcatgcgctgaccgtgccaaacgaaccagcgaaatcattgcataattgttatactaactatattcaatgtacctgaacaaaatgatttccaaacacgtgaccgacacatatgatgcggtggccagaagagtcaggtggtggttgacttctaagagggaaaaatgtcatgcttttttgttgggacaacgatacaaggattatgttataccatgaagcaatcacatatcacatgtccgttatatccatccactt

SEQ ID NO: 291581 - DNA, 333 bp, Glycine max
gttacctagtactcaaagataccacctaatttattattaaactaggcggacatggagagatgctttcataataaatcttataagcgctaacctgaaggcactatagctgatttgatgaacatgaagaaaatggttgaagaattaacaatagacttcatagaaaggttcataacagctggaagtcattgttcagtacaatttccagaagtagagtgtgcagacatggcaactatgaatatgcattctaggctgaaagaaaaattagtggctcaagagtatagcgaccttatccagctagcttgcaaggctaatcatatagagcagcgtatacat

SEQ ID NO: 291582 - DNA, 339 bp, Glycine max
agcttggttggagggacttacccggggaagagtgaatattacctagaacgaacgatgaatgttgatgatcggccgtgaatcttcgcgtaattactcacggaaacgttacagaggcgcctccgctcggattgtattcatggaaataattatgctcatcacattcaagagagggagaagagcctaaggggctgaacccttctcttctgcactgtttgccctatatatagcggaataagggagaagctggccgcccagatggcccaagcgagcaaggttgcttgctccagatagaacggcccaagtgggcctggctgctattgacacacccacttttactaa

SEQ ID NO: 291583 - DNA, 409 bp, Glycine max
  unsure (1)..(409): unsure at all n locations
agcttctcaaggaagctatctagtctataaatagaagcatgtgtaacacttgttgtaactttgatgaatgagagtcttgtgagacatacttcaaagttccacttctctccctcttttattccttcaatttcgtgctcccccctctctctttctctccctctttcttttcctccattgaagcatccttccaagcttcttatccaaggttcatcttggtggtgaagctccttcttccatggcttattccctagtggatggcgcctcctctcacctcttttcctttgtctttcgctgcatctccatggtggaaaatcaccattaaaggacctcattgaagctcanagatccagcctccatagaagccccacaagcaagcttccatcacataagtctatggcactttcgtatg

SEQ ID NO: 291584 - DNA, 431 bp, Glycine max
  unsure (1)..(431): unsure at all n locations
ntgctgatttggttnttgtcggcaaaaagatcgaagttgtcttagaagaggcaaatttgattatcctgctttgatgaatatgaagcctanggcaaatggagagaataaggagggaggaacccatgctgtgattgtcatccctacatggccaaatttcccaccaactcaacaatgtcaacactcagccaatatcagttattctcattacccaccaccctaccagtcaagaacacccaatcatccacaaaggccacccctaaatcagccacaaagcccgcctgccgcacatccgatatcaaacaccacccttaacacanaccanaacactaactagggatggaattntccagaanaaaagcctgtagaattcacttcaattccgggtgtcgatgctaatttgctcccatatctactcaataatgcaatggtag

SEQ ID NO: 291585 - DNA, 409 bp, Glycine max
agctttgccacttttatctcttcgtgtagaccccaggggactagagggttgccgagtctcagatgacaatctttcttgtgttctgcaacataggtggtgtccccaaagattttataaatttacttgcaagagcaaaccttgccaaaactatcactacttaattttgcagttccagacagggtgttgattagattcattataatatttatgatttggaacttgaaacctacttcagaaatgaataaacaattctgtatttgaaaatatctcttttgaaaagctttactttatcacattaataaattcatgcacacccaagaaaaaacagaatcacgctaatgttattcaagcatttccttaagtgccccaatacctgactctccccatagaagacggcaagggacttctt

SEQ ID NO: 291586 - DNA, 389 bp, Glycine max
tacaaactcagcttgagctggtcagattcaagggagaggaaccaatttattcatatggagagaatgcctatgggtctaagggtaagaagaatcacgagcgcgatgatatagacaccagagaagaagaagagaggagaagtctcttgcaatcagcacttaaccttgttgatgagagtgacttgtcagatgcttttgatcgagttgtgctgcttagtgtggaaaatgttcgtaatgaacactgtagtttgcagagtgaaacagtgaaggcttgagagccaggtggagtgaaaggtcgtcctaagaatcaagcgacaaacaaggaaaccagagatttgaggaatcttctgatgatgtgttcacaatctgtgtatgccaatgacaaaagagct

SEQ ID NO: 291587 - DNA, 398 bp, Glycine max
  unsure (1)..(398): unsure at all n locations
agcttgccttatagagttccaggaaggataaagtggctgaagggaccagttccgctctcgaatatgacagccaccgttttaggagcgctgagcaccagcagcgcttcgaggccatcaagggatggtcatttctccgggagcgacgcgtccagctcagggacgacgagtataccgacttccaggaggagatagttcgccggtggtgggcatcactggttacccccatggccaagttcgacccagacatagtcctcgaattttatgccaatgcttggcctacagaggagggcgtgtgagatatgcgatcctgggtgaggggtcagtggatcccgttcgatgcggatgctctcagccagttcctgggataccctntagtgctggaggagggccaggaatgc

SEQ ID NO: 291588 - DNA, 376 bp, Glycine max
catgtgactgaactttgcccaatttatatgaaataaaataaatgcattctcaagttttgtttgctgaatgctacaagctttgcaaaacgtttttgctgctttagtctattctgcaaatactagtattgattatgtgttggagtcattatttgcctctgctaagccttctccacagtctggtggcattgctaaacaagctttgcattcgatagctcagtgtgttactattctatgccttgttgctggtgatcagaaatgttcatctacagtgaaaatgctcactgacattctcaaagatgacaacagttctaactccgtaagcttttctcttcagtgaaaatgctcatctacagtgaaaatgctcactcacattctc

SEQ ID NO: 291589 - DNA, 407 bp, Glycine max
  unsure (1)..(407): unsure at all n locations
agcttgtattctttcttcttttttttccaattcaaatgtgattttttttttgcattgtgatctataacaacaaatttcaggttatatttgcactaaaagaagaggatgtagtttttgtctttctttacctagttataaatttattgtagttatcagtatgctattttaggggctccatatattttttggttttgtagagtcccaaaatattgtggatagtttgaaaagtgatttgggtttcatttctacttattttgtcattgcttatttacaatagccagttgttcatgtttgcaagttaaaaacaaaaaaaagcacatcgatagtgtttcattggaaaagtgtcatctacaattntgaatatagatactgcttatttaatgaagcataatctatatgtttatcat

SEQ ID NO: 291590 - DNA, 429 bp, Glycine max
  unsure (1)..(429): unsure at all n locations
gtggtaatcagagcacaagagcttcaagtatgtgctttcttaaacctccattaatttttgctttaccttatcttctattgttgtttcttcatttttctccatgtatctcctcacatgtcttgagctaaatgtttttaacatgattctttaaagtttccaccgattaaacttgctatagaagctagatttgattttctatggttcaaatttcttgttcttgttcttgaaccataaattatgttgagtttaggttcctttgagttttgtcttgttcttttttgtggctgaaacctaaaccataaaattcttacaaaaatattaaagtagaagaaaacctcaaaaatctagattgacttgttcacctattgtagttntgtcatagaagtcatgtctagtcatgacacttgtcacataagatttcttatgttg

SEQ ID NO: 291591 - DNA, 406 bp, Glycine max
agcttgaagtaaattcaaacgacacacaactggatctgagatttccgaatgaattccgtagtatatctagacgctcgaaattcagaacaaaagctctgagcaaattcaaacgaaaataactttttactcgtatgtccgatcgtttcccgtagtatatcgagaccctcgtaattgaaaccagaagcccgtagcaaactcaaacggcaataaattctaactcggatgtccgaatgaatcccatgatatatcgaggcgatcgtaattgaaaacagaagctatgagcaaatgcaaatgacaataactttttactcggatgtcggattgagtcccgtaatatatcgagacgctcggaattgaaaacagaagctctaagcatattctaacgacaataactttttactcggat

SEQ ID NO: 291592 - DNA, 382 bp, Glycine max
  unsure (1)..(382): unsure at all n locations
tctgttctgaatttcaagcatctcgatagactacgggttacaattggtcttccgagcaaaaagngataancgggggatattgcttacagaattatgctccattatcttgaataacagaattaaagagaccttaagctattgtcgggtgatttttcaatttctattacgagggtctcgatatattatgggattcattccgacattcaagtaaaaagttattgtcatttgaatttgctacgagcatctggtatcaattacgagtggctcgatatactacgggacataaccggacatccgagtaaaaagttattgtcagttgaatctgctcatagcttctggtctgaatatcgagcgtctcgatataccacgggacacaatcaga

SEQ ID NO: 291593 - DNA, 409 bp, Glycine max
ggtaatctttgagctgcaaaaaatctaataggaaagatttgcttcgtttgttcttcaatgacaacagttaatatatagggtctgattagggtaaatttttctagaagaactatgaaaaagaaataaaatgattttttttcgtaagttaatttgaacttatgcacaaactaagctctaattctttttttcatcttttagagaaattattatacaagagcttttacaataagtaaaaatatgaaaattttcttatgataaatccatttcatttgtaattattcctagaaatccttctggacagaaacccatagactaaactcaaaaaggcctttgacgcacgatacctccgctgtgtgggttaaaatagtttaaatattgtttaactcttccgttagtaaacaagcgacac

SEQ ID NO: 291594 - DNA, 185 bp, Glycine max
ccaccaacccaacaaaggcaagacgcagccaagaacaaaccctcgccttacccaccgcccaggaagccacaaaggccatccctaaatcaaccacaaaggccggctatcgcaccaccacagacgaacatcacgcgtagcacaaaccaaaaacgccaaccaagaaatgaacggtgcaacaagaaagc

SEQ ID NO: 291595 - DNA, 406 bp, Glycine max
  unsure (1)..(406): unsure at all n locations
ttagctttgcattagatgcttgatctccctctgccatcacgctctccgatctctgtcaccgtcaacccttcaacctcctctagtggaatttctctttttcaaaactatcataatctgatgagatgaatttgtgatttggggttgtgatttgtggttctttacttgttttaggttatgttcttgttctgggttatgaattatgttcttcatttggattcttagatgttgttcttgcgtttacaaaataaacatgtttaaagaaaaaaaagtattttgtgatgacttttaactgctaatggagctagatttgtcttgacggaagaattgttttgaaccttttagttaagataaataaccaaagtgaactttntttataaaaaataaactaaactganaaaaaaagata

SEQ ID NO: 291596 - DNA, 434 bp, Glycine max
agaaactcagccgagctaagccccagagcataaaaatcttgtgttcttttgtgccaatcattacttcctgcataaaccagaccttagaaacaatagtatctttggtggtcatcaatttccaaccttgctttcctagcatgacaagattaaaaagcgtgaagatgcttgaaccccatacctccaaattctttgttcattgtcaacctctcccaatttaaccatttatacccttgctcgagtgattgttacatactaccccaccaaaaagagttcattattttttttctaattcaccctgaagagtagatggaaatagaaaaatgcttatacaataagtgggattgagtgagctactaacttaatgagaatttctttatccaccttggaaagatactcaatggaccagggatgaatacacatggaaagtctatctt

SEQ ID NO: 291597 - DNA, 403 bp, Glycine max
agcttgtgttattcacagcctccaccgctagcttggagtcactttcaatccataactttctccacccacgatcaaacgcaatctcaatggctgacagttcgcttatatcactcttattatattcttcctaaaaatagaataaactttgttatactgatagaatttagtagtagttaggagactttgctgtagtaactagtaactacttgatgagtcataaatgcagctgcattatacaaatgcatagcatctgtattcatttcacaattttattcaatcaatacatgatgtgtggccatatcaagtgggtattgcatggaacgtaacatccattgaaattctaatatgaacttttcagtttatggatgatgttaatcaaatgatacagtaaactagatatata

SEQ ID NO: 291598 - DNA, 421 bp, Glycine max
  unsure (1)..(421): unsure at all n locations
tcagtcttatcgctaagcgacattntatccttggctttgcaagacctatngncaccaagcgcaagtcctcacggccttaattgaggtccatgacactaagcgctagtcatggtagctaagcgagattctttgtggcaatatgagcgctaagcgagtacctctcagctaagcacgtgctcctttgtacttaagatgcatcatattagctaagctggccaaggccaggcttagcgagagttgcagcttttctaatctacaggtctcgctaagcagacgtactctcgcgctaagccgagtttttgtgtaaaaaaaaaatattttcaaatttgaaacgtcggctaagcgcacgtgttcgctaagcgagccttggtaagaaaccanatgtctctcttgcttgcttagcacaatagttcgctaagcg

SEQ ID NO: 291599 - DNA, 396 bp, Glycine max
agctttagttttggtcttcatgaattctctctagtgttccttcgtcttcatttttgcatatatatatatatatatatatatattcaacttgaactttacacctatttggtacactacaaaatgtatgggtagtagttttaagttttaacaaaagtaaaatcttaaaatataaacaaaaaactatcatataaggaagtgaaaagtagtttgaatttggggaaaataaataataattaatttaaaatataaatagttgagattcaaaataaaaaaaagactttcatataaacagtgaaaataattaaatggcatttttttctcttttcgctagagacacacatatacaaatgtagttgaggtatcaaatgatataactatgtttatacgttccatggc

SEQ ID NO: 291600 - DNA, 419 bp, Glycine max
  unsure (1)..(419): unsure at all n locations
tctagccaaatggactcaccttgcaataatttctnagttatttcctctagagccacgattccctttgcttgttttgaagctcactacaagccttaagtgaaaaaccatgatattaccatatccttaacgaattttggagctttggaattgttttgggaataagcgtggggggtttttgtttcattggacaacttgttttgatggctatgcttcatgatgtattttgggccatacttgatgtacattgtatattggttaaatgatggacatgctgaatgaaatgttgtttctcacaggctccagagtaaaaataaaaaaataataaagttccaaataaataaaaaaatctgaaaagacaagaaaagataatgaataatggtgagtgaataagatcttaaatggcacaagagtgatgaaac

SEQ ID NO: 291601 - DNA, 405 bp, Glycine max
agcttgacctatcccgacccaacccgggcatagtcggtcagtgagaacatgtgacgtacctaagcaggcgagctcctggcagtcaacagataaaaggaaaacaagaccacagagcaaggaggcttgtggtggctggccagctgtgaattttgtgtaatatgtggattgtggcctctggtaatcgattaccaagggtgggtaatcgattacaaggcttaaaattgaagacagggggctaagatggtctctggtaatcgattaccaaggggtgtaatcgattaccaggcttgaaaacgaggtcaggaagctagggaagcctctggtaatcgattaccaaggtgtgtaatcgattaccaggcttaaaaagggaaatgggagatggtggaagcctctggtaatcgatta

SEQ ID NO: 291602 - DNA, 431 bp, Glycine max
ttttggaccttgaacaggcaactaactcttctttatatatcatgctatgtgctcgcgactggtccctttcttcctttcgcaacttgagttcactattgctaccccatagagctccgcgaaatttgttccggccatactcttccttgcgagccctcttggtctcttgttcaagggctcttgcggtaattgcattctcttcccgtaacccggcacactccttccgaacgtgtgtagcggccaacttgaacttctccttggcaagttttgcctttcctaactcgcttttgagagcttggacttcttcgtcctcttccggtgcttcaaaactctctttgctgacgacttttaacttggcgagccaatctaaacctcgtatatgaactttcagccattcgtggtacccaccaatgatgccattacgaatgcctcta

SEQ ID NO: 291603 - DNA, 401 bp, Glycine max
  unsure (1)..(401): unsure at all n locations
agcttgcttgcggggcttctatggaggttggatctttgagctttaatcaggtccttcaatggtgattttacaccatggagatgcagcggaaggcaaaggagaagaagagaggggaggcaccatccactagggaataagccaaggaagaaggagcttcaccaccaggaattgctttggataagaagcttgaagaggatgctttaatggaggaaaagaaagagagaaggggggagcacgaaattgaaggaataaaagagggagagaagtggaactttgaagtgtatctcataagactttcattcatcanagttacaacaagtgttacacatgcttctatttatagactangtagcttccttgagaagctatcttaagataacttccttgagaaactnttttga

SEQ ID NO: 291604 - DNA, 300 bp, Glycine max
ccgcttgcccatataaggaatccacagaagattatgcttatctttctcgaaagactgaaaagcggcttctaaggactcctctgcggcctccacataaggcgtagaggatgggcagctcaccaagatgtctacctcgcctgatacgatgaccagatgtcttccactacgaatatcaagatctggtggagtgtatagggaacaactcccactgagtggatccacaggcgccccaacagacagttgcatgggggttaatatccattatttggaaagtaccttgacaggtgtgagggcctatct

SEQ ID NO: 291605 - DNA, 397 bp, Glycine max
agctttgtcttggtttagacatgatttatacatgatgtatgacttgtaggattcaatttgggcaaaattggatgtgggaaagtgtgatttcgaaaatctgcactttatgcagaattttgctgtcaaatatgtgcatcacaattttggctttgtgcagaaaatgcttgtgtatggctggttgtggaaagggtagtatatattgggttctggacattttgtagcagatcccaacggtcaaaatgtatacttatacactagggacttccagtaaaattttcgagtcgatccaacggtgaacgaaatggaacgaaggaaatgttactgcggtctctaagtaaggaaagctgcgattttggtttgtgttatgggcagagatttctgcctctgccctgttttc

SEQ ID NO: 291606 - DNA, 379 bp, Glycine max
ttcatatgtgaaatcaagagcagcctatttccttagattcctctcacagagtggaggttgagccgtgttctcacaatgttcaaaaccacgatgttcaaaattaccaaccacaaaatgctcaaactcaccaataacagaatgctcaagatgctcacaaagtacgaaatgatgcctaactaatatatgaaatgtcctatctatctcaagatcaaagggttgtaagtcacatgcattgcctctagtcatacactacattcagcatgcacaactaagtgtcttcttatgccactaacagggtaagtttgaactacaactaccctctaatgatatccaaatgacttgaaattttgtgagaaacaccctataatcatgaaaagat

SEQ ID NO: 291607 - DNA, 413 bp, Glycine max
agcttagtgtattatgtgggtacccgtcatatgtggtactaggtggcgatcaggcgatggcgcaaatcaactctcccacttccacaagtcaaatataaaccgaccatccccggttgcccacctttcaactgagctcacgcactcctgcgtagcccttatcctcgttcctctcagcatcgggtccccatcaacccctccaagcttccacaatattcaagcaattcaattccaaatatcatgaaactaccctcaaccaagaaaacaaagtagaggcagaaaactctacccaaaacacattcaaataccacaactttccttactcatataccccagtaacattctctttgttccgattcgttaaccgttggatcgccttgaaacttttactggaggttcctagtacataaatatac

SEQ ID NO: 291608 - DNA, 459 bp, Glycine max
  unsure (1)..(459): unsure at all n locations
acctatccaatactcaagcttgcttgtggagcttctatagaggctggatctttggctacaattatgtcctttaatggagattttccaccatggagatgtagcggaagacaaaggagaagaggtgagaggaggcgccatccactatggaataagccatggaaaaaggagcttcaccaccaagatgagccttggataagaagcttggaaggatgcttcaatggaggaaaagaaagagggagagaaagagagagggggggagcatgaaattgaaggaagaaaaagggagaaaagttgaactttgagttgtgtctcacaagactctcattcatcaaagttacaacaagtgttacacatgcttctatttatagactangtagcttccttgagaagatntcttgagaaaacttccttgagaagcttctttgagaaaacttccttgagaagctagagcttacctac

SEQ ID NO: 291609 - DNA, 411 bp, Glycine max
agcttctctggaggtgagcttagttatgagaggggtgtgcgtagttaagctctagcttctcaaggaagttttctcaaagaagcttctcaaggaagttttctcaagaaagcttctcaaggaagctacctagtctataaatagaagcatgtgtaacacttgttgtaactttgatgaatgagagtcatgtgagacatacttcaaagttccacttctctccctcttttattccttcaatttcgtgcttccctctctctctttctctccctctttcttttcctccattgaagcatccttccaagcttcttatccaaggctcatcttggtggtgaagctccttcttccatggcttattccctagtggatggcgcctcctctcatctcttctcctttgtcttcctctgcatctccatg

SEQ ID NO: 291610 - DNA, 419 bp, Glycine max
  unsure (1)..(419): unsure at all n locations
ntaagatgaaaaccatgatatcaccttacccttaaattatnnatgatctntggaatagnnntgggaataagtgtggggggtatgtttcattggaagatataatttttggccatgcttaatgtttgattttggccatgcttgatgtatctgcatattgcctagttcttgctntaatcttcaaattcgtactgttaaaaaaaaatcaattgctgcaaattttgcaaattcgaactgttncaaaaaaaagaagtgaagttgaataaatgaggtcttgttatgaggactntatttgggagccttggttgattntgttaaattagagggtttgggtttactacttgtgcttaatttccacttattccccattgctcctctattcctttgggatttagctacatattccatatttgtccctacct

SEQ ID NO: 291611 - DNA, 408 bp, Glycine max
  unsure (1)..(408): unsure at all n locations
agcttgcctttccccttgatatattngagggactcatggtcactatgaatgacaaattccttgggataaaggtagtgttgccatgttttcaaagcccgtactaaggcatacaactccttatcataagttgaatagttaagggtaggaccacttaacttttcactaaaataagcaattggatggccttcttgcatcaacacagccccaatcccaacatttgaagcatcacacttaatttcaaaagatttttgaaagtttggcaacgaaagtatgggggcattagttagctnttgcttaagaacattgaaagcttcttcttgtttctctccccatttgaaaccaacatttttcttgagcacttcattgagaggtgctgccaatgtgctaanatccttcacaaatcgtcta

SEQ ID NO: 291612 - DNA, 440 bp, Glycine max
  unsure (1)..(440): unsure at all n locations
ntgatgaataagaagcctggggcaaatggagagagttttaatgtaggaggaacccatgctgggactgccgttcctacatggccaaatttcccaccagctcaacaatgtcattactcagcaaatatcgacccttctcattacccaccaccctatcaaccaggaacacccaatcatccacaaagggcacccctaaatcagccataaggcccgcctgccacacatccaatgccaaacaccacccttaataaaaaccaaagcaccaaccaaggaagcaattttctagcaaagaagcctatagaattcacctcaatttcgggggtcgttgctaacttactcccatatctactcgataatgcaatggtagccataaccctagccaaggttcctcaacctccagtttttcgaggatacgactcgaatgcaacatgtgcttatcatgg

SEQ ID NO: 291613 - DNA, 410 bp, Glycine max
  unsure (1)..(410): unsure at all n locations
agcttcatgttggcctctttgtggtctatattttatgttggttcgagttggtagttttttttttttaaatataatgttccaatctaactcagaaaagaaaaagaaaaaaacagaaatgaaattattcatgacatatgagatacagtattttatagatggtggtggcgtgagcctgngtcctctacgtgttggtcaatcaggaggttgaaatgcacgcgtatatagatcgtatttatagaatatattctggcctaattgcttagactaattattatcaaatacaacaaacactattttatgtatataatttattcttttactagtacatatatgtatttttctttcatatatatgtccatgcgactacagatatttaatgattataaaaaaaatccctgtaaatgtttact

SEQ ID NO: 291614 - DNA, 439 bp, Glycine max
agcttgtacatgacatttacaagatgcagtgacatatggtttcaactttattcattataaaaattggtcatgctcataatcacccaattgttgacagttgacctgaaaattacatggttaagagaagggtgtagctagcataatgcagaaattgacaattaaattaggaccacaaataaggagattttttttcaaaaagaacattacaattgataaaattaaagactgtaagaataactatgaccagatgtaaaaagttctgacatatcaatgtaaaattctaaatgtacatatgacaaagaaggcagcttcaagtttggaccaatattgtgctgccaagtctagaagattcttatcaatttaagtcatatatttcatttgagcacaatgagaacttaagttattgtattattgaggcaacacagaagaacagtctaca

SEQ ID NO: 291615 - DNA, 406 bp, Glycine max
  unsure (1)..(406): unsure at all n locations
agctttgtgtttcacaattattggttctactgtttactctttctacacataaaaattatcaaactatttttttttaaacatgttatactaattaatttgttagaatattaggtttgttatgagagggagggaaggaactcatgaccttttttctttttctttctctcttaatcatgttattgatagagagtattcatcatctattttattaatgattaatctccattagaaatctaactatctgaattntctttttcaatcatatttttttcatccacaaaattcaaaatcaaaattntacttaatggaccgagtctaatatcactcgagccaactacttatntaatttaaacttatgtttaactaaactagcanattgcaatgttgttcanaattcctacaaatt

SEQ ID NO: 291616 - DNA, 412 bp, Glycine max
  unsure (1)..(412): unsure at all n locations
ntgtcatcaacatcattcatagtcataancnctnggttttgtatatacttattgcataagtaggtgataaacaaaattaaaggagagaaattgttacatgaatgtataagaacatcttctgtcacacccgtgaaattgaaaaaaaaacattaaaaatattattatgcaaataatgtaaaaagaagaaaaatgtaaactggaagacactgaacaaattgagaaaaaaagtcagatagtaaaagagggaatgaagcatgtaaaggggtggagaaataatgcacgtggaatttaaaatagaaattagaagatatacataattgttacacgtattaatttcagaattaaattattcccaaaactaactatttttaaaaattaattttctttttttaacatatttctaanaatatat

SEQ ID NO: 291617 - DNA, 408 bp, Glycine max
tttgcttcaagaaaaatggccttagcaaacttcttatttccagaaggaaattcaatcaatagacctccaatctttaatggagagggttaccactactggaaaacccgaatgaaaatttttattgaggcaatagacttaaatatttgggaagccatagaaatagggccttatatacccaccacagtagaaagaatcacaatagatgggagcacaacaagtgaaagcataacaatagaaaaacctagagatagatggtctgaagaggatggaagacgagtacaatacaatttaaaagccaaaaacataattacatctccctgtggaacggatgaatatttcagggtttcaaattgtaagagtgctaaggaaatgtgggacactctacaattaacacatgaaggaacaaaa

SEQ ID NO: 291618 - DNA, 408 bp, Glycine max
  unsure (1)..(408): unsure at all n locations
tgngtgaagagatagattaanaagacttttatcnttttttgcaatagnctattcggaaaaagcagaccttgcgctaagcgcccaatcttcacgcgctaagcccgagcttgctcgcgctaaacgcagagacccctaattggttagctgaatagttcagctaagcgcatatcactgtgctaagcccaacatcttcactataattgaaacttaataagtgggcttagcgtggatgatgcgctaagcgcaatttcttctctggaaaaatttcattgttggcgcgctaagcacgctgtcttgtgctaagccctagatccattctggaatttgagctttcaagctgggctaagaagggtatgatgcgctaagcaccaatcttacctgttgcgctaagcctgaactactctctgt

SEQ ID NO: 291619 - DNA, 311 bp, Glycine max
  unsure (1)..(311): unsure at all n locations
taagcttgtgcttaggnctgcggaacgcgccacattttgatgtcaatcaacaatatggaataatatatattcaggagacttacactatatcacaagtaataaaaatgaataaacaaaaccaaaaaacagactgctcaggagctctcactcgacagaaataatgaattgaattgacagatgtcaacaaaaagatattttacaacaaaacatattgcattcattaagcatcagtaaacctgacaccgacacccccccccctccctgttcctgtttgactcaatatgaacatcaatttactctccattgaacgg

SEQ ID NO: 291620 - DNA, 175 bp, Glycine max
tatggcgaactctcattgtgataaactacatatgtccaccaatttctatacaagtcgttgaaataggagctaagataaacttgacgccatctttggagttatttataaaaacaaaagacgcggacagagaaattttaaaaaatcacatatgcccatatctgctagtaaaaggctc

SEQ ID NO: 291621 - DNA, 409 bp, Glycine max
tttaagtctttgaggtatatatgcaaactcaacttgtccctttctttgagtttctcatacttataatattataatatgtttaagtcccaataaacgaattttcatttgggtcatgtcatcacttcacttaactgacgacatgaactcatgacaaaagttttaatatattaagcacttaaaacaaaattcatatcatttattaatatcttaaaggtatttaagtctatattatattattcactctctcactctgtatatatatatatatacaggatgttgttgatatcagaaatctcagtctggtttacactcttgctggaggtaaggtcttttataactataagtttttaggattaatattaatataacagaagatacatgcatgataaacattaatcagcatgctgtg

SEQ ID NO: 291622 - DNA, 431 bp, Glycine max
  unsure (1)..(431): unsure at all n locations
tgtacgtgaattttcaagacttcagactcttttctctttgtcttgngaaatagattcagagcagtcacattttcatgcattcaatttattttatatttgttctaaatttcagtagttcaattttgaacaactgaaatttggaattcattttttaaaattaattggtcgaaataaaatatgagttattcaatcttcatttgatagttccaagttactaaatgcattgaaaagtgaacgcagaggatctgatcctctgcctcagtctttcagtcaatgataggtattctcacacaaccttccaagctagcttgctccaattnttgcaaaatgcctcaatcctaatagtattaaatcctatgtaagagtcacaacatacagtacataactgaagagttattannatgtaatattattgtctaattaccctttaa

SEQ ID NO: 291623 - DNA, 401 bp, Glycine max
  unsure (1)..(401): unsure at all n locations
ttaagcttttaattctatccttagatcgtcacctagccacataaactgtttctgccggaagcaaatacataaatagaattgtgaaattgaactttgtagttttagttgatctgacttcactaatctgttgacctttataacaaccgaactctacactacataggttttagcttcaccatgctgtttaggtttagaggcgttcttgtcatatgggcaatgatcactttgcctaaatctataaatggaggaagttgagttacaatgatgattgcaaattaggctcgaaattatatgtgtatagaatcgttgagctttatttgaagtgaacatcacgaatttccggtattggaaatattggacattacgcagaccatgcttctttggttgacattgntaaatga

SEQ ID NO: 291624 - DNA, 110 bp, Glycine max
  unsure (1)..(110): unsure at all n locations
agagagctagttaacaatctattaagacaatttccaattcatactcttgatgatgggggttaaattaacactttcttggagggggcaggcaccccccccnggacccacat

SEQ ID NO: 291625 - DNA, 355 bp, Glycine max
ttagcttgatagctttgaaatattggatgctatatgtaagctaatgaagatctcgtgcttcaaattacttggaagaaagatcaattaggttattcctttttttttttggattaataagggtaaacaaacataaaatatataacttacaacactttgttttttggtatttttgtcagtgcaggaagcaagacagtcaaatagtctatatcaatacttaatgatagagttcatcacccaatctttgttcttcatgaccgtttaatacttataatgacacacattacataatatatataatagaacaatggatttaatcatcaactcagtagaaccacacatgtaacaaacgcaaaac

SEQ ID NO: 291626 - DNA, 433 bp, Glycine max
  unsure (1)..(433): unsure at all n locations
ttggacatttgaatatgaaatgaattttttnatattttattttgctaaagagctacaaattagccatgagagttgaaagatctaaacgagaactttatatatccatctttatgagtgaaatttcttcaaatcttaaataaatgaacaaaagaagtaggcaatataataagctataaagaaaggaacaaacctctattcttggaattggatgaccgtgagttgtgatttgtctttacttgtcactattccaaatcgtaagcaataaactgaatgtgagaaaaaaagagcagatttaggaagaaagctgaaatatgttggcaagctaaacatgatttaagcatatggatggcgtactactagtccgaagaanaccaagatcaagttaaagagcaagagaatactcagagcatgacgaaagaaaccagaaaacata

SEQ ID NO: 291627 - DNA, 396 bp, Glycine max
tgtcttttcaagtttcgagaccatgctggagagatatggattgggtgtaactggagtccagaacttagactagtgaagagagggttagccaaacttcactaagattattgtgtctggatttctaataaatatgggtcatattaacgcgagtagtatacatacccaatataggtttgatccttattaccgctacgaaaaaaaaaaaagactaaaatgcatatatggaatccattattgcggactaaacaaatacatatcgctaccttaataagtgaggcaaacagatgttaaaatgtgaattcttagtggctttaacattttgtaatcaaaatatcgctttatactagcattttaaactactattgtttaattaattatcaaatattcttcaaataa

SEQ ID NO: 291628 - DNA, 399 bp, Glycine max
agcttgtaggattatggggtacccatcacatgtggtactaggtggcggtcgggcgatggtgcacaacaagttttccacatccacaatgcgcgcataaacccaccatcccctgttgcccacctccatctgagctcacgtactcccacgtagcccatatccttttttctctcaacaccgggtccccatcaatcctcccaagtttcctccaacatcaaagtaatacaacattcacacagcacaagctatcgcagccaagcaaaacagggcaaaggcagaaaactctgcccaataacaccaaccaaaatcacagcttttctcacttaaagaccccagtaacaatttcttcgatccaattcgttaaccgttggatcgactccaaaattttattggaagtctata

SEQ ID NO: 291629 - DNA, 334 bp, Glycine max
  unsure (1)..(334): unsure at all n locations
acaacacatcggtcatcctagacccatatntgaatgcaagaatacaacgtcagtggctataaaagaatagacgttataaaaaaggattcaacgacgcacatattagacaacccgtcngtgttttggtccatttcatcgtcgggttagcaagactcngtcgtgttggtgtccatatcaacgtcgggttcgcataacacccgtatttgttttgtgtcctgtcaacatcggtggcaagctcaccaccgacgttgtttggtagtatgtcaacgtcggtggtgaggacaccgtcattggctctttctcattntaaatgaataaaaatgaagtcttttat

SEQ ID NO: 291630 - DNA, 410 bp, Glycine max
  unsure (1)..(410): unsure at all n locations
agctttctagcttttcactggtgtattttgatctccttttggtgctctaaattgtgggaatgtgctcaaatatgtggggcaattttggtttgttttcttgcttgattgggttgaattgggggtttgtatgagatggccctaggcctataatgcattttgaagcaatggggcatgccacattgtccccgttctcttgctattgatgcctaaacgcgcgcctgccaagtgttcggtgaaatgcctcaatggcattagcgcgtgatttttgtagggaaacaacctatgggacaacttggtttgcacatgttttctattttttgggacatgtattcagtttcgtaagggctagagtaattgccccacatatatcctangcctangaaccanagttnttatgcaagagaacacaa

SEQ ID NO: 291631 - DNA, 438 bp, Glycine max
  unsure (1)..(438): unsure at all n locations
ccnccagtccatgagccgttgaagcaattctccacttcaagacatcctaaatctctttgcccgcgatggcccatcctcttcaacggcgttcacgctagcccctccatgactagctagcgggttggttttaacatttgggccttcctctcgaaacgatagtcaaccggcactaatcaggtgctgcatcttatacttgaacgggatgcaggagtcaatgttgtgtccgggagctccactatggtacgtgtgacatccttgaaatttctacccggaatttttgtaaacggggtattttgaatgattatatatatatatatatatatatatatatatatatatatatatatatatatgagtattattcagggtatatgcatatatgttcctggtagaagtaggaataaagggggcaagatacgtgggttaggctgattaagg

SEQ ID NO: 291632 - DNA, 409 bp, Glycine max
  unsure (1)..(409): unsure at all n locations
agctttgatcttctaccaccgccgccaccatcatcttagaattatattttaatattattagtactttgattttcagccttgtattttggctatattattatggtatttgaacaatttactatttccttatttgcatggtatggttgaacaagtatgttattttactatgtggatttcatagttaatctatttatgattgttgcttcatggttcttacttcatgatttgattgatggtttttcatgaatgttgtatgaatgtttagttatatttgcatacttaaattttgatacgcactttggctttttgttgatgccaaaggggaagagaaatgggattaaatcaagaactcacaagagtaatcaatttaattntaagataagcacanattcaaaaacaaagggggaga

SEQ ID NO: 291633 - DNA, 431 bp, Glycine max
  unsure (1)..(431): unsure at all n locations
tccatcaagtggtaatcagagcacaagagcttcaagtatgtgcttcttataccaccattaattttttgctttaccttttcttccattggtgtttcttcatttttctccatgtatctcctcacatgtcttgagataaatgtttttaacatgattctttagagtttccaccgattaaacttgctatagaagctagattttattttctatggttcanatttcttgttcttgttctcgaaccatgaattgtgttgagtttaggttcctttgagttttgtcttgttattttttgtggctgaaacataaaccataaaattcttacaaaaatattaaagtagaagaaaacctcaaaaaatctagagtgacttgttcacctatagtagttntgtcatagaagtcatgtctagtcatgaaactagtcacataagatttct

SEQ ID NO: 291634 - DNA, 411 bp, Glycine max
agctttagtttatgattattatgaatgaaaaatgataaaacctaaaatcaacacaaaaacatgattcaagagtagatctacaaaatttgaaccacagaaatgcaagaacaagtgtagatctaagatttaatcagtttattttttttgaatctactctaaacatcaacaaaccacaagacaatggagaatatacatggagaataagatcaagaacaaggaattaaagagaattcaccgaacaaaaagatagaggaagcaaaagaacatcacctagatgaagatgctcttgataccacatgatgtaagctccatcggagcttgtaggcctaggatcttcttcatcaatggattcctttgcttcttggaagatgaatggcagcggaatggagaaggaagagagagaggagatgc

SEQ ID NO: 291635 - DNA, 428 bp, Glycine max
cttctatggaggctggatctttgagcttcaaataagatctttaatggagattttccaccatggagatgcagcggaagacaaaggagaagaggtgagaggaggcgccatccactagggaataagccatggaagaaggagcttcaccaccaagatgagccttggataaaaagcttggaaggatgcttcaatggaggaaaagaaagagggagagaaagagagaggggggagcacgaaattgaaggaataaagtacggagagaagtggaactttgaagtatgtctcacaagactctcattcatcagagttacaacaagtgttacacatgtttctatttatagactaggtagcttccttgagaagcttctttgagaaaacttccttgagaagctagagcttagctacacacacccctctaataactaagctca

SEQ ID NO: 291636 - DNA, 386 bp, Glycine max
caagctttgatctcatttggagaggttaatgaaacaacgagatgatgcgctccatgagaggttggatcaaatggagaatagagatcataatgaagaagaaaggaggagaagagggaatgatggtgttcctagacaaaaccgaattgatggtattaaactcaacattcctccatttaaaggaaagaatgatccggaggcctacttggagtgggagatgaaaatagagcatgtattctcatgcaacaactgaggaggacaaaaaggtgaagcttgccgccacggaattttccgactatgctcttgtgtggtggaacaagctacaaaaggagagagcaagatatgaagagccaatggttgatacatggacggagatgaaaaagatcatg

SEQ ID NO: 291637 - DNA, 437 bp, Glycine max
  unsure (1)..(437): unsure at all n locations
ntgagaaaattcanacaacaataactntntacacggatgtctgatagagtcatgtaatatttcgagacgctcgaaattgaatacggaagctctgagcaaattcaaacgacaataactttttactcggatgtctgattgaatcccataatatatcgacaagctcgaaatagaatcttgatgctctgagcaaattcaaacgacaataactttttactcgaatgtctgattgagtcctgtaatatatcgagacgctagaaattgaatacggaagctctgagcaaattcaaatgacaataactttttactcggatgtctgattgagtcccgtaatatatcgacacgctcgaaattgaatgttgatgctctgaggaaatacaaatgacaataacttttttctcggatgtccgattgagtcccgtaatatatcgagacgctcg

SEQ ID NO: 291638 - DNA, 411 bp, Glycine max
  unsure (1)..(411): unsure at all n locations
caagctttattttaaacttggccttctcttaattgtctttgggcttggcgaccacgatcaacaaagtactttcggcacctactatatgttgacttgaccaacgctgttattggaatgctgcgacaatctttcaacaccttattcacacattctgataggttggttgtcatgtgaccatatcgtcgtccagatgtatcgtaagccatgcttcattnttcctttgaaatgcgatcaatccatcatgctatggctggactcagttgacgaaatttttctaagttttgatcanacacatgcttgcaaggagtgcacgctgcatcaaatttgttatcatcaaaagttgtacgtagacatcaaactcanattaaattaatgtataaaataaaccttacccaatttcttgaacatctc

SEQ ID NO: 291639 - DNA, 402 bp, Glycine max
  unsure (1)..(402): unsure at all n locations
tgcagaaggtggttgcgggagtgtgtantaaaggatcctattgcgtatcttgatggccaaagtgatccaattccagttgctatcaaaaggctcaacactcgtggcttccaggtatatactccgtccgtccctatttataataagacagacatacccaacaaatttttttggccctgttataagacttcattatatttctcttctattaattttttttttttttactgaaacttcataaattgtctttttttccgtcttatgatgattgaagaagatgagtaggttgtcaataaagttaaggataaatttgaaaaaatattactcttggaaagttaaagattggagtataattattgacaaatttaattttaaaaactaaattaattaactttcttaataaac

SEQ ID NO: 291640 - DNA, 400 bp, Glycine max
tctgctttagcccttaggttgttcagaagctagctagttagttaagttgaacatcctttagattgctagctggttgaaatcaagcttaacgaggtggatatagataaataataggaggaaaaaagttttaaaatataaaattctattaaaacttttaaattataaaaagatatttaaaagtttaataaaattacaaagaatagcaactatttaatgtattagttgcacatacttgtttaaacaaatgtgtgatttgtcttggcaaaaaaatgcgtgagttgcaccttatataagtatttcattccatatatggctatatgctagaggttttgaccaacccttctaacatatttcatatatattcagccgcccaatgttaaattggaaagttatagataat

SEQ ID NO: 291641 - DNA, 339 bp, Glycine max
catcgccgcgagtatgacatgcactccactatggctgaagtagacgagaccttcaatcctattacgcaacgaggcggacaaaagtgggcagttaacttgaatggtcattattatcaatgccgaaagtattctgcgcttcactgtccatgttcacatattattacagcttgtggttacgtgagcctgaactactaccaatatataaatgttggttatacaaatgagcacatcttaaaagctaactcctcacaatggtggcctcttgggaatgaagcggctattccttcttctaatgacgcatggacacttatccctgacccaactacaattcgtgcgaag

SEQ ID NO: 291642 - DNA, 405 bp, Glycine max
  unsure (1)..(405): unsure at all n locations
ttagctttcatttttttttggtttccaaactttgttctttcacagaaaacaaagtgtgcaattcatctttttcattcttttctccctttgccaaagagaattcgccaaggactaaccacctgaattctttttgtgtctctcttctctctttccaaaagaacgaaggactaaccgcctgaattcttttgtgtctcccttctccattgtcaaagaattcaaaacgacacagtctgagaattcttttaattctcccctttcccttaaacaaaaaatttcaaaggactaaccgcctgagatatctttttttttccccttcacaatgtttcaaaggactaaccgtctgagaactntgtcttaacacattggagggtacatcctttgtggtacaagtagagggtacatctc

SEQ ID NO: 291643 - DNA, 409 bp, Glycine max
tcatgcttaagtatgtatggaacaacttcattactgttgtttaacacatacaagagagcttatgacaaatcttctagacttggagtcattacatgcaatcctcttgaacccttaccacccactctgacatcatgctgaaacttaagaaggccaacaggtttagccttctcaatgtattctgaacaaaattcaatggcttcttctgcaatgtacctctcaacaatagatgctcctggatgatatagattattcatatacattttaaaaatcttcatgtatcgctcaactgggtacatccactgcaaataaacaagaccataacatttgatttctctgacgagatgcataatcaagtgaatcatgatgtcaaagaaggtatggggataatacatctccaactggcacagta

SEQ ID NO: 291644 - DNA, 395 bp, Glycine max
  unsure (1)..(395): unsure at all n locations
tcaagcttgtccaaatcccttgaagctgaaaactcctctaatgaagattttgagtaagagtctaatgaagatgaactcaccttcatctcatgaaagattttcaagatgtggaagaacaaaggtagatccaaatagaataacttctcaaaaatgttgttcaaggaaaagaatgacaaagacaaaagctccataatatggtatgaatgcaagatacctagacactntaaatctaaatgccagaacaagagaagtcttgggacaagaagatatactacaagtccaaggaaaagaaaggtctctttagcacctaggaggatctggacgacacattgtctaatgaagatgaagaagaagccaacctatgtctaatggtagacatagtctttgaagaataa

SEQ ID NO: 291645 - DNA, 431 bp, Glycine max
  unsure (1)..(431): unsure at all n locations
tgcttctacaacaaaaggtacaagcaagactctctattagttcttactcaatataatcctcaaacactctttgagcctgtctaatcctttctttcatagccctcttacccccgaccacattacaagcccaataatgcccatgtggatcaaggaatgactaatttgcttttaagttaggattctagaatgaaacccgcacatgcttgtgattgttaaaaaatatataaaacaaaaagagaaatccctgaggttcgcacttgcatgtttgagaagcaaactcatttggctaagagctcatggaagatgcccaaacatctaatgttagtctctcatgcaaactctntgatatttctttcgaatccaatggtagcttcattacataaatcttgtcaagatcaacccttgccatcaagtttcagtagggtcaacag

SEQ ID NO: 291646 - DNA, 400 bp, Glycine max
  unsure (1)..(400): unsure at all n locations
agcttccatattgatgttgnagctgctatccacccgattttccaccttctgttagtgtctttcaatcctgacatggaatagtgctggatgaaattatccataggcctccaatggagcactctaggttcctttacccatgagctgaattcccaccatagaggcataactntatgacacaggaagaataagtgggaggcagattcagctttgctctgacaaaaagggcacaaatcattttcaatggtaacatgcctcctaattaaattatccttagtgggcaatctgtcccatagaagtctccaagcaaagactaaggctctaggagggattntgatgttccatangtgatggaaaccaagacattgatcttcatgaaggtgatcagctttaatataaagat

SEQ ID NO: 291647 - DNA, 432 bp, Glycine max
  unsure (1)..(432): unsure at all n locations
agtcaaggaagctacctagtctataaatagtatcatgtgttttactagntgcaactctgatgaatgagagtcttgtgagacatacttcaaagttccacttctctacctcttttattccttcaatttcgtgctcccccctctctctttctctccctctttcttttcctccattgaagcatgctctccaagcttcttatccaaggctcatcttggtggtgaagctccttcttccatggctgattccctagtggatggcgcctcctctcacctcttctcctttgtcttccgctgcacctccatggtggaaaatcaccattaaaggacctcattgaagctcacagatccagcctccatagaagccccacaagcaagcttccatcaagtggtatcagagcacaagagcttcaagtaggtgctccttaaacctccatt

SEQ ID NO: 291648 - DNA, 402 bp, Glycine max
  unsure (1)..(402): unsure at all n locations
agtttgcataaagattctcattttggtttaatcgattaccagctacctgtaatcgttactcagttcagttgagaccatgtctggttttcatgagtatttgctttaatcgattaccaagtgattgtaatcgattacttcaatcttgaaagtgttcccagaagtgatcaagaacactttaaccaattaaataaataatctaattgattgcattgttcttgaaaattttccaggtttcgggaagaacactttaatcaattgaaataataatctaattgattacttcatcgaaataatcgattacattggaaatttatttgattacaggcagttataacagttcattgaataatacacttganactcagttcttgacatatntgcttgagaaaatcatatcccttg

SEQ ID NO: 291649 - DNA, 428 bp, Glycine max
  unsure (1)..(428): unsure at all n locations
atactcaagcttcaagaattatggcctcatcaaactatttgntttcgtgtgaaattgtataaatagacctcctatctttaatggagtgggttaccactactggaaaacccgcatgcaaatctttatagaggcaatagatttaaatatttgggaagccatagaacaaggaccttatgttccctctataatagccggaagtgcaacaatagaaaaacttagagcagactggactgaggaagaaagaagattagtacaatataatttaaaggccaaaaatattattacatttgccctaggaatagatggatactttagggtttcaaattgtaaaagtgctaaggatatgtgggatacactacaagtaacacatgaaggcacaacagatgttaaaatatctaggataaacactttaactcgtgaatatgaac

SEQ ID NO: 291650 - DNA, 396 bp, Glycine max
  unsure (1)..(396): unsure at all n locations
agctttctagcttttcattggtgtattttgatctccttttggtgctctaaattgtgggaatgtgctcaaatatgtggggcaattttggtttgttttcttgcttgattaggttgaattgggggtttgtatgggatggccctaggcctataatgcattttgaagcaatggggcatgccacattgtccccgttctcttgctattgatgcctaaacgcgcgcccaccaagtgttcggtgaaatgcctcaatggcattagcgcgtgacttttgtaaggaaacaacccatggggcattttggtttgcacatattttctattttttgggacatgcattcattcccganaaaggctagagtaattgccccacatatatcctatgcctagaaaccaaagttttta

SEQ ID NO: 291651 - DNA, 395 bp, Glycine max
gacctataaaactcagcttgcgattggtcttcccaggattgattttgttggtccaaaaagaagcaaatttgatcatcctactaggacgactgagataactggggcaaataaagagggtgacgatgagggagaaacccatgctgtgactgccattcttgtacggccaagtttcccaccaacccaacaatgtcattactcaacccttctccttacctaccgcccatttatccacaaaggtcattcctaaatcaaccacagagtctatctaccgcactttcaatgacgaacaccacctttacacaaaccaataactccaaccaagatatgaattttgcatcgaaaagcctgtaagattcaccccaaattccggtgtcatatgctaacttgctcccata

SEQ ID NO: 291652 - DNA, 396 bp, Glycine max
  unsure (1)..(396): unsure at all n locations
agtttgtgaaaaccttgacacaattcatgcaagtcttcatctcaaaccataaaaccacgaaatcggcaatcaaaaatcttgaagttcaagtaggccaacttgcaaagcaacttgcggagaagtccaatgggaattttgtggctaacacagagaaaaaccacaaagagaaatctaaagtggtacttacaataagaaaaaggatggatggccttgttagtgataatttagtggaaggtgtagtaaaagatatgggtgatgcgaggaaagtgtangagagagagacatagctgagaataaagagaaacaaataagtgttgaaaatgtagaanaaaccagaaaagtggagaanaaaagaaaaacacttttaaggaaggagttgacgaggcatatcttcta

SEQ ID NO: 291653 - DNA, 429 bp, Glycine max
agggttcctccaccttgctaccttctctaattttttttagtttcctcttctttaagaatttccatcaaagtgtcaagacttttctattagagatagggggagaaacatgagcaacatggtgaacaacctaaatgctaaagcctgaagctcaaggaaaagcttaaagaagttttggcttttacatgcccaactcccttgaatgacatttgtattggctgtcattttggttgttgcatcttagtacattcgatatctatattgcatcctgcatcatcatggttagtatcaacaaaattttttaagtcagaaaaatttcttcagaggcaaaaactctctattttaatggatgacagggttatcgtaatcgattacaacaagctgtctgaagcttgtagagttgagtctcatattagtttaatcaattacatg

SEQ ID NO: 291654 - DNA, 613 bp, Glycine max
  unsure (1)..(613): unsure at all n locations
accgacgcgatgagacgccacaangtaaataaagangagcgananagatatacataacnacaacnaacacaagacacgagagttgaatcatngcgagngcatncgnannacaaananacaannagacnaccangaaaaaggcacgacaacgaagacacanaancaggttgnnaactacgcagtttacgaaacgcaacagacagagcgcacgaggaagggggagccgagaagagagacacacagaacgcacgcagcagacggccaagggaaaacagacgagacgacaagaaacaggaagcanggacagcaacagaaacgagcaaagaaaggagagaaacgaagagcaaaggaagacacgagacgcaagagaaaggacagagcaaggacgagccgaaagaagacgagcaggaagagaaggagagcgaaggaccaaaagggacacnaacggaagaaagaaaggacaagagagagagcaaaggagcgaaggggcggaaagaacgcggagacggaaccgaaggacaagaaagcgacgacaggaccggacaaaaagaagaaagagaaancaaggaaagacaagganggaaaagcagaaggagaaaacgcagaaaaaggg

SEQ ID NO: 291655 - DNA, 411 bp, Glycine max
  unsure (1)..(411): unsure at all n locations
agcttatattatcaaaattgcctaaatcatttccaaatatgcatgtgaattaggaagcatcaacaagaatcaagccaaggctattatgcaagcaatcaatggggaaaaacacaccaaaagattatgatgatggatggctcaaattctcacaaaggtaaacttatcactttcaaattgagctttcaaaactatcatgacatgtagaggaaaaacaaggatttaaaatcacaaaatgtcaagagacttttattttcagaacaattacccatttcttgaacatatcctataattcaaagaaaaatatgcaaagttgtacatgcaaacagaattgacctanaatattaaactagaaacccaacaaaactaacaaaattaacaaaacaaacaaaacttgcaaaaccaaaaccaaag

SEQ ID NO: 291656 - DNA, 438 bp, Glycine max
ctaagcttgcctggctcagaaaaagaacatcaagattgtccattaaatatgggatttagattgtactgattcagagaagtgtccacgcattagttcatcattaaaaatagttgtcatgtgtatcagaaaaacaaaaagttcatatttacaccaaagaattcaacaatccaaattgcattgatccatgtccgtgcacccattagtagaaaaattattttctacgataccaaaatgaagacgattccttaagaaccgtcttagtatatcaggcggagacatttttgtaattaaatataatcactctcactcttcgactcccctctagggttcgaagccgcaactacatctattggggttccaactctttgaatccctctcactcttccttcatggacgctttgcttctttttcttctcctttgtgtgacaatggttcaat

SEQ ID NO: 291657 - DNA, 407 bp, Glycine max
  unsure (1)..(407): unsure at all n locations
agctttcaacaagagtttttacaaataaccatcatgaagcagaaaactaacaaaactacccatcatatctcccaaaaccccatacccacgaaatttaagagagaaagaagtccacccaaacctgaaatttcgaagtcccactcgtagccacgcacttcacgactccaaaaatgccctcctttcgcgatttggagcagaaatgagcaccaaaggttgaagctttgtttggagcttcaatggagaatgagggagaaagaaaggcaacgtgaggaagagagagagctatctgaaaaaagtgtgggggctgagtgaagagagagaaaagctttttggttttaaaataaaggggtttctctntntctattattntattcaagctctgccatgtgtccctatttgagtggagc

SEQ ID NO: 291658 - DNA, 410 bp, Glycine max
tcggaagatagtgatgaggtacaagtcctaaaggcagtgcttgttagattctgagtagtcgaagagaagttcaagtccatagccatcaaagtctgaaaagagtatgatgaactaagggatgtcaatatggccaccgatgaagccttggaatgagaaaccaagaaggcccgaaaggaagaacacgaccaaatcaaatttttgaggggctttatagggcagcaatagtgagctcaaactccgaagaggtgaaaggaatcatcacgggtcaaaggcatgatctggaaggacgagctaaaggcttgccttatgtcgaaaagaaatttgtcccaacagttaaggtgagactgaagggaatatgtgggccatcatcgataagtgcaaagagaagctaaatctagcggcgactcatg

SEQ ID NO: 291659 - DNA, 412 bp, Glycine max
  unsure (1)..(412): unsure at all n locations
agcttttacttttatacaaaattaaaatattaacacataaagcataagacacaactaaaacaactagattaacaaaaacatccctatatgtctaacaaattaatgttgaagtaacaaaaatcgggagcataatagtttcaatttatcatgaacaaacaaaaaactagataacaacaaagattattttggtaacacattcaatgaaaaattgtcataccctaatttagttcggggaccatccgttgttgggatgcgaccctcgtttgaccacttcgaggtatttggcacccatcgttaggcaatttgtgaagttctaagacatgccggaagccaaaagataagcgttgtagcacaatccgtgaagttccgtgacatggcgganattataaggaagtgttagtgcgtaatccgt

SEQ ID NO: 291660 - DNA, 389 bp, Glycine max
  unsure (1)..(389): unsure at all n locations
tgtccttctccaccgtaattctctccaccctgccaactaagtctttnttcactttctacaagtccttgtagcacccaaacaactcatctctatccaatctggtgcgtagcaacttggaaaggacaatgccaaccttggaagatagttggtggtttgacttcacagcttcagtgaaggcaacggtgacattagctaccttaagggacttcactctccagactgtgcgagcagcaaccctccatttggcaacctcagcctccaaggatgccaccttgtttggtgcctcttggtgcctttgtccattctctnttaggatcatcaaacttcgttggaggaaaaccttggcagaatccatggcatgctggaccccagctgaccggataagtttt

SEQ ID NO: 291661 - DNA, 389 bp, Glycine max
tcaagcttctagaaggagatcaacttgatgttctatgcttcttgaaggtggcagtccatgaggaatctccttgggaaagacatctttaaattcctgcaataagggttgaacactaggagaaacataaatagttaactgattagaattatcactctctctcttgtgtatcactcttttcctcgggtgtatcactcgtctttttcatattcctttgtggtgcctcactattttctttctcttgttctctcttttctctcattctgatttggtcatcacacacttctctaggggatagaggtttaagagtaaatgaggaagatttggctattcgtctgtagggctcttctttgttacggttcaacaaacgttgcatttgtgtagtccacgcg

SEQ ID NO: 291662 - DNA, 428 bp, Glycine max
tcattgcctaacaagccaacttacaattacgagccctatgagactcagcataaggatgcacaggtcaaagttgagtatgtgaaaagattgtatgaccaagtgaaggtgcaaattgcaaagaagaatgaaagttatactaagcaagccaacaagaaaaggaaggaagtggtacttgaacctggtgatgatcctggacatttgagggcaaatgttttccaagaaggagggaatgatgatcttgaaattggccaaatacaagctaaaggcctaagtggagaagggcgaacgcccaagtggagaaggataaagccccccaatggagaaggatgaaggcccagagacagagacactatcaagactattaattgttgctgaagacccaaattaatttgaaggcccaagttaaataagtttttagttataattta

SEQ ID NO: 291663 - DNA, 404 bp, Glycine max
taagcttgccgcaactatgtgaagtttgctttagtttgttatttggtgcttgatagtggtttatagaggctgaaattgggcttgctgatccagaaaaaaaaaatgcatgtagacttaaaacttgtcgagccatagggtggtcctgttaaagaaattgggccaaagattgaagtagatgtgttgtctctaaattgcaatgcaaaaaaagtggttaaggttgttcctgaggactctactcagaatggtattgaagatatggatgttgatggtgctaatggtgtgggtaaaggtggtccagtcgctaaaattgaagttgttagagttaaaactttagctaatgtacaagatgctgaaactgaagttgtatatgtgtctccagaagatgatggacaaacaagtgacac

SEQ ID NO: 291664 - DNA, 470 bp, Glycine max
  unsure (1)..(470): unsure at all n locations
tgcatgaatgtgctttcaagnacggacctatgatactcagcttgcaaaacattttcatcacactggtttttctattgttttgagccaattaatgctaggactatcttcttctaaactaatcctccatgctttagaatcttcttgtcctcgctcttgattcaaaattattgtcttcattatttgattgagtaacttaagatgcaatatatatatatatatatatatatatatatatatatatatatatatatatatatatatatatatatatatatagagagagacagagagagagagagagagagagagagactggaacatgtgtgatgggatagagaaaggtgtgacaactcacacaaaagagaaaaaaatatctcaattggataacattgttttataggcgcgatatctgtatatcatatgtaaagatcgcatgatattcatggatatncattctaagaaactcaatg

SEQ ID NO: 291665 - DNA, 399 bp, Glycine max
  unsure (1)..(399): unsure at all n locations
agtttggtgaatcttcaagttgattttgatggtatacgtagtccaaactccaaacacgttagttttaagggagattatctaagtatttgtaaagatatcttaatacttaaatcagcgagtgaacgaattgaataattgattagttatatatggaaagatagttcgcttgataacactggatgtaccttatttatagcgctcaaatacaattaaattaaatatgacattcaagcacatatctatttttttttaaggaagcacatatctaatttacttgataaagaanatcttaaatatttttatttttatgatgttaaatacattntttatttaatacttttattataaaatagtacctaaagattaataaaaaatattataagagaatataatattact

SEQ ID NO: 291666 - DNA, 428 bp, Glycine max
  unsure (1)..(428): unsure at all n locations
tcggcctatatctgtgatgcaggggaaggattagtgttattgcggaagaagctcgatgatgagtgtaaagacgacttaacaatatcaaatactaaagatgaattgagcctagtatgataaatttccacgaggtggtcacgttgacatgaagctagctcgttctttttccatgcaacattttacaatgtatattcaatccaaaaataatttcagaactgattgtttcgaagcaagtagtgttggttatagttggaatatccggtgtctataaattgtgattcctatccagccattgacattctttacgctgcaattttttcttttcaaccgaaattagcattaaaataattcaaggtaatgatccaggaattgatcgatgtgcaagaaattctttttttttttaatacacacttattagntggaattta

SEQ ID NO: 291667 - DNA, 396 bp, Glycine max
agcttggagaggatgcttcaatggaggaaaagaaagagggagagaaagagagaggggggagcacgaaattgaaggaataaaagaggtagagaagtggaacttcgaagtatgtctcacaagactctcattcatcaaagttacaacaagtgttacacatgcttctatttacagactaggtagcttccttgagaagctttcttgagaaaacttccttgagaagcttctttgagaaaacttccttgagaagctagagcttagctacacacacccctctcataactaagctcacctccttgagaagcttccttaagaagattcctaaagaagcttgagcttagctacacatacctctctaatagcgaagctcacctccttgagatgagaagctagagctta

SEQ ID NO: 291668 - DNA, 431 bp, Glycine max
tgtgaaattcttaaaggaaatgggtccaagctttgttttgagaatgagacaattgctaaagaaaaatctactcttttgggaaacttttgggagttggaaaacaaattgataggtctacaaaatgatataaaggagctaattgaacttcatgatcatcaaagtaaagaaagatatgatctatggagagaatgtgcacaagtacatttagattatgaggacctttaagtaagtaaacataatttttcagtagaaagtgaagaacataatctttatcttatgtgcaagatttcaccaagtacttagggaagtccatctaactacaaccaaatgtatgtttagctatctaattgggacatctaatattggtctattgttcaaaagaagggaagattttgggctcacaagtttgtgtgatgttgactatgctggag

SEQ ID NO: 291669 - DNA, 354 bp, Glycine max
  unsure (1)..(354): unsure at all n locations
agcttgcttgagaagcttctatggaggatggatctttgagcttcaatgaggtccttcaatggtgatttccaccatggagaagaggttagaggaggcgccatccactagggaatataagccatggaaggagaagcttcaccaccaagagagtgtcttggataagaagcttagagagaaagcttcaatggaggaaaagaatgagatagagaaagggggggaagggagcncggnattganggagaaaaagaaggagagaagttgaactttgaagtgtgcctcacaagactctcattcataaaagttacaacaagtgttacatatgcttctatctatagcctaggttgcttcctttga

SEQ ID NO: 291670 - DNA, 428 bp, Glycine max
aagtcctaaatggcatttcaagctaagatttacttactttaacctccatttaccacagaatccagatttaaccttccaactctcaaagcctcactctttttccactcacaacaccacattctcactttctaaccccaagttaactctacccttcatctctaacagtttccataagcaatttcagcacatgaacatcacaagcatcatcataaaaaccctaaaacagaatgggtatgtttaactcatccaaacatggcaatttcaacatgctttcaacaagtgtcttcacaaataatcatcacacagcagaaacctagcaagactacccatcatatctcccaaaaccccatacccacgaaatttaagagagaaagaagtccacccaaacctgaattttcgaagtcccactcgtagccacgcacttcacg

SEQ ID NO: 291671 - DNA, 401 bp, Glycine max
  unsure (1)..(401): unsure at all n locations
agtttatgttaattgataatatttttattctacatttgtaattaaggaaaggaattaagagcaaaggacttctagaggattttgatatgagaaattgtatttttacaccatccttcctcaacctaattttgtaccttttaataaggataaactaattttgtaccttttaataaggataaactattataacaggtcattgaacaccaaaattgataatatctcaaatgaagtgatcctaacgatgcatgatgatttgaggttgacacaaaagactaaaagtgcaattaactntactttntttattttttcttattacattaatcattntatctcatatgttgtattacataaaaatataatttattatatcaaaatcctccanaagtcaagctcttaattat

SEQ ID NO: 291672 - DNA, 433 bp, Glycine max
tgatgggttgcatcttcatttcatgttaatttttacttatagcacataaatatatacccgttgttgtttaatttagtcatccttattggctcctttttcttacactactagaaaaacagttttctacgacacagtatctacgacggttgtataagaactggcttaaaaagtagtacggtggcatttttgtaattattataaggtttgaagcattttacgaaatacattctaagacggttattaaaaaccgccttagaatgttatatgaaattaaatttactgcgggttttagtaaaaaaccgtaataattcagaaaaaaaaagaaataaaacgcgtcctcccaccttcctttcgcgaaccctaattcttgaagctggcctccactcagcctccctctcactctcacgctctcatactctctcttctctttcac

SEQ ID NO: 291673 - DNA, 443 bp, Glycine max
ggcaattgagctcggacccgggatccttagagcacctgtggcatcaagtttgcgcgctaagctgaaaagcttctctagaattttaacattttgaattgggcttagtgagcagatgcgctaagcgcaagggctcttaaaactcaaacgtcatatgggcacgctaagcgcagctgtgcgctaagtgcaccatacgaaactgccaaatattataaggtacctgccgtaggtagttaccatttcactcttgttgtgcattaaggccattcattgcatctaccctcaacttgcttcatttgcctgcattcctgcacctttgctattctttgcattcatctacacaatccaagtaagttgctttactttacttcatttcgttctaagttttcaaccttaggatagataatttagtgattgttaggtaaaaatactgtttatgcttagtg

SEQ ID NO: 291674 - DNA, 567 bp, Glycine max
  unsure (1)..(567): unsure at all n locations
caacactgacgccgacaaagccgccaagcgcacgtcgaagacgaacggacgcngcgcataccacccacagcagccgcggcttgacatgattgcctccgaaagccanncngngacactatagaacacgcgagcggctcaaggaaggctgcacaagaaagctctccattgaagcgacctgcggccacaaaggagaagcgaggcgtaacacttagccgccacctcgacgaaagagagactgtgcgagacatactacaaagggccacgcggcgccctcgttgataccatcagagccgagagccccccgcgcacgagctaacccacggacgaggacaccaaagaagcaatccggcaagcttctgacccaaagctcagcgaggcggagaaaccccatctcccatggctgataccctagaggaaggcgcctcctcagacctctacgccgtggacatccgctgcatccggaaaagcaccatcaaaggacctgataggagctcacacatccagccgacatagaagccccacaagcaaggcgccatcagaaaggcgggaggagaaggagcctctaag

SEQ ID NO: 291675 - DNA, 410 bp, Glycine max
tttgcatttaagcttgttggcatcttcatgaaattttggatgaacttgcaccatccactgtcaataagaacaaattataaataaaattacaaattgggagcacaaaggatttatacaataaattactccctccgtccctttttataacaccatttcaactaatttgaaccctttaagaaaattggttaatttagttaatgacattaaattttcaataatttgtaatgttcttccaaaatcaccctcttaagttttttgaaattaatcatttccctctttccacttaattgcttctcacctagttgccactcatcttccccaatcctgataagagagaaagtatttatctcattaaatttcagcatttattatttttttactaaaaaaattgttaattaactacaggtact

SEQ ID NO: 291676 - DNA, 358 bp, Glycine max
catcttggaactcctcccctcggcactaaattgagaagttctacttgaactggaaaaccaaaatattgaaaaagctgtataagaagataaaatgcttggtttcttgaagctgctttaataagtgttctgttttgaagaataaaatgggcatcttgtccaattcttgcttgtattttgcaggttccacacaaaagcctgaagatatgtacaggattattgagcactttgcccttggaaggaggagactagaactatttggtgaagaccacaatatacgagccggctggctgactgttggagagaattatcatcttccaatcttaataagaggtaagatatctgaaatgctagcatacct

SEQ ID NO: 291677 - DNA, 290 bp, Glycine max
  unsure (1)..(290): unsure at all n locations
agctttgatcatctaccttatttctgacagccagtgggtgaatccagtccaagtggtccctaagatgacagacctcacaataattaagaatgatagggatgagcttatccccataagaatgcagaacagttggcgagtctgcattgattataggaggctgaaccaggtaaccaaaaaagatcatntttccctgcctttcattgatcaaatgcttgagcgcttggctggtaagtctcattaatgctttcttgatggcttttctggttatttacaaaatcatattgctcttg

SEQ ID NO: 291678 - DNA, 330 bp, Glycine max
tcaacatcagaccacttccagggtgctggaactactttacatggtcttgatggggcctatgcaagttgaaagccttggaggaaagaggtatgcctatgttgttgtggatgatttctccagatttacctgggtcaactttatcagagaaaaatcagacacctttgaagtattcaaggagttgagtctaagacttcaaagagaaaaagactgtgtgatcaagagaatcaggagtgaccatggcagagagtttgaaaacagcaagtttactggatactgcacatctgaggcatcactcatgagttctctgcagccattacaccacagcaaaat

SEQ ID NO: 291679 - DNA, 305 bp, Glycine max
tatgaataacgagaattgggctctactgtccccgatggacctctatgctaactatccctcttttcggcgagttttccgaatttcgccgcaaagttcccctttgatgcgaacactaacacgcatgctgcgagcatgcgcgcttacaccggcactgtgctgccatctcgctggagtgaccctctgatcagaagagctctatccacaaacccaacggcaccggatgtgccaccacgcctcccatactccgacatgtcaccctcacgcacgatcccctttctgggacatgacggtgttacacaacccac

SEQ ID NO: 291680 - DNA, 310 bp, Glycine max
cttttctatgctgcagagcctgcattatggctagctcttgatcatgcaaagcttgtagaatgtggtgcaccaacggccggtaatgagcgttgaagaatttattcaataggtggcctggccaggaatccaaccttctcctttgggaaggggtgaggcctccgcagcccaagagcctcatcaagatcagcaggaggacattccagaggccgtagagcctacacctcctgaaccattcactttagagtctgatccggtttgtgtacacgttcaagaggatgttacgacatcagaagcctttatttttaagctg

SEQ ID NO: 291681 - DNA, 272 bp, Glycine max
tagcttttgttaaagactatttattttcattctcttgctacctcaccgtttttgtgccaaactctctctgttgggtccaaacttatttattactcatactatctaagcttgggaacctccagatctgagttcttggttcatatgacaattttcgtgctaccattattaatggaaggggggtcgttgcacttcttgaaccatgtccttattgttataggaagctccgcttccttgcatgctggggagatgctcaaagcctcatagttaatgtc

SEQ ID NO: 291682 - DNA, 109 bp, Glycine max
agctttattctccagttttgtttcagggctggccatcagatctggtacatctgccatatactctaccggtcttaggcctcatgaactttctcatattccgcatcttact

SEQ ID NO: 291683 - DNA, 377 bp, Glycine max
ttattgtatcgaatctaacaagggcgagtggttttcggatattatatagacgctcgaaattcaaaagaaccctcacagcgaaatgaaacgactttaacttattactagaacgttcgaatgaatctccgtaagatatagagacgctcgtaactgacaacacaagctctgatcaaagtagaagataatagctatttactcggacgtgcgcatgtttcctgtaggatatctagaccctcgtaatagataccagaaacccatatcaaactgtaaacggctttagatcattactcggaaggccgaatgatatccagtatatatcgaggcgatcggtattgtaaacagaggcttgaacaatatgtacgacaatagctttaacc

SEQ ID NO: 291684 - DNA, 387 bp, Glycine max
ttgcatgccagctttgttcgaggatgcctacccattacccattaaatatagactagttgatagggccacaagaccctgcctacttagcttcttagatgcatactcaggggacaaccaaatacggatgcatccacaagatgaggagaaaacaaacttcataacctaggcgactaactattgctatcagattatgccattcggcctataaaaggctagctccacttaccagcacctattggacatgatattcaaagaacaaattggaaagaaaatggaggtatatgttgacaacatggtggtatagtctaatgatgcagaatcacacacctatgattttgaagaaatatttgcaaagatctgaagcctaacatgtaactcaattcgaag

SEQ ID NO: 291685 - DNA, 295 bp, Glycine max
agtaattatacagcatcacaatcctaatctcgttctatttgcaatcaaaatgttatgctctattcctagaaacctaatgtaaagagtaaattcattcagttcagattctaagagtactttccaatcaaaattaagatccaatttcatgaaacttgtgatcaaatagaatcaaacattgagaatagaatgaaatcaccaataatgagtataaaatattcatacatatatataatatcacaagagatacctaagggtacaaagaatacattccatcctttagagaaactaaccgatc

SEQ ID NO: 291686 - DNA, 323 bp, Glycine max
actgggataaacttcttgaagggcttctttgtctgcttgcattccaagcaatttctacatttctcctgtggttattgtagttgaagaattccttgtgccaacttgtgcatttgagcaaaatctttgaaattcaagtgtccaagcctacagtgccaaagccattcttctttgttgctcacagcactaagacattcgtgctcaaatgcttgcgttccaattttgaaagttctatttctggtcaatggtgtttttatgattagatttctggttttgtcatataccagcatcatcatgtcctccatagttatcttaaagcctttttg

SEQ ID NO: 291687 - DNA, 359 bp, Glycine max
  unsure (1)..(359): unsure at all n locations
gatagaaacctcatccagtcagctggggtgcagattgctattgactttgccaaagtgttcctctagagaagtttaacgattctggaggagaacggacagtggcaccaagaggctctacgcaaggtgttgtccttggagacagaggttgccaaatagagggctactactcccacagttagagataggagcgccctaaggtagctaaagccatcatcacctttgctgaagttgtgaggtcgaaccaccaactatcttccaaggttggcagtgtcttggccaaattgctatgcacaaggttggacagtgatgaactatccacacactgcaaggggttgcaggaagaggganaggacttggct

SEQ ID NO: 291688 - DNA, 360 bp, Glycine max
agtttgtcgtctcggagatgtccgactatgctcttgtgtggtggaagtgattatgcaagttgaagtggacgtttccattgggaaatacaatgataaggtactttgtgatgttgttcctatggaggccagtcacttacttttggggagaccatggcaatttgataaaagagccaatcatgacggttacaccaacaagatctctttcattacttttggtgttgcataaaaaatgtacaatgtaagtcggctaggtatttttgtgcgagctcaaccgacattttgtttcgagcgaaactggcatgttcccatttatattggccagtaaatcattagcccacctcggcataaaaatatttgcta

SEQ ID NO: 291689 - DNA, 172 bp, Glycine max
gacaaaacgaaccgaggacacgaacccaaaacaaggcagatttatcaagccacagacaccacaacccaaaaaccacaagcccaaaaccaggcaactttaccaccggacaatacaacctcaataacacaaccctaaaacaggctacttcccgatgcgatggacaaaacggacc

SEQ ID NO: 291690 - DNA, 228 bp, Glycine max
agcttactcttattagtgcacatctccctctgaagtttaacgtatcttcggagtcgctctatgagctatttccagacgaatgtatacctatactttcataaacgcttcctgaatctgcttgtttgtctacttcatttatgagtgagcaatagtactgggaggaaaagtaagagggatatgcagcatctctctacattccctgcgtacaaattgctacgtaactttact

SEQ ID NO: 291691 - DNA, 386 bp, Glycine max
agcttgtttagaataacaagatcaaaatgcacaatttgctacgtgacatgggaagagaaattgttcgtcaaagttctctagaggaacctgagaagcgtagtcgattgtgggttcaccaagaagtgcttgatttgttgttagaacatactgtaagaactttctctacatattattttgaaacttttgatcatatgtgtttttatcatgatcacaaaactaaatttaaatcatcttgttctttttaagttatgctaatttttgtgggattcattgttcacaaaaataaatttgaatgattctgctcttttaatgtgatgcaatgttattagacccggatttattcagaccatgttgcttgcaaaccagtgttcgactgtctgaactac

SEQ ID NO: 291692 - DNA, 417 bp, Glycine max
tgtaatgtcctccgacaaacaatatatgaggatggttatgttagaacacgaaggaaaaattaaaagccgtttaacaatgtattttttttttaaaaaaataaaaaattaaaagacattttcttccatacccattcctcatgaatgaataaaacattcaactttgatgaggaattccaagaatatatcccaacgcaaattaaaatagttcttaagtttatcccttgaaataatgtgaatatatctttcatcatgcaatgaaaaaattaaatgatgcctacaatcttttttatcccttgcaacaaatatgtggttaataatataaaaaagattattatcttatttattttcaaaattttgtccagccaaaaaaggttgtgttaatagaaacaaattaaaaataatataataattatgtaa

SEQ ID NO: 291693 - DNA, 372 bp, Glycine max
tctatttttgcccttgcagaaattaatgttctatctaatcatgacagttcaccaggaaatcaggttactctttcatttgaagagtatactgctctgacgggcaaagctcgagatgcagaggaacaatctaagaagagagttgcaagttctatgcttgaagttgacgaaacaagtttgtcgaacatggacattttgaaaagggtagaagaagctacagaagaagttaaaactagcaagaaggcccttgaagaagctctagaaggggtagaagctgcgaatagagacaaagtagcagttgaagaggctctaaggaattggcgatctgagggtcaaaataagcgttcttctatacacaactctaccaagttcaaa

SEQ ID NO: 291694 - DNA, 416 bp, Glycine max
taactaggataaaacttcaaaagagtagaattccatgtccaaagaatggctttcctagacaattcttatagtttgtgggcttcattctttaggctatgttgaaccttgaaaggtctttcctatttagctgccaattttccttcttgatgaatcttttcaggcttcaccttgggttgtctagacaaggtccccctccttgaactgcctaagcattaatttttagttaaaacgccaagccatgtactgcttgcaagctttgactatgatgattgtattttctcgcacttgttctacgaggtctagatcttcctgtaatgcttcattgttctcgacctctatgaaaatttgtcgccttagtgatatttcccctacttctgttgggaccatagcattcgtcccgtacatgagccgaaatg

SEQ ID NO: 291695 - DNA, 379 bp, Glycine max
agctttgagccaaaatcccaacttaccataaaccttgaaccagggtgagaatatcaatccttgcccttagaagaaaacacaaaaagaaggaaaatccccaatcaaagaaagggagaaagcaaaaaaggaaagaaaattcccaattaaaagagggagaataagaaaagaaaaagaagaaagataatccccaatcaaagatcggaagagaacagaagatatatacagaaaggtctttggaccagacaatatctgaacaatacagaattgtcaccaagaaaacatggcaaccaaaaacctgtgcgtcagtggcttgttcacctcgcgccaaacaaaaacagaaaagaataagccaaaaacactcaaagccaaatttcccacc

SEQ ID NO: 291696 - DNA, 437 bp, Glycine max
  unsure (1)..(437): unsure at all n locations
taagtggacaagttccacaaatttgttttatttttcttattaaaaggtattcttttnttatttcactttctcccatgcttttaattaatttaaattttttcatatattacatctttatgaactgtattcctatgaaatatgttaattggtttattattttattgcaatgaataattgttttcttgcaaatatgtgtgattgaaaaatactantggtcgaatggatgcangtgagccgcatctgctccataaaatatttattaattaactgttatatacttgagtttgtagttggatttcttggtacagtttataggattttggttgggccttagtaattagttaaaatagtatatctacgtgattcaaatattanggggtaggaattaccttaataagatgaaagggcttcaaccatgacttgaacttcatatgatg

SEQ ID NO: 291697 - DNA, 396 bp, Glycine max
agcttgtctaatactcattagacttgattaaaacttaaatgagttaattaaaccttgaatgagagaaaaagattagaacaacagaagaaagacacgatgttttatactggttcactctctatttctagagaagctcatccagttatctaatccacaacctgaattagattttcactatgcatcaagaatccttacaagcaatcacaaccaatcaaccattccctggaaaaagagactaaggcacccaacactagggtcctttgtgaatataagcctaagagaaccctactcttagcccaaactagaaaaccctattctagcatgttgtaagcaattcatggataaaaaacagaccgtgtgaaaaccatactcaagaaaaaacaagtaggagagata

SEQ ID NO: 291698 - DNA, 402 bp, Glycine max
attaataattaattcaacccttcttcttaattattccgaggccacttgatccaacaagtggtatcaaagcaagtatcttgtagaaagtttcacaactaccagattcatggcctccttaaattttctgtttctggaaggaaattccatccataggccacccatatttaatggtgagggttaccactattggaaaatccgaatacaaatctttattgaagccatagatttaaacatttgggaagcaatagaaataggaccttacatacccaccatagtagatgtaagcactagcaccacaacacaaaaacctagagataagttgactgatgaggatagaagaagatcccatattatcttaaagaccaaaacattatcacttctaccctatgaatagatgaatat

SEQ ID NO: 291699 - DNA, 311 bp, Glycine max
gcgcctgttatacttgcgaatctttctgaacacctattccaagactgtgatgtgtcgggtcatgctataagacttgacaggcatgtcatcaacatagacctcgatatttcatcctattttttgtttggagacccggtccatgaacctttggtacgtggcccctgtagtcttcaatccaaagggcataaccatgttacagaaattgatgtcttcaattatgaaggcaattctctcctcgtcaggagggtgcatcctgatctggttataccctgagtacgcgtctatgaaacttaacaactggaaacccgacg

SEQ ID NO: 291700 - DNA, 193 bp, Glycine max
ttagctctctggccgagaataagggttatcgagccatgctcgcttaaccgctgtgctatttcagctaagccaatgtgtctcggttatccagagtacttggtagtgtgtagtcgtgctaagcgcaacttggacgcttaagcaggactattatttttataaggcgtgctaagcgagccaatcttcgtaagcgccc

SEQ ID NO: 291701 - DNA, 388 bp, Glycine max
  unsure (1)..(388): unsure at all n locations
agcttattactttattntttcggatcgtgtaatttaaaacttataattgatagcagaaaataaaatttataacttgttaaaatagaattgtttgatatatttaattattctatcagttgataaatataaaatgatataaaaatgtttatatactattgtcacataaaaatgttntttaggtaactataattttaaatatttgattcttattttttttggaaatatataatattttattaaaaataaaatatcagaaaggatattaaaatagttaaaagacctataactattaagaagagatgataaataaagtggattaaagcaagaataaaaatgaaaagaaagaataatattactaatacatgcttttaacgagttataagttaac

SEQ ID NO: 291702 - DNA, 315 bp, Glycine max
  unsure (1)..(315): unsure at all n locations
aacttttataatgaataagcctaataacgaatgccaacaatatgatcaccaaatgtcaccttaaacaccacaaccagtacaaaccttcttcattcaacatgtcatatggaccaagaaagaaaaacaaattcgtttaacaattcagtcacactaaacattatagaacaactaaaactaacctaacatccctaaaaaaaaacgtaaaccacatctatgaatngactaacccaaatcccataaattacaactcatacacgggatcaaaacacctaaacaacaaatatagcataaccctgtcatgtagataacaaccaa

SEQ ID NO: 291703 - DNA, 360 bp, Glycine max
agctttacacagtttatttttctcaaacttgagttttggaagaccaattactaagtctttcctaattagatgatttaaatgattcatattaatgtgtgcagtcctacaataccacaaccatgaatcatctatcttactcaccaagcaacttagctcatgaaaaactgcatgctcaacattcagcatataaatgttacctattctcttaccaatgtggataactttatcggatatggcttcacttataagacatcaatctatgttgaattcaatcttgaaacctttatcacaaagttgactaatacttagaacggtatgctttaatccattcataattaacacatatttcatctaaggttt

SEQ ID NO: 291704 - DNA, 378 bp, Glycine max
actcagctttatacacacctattaagttgccactcaaaactttctatgtcttgttttaataattgtttcgatagacatttttatgtgaagaaaataacaaagtaaaataaattgagtttctctcgtaaataaaaatcaacttatgcactcaacttttatagaaattctcttaactggataattgaaatgtataagttaattttaacttatggaaaaaactaaactcattttatcataacttctttttttataaatactcatgggaaaaatattccaattggataaaaaaaagatgaaatagcatttgtttaatagcaacatgtggggggacatagtgacatgaaatttttaaagctagttacctccagataataaaga

SEQ ID NO: 291705 - DNA, 400 bp, Glycine max
  unsure (1)..(400): unsure at all n locations
agctttcacaacaaatttctaaatatgtttttgaacaaaatgaagtacgtaactaattaccactaatatatactgtgactacttagaaggaagggataggtcatgattagtccaacctaatctgcctaattaaactaattacacaaagcaaagcctaaattcgtaacccaattattcaagtgcagaggttctgacttccaatattaatttgaccctcaaaatggaaggattggcccaagcttattgatgcaatcctcccaaggaggggacccatcaccatagccatgactaggagactccaggaagattgggctagggatgcaagagaaggccctaaggttctcatgagccttangatagatnttgggcccatgggctaagtatgaacccacttatcttt

SEQ ID NO: 291706 - DNA, 193 bp, Glycine max
catcaaatcttacagagaatgggctgttaaacttcaatttaaaagccttaacacatctcaagatttgcacactaccaatatagtgctgttgatagcacctcaactgtgcacattctctcttttgatggaaatttttggcatataccaattatttttccatgacagagtgaacttttaaactggattaatctat

SEQ ID NO: 291707 - DNA, 134 bp, Glycine max
ttctgcatgcaagcatagcttggataatgtcatagataattcgctaaatgaaaagtctagatgaaaggagaaaggcttgagtagtcattgttggacaagtggcctcaaatatcttaagaagggggggggggggg

SEQ ID NO: 291708 - DNA, 292 bp, Glycine max
gaagagcacaaaccgaaggaacaacgacattggggcatctaaacaccgtctggaaaagcaacaatatcttatatcaatcatagacgaaaactctcgagaggcataagtggaccttatacaagagaaggcacaaccactggaggtgccaaaacattcaaagtgaaagcgagagaaccaacaaaaaaaagatgcacacgacggggggaacaggaaataggccaggacaagcgggctttgcggaccagaaaagggatgcccacagaacaggccggcaccaacagaagggggtgaa

SEQ ID NO: 291709 - DNA, 354 bp, Glycine max
  unsure (1)..(354): unsure at all n locations
gaaacttcctgcttttattccttgaccacaaagtggtacctggagatatgtcgcgggggtcaggaaaccttggggacgtcaagtggggtgctattgcccaaaaccaagcttgaccaatcccgacccaacccgggcatagtcggtcagtgagaacctgtgatgtacctaaacaagcgagctcctggcagtcaacagataaaaggaacaaagaccacaaagcanggaggcttgtggtggctggccagccatgaacttgattgatgtgtgagatatggcctctggtaatcgattaccaanggtgggtaatcgattacaaggcttaaaaatgaagacaggaggctaagatagtctctg

SEQ ID NO: 291710 - DNA, 416 bp, Glycine max
gcgtagcccaccatcttttaatagtaaattaccgataatgggtctaccatcacgattatcgtctccctttttgcacatgttctgtagttgcatcctatccggaaccatatcaaaataatactgatactgcctaacgaaggcaaccattaggtccttccaagtatggactcgggaaggttccaagttagtgtaccaggtaacaactaccccagtaagactttcttggaagaaatgtattaacagctcctcatctttgcgtatgcccttatcttctgacaatacatctttagatggttctttgggcaagtagtccccttgtacttgtcaaagtccaacacctttgacttgggaggggtgatgatattgggtactaagaacaactcttctatgttaggaaaggcataatctttacctcc

SEQ ID NO: 291711 - DNA, 362 bp, Glycine max
agcttttggtgggacatcttgacttgctttccaatctgacattcaccacagattctgccttcttctattttcagattgcgaatgcctctaacagcacctttgtcaatgagtttcttcatgcctcttaagtgcagatgtccaaatctttgatgccatattctgacttcatcttctttggaggatagacatgtggaggagtaactggtttcttgaggtgtccataggtagcagatgtcctttgatctgctgccctttattagaacttcacacttctcatttgtcactaagcattctgaccttgtgaagtttacattgaatccttcatcacacaactgactgatgctgatcaatttgcagtcagt

SEQ ID NO: 291712 - DNA, 566 bp, Glycine max
  unsure (1)..(566): unsure at all n locations
actgtgtcgcatcgtaagtgattctgtaatcgaaccattaactantcaccccncctttcncnnncagagattatgatacatacactagcatncngngacactatanaacactcaagcttcttattcaaagctcatcttggaggtgaagcttctttttccatggcttattccctaatggatggggcctcctctcacctactatcctttggcttccgctgcaatttcctgggggaaaatcaccattaaaggactcccttgaagctcaaagatccaacctcctaaaagccccacaagcaagccttcattcagtggtaatcagagcacaagagcttcaagtaagtgctccttaaacctccattaattatttgctgtacgttcccttccattggtgttacttcattttctccatgtatctcctcacatgtcttgggataaatggttgtaacatgattctttatagtttccaccgataatcttgctataaaagctagattttattttctattgctcaaatatcttgttcttgtctataaccatgaattgggtcgacttaaggtcctttgaat

SEQ ID NO: 291713 - DNA, 380 bp, Glycine max
  unsure (1)..(380): unsure at all n locations
agctttatgcggcataattttagttgtttcttcttcctttatcttttaagatagtccatacaatcaggtctctccaatttcaagacatgttattctattaagaaattataagaactttgaatttttaaaactattcatatagacattagcaactcacattgttttaaatagaaattatgtgcgtgtttggatgaacattaatataattgattntgaatgaaattaattttataaaattgatttaaagtaatgtgatttatatttgaatgtttttaaagtatgttaggagtaaaacttaatattaaaattgtgttnttatacatatatntatgacaaatactaattacgttgnccatgatctttttatgttcacctatgtt

SEQ ID NO: 291714 - DNA, 300 bp, Glycine max
  unsure (1)..(300): unsure at all n locations
atgacacagncttatggtctttcctggattatatgctgcatacatcgggctcttggcataaatggagaaagtggatcccagcttgtcttcactcagcaaccatttctatccttattaatggcagccctacaaaagagttcaccccatctagaagcttgaggcaaggagaccccctaacccctttactctttaacatagttgggaaagcatttcaggcctaatgaaggaagcagtccggaagaatctctataccactacaggttgcgatgaaatatgagcccacaatattctgccaaatgc

SEQ ID NO: 291715 - DNA, 368 bp, Glycine max
  unsure (1)..(368): unsure at all n locations
tttgcatgcaagcttgctctaaatttacattgatgtttgtattgatgggaggaggttacatgccatttttgctttaagagtaacgtcccactggtaaaactaactttccaaatgtttgccttcgcaggaatggccccgaggaagcttgcctcaaagaggtccaggaaggacaaggcggccgaaggaactagttccgccccggagtatgacagtcaccgctttatgagcgttgtacaccagcagcgcttcgaagccatcaagggatggtcgtttctccgggagcgacgcgtccagctcanggacgacgagtatacntgatttcangaggaaatanggcgccggcggtgggcaccactggttactcctat

SEQ ID NO: 291716 - DNA, 397 bp, Glycine max
  unsure (1)..(397): unsure at all n locations
cttgaataanaagtcaagagatgtaactcttcttatgattntcaggtttttctcaagggtataactcttccaatggttttcttgaccagacataaacagtctataaaagcaagaccttgacttgcattcgaaataacttttgaacatctttgtgaacttcttcttcttcttcctttgccaaaagctttctaagttttctgttttccaaacctttgtctttcacagaaaacaaacgtgtgctatatcttttcattctcttctccctttgccaaaaataattcgacaaggactagcctcctaaattctttntgtgtctctcttctcccttttccaaaagagcaaaggactaaccgcctgaattcttttgtgtctccctttctccttttcaaagaattca

SEQ ID NO: 291717 - DNA, 412 bp, Glycine max
  unsure (1)..(412): unsure at all n locations
agctcggccccgggatcctctgagtctcctgcggcattttactttgcttttcattnatgggactggagaccttgctcacacttacaaatatggaaatgacagcttcatgcagcatacacaaggatcttctagtcgcactaaagatgctgtagagattaaccgactgcgggaggagctgcgtcaatcaaaggaggagatatgtgtttttcaatcagttgtccttcaattcctaccttctaaagcgcgaaacattattcatcatcatcatcatcatcatcaacaacaacaacaacaacaacaacaacaacaacaacttcaccggtagcaacaagaccaacaacaacaccaacactagcaagaccatgtagatgacccgcangcagatgaccaacacgaacatgatgaccaacag

SEQ ID NO: 291718 - DNA, 372 bp, Glycine max
tgttcttctacaactcgaggatgacttccctgtctgttcgaaccttctccactcgaaatcgcagttcgtgaaaaaatgaggttaagcttcttctaaccttcttttatgttaagcttcgaagaaacccaatcaataaggttcgtgtgaggtcacgaagcttgtattactactgatgtatgctaatgttggtggcacggaagatgcaagtcacgaatgagttattgatgaacaatagctactgggctaaaagagttaacacggttgtgctttataatcatatcttctaattgttaaggataactgcgtaagtgcatcctatctagtgttgtgaatcgttaaaatgtatgccttggaaacgacatgttagatatt

SEQ ID NO: 291719 - DNA, 374 bp, Glycine max
tttagcttgcattattttacttaggttgtgttcagcattacaattaacaaaaccaaaatcattattaactgaaaatgaatgaccaataacagacaaattccagaggccaatatcttcaagacaatttggaagctgaacatccccccaagggctgcggttttctcttggagacttatcaaagatagattatccactagatataacctccttaaaagaaatgtgcccattcaggacaatgaatgccctctctgtgggtattaccaagaggaggctggccacttgtctttcaattgcaaattgaccagaggactatggtgggaatccattatgtggaaccagatggtaggaccactttcagcttcttcagcaactca

SEQ ID NO: 291720 - DNA, 359 bp, Glycine max
  unsure (1)..(359): unsure at all n locations
tgtcatagaatgaacaagtagnnagctagttgtggttttgttncctaaccctcttgatttacttctgcttaattctgcccgtctgctccatatgcaagagaatcatgcctctattggaattaaattttccaacactctaagttaattgaaggtctattaacagggttttagattgatcttaactcccataccctcaaaaattcatcatagctgatatatcgtggactttagaatgtcatattgggagtgaggttttgatgcacatcctaattaataactagataatttagatgttgtagatttccacagttcacagttctaagtatagacaacacgtttaantaaattagttctaaata

SEQ ID NO: 291721 - DNA, 386 bp, Glycine max
  unsure (1)..(386): unsure at all n locations
agcttgaggtgagtntattcgttatctacgaagaatcaaaggcatataggctttatgatcctatctcataaaggattatagtaagcagagatgtggtttttgaagaaaatgaagaatgagaatgggacaaacaacatgagtcaactgatatatgcgagctagaatgggaagatgatgaaaaggttgtttccaaagaatctcctatagaagaagatgttgttgatgcacaaccggaggagtctcttgtcactaatcaagaaacttctgaagttcttgtcaaagggaggagtagaaagcaaccagcttggctaagagactatgtgttcggtgaagggttgtcagaagaagaggctgcattttacttaacattctttgccttggatact

SEQ ID NO: 291722 - DNA, 366 bp, Glycine max
  unsure (1)..(366): unsure at all n locations
gagatattctgacatgttattaggatctagcttaccaagcatctacttaaccctggcatttatcaagaaatttaaggtctattatatttatactgaagacagttgcaagtctgtactttgttcacatttcaaactcagtagatcttcacttcaaaggactttggttagagatataaaactatntttgtacatttcatttatccagaaatttagggtaatattatactaaagacagtcgcaagccagtaggttcatatttcaaactcagcagatcgtaattttttagaagttcacactgagaaaacagaatgaacaaggccgcctaacttagggatattttnctcaagataaaatccatcacatctt

SEQ ID NO: 291723 - DNA, 398 bp, Glycine max
  unsure (1)..(398): unsure at all n locations
agcttgtattgtcactcttatcttgactagttaaaactttttgaataaaatgagtttatcccatgttttgactccgaagtcagtgtgaatcaaatcactcctgcattttatctctagcatgcattcattattttttacctactcctcacgtttggttttttaggaaaaacaccataactaaacgcgccccaaggcatccctatcgcaccagatccaaatctagaacgatgggtgatcaagcggagacacaggaatagatgaaagccgacatgtcaactttgaaagaacaaaggggatgtcgagttctaccacgcaactcttctagctaccacgcaccatcctnccccanatgcggtaggacgaggaaggagcacactggggcacaacagcaaccccca

SEQ ID NO: 291724 - DNA, 361 bp, Glycine max
  unsure (1)..(361): unsure at all n locations
tcttatccaaagctcatcttggtggtgaagctccttcttccatggcttattccctagtggatggcaccgcctcttacctcttctcctttgtcttccgctgcatcttcatggtggaaaatcaccattaaaggacctcattgaagcccaaagatccaaccttcataaaagcttcgcaagcaagcttccattaagtggtaatcagagcacaagaacttcaagtaggtgctccttaaacctccattaattntttttctttaccttctcttccaattgtggttcttcatttttctccatgtgtctcctcacatgtcttggtctaaatgttggtatcatgattctttagaagttccatcgattaaac

SEQ ID NO: 291725 - DNA, 387 bp, Glycine max
agctttctaagttttctggttttcaaacattgttctttcacagaaaacaaaagtgtgctatatcttttcattctcttctccctttgccaaaaagaattcgacaaggactaaccgcctgaattctttttgtgtctctcttctcccttttccaaaagaacaaaggactgaccgcctgaattcttttgtgtctcccttctcccttttcaaagaattcaaaacgatgcagtctgagaattcttttgattcttccctttcccttaaataaaagatttcaatggagtaaccgcctgagatatcttttgtttccccttcacaaagattcaaaggactaaccgcctgagaactttatcttaacacattggaggatacatcctttgtggtacaagt

SEQ ID NO: 291726 - DNA, 415 bp, Glycine max
  unsure (1)..(415): unsure at all n locations
tgggataagaaactaagaaactatgaaaaaataagacttttataatatactaaaaatatcattaatgattaaatatggtgaaataaagaaaaaaattaaaataaagtgagataaaatatttaatttgataaaatttattaacttctaaaatgatatacagatacacgtgtatttaggaatgaaaacataatatacatgttaattcataatataagaaaaagttataatattttaaaattagcataataaaaatacagacgtacacgtgtttgtatttctgctagntatatataaattaaattattaaatatanaacacattaatttttaatcaacatactctattagaataaatgatctatactggttttcaatggtaatttggtggttttgtttaaatttgttatattttctaa

SEQ ID NO: 291727 - DNA, 396 bp, Glycine max
  unsure (1)..(396): unsure at all n locations
agcttgcatctcggacgtttcacatttactacaagtgaaaatgactgccgaatccttttcaaattggcgcgtgttaaatactttggtccttgtttgttgttccttgcataatgatgcacaagtcctctacatatctaatccttgtaaaatatacaagtagatctaaacatgcaaatcaattcaaatgacatatttagatcaaacaacggaaattaaatattacgagcgtacctccaaccattgcaaatcgaacgctaagcggtgcatacatgaacctaaagacagttntgttcttccagacccttactcgctctgaatagatgatgtatttttttctgaatagagaagtcagtttggtgatacaaaactgagaacaccccatcctatntatagagt

SEQ ID NO: 291728 - DNA, 371 bp, Glycine max
  unsure (1)..(371): unsure at all n locations
cgccaaatgctctataggctgatgagttggtccatcttctctaagtccaatcgtatcatgagtcatcacataaataacttcagcttcacacagtgcataaatccttatggcagctctcatgtagtcagtgaaaacaaagggcatntaaattttgctgaaacagatttcttgtagcatatgcagggctttctggagtgtatgtctgaatgttgaaatttaattaaaagggtagtcaataatccagaaacaaatgatggaagtcaagttttatttatctttaaagttgaaggctatacatgcatgaagcanaaagatggatgatgagtgaagatgcaatgtacttaatatgaaatttactgtattaggaaagt

SEQ ID NO: 291729 - DNA, 384 bp, Glycine max
agcttatgagaaatccctgttttgtggagagataagtccttgtttggctgatttaaagcatttgaatcacttgaacttgagcggcaattatttccttggagcaggtatgtcaattccttctttccttgggacaatgacttccttgactcacctcgacctctctcttactggattcatggggaagattccatctcagattgggaatctctccaatttggtctatcttgacctcggaggttattctgtcgagcctatgttagctgacaatgtagaatgggtatcaagtatgtggaagcttgaatatcttcatttgagttatgcaaacctatccaaagcattacattggctacacactctccaatctcttccttctttgacccacct

SEQ ID NO: 291730 - DNA, 367 bp, Glycine max
actcaagctgtagatttgcaagatcatcttcgctgacaactccttgattattattgccatcgatatgaagaagtgacaatttagagagtgatccaagactttcaaatggatttccactgaatttattcatagagagatcgagatatgttaaatctgtctcccttgaggtgcggagacttcccaaaaaagtcggaattgttccttcagttgaagatatgacaaaacaagttctacgagagaagtcaaatttcccagagaagttggaatggttccttcaagttgattgtatgacaaaagaagttcaacatgagaagtcaaatctcgcaaagaagttggaatgttccttcagttggttacctgataaatc

SEQ ID NO: 291731 - DNA, 384 bp, Glycine max
agcttgtatgattatggggtacccatcacatgtggtactaggtggcggtcgggcgatagtgcaaaacagttctccacatccacaaatcacgtataaacccaccatcccctgttgcccacctcaactgagctcacgtacttccacgtagctcttatcctcgttcctctctacgccgggtccccatcaatcctcccaagcttccacaacatccaagtaattcaacatccaagcatcatgaactaacatagccaagaaaacagggcagaggcagaaaactctgcccaaaacacaaaccaacatcacagcttttcacactcaaataccacagtaatattctcctcgttccaattcattaaccgttggatcgactcgaaaatttactgg

SEQ ID NO: 291732 - DNA, 435 bp, Glycine max
  unsure (1)..(435): unsure at all n locations
tcttatccaaggcaattcttggtggagaagcttcttcttccttggcttattccctaatggatggtgcctcccctcccctcttctcctttgccttccgctgtatctcaatggtgaaaaatcaccattgaaggacctcattgaagctcaaagatccagcctccataaaagctccacaagcaagcttccatcacatatatcctcatatgtaggttccctgaccctaactatggtgttaaaatggtaaattttataataaactccccacacctatcgtgagctaccctgcggattcctcgtcatgtcacttgaagattcctttctgtccttgctcgttgattccactcaagcctctaccatgccaaaacgaaggagacttagtatggattttagaaagctagtgacagtgctctgggtcanacacccacatcactacat

SEQ ID NO: 291733 - DNA, 386 bp, Glycine max
agctttggtatatagtgatgaggtacaagccctaaaggcagagcttgaaagagcccgggtagtcgaagagaagttcaagtccatagccatcaaagtctgaaaagagtatgatgaactaagggacgtcagtatggccacagctgaagccttggaacgagaaaccaagaaggctcgaaaggaagaacacgaccaaaacaagttttgaggggctttatagggcagcaatagtgagctcaagctccgaagaggtgaaaggaatcatcacgggtcaaaggcatgatctggaaggaggagctaaaggtttgccttaggtcgaaaagaaatttgtcccaacagttaagcgagactgaagggaatatgtgggccatcatcaataagtgcaaaga

SEQ ID NO: 291734 - DNA, 332 bp, Glycine max
tatccttatggcctgcctccggacatcaccccttgttgtcctctcgaagatttaagccaagcccctactttcgaggagcaacttccacctttatgaagactatcccgggcaagacgatggggaaggagatacccatcttggccccctgctccacctcaaagatccgtccccacatgaactatcccaatcgaacatagtccgccatatcccagcctcacccacacccgtaaaagaatctgttccctttgcggaagataagggaaagattaaggcgcttgaaaagaggttaagagcagtcgagggccttggcaatacccattctcggatttggc

SEQ ID NO: 291735 - DNA, 377 bp, Glycine max
agcttgaaatcagatattgtgaaggtagtttggactatgattcacagctttgcatgtctagggtttctagagagaaaaaggtccaagttccagagagttttgagagatttttccgtgtgaagatctatagagaccagagcttgaagcaagagccagtttgagagcttgagatgagtttgtgagtgattgtgagattctacacgtgaaagagacatcctcaccacttggatttttgcaatctttcatcttggtcttcttttagtagtaagaaggcttcctggtatggaaagctatattctctgttggatcctccctgtaggtacctgatgtaaaatatttctatctatttagcgatggtatgtgtggtctctatgcta

SEQ ID NO: 291736 - DNA, 372 bp, Glycine max
agctttgtttttttggaggcattattggcttctcttcctttaattttattttaatagccacatgctgatcttcacgtgttgtgcatttagatttgtgctgatgtatgaaagacaaatctttctctctttcactttaaaaagacatgcagtgggtcacacatggggatggtgaaagataatgtgaggcaatatacattgcccatatttactctgtagtctatatatatacttgatcctaaggaaggtggtgatattaatttttggaatagaatcttctgattattgaatatttatttggactgtttctatttcatagcattgatgcaaggtattttagaggcttctatagactttgaccagcaaacatagtgc

SEQ ID NO: 291737 - DNA, 257 bp, Glycine max
ttgcatacattccatacagatgacacacacaatctcagtttctgtgatttgcttttgagggcccatgttatttcttttaggaaaattattctgatttggaagcagtgggacacagctatatgactttgtttcaaatgccctaggggtgcattgcttcacaattccagtaaatgtaattcttttttggattaccgattataaagttactgctatcattctatttacatagaaatgacttggtatcatgctctattata

SEQ ID NO: 291738 - DNA, 335 bp, Glycine max
agcttggtttgatgtacttacccgttgaagactgatgataaccaagaacgatccatgaatcttgaataacggtcgagaatcttcgcgagattactcacggaaacgttactgaagcgcctgggcttggattgtattctggagaaatctatctcagcaaattctagagagggagaagagtctaaggggctgaaccctttccttcttcacttcttgcgctatatatatcaaaatatgggagaagctggacgcccagctcgaccaggcgagcgtggttgctatctccataacgaacgggccatgtgggcctggatgctatttacaccacactttttact

SEQ ID NO: 291739 - DNA, 268 bp, Glycine max
  unsure (1)..(268): unsure at all n locations
tgaagtcatgtggatgctacgcttncccatatttcttctatttcatatcgagtanccgttatgcaagatttatgctaaacccctgttatcattagttatgcataactgaaacattgttaaatctctcttgcactaactagagttacgaaactcttgagtatccctagatgtgtaagccgcgtgctttgcagaacttgtaacactgatccgagactagtgtaaatcacacgagatgtgattgctgcaggaataccatcttcctgttttc

SEQ ID NO: 291740 - DNA, 354 bp, Glycine max
  unsure (1)..(354): unsure at all n locations
agcttatgctgcaaacatttataatagacctgctcagctgcaaaatcaacatcagcagaataattatgacatttcaagcaacagatacaatccaggttggaggaatcatccaaatctgagatggacaagtcctccacaacaacaacaacctatccctcatttccagaatgctgctagtctaagcaagccatatgttcctcctctattacagtagcagcaacagcagcaatcacaacaaagacaacaagaaactgaggctcctcctcaaccttccttagaagagttagtgaggcaaatggccatccagaatatgcaatntcagcaagagacaagagccttcattcanagtctgac

SEQ ID NO: 291741 - DNA, 377 bp, Glycine max
  unsure (1)..(377): unsure at all n locations
tttagctttttcttaagctttttctacaaccttttctccccctttggcaacatcaaaaagccaaagaactcggaaatcaacacagatataacaatggagtagaaagatatagatatcagagtataaaacacaataagccaaactcacaaagaagaagtaatcaaaccagaatccaaataactgaaaatgtcaacaaccacaaaacatccaagactgaaatttanaaaaccacaagataaataagcaaagtacttagcaaaatagtgtaaattctaagaaactaaaagccaaaatacacggcttataaaagacatataatcagaaactaaaatctaagaagacggaggtggtggtggaagatcgaaactctgacgaat

SEQ ID NO: 291742 - DNA, 408 bp, Glycine max
  unsure (1)..(408): unsure at all n locations
ctggttcttaatttttctaagttctttaacaagctttgttcaatatacttgcccttcatttaactgtctctgggcttggtggccacgctcaacaaagtactttcgacacctactgtacgttgatttgaccaaagctgttatgggaatgttgcgacaatccttcanaaccttattgatacattctgagaggttgngtgtcatgtggccatatcgacacccttctctatcataagccatcgtccatttttcctttgaaatgcgatcaatccatgttactatggctggacttaattcacgaaatttttctaaattttatcacaatgtgcttgcaggagtgagactgcataaaattagtatgaatacaatttcaagttatatgaagttaaataacgtaccatcaaaatgaaa

SEQ ID NO: 291743 - DNA, 400 bp, Glycine max
  unsure (1)..(400): unsure at all n locations
agcttctgaanatcatagcatgtttgaaaatcaagtagaaaatgacttttgaggagaatttttttttttttttgcaaatgatcaaaatcattgctgttgtttttgtgacttttgaggtaaaaaaacttttgcaaaatgattaaaatcattatttttgtttttattattcgatggatctgtatttggagtgcacatcacaataagttgaaaactgtaaatcaaatatgcactcaaacatgatcttaataattaagaaattctagtttaattgattaaacagaatgttgattaagtagaatgtgtaagatcttgtttaattcttgcgggaaaaaaaaatataacaaggttgtagatctatatctttagctctccatttggtgcaacagtaatggttatggag

SEQ ID NO: 291744 - DNA, 428 bp, Glycine max
  unsure (1)..(428): unsure at all n locations
acttcaacaatattacaaaattgatttttatatctttaaattgattaaaaatatcattttaaaataattaacaaatatggtttttgaatataaaaaacacacgctatttcaacaaatttaatataaatatttatttttacgataaatacatttaaaaattaattatgaaaagaatcaagtccatcttacacatattatctcaaaattgaataattatatattcatatttaacatatttacattcttttttaatttatatatttcatataagtattccatgactattactgcttagtaaaaaattaaattataataaatttcattaggttaagtatttttaatgataacataggtttaattacaattttaaataatcatcttctttgatntaatataatatatatatatatcattgatattttgacatg

SEQ ID NO: 291745 - DNA, 396 bp, Glycine max
  unsure (1)..(396): unsure at all n locations
agcttgagatgttgngatatgacaagggccttcatgattgaccctgaccttcttgattgatcacgaccatggtcaatgtatcacggctattatcaagtgaaaatagtatcaaatcttcatgaaagtgcattttccaacttttccacttgattgagcaattgtatttctacaagataaaagctaatgtccaaaccactacaaaaaaaggatatttctaacgaaatattttccacaaaatttattatgtcaagaatatttgaatttttgatggaattttcaaaggattatattccatgggaaatttttgaatttgtgacagaatttacccaccaacaaatttttcatcaaaaagtattttaccgaagaaatacagatccgacagaatttaccaccgag

SEQ ID NO: 291746 - DNA, 415 bp, Glycine max
aactaagctcgaggattatggggtacccatcacatgtggtactatgtggttgtcgggcgatggtgcacaacaagttttccacatccacaaagcgcacataaacccaccatccccttgtgcccaccttcaactgaactcacgtactcccacgtaacccatatcctcgtttctctcaacaccgggtccccatcaatccttccaagctttcccaacatccaaataatacaacattcaaacagcacaaattatcacagccaagcaaaacaagggaaaggcagaaaacttttgccaaaacaccaaccaaaatcacagcttttctcacttaaagaccccagtaacaattccttcgttccaattcgttaaccggtggatcgactcgaaaatttactggaagtctctagtacttaagcataca

SEQ ID NO: 291747 - DNA, 391 bp, Glycine max
  unsure (1)..(391): unsure at all n locations
agcttgctctaaatntactttgatgtttgngtttatgggaggaggttatatgccatttttgctttaagagtaatgtcccactaaaactaactttccaaatgtttgccttcgcaggaatggccccgaggaagattgcctcaaagaggtccaggaaggacaaggcggccgaaggaactagttccgccccggagtacgacagtcaccgctttaggagcgttgtacaccagcagcgctttgaagccatcaagggatggtcgtttctccgggagcgacgcgtccagctcagggacgacgagtatactaatttccaggaggaaataaggcgccggcggtgggcaccactggttactcccatggccaagtttgatccagaaataatccttgagtttta

SEQ ID NO: 291748 - DNA, 408 bp, Glycine max
  unsure (1)..(408): unsure at all n locations
ttgaatgctctattcaatggagttgacaagaatatcttcagactgatcaacacatgcacangggccaaggatgcatgggagatcctgaaaaccactcatgaaggaacctccaaagtgaagatgtccagattgcaactattggctacaaaattcgaaaatctgaagatgaaggaggaagagtgtattcatgacttccacatgaacattcttgaaattgccaatgcttgcactgccttgggagaaaggatgacagacgaaaagctggtgagaaagatcctcagatctttgcctaagagatttgacatgaaagtcactgcaatagaggaggcccaagacatttgcaacatgagagtagatgaactcattggttccctttcaacctttgagctaggactctcggataggact

SEQ ID NO: 291749 - DNA, 394 bp, Glycine max
agcttagatacgtcacttatacacgtatcaattaagtatttaaagagtgttggcattagatgcatgaagcaaattgaattatcggtgcttcatagatttagatacttcaccgatatacatatctgtgaagtatccaagagtatcagtatcaaacatgaatatgtgaaacaaattgaagtatcaatgcttcataagtcccttaccttggcttgtgaaatgatggtctaagctcttgggttaggcctcagatggaattctcaatttgcccatttcaccaagtgcccatcaattataaagcttggacctttcggttgctccaaggatattggattcaacatccttaactctctattaagcttttgaatggagcaatggtatttagtagtactagtat

SEQ ID NO: 291750 - DNA, 352 bp, Glycine max
ctatcttgaggggatgtcctattcattgactttaactatctgttcgttcaacttctaacccatccaacatttggtatcccaacttgggtgcctttcatcatgttactatcaatgttgaaaacattcagtagtgttcttgatttgagggtcccaatcaagtgattgtaagcaatggtcaaggtctggaaacaaatatattggttcatcttccttataatcattctactaatttagttgtcaatagaatattgcatgttccaaccatttctaaacatcttccaagtgtaagtcaatttataagggataattcaatctccctttgaattcaccctaatgtgtgccttgttaaatc

SEQ ID NO: 291751 - DNA, 367 bp, Glycine max
  unsure (1)..(367): unsure at all n locations
agctttccagtttggtagtttctccaactttagttacaaacccatatggatgaaatgatagaaagcttttttctttttttgtcttgaagcgattgcatgagctgggttttcttccatttggtttgttatttttgtatgcgttactccaaaagtttgagactaggctatattactttgtttctggttatatggaataaaaatttgagatttttatgctattttagatagagtgcaacgttgaagtttgaacttttctgttttagtctttttctccttgggttagttcttaatttaaacataanatgtgtattataatttataacattctggttcttaaatagatgtattgaattcctctgtttctcat

SEQ ID NO: 291752 - DNA, 375 bp, Glycine max
  unsure (1)..(375): unsure at all n locations
attgacttattgcattctatatttaaatatcaaacataatttcttacttcccaacatgttttcaaacacatgtttaataattaaacgccattaattgaaaattaattatagctggacaatgtctttttaaaaataattattgatacaaatttaattaaaaaagaaacaagatatatcactatcttgctgtactagttgtctttttcctttcctttcctttaaccacttggccaatatgagacaccaaacaaagataagctgtggcgtctaactgataagacatttcaagtctccatttttcaagtaaggttttaagaacaatgggaagacgttgattttggtcagcagaaatatatcctatnactctattcctac

SEQ ID NO: 291753 - DNA, 305 bp, Glycine max
agcttataacctttctttaagctttttttaagcttatttcagtaagtttcaagttcgtggttaagcttttgatataacttctaatgtgaatgtgatatgcttaggcgcctaattaagctatttactcaaatgcaccttacatgtaattgtacacatattatttgcctatatttgatgtttggtgtttttttaaatattgttgttccttagtgagcttgaaacattaacgtgcggagtaaaaattgcatttttgtttaatgtttcaacaaaaccttttttttttcatttttttggggggggggggg

SEQ ID NO: 291754 - DNA, 443 bp, Glycine max
  unsure (1)..(443): unsure at all n locations
tttcttagtcgtctgtaaagatgattaggtgttanttagcggcgatgcctactgtagactgtgtgtctcccatgtttaagttgtatgtaacttgtattttcttcacagatggggcatgcgtgatgacccttaacactgtaaccgctgagattcccatatgctggaaagtcattaatggtacaaaaaagcattgcacgcatttcaaacgtctccttgcgaaacgcatcatacactacaaccccctcgtcccacaactttctcaaatcttcaatcaacggacttagataaacatcaatgtcatttcctggctgtcttgggcccgatatcatcatagacaacatcatgtattttcgcttcatgcacaaccaatgagacaaattgtaaattactagtagaactggccatgaactgtgttgagtgcttaaggagccatatggattcat

SEQ ID NO: 291755 - DNA, 385 bp, Glycine max
  unsure (1)..(385): unsure at all n locations
agcttttattctagagcatcccgaaggagaaagctcacaagtcacaagtgtcttgtaagaccaaacctggaatttgcttcgagggagggagaccaagaaaaaaaaatgtttacatgtatataacatataaaaaaaggtttaatatatgatatatatttaatatttttttataaaaatatatataacaatatcaagtaaaaaacattattatctaactaattatatcatttatataaatataagaaacaaatataatatttnttcttgtaattataaaaaaagacaaacttgtatttaaatatattaattatacatttatataagagacaaatagatacaattnttatatccttaatgtattggtgaagttactaatgagataatc

SEQ ID NO: 291756 - DNA, 377 bp, Glycine max
aaaccagcttactcatattcaaaatgattgatgtttatatattgtggcatatatcgcatgtgatatgtgcacactttccccccatatataacacatatcagatcgatgttaataagcatttgctaaaatataattctctaaattgtaggaggttgtgttaatttcatcctcaaaatagtgcatataaataaaagatatttattattattattattgaattaaaatcaaacttaaatgttaatacgatatcaaaatttattatattgatgattgttaggccatcaaagcactcaatatcgctgattcattatttaattatctacatatgcacgtctaataaaatattgttagaaaatacattctctagcatgagagag

SEQ ID NO: 291757 - DNA, 372 bp, Glycine max
  unsure (1)..(372): unsure at all n locations
agctatgaccattcgaatttctcaagagttgccgttgttcaatttcgagcgtgtagatgagttatgtccccgaatcggacatctgtgtgaaaagttatgaccattcgattttctcgagagcttccgttgttcaatttcgagcgtctcgatatattatgaccccgaatcggacatctgtgtgaaaacgtatgaccattcgattttctcgagagcttccgttgttcaatntcgagcgtctagatgagttatgtccccgaatcgaacattcgagtgaaaacttatgaccattcgaatttctcgagagcttccgttgttcaatttcgagcgtctcgatatattatgttcccgaatcgggcattcgagtgaaatgtt

SEQ ID NO: 291758 - DNA, 215 bp, Glycine max
ggtttcctgaacataggaaatcaaagcttcaacaatggggagatggaccatttcaagtgcttgaaagaatcaatgacaatgcttacaaagttgagctgcccggcgagtataatgttagttccaccttcaatgtctttgatttacctctctctgatggcagatgtagaatccgatgtgaagacaaatccttttcaagatggagagattgatgagga

SEQ ID NO: 291759 - DNA, 303 bp, Glycine max
agcttgttcaatggtaatagaggcaattagaaggtaagacatgcatgtgtactttgtgagaagttaaccaactaattcatttgttgtgactttcttaaaaaaaataataattgtgaagaacggcttctctgccaacacaaccaactgtagtcaattaaggtgtgttgtttggagaataagaggataaaagaagttgaaattcacaaagtgagattcacatttctacacttttagtttaaaattttatcctaccttaaattttttcatttcttttcacttacaaacctttaaatttgagaaaat

SEQ ID NO: 291760 - DNA, 387 bp, Glycine max
  unsure (1)..(387): unsure at all n locations
ttctataatcaacgcacattctccatcctgtgtctgttctggtatgaatnagaccatttcgaacatttcttattactgccattcctcctttctttggaacaacttgaacaagactgacccatgagttgtctgagattggatagataaagcctgcctctaataacttgagcacttcttttcttacttcctccttcattataggattcaatcttctctaggttgtcgcacaggcttataatcgggcttcaaattgattttgtgcatacaatatgatggactgattcctttaagattagaaatgtgccaaccaataaccgacttacgtcatttagaatctgcactaattgatcttcttctctcttcttcaaagagttgctatttataaca

SEQ ID NO: 291761 - DNA, 385 bp, Glycine max
agcttcatgcatggatgctgagacagactcttcatcagaactttgtattggaccatctagtataatctttatcaacaactcaaacatttggacaaactcttgtgcaaatttggctagagtattctcacattctcccattccactgaaaacggcatctggatgacccaatatcatataaccacaaagaacaactctcacaggataccttgataacctaactaagctattgtttgactccctgactgaatctactttctttgcctgtcggcttctcataaaactcttggaagtagcctttttcttggggtaagcaacccatttaagaagattatcaatgttatccaagctagacaaattgttggcaggagccactgttgtagacact

SEQ ID NO: 291762 - DNA, 344 bp, Glycine max
  unsure (1)..(344): unsure at all n locations
ggacctataaatctcagcttgagttgtgaaaacttgattggatcttccatttntttgtgtagagttgcngggaaacagaattcaccaaaaaaaaagaaagaaaaaagcatagagagaaagatcaacatggtgttgaggaaagtgggtaaatatgagattggaaggaccgttggagagggaacgtttgcgaaggtaaagttcgctcataacacatacagtggcgagagtgttgtcatgatagtgctataccgtagcgccatcatcatacacaatatggtcgaccaggtatttgtttttttaagtactacatcacgtgaattcctgaaattacaagattcagttca

SEQ ID NO: 291763 - DNA, 327 bp, Glycine max
  unsure (1)..(327): unsure at all n locations
tctatttgtactcatgagtggtaagnngaggtctaagtggattggtccttttgttgttactaatgtttttccttatgggacaattgagatcaaaagtgactccacaaataagatcttcaaggtcaatggacatcgacttaagtcattcctcacaaactcttctttagtggacgtagtggtggaagagacttccttactccaccttactcttcctccaccatgacttagggagtttttctttttctatctccttctttacttttattacatttttccgattctatttgatggtttaattacttttaatcttttaattgtgctacattg

SEQ ID NO: 291764 - DNA, 435 bp, Glycine max
  unsure (1)..(435): unsure at all n locations
ntggggctgaaaattatataacagctccaatgttcttttttangccctcttctatcctctctctcctctttcgttttgagttttacgcttctcttcttctttcaaacacttttttgttttgcaattccacgttttacttttcattttagcaataagatatcattctctattgattaatggaaggctaagtctccagcgttgctttctcttgaggatctagcacagttctctttgaccgggaggccaacagtgacggccaattctaacaccgtcaatcgtggacccactaattccacaaggagcggtaatgttagcaacaacaacattagtggtggaagaccaaaagtaccctctcgggtgtttgctatgagtggttcataagcggctgccttcgacgatatgatacagggtaagtggttgattgctgataaacta

SEQ ID NO: 291765 - DNA, 375 bp, Glycine max
agcttggttatctccttcttcactacatcaagaatcactgggttgagtcttctctgtggctgtcttactggtttagctccatcctctaaatttattcgatgcatacatgtggatgggctaataccaggaatgtccgccagggtccagcctatagccttcttatgcttcttgagaactgacaacaacttctcgtcttgctcatcagcaagggaggcagatataatcactggaaaactcttgcaatcatccaagtaagcgtattttaaatttgatggcagaggcttcaattctggtgtggtcggctggacagtggtagaaggagatggtttctcagcctttacctcataaagaaagtcagaggtatgtgtacttcct

SEQ ID NO: 291766 - DNA, 426 bp, Glycine max
  unsure (1)..(426): unsure at all n locations
ntgatggtgtcgagaagaaatcacatgcttgtcatcttcaaaaagggggagaatgtgaatgtatgtatacatgattntgatgatgtccaaagaagaatcaaacaaagttgcttcaaaagataagcatggcttcaagattaatacaagattgcttcaacaaaacaagccttgcttcaagattaactcaagatcaagccttgccttatagcaaagtgctttcaagacattcaaggctttggtaatcgattaccggaagatagggttgagaaatagttggtgaaaagagttttgaatttgaattttaacatgtaatcgattaccatatgtctgtaatcgattaccagcaacggaactcttgaaattcaaattcaaaagtcatgacccttcaattataactgtgtatcgatacacaacattgtatcgata

SEQ ID NO: 291767 - DNA, 391 bp, Glycine max
  unsure (1)..(391): unsure at all n locations
agctttcttctacatgatttaatttanagagaatgagagacaaggacgtcaaatttatccctattattagaattatgagtgttgtttatagtaatggcataaaattgaaaatcctaatgagtcattggagacatcaaacaacaaccttcaaattgccccatgcatagtgtcgcttgacaacgttagaattcacaagtgattgtcttcctcgaatttcaactagcccgcatcacttacactntgcatcttacgtttcagggtcatacaatgctcaacggaatgccctggaactccttcatgataagcacatgttggatccgagttgtattctcgaaaaaatggaggtcgaggaatctttgntgggattacgactaccattgcattattgagt

SEQ ID NO: 291768 - DNA, 354 bp, Glycine max
atgaagaagtgtagaaaggtgaaacttcctgcttttattcgttgaccacagagtggtacctggagatatgttgcggggatcagaagaccttggggacgtcaggtggggtgctattgcccaaaaacaagcttgaccaatcccgacccaacccgggcatagtcagtcagtgagaaccagtgatgtacctaaacaggccagctcctgacagtcaacagataaaaagaacaaagaccacatagcaaggaggcttgtgtggtggctggccaactgtgaatcttgagtgatatctgtgatatgtgttagtgcttaacactactgagtttaaaaaggttggctaagattttgtttaaacat

SEQ ID NO: 291769 - DNA, 302 bp, Glycine max
  unsure (1)..(302): unsure at all n locations
ccgccccgggatccttaaggcacctgccgcatgcagcttcttggaaacattatacncgagaggaacggctcgcggccaatattttaacagtaggttcacatcggttttcataaaaaaacaaaaataacgacgttaaccaatgatggccacattaacattagatttctggagaaactgatgttacttatcatacgtaacatcggtttccacaaactgtgttaaagatacacatattacaactatgccccggttatgttacctctgttttcgaaatcgtgttaccgacaacttaatctacattt

SEQ ID NO: 291770 - DNA, 332 bp, Glycine max
agcttgtgatattcgagtctgggatcggctcctaggaatggaaggtacccaataactgtcaagcctattggaactggaggccaacgagatgaaacagcggcttcattggttgaattcttgaaccatcttatcaagcatagcacactgatcagtgtgactagaatggttttaattggatgcaagttggtggaatcccatcaccacaaatatggtcgtgtgacacataatgagctcaacagcattcttgattatgcatggtgaactaccatgtgtttcctagttatttttgcttaattaacctgcgattgagtgaattgtcgatctcatcatct

SEQ ID NO: 291771 - DNA, 259 bp, Glycine max
actgtcctcgaaagattaaggctactattacaaccctggagaataccaaagaactgtccaaacttaccttggcagaaccagtaatgctatgcaagcccaagagcaaagaagaagaacgagggctgacggcgccatggaacgagcagcgaagccaaatcgcgaataaccaaggcgagaaaacaaggggaagaaaacagaagggaagttcacacacaaaagcacggcaacccagcaccataaggcaacacaccaaagattc

SEQ ID NO: 291772 - DNA, 393 bp, Glycine max
agcttcgatcgaatcgtttgcggctttgtggagagatctgctgtttctcgatctgttctcgcaatgcgaggcgatccgagtctattctattgcttgagttcgtcgtccgagcaagatccgatgctcgtttttagcgtttttcgctaaacgacgactttttctggttgtatttgcttaccgttgttgcgttctcgttggtttgaattgaacgctaatgtttaagttaactaaattctggagcgagtctcagtgtttttgtgcttcgacttgtgaactttacttcatttagttattgtaaatttgtcctcaactcaaatctaagtgaatgagctacttgcttgagctgccacacgaagcttatgaattttctactagtgtactgttgactgttat

SEQ ID NO: 291773 - DNA, 300 bp, Glycine max
  unsure (1)..(300): unsure at all n locations
cttacaaattataatcaagtcaagatgagtatcnttcttcatttttatgcactggggtagtattataggagcaaaacattaaaaattaaagacataaaacactaaaattaacatcaattcatgatttcttttatctgttagatatactgtctacattgatttaaattttttgtctataggaataaggataacatctatttttttaggaaaatgtttagtgaacacacattgtgctatgatacacctggggagaaaaaagaaaaagagaagaaaaaatatagatttaataaagcttatgat

SEQ ID NO: 291774 - DNA, 393 bp, Glycine max
agcttttactaaagtattctctagtttagagtcctgcatcagtacaacccttattccaacaccaaaagcatcacattcaatatttcaaaagctttatcaaaatttgacaaacaaagcaaatgtgcattggtcaacttgtctttcaatatattaaaagttgtctcatgcacatcagtccacttgaacaccacattcttttttacaagttcgtttaaaggtgcagcaagtgaactaaagcttttcataaatcttctataaaaacttgctaaaccatgaaaagatcttacctcattagcattcttaggtacaggccattccttaatttcctttaccttttcttcatcaacacttattccttttgagctaatgaaataacctaagaacacaactgat

SEQ ID NO: 291775 - DNA, 343 bp, Glycine max
aactaagctctctcagttgtcttcacaaataatcatcacacagcttagatttttcttgactacccagcatatgtgccgagaccccatacccatcaaatttcagagagaaagaagtccacccaaacctgaattttcagagtccctctcgtagccacgcacttcacgactctcaaaatgccctcctttcgcgatgtggagcacaaatgagcaccacaagttggagctttgttggggtttcaatgggaaatggaggagaacgatacacaccgtgaggaagaggagaggctttgaattttctggtttggctgagtgaggagagagaaaagcttttttggtttaaata

SEQ ID NO: 291776 - DNA, 351 bp, Glycine max
tttataataaacaagccgagccgaaccgagtcttacgtaagtcgaattgaagaccctcgacaagctgttcggctcatttccacccctacctgcaataacatagaagtgggtaaccccacaattttacttattccaattatcactgctcttttccccttgattttcacaccgggcctaagtaacaactcaatgcagcccttgggagcacaaggaacaaagaagggctttcttcctcttatgcaatttcaattctttagcaataacttaattttgtagattttttaaaaataaattcaatatttagtataattattactttttcacatgtcttttaagtactaattcatttca

SEQ ID NO: 291777 - DNA, 349 bp, Glycine max
actccgcttataatcaaaaagcgttccccaatttctttttgcgcagcacacttcttccttttttgttttgtatactctatatctcttcctatcttcttgaaaaaatttcgtggctcttccactggtgatgatcatggaagcctaaaactaatcagtcaaggatccactcctagcaacgcttaattcgagttttggtttaatatttcaatattgtgggaatgtgcatatttttcttcaatcctattttcaaaataggttatggattcatttcctaattataaatttaatcatacattgtttggatgatattccaacctaatttgcgatctgcatgaatctagggatttat

SEQ ID NO: 291778 - DNA, 392 bp, Glycine max
ttgcatgcaagcttgttgttaggatagaacctaatgacgatcacatataccagatgacattgatgatcccacaacttttcctcaagcctatgcaggtgtcgtgggattcaactgtgtttgggtagtacaatgataatgtccccttgtacataaagcatgaagatcatggggaaatagcacacgatggtcaatgtatgaacatcattattataaaaattatggattatgaaagtaactctaaatgacagtccattacctaattgattgtcttgaattgatccataatttactttattgtaacaacaatagtcaatcaatgagttaagtctatgatcagggaatgcctctgtgtatggattcaatcgcaggttgaatctgaggattatattaag

SEQ ID NO: 291779 - DNA, 284 bp, Glycine max
ataacgggaagtcatcactcccacaaacctgaaaggccaactcgcaacagttttcagtgcttgccaacttcacctggcataacaagaagtcatcactcccacaagcctgaacgaccaacttgcaaaagtccttaatgctcgccagctacacctagcatagaaaaagagcaacactcgctgttgaagtgagagaggacttagattttagaacgttggccctcactcactcatagccagagacggcaaagggggacgatggtgacccaaagtatggctaagcacat

SEQ ID NO: 291780 - DNA, 346 bp, Glycine max
  unsure (1)..(346): unsure at all n locations
tatgcatgcagcttttgggtatgactccggagaactggatgttaaacaaggagacattcttaagatgtttaagctctgtcatctcaagtggtagctcgcccgagaggttattaatgtacatatggatctgctcaaggctttgaattntccatatgccaagtggaatttctcctgtcaaatggttttcacacaatctaagatcacgcaatttactcaagtttcctaattcgcttggaattcctccttcaagttgattgtaattcaaactccactctttcagtgattcgcaattaccaatctgtggatgtattttccctgacaataggttctccggaatgaataacat

SEQ ID NO: 291781 - DNA, 72 bp, Glycine max
aaaaggaaccaaacagagaggaaggaaaaaagcaacaggagtaccaacccccgaaaaaaaagcgggacaaaa

SEQ ID NO: 291782 - DNA, 249 bp, Glycine max
cctaactgacataagctaaaaaaccctagtcggcatcaacttaaaaatagcactgaccgatgttgatcgaaaataccctagctaacatcgacgaaaaatagcctggctgatgtaggcaaaaaaaccttagtcgacgtctaccgaaaatctgtagtcgacattggctgaaatatcctaaccaaggttgaccgataatccctagctaatattgactaaatagtcgctctaactaatgcgtgtgaaaagcct

SEQ ID NO: 291783 - DNA, 387 bp, Glycine max
agcttgcttctacaatttccccgtttttgatgatggcaacttcaaaaatcaagagacacacatgtagaagcaagcttcatgatgaatcaagattgattcaaagagttttgatgataacaaaggtgatgacaaaaagctcaaaagtcaagaacacttcatgataacaaagatgatgatctcaagaatcaaagaatgagttcaagattgaatcaagaacatttcaaggttcaaaaggaaatttgatttcaagaatcaagaatcaagaatcaagtttcaagattcaagactcaagattcaagactcaagattcaagactcacgattcaagaatcacgagaagacctagtcaagataagtattatagagtgttttcaaaaactgagtagca

SEQ ID NO: 291784 - DNA, 389 bp, Glycine max
  unsure (1)..(389): unsure at all n locations
nttgtttgttgaaatacaagaaggcatgatgagtgttatcatgttggtgaggtttctccttaaggccagcacttggtttgggctgcaccatgttttccttgtgcctagatagtgtgagaatgtcattcaccatctacatgtgtatgttgaatagatagctaaatgctttgcaaatgtgcatatatgttgaaaatggcacgaaaatgcgtctcgaagtaggaacatatgatataaaattgcctttcaagaatgagaatgagtagtacaaagattgctttttcaatgaaagtgcgacataagattgttttcaaatgagtgtgaacatgtgcgaatatataacatgaagttgcctctcatatgtatgaacatatatgtgaatgaaacgtgaa

SEQ ID NO: 291785 - DNA, 365 bp, Glycine max
tcgtattacaattcactggccggcggtttacaacgatgagactgggaaaacccttgcgttacacaacttatcgcctagcaacgcattccccttttagcagctggcgtaatatgcgaacaagcccgcacctatcgcactttccaacagttgcgcacactgaatggcgaatggcgcctgatgcggtattttctccatacgcatctgtgcggaattcacaccccatatggtgcactctcagtacaatgagctctgatgccgcataatgagctagacccgaccccgcctaacccgttgacgcagaccctgcggttattccaaagtatacaaaggagggcgcttgggaaagttcccttttgcctggaacg

SEQ ID NO: 291786 - DNA, 378 bp, Glycine max
  unsure (1)..(378): unsure at all n locations
agcttggttntgggcaatagcaccccacctgacgtccccaaggtctcctgacccccgcgacatatcctcaggtaccactctgtggttaactaataaaagttggaagactgactcttccacgctttctcacacatggcttattgggttatggggcacccgtcatatgtggtactatgtggcgatcgggcaatggcgcaaaacaaatatcccatttccacaagcccaggcataagcacaccatccctagttgcccacctttaaattgagctcacgtacacgtacgtagcccttctcgttcctctcagcaccgggtccccatcaacccctccaagccttcacaatgtcaaatccattcaattccatttgacatgaaactac

SEQ ID NO: 291787 - DNA, 347 bp, Glycine max
tagcccaataatattgctaacaataatggttatatctatatttctaactccctcccctaaactatagttcacttagcatcacacttgttacaaagtattaaaatgtcgcaacatctttaatgtatctcagaatattgttaggatcatattgcaaggtatgaaagttgagtctcacattgaaagtttggcatttaatgtagggttttttacgcctccaccttcatttttccaactacaattgatggcttttatggtgtagttctggtagggtcttaataattggtattagagcttcttcagtgttgttaaatggtggcgctacggctaccatggctgaatggcatcat

SEQ ID NO: 291788 - DNA, 397 bp, Glycine max
agcttgtcagagacaattgcaaatttttctcttatctttccatcaagaccaacatgactactgtgctttagattagttgattatacctttatgcttcatcatggtgagcatcactttgaagttggaactacattataataatatacaatttataatataattagattccattatatataattaaaaccaaaaatcacctctacctgacacactcttataatgttttttccaagaaaataatcaaaacaaaaaagaattttcagacatagaagactacagaaatatataaaaatatggtctagctgagtcttcccagtccttggaggcccctgaaagagagttggttaggctcgattacaatttttagacatgatataaatggacaatacaacctctt

SEQ ID NO: 291789 - DNA, 434 bp, Glycine max
  unsure (1)..(434): unsure at all n locations
atctttttgggattgtttttttcccctataccctttcccatttggagtattaaattaaggttggcttggaggagcttangctcaaaaggatgatggtctcggaaggatgtgcaagtttatatagcttaccatgttggtctataatgtatcaatgggtttatgggtttaaggagacattggaggtattgtcaatgaattttttgtttttaatccttttttcttggattatgatggtttgtgtataaagctttatctttctgggattctttttccctatccctttccccctttggagtatgagagcaaggttggcttggaggagcctangctcaaaaggatgatggtctcggatgagagcctcgagctactctcttggtctttcacacacttcaagtcttttgttgggccaatagtgcacatgtcattatagatct

SEQ ID NO: 291790 - DNA, 350 bp, Glycine max
agctttgagacaattcattcgacaataactttgtactcggatgtctgattgagtcccgtaacatatcgagacgctcgaaattgaatgttgaagctctcagccaattcaaacgacaataactttttactcggatgtctgattgagcctcgtaatagaacgagacgctcgaaattgaatgttgaagctctgagccaattcaaacgacaacaactttttactgggatgtctgattgcgtcccgtaacatatcgagacgctcgaaattgaatgtagaagctctgagacaattcaaacgacaataaatttttactcggatgtctgattgagtctcgtaatataacgagacgctcg

SEQ ID NO: 291791 - DNA, 324 bp, Glycine max
  unsure (1)..(324): unsure at all n locations
ataatttnagcgtctcgtatattacggtttctatcagacatccaagtaaaaagtgagtatcgtttgaaatggctcagagcttccacattcaatttcgaacgactcgatatatgaagggactcaatcagacatccgaataaaaaggtattgtcctttgaaatggctcagagattccacattcaatttcgagcggctcaatatattacgggactcaatcagacatccgagaaaaaaattatttccgtttgcatttgctcaaaggttcaacaatcaatttcgagcgtcttgatatattaccggactctatcagacttccgagtaaaa

SEQ ID NO: 291792 - DNA, 394 bp, Glycine max
agctatgcttacaaactcttcatccccctcaacaaaagactctttcaaatcgcttctaccattataacaacaattccaaagaatattgttcatattctatttatttaataaaaattagggacattgatgtttagtcatgcatactcttagagtgatctctattatatatttgtagcaagaattatgatcatactttaggtgaaaaaaatggcatacatataatgtttgactttctaaagtcacaaagtatggaatataaataacataaccacaatcagatatatatacttaacacgtttagtataaaaaatttcaaacaagtacaataaaaacctcaactaacccaaacaatagaacataagtgtcagtaatgaagcgatcacccaagataaac

SEQ ID NO: 291793 - DNA, 445 bp, Glycine max
  unsure (1)..(445): unsure at all n locations
tgcaaactaagtgctcacctttagtagaggagaatttcttatgctggttcatggtaaccttttcctctagatgaccattaaggaatgtcgttttcacatccatttgatgtaactcaaaggtcaaatgagctactaatgccataattattcagaaagaatctttcttaaatacaggaaaaaaaggctctgtgtatcaattccttctctttgagtgaaccctttggccacaagtcttgccttatgtctctcaatgttgccttgtgagtctttcttgggtttaaaaacccatctacatccaatggcttttacaccactaggcaactgtacgagatcccagacttggttaaacgccataaaatcatctcatncttcatgggatatgtcaacaagttgattctttagaactcatgggcctgtgaaacgttcaggatcatttgcagctcta

SEQ ID NO: 291794 - DNA, 348 bp, Glycine max
agcttcttatccaaggcttatcttggtggtgaagctccttcttccaaggcttattccctagtggatggcgcctcctctctcctcttctcctttgtcttccgctgcatctccatggtggaaaatcaccattaaaggacctcattgaagctcaaagatccagcctccatagaagccccacaagcaagcttccatcactttgtttacagcatggccatttaagctacatgcaattatattgttaatgactcttgactccatcatcaactagattgcatgcttacccattgtgcattttcttgggtactatatacgagagagatattggtggttagtttaaataactggatg

SEQ ID NO: 291795 - DNA, 404 bp, Glycine max
tcttcgccagtgaaaggatcgatgtgtgttttataagaggcaaatttgatcatcctactatgacgactgagaaaactggggcaaatgaagagggtgagaaagagggagaaacccatgctgtgactgccattcctatacggccaagtttcccaccaaacccaacaatggcattactcagtcaataacaaacctcctccttacgcaccacccagttatccacaaaggccatccctaaatcaaccataaagcctgtctaccgcactttcaatgacgaagaccacctttagcacaaactatagaaacaccaacaaaaatgaattttgcagaaaaaagcctggtaggttcaccccaaattccgatgtcatatgctaaacttgatcccatttccactcaataattcaatg

SEQ ID NO: 291796 - DNA, 391 bp, Glycine max
  unsure (1)..(391): unsure at all n locations
agctttacatgatngattttggtgttagatttggtcaatttgaaggcaagatatgggaggagtgataaaattttcactgaattgcttgtgttgttgaagaagatgatccctaaagataacaagttgttgaatattcactatgaggtgaagaaaatactatgtcctattagtatggagtaccagaaaatacatgcatgccttaatgattggataccaaaaaatgagtttgcagaaatgcataagtgccctacatgtggggtatcgtgatacaaagtgaatgatgatgactacagtaatgatgtaagcacacacaataaccatccaacanaggtgtgttgctatcttccaataattccaatgcttaagtgattctttgctaatggagacaaca

SEQ ID NO: 291797 - DNA, 167 bp, Glycine max
gatattatgtcctgtgggtatggagtaccacaaaatacatgcttgccctaatgattgcatttcgtatgggaaatagttggctgaaatgcacaaatgccccatatgctgggtatcacgggacacaatgaaagatgatgaatgtaatgatgatgcaaccacatgctgta

SEQ ID NO: 291798 - DNA, 302 bp, Glycine max
agcttccagagtttgcccgtatttcgatatcatacggggactttatgccatctttgatcgccaaccaaatggcagtcgtgacctctggaaagatttatcaatctcctttcccttggtggttcaaccccaacgcaacttgcgcgtatcaagaggtaccccgaggcattcaatcaaacagtgtgtggccctcaaacatagagttcaaagcttgaccgacgtggggtggcttacattccaagaagacgacccaaatgtaaatacaaatccgcttgccaatcatggagggtcgggagtaaatgcaa

SEQ ID NO: 291799 - DNA, 272 bp, Glycine max
gctgtaaatggtagactgaacatgtcatttttttttgtcaagataaaggggccccatttttcctgaccaagcaaaatagattggaatttatgcaactggctgctgccctagtcgacccaggtcaattttaggcatggagctaggtcagatcatttccttattaaataaccatgtttcaaattggtctttacaattggctcatcgatcattggcgttagaaattccagattcccttaggtcacacactttcaaaaaggaatttttcaaaagtt

SEQ ID NO: 291800 - DNA, 181 bp, Glycine max
  unsure (1)..(181): unsure at all n locations
tctgtgcggtatttcacaccgcatatggtgcactctcagtacaatctgctctgatgccgcatagttaagccagccccgacacccgccaacacccgctgacgcgaaccccttgcngccgcttctnatttactttccatnaggctgctctcgacgcgttagcgatgagctcgcacttcatgtt

SEQ ID NO: 291801 - DNA, 379 bp, Glycine max
agtttcttatccaaggctcatcttggtggtgaagctccttcttccatggcttattccttaatggatggcgcctcctctcacctattttcctttttcttccgctacatctccatggtggaaaatcaccattaaaggaccccattgaagctcaaagatccagcctccatagaagccccacaagcaagcttccatcaagtggtaatcagagcacaagagcttcaagtacgtgctccttaaacctccattaaatttttctctttaccttctcttccataggtgtttcttcatttctctacatgtatctcctcacatgtcttgttctaaatgttgttaacatgattctttagagtttccaccgattaaacatgctatagaagtt

SEQ ID NO: 291802 - DNA, 247 bp, Glycine max
gggatggcggatttatgtgtgatttgtggatgtggatagtcaacttgcacattcgccgaccgccacctagtaccacatgtgacgggtaccccataatcctacaagcttgaactgaggaagtgtggaatggtgatacttcctacttttattcgtttgaccacagagtgggacctggagatatgtcgcggtggtcaagagaccttggtgacgtctggtggggtgctactgcccagaaccaagcttgacc

SEQ ID NO: 291803 - DNA, 340 bp, Glycine max
agtttgtctcagcgtttatgcaagacagagaccaacatgttatccattgtcagcaagtaccaagaagaattaaatctagccacgacccacgagcacaaagtggcggacgagtatacccgagtatacgcggaaaaggaggctagaggaagggtgatcgactcgttacatcaagaggcaacaatgtggatggaccgatttgctcttactttgaatgggagtcaagaacttccccgattgctggccaaggccaaagcaatggcggacacctactctgccctcgaggagatccacaaacttctcagctattgtcagcatatggtagacttaatggcccatataa

SEQ ID NO: 291804 - DNA, 380 bp, Glycine max
  unsure (1)..(380): unsure at all n locations
ggggagcacgaaattgaaggataaaataaaggagagaacgtgaactttgagttgtgtctcacaagactctcattcatcaaagttacaacaagtgttacacaatgttctgtctatggactaagtagcttccttgagaaactttcttgagaaaattcttaaagaagctagagcttatctacacacacctctctaatagctaagctcacctctttgagatgagaagctagagcttagctacataccccttataatagctaanctcacccccatgacaaatacatgaaatacaaaaagtccctatacaagactactcaaatgcctgatatacatgctaaaacctatactactagaatggccanatacaggccctatgaagaaaa

SEQ ID NO: 291805 - DNA, 380 bp, Glycine max
agcttgtactttcaatgttctttcatatctagagttagacctttacatgaactgtgacagttttgtactttcgataatgttcattcatttatagagttgtctaccattttcaatgtgctccaaagaaagaaattattatatacctaagctaaggaccttctattggtgtcatgaacattttttttttaaatgaattaggagttttttttttggttacaatcaatcaccatttggataatgtctcctacaaacaatcaaacatgcgcagcttctctaaagtctcttctaataaattgctgcctgtaaataaatagtacttatgacacaagaaaacaacaaaaaatttgcatttcaaacctgcactagctaaaaagcaaaca

SEQ ID NO: 291806 - DNA, 444 bp, Glycine max
  unsure (1)..(444): unsure at all n locations
tcttttggaccttgaacaagcaatcaactcctctttttaaccatgctatgtgctcgcgactggtccctttcttcccttcgcaacttgagttcattattgctaccccatagagctccgcgaaatttgttccggccatactcttccttgcgagccctcttggtctcttgttcaagggctcttgcggtaattgcattctcttcccgtaacccggcacactccttccgaacgtgtgtagcagccaacttgaacttctccttggcgagttttgctnttcctaactcgcttttgagaacttggacttctttgtcctcttncggtgcttcaaaattctctttgctgacgactnttaacttggcgagccaatctanacctcgtatgcgaactttcagccattcgtggtaccaccaatgatgccatacgaatgcctctaactcttgatctttc

SEQ ID NO: 291807 - DNA, 272 bp, Glycine max
  unsure (1)..(272): unsure at all n locations
agctttataacgtggccatggcttgctgcggaaaacaccaactcatggatgcactgagcctattcagctgaatatagtcaatgacggtttgaggctgcgatacaagcagttattaaatgcttctcactgaggataaatccagttgaagactctacaggacaccatggatctcattgaaaatatagcanctagagatcacgctagtgtgcgtgataagacacacatcgctacgccacgaagtctgttgaagctttcttcacagatgcattgct

SEQ ID NO: 291808 - DNA, 488 bp, Glycine max
cggcgcttgatccattgatacctcgcattcaggacactatgaatactaagcttgtctgaagagactcactggaggtgattttcttctctcctggactagtcactagtggatggtgactactctcacaccttcacgtttagccttcggtataggtacatggctgagatatcccattggaagactttattgaagcttagagatccaccctatatgatgctatcctagcacgcgagggcattggaccgaacactgatagaacattgggctagagatccaagggacggccctagggttctcatgagccttatggtagatctcgagcccatgggctaagtctgagcctgctgatatatgtaaatattagacaacgttatcgctggagccgagccttgtacttagccattctaatactatagggattgagccgcgtatttcgaggcatcttgatactgctttgagaaggaatcttctctgtatgcaagtctcgg

SEQ ID NO: 291809 - DNA, 358 bp, Glycine max
  unsure (1)..(358): unsure at all n locations
agcttggatctttatcttttgttctcagcaaaacaacaaagacatgtttcccctttcttttgagccatatataccaagtattgtaaggtctagagaatcaattggcaccaacaaaaaagaacaattgatacacaagttcttctcatcgactaccatgatcgcattntttgtagatctatggatagatctccacacatgaagtcgagcatgtaatctctacgactntgcgaccccaccatanatgttgaagatgtcagggtccgtgatagtggcttttttgtggcaactgggtgcatggcgtgggtggagatgcggaggccttcgtaagtggagatgacaatgttgtggttgcttgtgc

SEQ ID NO: 291810 - DNA, 415 bp, Glycine max
  unsure (1)..(415): unsure at all n locations
tgcctgtccgatgcagcagtaatgatggcccgagttatgttggggaacggttacgaacccggaatgggtttaggcaaagacaacggcggcataactagcctgataaatgccaaaggaaatcgtgggaaatatggtttaggctataaacccactcaagcggatataaagagaagcatcgcgggaagaaagagtggtggtcaaagctcgcggttgagacaagaaagtgaaggaagcccgccctgccacataagtagaagctttataagcgcgggtctgggagatgaaggtcaagtggtcgcgatatacgaagatgatgttccgagtacattggatntggtacgaccatgcnctcctgatttccagctaggaaattggcgggtggaggaacgccccgcatttacgncacgagcataat

SEQ ID NO: 291811 - DNA, 374 bp, Glycine max
agcttgaaagagcccggatagtcaaagagaagttcaagtccatagccatcaaagtctgaagagagtatgatgaactaagggacgtcaatatggccaccgatgaagccttggaatgagaaaccaagaaggcccgaaaggaagaacatgaccaaaacaagttttgaggggctttatagggcagcaatagtgagctcaaactccgaagaggtgaaaggaatcatcacgggtcaaaggcatgatctggaaggacgagctaaaggcttgccttatgtcgaaaagaaatttgtccaaacagttaaagtgagactgaagggaatatgtgggccatcaccgatgagtgcaaagagaagctaaatctagcggcgactcacgag

SEQ ID NO: 291812 - DNA, 387 bp, Glycine max
agccgagcttagttgttagatgggtgtgtgtagctaagttctagcttctcaaggaagcttctcaaagaagcttctcaaggaagtttctcaagaaagcttctcatggaagcttctcaaggaagtttctcaaggaagctacctaggctataaatagaagcatgtgtaacactttttgtaactttgatgaatgaaagtcttatgagacacacttcaaagttccacttctctccctcttttattccttcaatttcgtgctccccccttctctctttcttatcctccattaaagcatcctcttcaagattcttatccaaggcacattcttggtggtgaagctccttcttccatggcttattccctagtggatgatgtctcccctctcttctt

SEQ ID NO: 291813 - DNA, 373 bp, Glycine max
agcttttactagttcaaaataaacaggtaatttcagagacatgaatggaataagattggagttttcaaatgcttgaaagcattcaaaattctcatttgagaagaactccatatctatgaattttaggtctataattgaatgagaggaaaaaaagtttgtgtaccgtatacgctgttcctcttatgagaacaatggtccagagggaatgaagggaggaattggggtttcctgtgacccggaatgccgctgactttgacttgaagtgcctttcctcttcttcgatggttcctccatttgaggagttttttaaagatttcaatcggttcaaatgaaaatgagtgaaaaagataaagttgggctttgtggggagtga

SEQ ID NO: 291814 - DNA, 339 bp, Glycine max
tgaatataatgaatcttgctaacttaacaaagctaatattctctcatttctcgcaagtttccttcatccattaaaggtgatagcggtacacatggccgttactgtgaaaagagagatagtgggaactctaaacactttttgtaacatatcttcatagaactacaacttgccagtgtcgtcttgcgctcaaagttgacttttagtgtaccaatcaaatataacattaacagcataagacaaaaggaattaagaatattaagacaagacaatttaaatcttcccttttgtgcgttgtggcacgagttgcttattgaacctatggacgctactttctgatga

SEQ ID NO: 291815 - DNA, 391 bp, Glycine max
  unsure (1)..(391): unsure at all n locations
agcttctacggcaagaatgacaaacaaaaaatttaatttgaatgaagcttttgacatatctcctagattgcaatcttaagatataaggatgagatttaagactaaatgtcagtaagaaaatttaaagattttttggaataatgttgatatcaagataatgatgaaatttgaactcaatgtgtgtaaagataaaattgtatttcttggtgtattattaatcttttgaatatttatagaagagggtggaccttgaaataaatggaaagagtgattttggtcatatactattagttgactagtcaaatattgactctaactaatatgacttattggcgatgacctttgaaatggtgcttatatgacanaggaatnaatggcgtgtgtaaaaaaa

SEQ ID NO: 291816 - DNA, 436 bp, Glycine max
  unsure (1)..(436): unsure at all n locations
tttctaagttctttaacaagaatttaacaatatacttggccttcatttaactgtctttgggcttggcggccacgatcaacaaagtactttcgacacctactatatgttgatttgaccaacactggtatcggtatgttgcgacaatccttcaaaaccttatttatacattttgagaggttggttgtcatgtggccatatcgacgtccttctctatcataagccatcgtccatttttcctttgaaatacgatcaatccatgttgctatggctggactcaagtgacggggaattttctaaatttgattaaaaaaaatgtgcttgcaaggagtgtagcctggcattaaatagttagcaacaacaattttaagtatatatgaaacttanattaacgtgaccatcataaatgaaatcttacccaattcttcaacatttcttt

SEQ ID NO: 291817 - DNA, 388 bp, Glycine max
agctttgatgcaacattttgaaaggttaatgaaacaatgagatgatgcgctccatgagaggttggatcaaatggagaatagagatcataatgaagaagaaaggaggagaagagggaatgatggtgttcctagacaaaatcaaattgatggtattaaactcaacattcctccctttaaaggaaagaatgatccggaggcctacttggagtgggagatgaaaatagagcatgttttctcatgcaacaactatgaggaggaccaaaaggtgaagcttgccgccatggagttttccgactatgctcttgtgtggtggaacaagctacaaaaggagagagcatgaaatgaagagccaatggttgatacatgggcggagatgaaaaggatcatg

SEQ ID NO: 291818 - DNA, 379 bp, Glycine max
  unsure (1)..(379): unsure at all n locations
ngaagaaagtttgtcttttacatgcccaactctctttattggtttttgtattgattggtgtatggtgtgttgtatcttagtctctatcaattcatacgtgcatcatgcatcatcatttaggaataaggagaaagtttataaagttagaaattttttgcagtagtcaaaactctttggtttaatggaatacaaccttacaataatcgattacacaagttggttttaagcttgcaaagaagtgtctcgtatcggtttaatcaattataagcttatcgtaatcgattacacaattgtttttgagacaatgattgatttattcaggagtctctgctttaatcgattaccatgtgatattatcgaatacttctcttttaaaagt

SEQ ID NO: 291819 - DNA, 394 bp, Glycine max
agcttgtagggttaaagtttcatgattgccacgtgttgatgcaacaattgttagccgtggctatacgagacatcttgccaaagaaagtcaggttagccataactcgcttgtgctttttcttctatgccatatgtagcaaagtcgttgaccctgttaagtttgatgagctgaaaaatgaggccgcaattatactatgccagttggagatgtatttttcccctgatttctttgacatcatgattcacttgattgtgcatctggtcagagaaatcaaatgttgtagtcctatttatttgtggtggatgcacccggttgagcgatacatgaagatcttaaaacggtatacaaagaatatatatcgcccagaagcatctattgttgagaggtacaatgc

SEQ ID NO: 291820 - DNA, 327 bp, Glycine max
  unsure (1)..(327): unsure at all n locations
tataaaactcaactatgctgctatatttacatagacctcctcaacctttgctttataatcaaccacagcagaacaaatatgacctctccatccacagatacaaccctggatggaggaatcaccctaacctcagatggtccagccctcagcaacaacaacagcagtctgctccttccttccaaaatgttgctggcccaagcagaccatacattcctncaccaatccaacaacagctacaaccccacaaacagccaacagttgaggcccctccacaaccttacctcgaaaacttgtgagacaaatgactatgcagaacatgcaatttca

SEQ ID NO: 291821 - DNA, 372 bp, Glycine max
agcttatagttattggagggagaataaaacaatccaaaatcaattgtacctttcaagtaacgaagaattctttttgcgacttttagacgaggagaggtagaaacaattatgaggaagaggtagaaacaattatgaaaaagcatatgaaaggaagtatgataaatctaatgttgaatgttttaattgtcataaatatggccattactcttgggagtgtagaacaaatgttgaagagaaggtcaatcttgttgatgataaagaagaagttgaagagtcaacactactactatcacttaataatggtgagaaggaagacaaatgcttatggtatcttgacaatggagcaagcaatcacatgtgtggatgcaaaga

SEQ ID NO: 291822 - DNA, 306 bp, Glycine max
  unsure (1)..(306): unsure at all n locations
ttttttacgacacttattctacgacggttctttataaaaccggcttaaaaaatgagacgcggggctattcgtaattatagcaatgaaaaatgccttttacgatgcacattctagaacgggctctagaaatcagtttataatgttatatctaataagattcacgataaagtttatactaaaacccgacttaatattgctgaaacaaaataaaagctctgtagtactcatgctggcctaaagtcacactcgacatctgtcatactntctcatgtgacctttaactctcatactcactcattagctcac

SEQ ID NO: 291823 - DNA, 372 bp, Glycine max
ttgcatgcaagctttgtatcccagggaagggattcgagcttaatgttgatggacaacctttgaagattctaaggaagaacatgaccatgctcgctcagacatggagcgttctttctttgtctaaccccattcctacctcccacacatttgatgtgactttggactgagccaaattgatttatgggattattatgaagatggacatgaacctggggtacctcatctcctaccagatctctctgattgcacaacatgacacatccaaacttgtattccctgccttgatcaccactctatgcaaggctagaggagttcaattagactctagatccctggagagcttgagccctgccattaactttacatatatta

SEQ ID NO: 291824 - DNA, 385 bp, Glycine max
  unsure (1)..(385): unsure at all n locations
aaccttctatgaatcttcggtaatatcctgctaagtccaaaaaactcctaatctcaaaaatagacttaagactctcccacttcagaacaacttctatcttaaaagggtctacaactatacccccttgagatatcatatgccctatgaaactaactttctctaaccaaaattcacacttggacaacttaacataaagctgttggttcctaagggtatgcggcacaatccttaagtgctcttcgtgctcttcatgttcttcatgttcctctctaacctgacctanagtctatcttgctaaacacacaagctcctaccagctggtccagaaggtcatctattctangcanagggtacttattctttattcgtcaccttattcaactga

SEQ ID NO: 291825 - DNA, 384 bp, Glycine max
  unsure (1)..(384): unsure at all n locations
agcttcaacatttttttattgtttcttgctaatttattttgacaaacagaatgggaagcaacttcatgaagttatggtggaaagaactggaccttcaaaaactagtggaccaaaagaatcctgaggactgagttgtggttagagcctcaggtatcaaacctgtgcttgaattataatcattcttttgttccaagatataccaattaagtaaagggatatgggttgtggtttgatatatcaatcttactaggcgtaggtagtattgatatgacaattggtagagttatcatggatttttggcatcctgttataacttattatattgagaatcaatctctntagcctgcgaatttattgtcttctgagttccatgcttaggtcttt

SEQ ID NO: 291826 - DNA, 378 bp, Glycine max
attaccatatatgtgtaatcgattacacagtgcaaattttgaattcaaaatttaataactgttgtaaatcaattttggccactggtaatcgattacatcctctaataatcgattaccagagagtaaatttgtttgagaaagactttttaacttaaatttcttggccaaaccttttgctacttcaattggaattcccttcctatttaatataccctttctaagactctagagactgtcttgatcatccatcttgaatatccttaatttctttgtcttgaataaagctttgagatgcatgtgaacctttggcatcatcaaaacattcagcttgatcctttgtctacaatctccccctgttgatgatgacaattcctgaaa

SEQ ID NO: 291827 - DNA, 385 bp, Glycine max
  unsure (1)..(385): unsure at all n locations
agcttgcatgatttacatctccctctttctcaagcaaattcttcttgatatcatcaaaatcttcatgatttacattctccccttttttgatgatgacaaccacctataggttaggagcaacaacaaagaaaatatctatttgcatatagtttactcccccttggttttacattgattgcttatatgagacaattgaagatttcatatttttcatatataaaaagttatctcataaaacaatagatattttgcaatatactctcttcaagagaagaatattacaataaagatcatgtangaatccttatagattttgcaaagtgttggccaaggatttctttttgagagagcatttgacaattgaagttctttggaatctctctca

SEQ ID NO: 291828 - DNA, 372 bp, Glycine max
  unsure (1)..(372): unsure at all n locations
ggctaattaacctgaaattgagagaaaatgattattttcacacaaaatgaaaatactaagtatttattacctatacttaatagaaaatacttataacactacaaaataaccataaattgggagagtttgaatcaatctatacaagttttatacacaaaagttagtcattttcaccgactaacaactcccccatatttatagttttgcttgtcacttgtcctcaagtgacaatgacatgcagtgaactatgtacaaaggtgtatgctacaaagttattgattgcatgatgagaaagatgaagcatgtgtacctataacttgtcttcacaaaatatgcggatattcaaagagaagaatanaatgtgaactgaac

SEQ ID NO: 291829 - DNA, 378 bp, Glycine max
  unsure (1)..(378): unsure at all n locations
agcttggctattgcatatcttgccaccaagccacctaaagagtgacctacaaatgaaattttctgaacacttgggtgacgttttataactgatataacctgngaaaaaagaagaagaaaacaagtatcctttatttttctggatttgatgctacagagttgaagtcaattgaacatcttaagagccaaaagattagtatctaacaaaggctaaaattaaagtatgactaagttttagacttaggattagtctcataatcacttcaaagatcctaattacagtggttacaaaaaagaacaagttaaaagtcaaagccataacacacctcctctgctagtctatctcccattacatcaacaccatcaaatgtcaacatgg

SEQ ID NO: 291830 - DNA, 442 bp, Glycine max
  unsure (1)..(442): unsure at all n locations
tagtcattatcatattntcctanacagtttctgtttttatcattntttgagcatagacagacacaaagaaccagtttctttggattggctttagaaattttggaaggcataacagggataaaaatttgtagatatgagccttatatgcattgctttaggatatttggttggagcaaaatggttcaattntaggagtcctcattggctttagatctgcacataataggattgtctccataccatctctntgatattcagctcaaggttaggtttgtctgataaatgctaactaaagagctatactatatcacaactttntggttcanatgaataagttttgacaagaaagaaaactntnttgtatcatttcattatactaatactaaccaaaaggtattaacaaataacaactgagtattattaggattatacataccgtact

SEQ ID NO: 291831 - DNA, 378 bp, Glycine max
  unsure (1)..(378): unsure at all n locations
agcttgcagtacaacatttcaattgttgacaagtaacttaaaaaagagaaatatgacaaccctttttctacttaaaaagaaatgacatgcatcagcaatgaaacaacgtagcaaacttacatggtaccaggccaatgtacaacagatatgttgaagtttctctgttcctcctgataaaacactgtattggagaatcacgaggaccangctattcatgcacaaaagagaaacataacataagaaacagaataccctaaagggaaaaaaagataaaagattaggcaacacaagaggtgaagaatttatcacctgcttcaatgaaatgggaaatgtgagccttncacattgttcaggagtcttaacaatctctttcgtaac

SEQ ID NO: 291832 - DNA, 424 bp, Glycine max
ctataaaactcagcttgaggtacacctggatctctgtttgttctattgtgctgattatataccgcgtttggacaacgaacaggctttgaaaatagtgcgtagcacacaacactatgaacacagggaaaggcattgtcctgaggaccctcctacttgccttgtgccaatccctaaaggttacaaaacacccatcgagtggcctagcagcagagataaggacattctttattttaatttatcggcaaatgttaattgttatggggaaaaattaaacttaccatctttcccttggttcttcttttgcactaagccaccttatagttataactcacatgtacacacacttagtcggccttttatatatttcaggctaataatttgctggccggttaaaaaacatatggaccacacgtacacacaactg

SEQ ID NO: 291833 - DNA, 362 bp, Glycine max
  unsure (1)..(362): unsure at all n locations
taagctttttagtaaataaataaataaatatagagcaaataataggttgagtaccctaggtataaatagctatgttaagtcaggtgtctcctcttggactcattttcgtttttttcccttctcttctcaaaatcctttctttttcgcgcaactcaccaaatctgtctcagaaaaataacgatctcggactcatttaccgttggattgtcgtgaaattttagcagcacgtttgcaacccaatttcgagcattctcactgttgggaattgtaaaaacatgtcggagctaagagaaatacctttcgcaccgtagctttctcatttnccgtagaaacccanaaaagtctcagtaaaactacaatcc

SEQ ID NO: 291834 - DNA, 433 bp, Glycine max
  unsure (1)..(433): unsure at all n locations
taatggccatggtgattgagaaggagacatacattattggaatgcaaatcatgcttccattttgctttttagacatgactcttgcttcaataacatggtttgctagtcttgtaaccaccaacctagtaccattgcataacccttgtgattgatacatgttccttaaaagcattattggggtacccacctttagttntatcttatgattaggaagaccaaatgttctcaaactattgagaaattcacttgtgaccacttcaagtgcatttcattcaaccatttttgacttgtcaattgaataagaacttagatattccctttgatcacctgaaaacaattcattaataaaaacattgtagaatcaatattaattattaaatcaattgattatttgtgagatacctggattaaagaaaaacataatcttatttga

SEQ ID NO: 291835 - DNA, 394 bp, Glycine max
  unsure (1)..(394): unsure at all n locations
agcttagacctttgntcatttttgatcatttggttatcgtttcctatacccagctgggaagccttttgatcttgcatgtgcatcatgtagtaaattttttcatttttcaggttgtaaacttccttctctacctgtaatttgcttcacttcttccccttaatttgctagacttcatcttcaattgctttggttcctcttctggcttctggcatttcaaattgaaggtgagcaagttgaaatttataaatagaaatacacatattatttgttgtgttatataaacctcattntttacgggttatgaatacctaaacctaaaaatgttatttgtatcatagaggtctatatcagaaaaaggtacaaattaaaacatagaggtctatatcaaggattt

SEQ ID NO: 291836 - DNA, 343 bp, Glycine max
  unsure (1)..(343): unsure at all n locations
tntcaaaccttgatagaagaaccacaaaaacatccttctcatccatgctaagttgaaatgaaatcggcattaccataatcacgatggtttagattcgacaaattgagaatggaaaagtagcatatgaacatgggaagaagaagcccctgtgaggattttgagagtcagagaaatggtccaagctccaagcaagagaactattattatataagaggaaactatacatactacgtgtctatgaaatacggatactctagtcccttgtcgtgttcggngnccnacacacatcgtgtcantgtctgacaccgacacgacacccgtattacgttctatattttggaca

SEQ ID NO: 291837 - DNA, 392 bp, Glycine max
agcttcttcttgcactacttatcatggttcaaccatcactgcaccctcacccctcttggatcgccctcagccggccgatcagcctctcccaccgatcgggaagcccaccaacggctctgatgagtcctccggagaatggcacaaaaagcaagaagagtctttggtcagtggaaatattattgtttcacatgaatcaccttaattttttctcctttttctgggggggtgggtttgggtttgtgaattagtgcacttttgcccaactttgacaatgagttggtgtaattaaattaaattattgttattgtgttgttgtttttaatttttattttagacttctcacaaaagagtacatttaggggtaaccattaaccaataaccaaccttgtatt

SEQ ID NO: 291838 - DNA, 434 bp, Glycine max
  unsure (1)..(434): unsure at all n locations
caaactcagctgacagccacaactctcgcacctgtagagtntaccaccctctacatcggacaatacttattcaagttgaggggcttgacaaactcgcaaccctcttacttgtcaaggctactacctttgacaccataaatctcttttgccaacaagctaactcaaagcttgggggattatgtactgcccggggtccacaaaatggacgtggcaagtgacgtggcactccaatgagcacgtcaaccctctatgtcaaccttggcataggagcacagacaccttgcccttagcagccaagctactgggccgatagggtatctctgataccttattatttgaatattaatgataatgttagaactcccttatcangtgacaggtacctaattatctataagccacancttatctactagctattaactataagctat

SEQ ID NO: 291839 - DNA, 398 bp, Glycine max
  unsure (1)..(398): unsure at all n locations
agcttgtaataatatcctgagcataaaaattccaattctaacagctggcacaattgttttctttttgtgcaaataggttttaattttactatcgagaacgggttagatgtgagtaaaaaaaaagtgcttttgatatcatatttaggaaacaaaaatcgttttttaattaaaaaataaagtttatctgtgtagaatttgtaggatctttcttttgccattttttacaaaacaaaaaatagtttttttatcccaaaattacaaaataaaaaattacacaaataatacaagtgtaaaaatatttgccaaagtgaaaaattggtcccctcaaactgatgtctcaaagtgtatgaaattctttnttttgctttcaatgttgggaaatcgatttccatgcaccg

SEQ ID NO: 291840 - DNA, 419 bp, Glycine max
ctcagctaacaatccttgtgatctattatggaatatttctatccctatcacatagcttacctcatccatatctttcacttcaaagtttctagagagaaatttcttagtctcatgaagaagaccaagatcgttagttgcaagcaagatatcatccatatacagaattagaaaataaccttactcccactgaccttcagatacatataccgataaatagtattttccttaaatctaaaggaaacaatggtatcattaaacctcaaataccattggcgggaagtttgctttaagactgtatatggatttctttagtttgcacaccatgtgttcctttcctttcactgagaaccccattggttggtccatataaacattatcttcctaatcttcatttagaaaggcagttttcacatccatct

SEQ ID NO: 291841 - DNA, 378 bp, Glycine max
  unsure (1)..(378): unsure at all n locations
agcttgttgacacgtggagatttacgtcatcttccgcgctcacaagatctgtcatattgacttttgagtcacgctgacgggcggaaatacccgagtggttatccgtataaactttttgctgtctgtaagacgtaaagccttataacacgcagagactaacgtcgtcttctacgaccttcgtcaatcgcggccgacaagcccatttaaaagcggagatttacgtcatctttcgtgctcacaagatctgtcatactgacttttgagtcacgctgacgggcggaaatacccgagtggttatccgtataaactntntgcattctgtaagatgaaaagcgtaatagcacgcagagactaacgtcgtcttctgcgcccttcgtc

SEQ ID NO: 291842 - DNA, 367 bp, Glycine max
  unsure (1)..(367): unsure at all n locations
taatgaaggcgttatcagatatgtactagaagccgttgatagccaacaaagtatacttgatgcgtcggttgttcaaccttaagatgggagaaggtatctctataactaatcatattaatgaatttaatactattcttgcccagttgaagtcggtgcagatcaaatttgaggatgaggtgaaggcattgattctattgtcatcactatcggatagttgggttgcaactgttactgcagttagtagttctacaagagagaacacattanagcttagtgacattcgtgacttgatcttaagtgaagatgttcgcaagagagatttangagaatcttctagtcatgtttccaatttagcattgaatactga

SEQ ID NO: 291843 - DNA, 382 bp, Glycine max
  unsure (1)..(382): unsure at all n locations
agcttgtgcaaatcaaatcactcctacattttatctctagcatgcattgtatgttggtctcgtcctttgtcacgggaagccggaaggtccatatcaccttcttaattgtacacatggggcactacgcccccaaatgcgcaagtaagaagagataattttccgggctctcgtgtccgtaaaatgcattcatatcatgcatcgcataagcatctcttcataacatcataatggacatatcctgcatttgtccgttatcatattccagcctcacattttgcatgagtcatggcatcatcatgcatatgcgttcaacaaactntntgatctgcanaatcgcataccatntgttttcatgtttgctcatccttgcgttntcctctac

SEQ ID NO: 291844 - DNA, 450 bp, Glycine max
  unsure (1)..(450): unsure at all n locations
tgaaagtgtgtaaccaaccattntctcattgtataactaccggaacgtgtatactatcattgtgatcatctttttctctgtcattgaaggtgccacttgagctgtcaagtccctccacctctgggcgtattccttgaatgactcatgctcttttttacacatgttttgtagttgcgttctatccggagccgtatcataattgtactgatattgcctaacgaaggcaaccattangtccttccaagaatagactcgggaaggttccaagttagtgtcataccctaatttcgtccggggattattacttgacgacatgcaacctttgattggtccgttcaagatacttggcaccctttgttgcacaatatgtaagtcttgagacgcaccggaagtcaaaggaagcanggttatgcgatccgtgaaattccgtaatgtggcggaaaccaaaag

SEQ ID NO: 291845 - DNA, 383 bp, Glycine max
  unsure (1)..(383): unsure at all n locations
agcttattatcttctataccgtacaagagtatgaaaacggctgaaaaaaatcagctgttgaaaaataataataaatttcatattttcatataaaaaaacagctattttagaagaaaaaaacttttctaaatttcagctgtgttttcaaataactttgttattttgcaaacattttttattataaaaaaatagttgaaataagagattataatcttttccaaacataatccttgtttacaaaaatatattttgtgagaacttaatacattntccttatccaataatgagcttcatctagcgtataataactcataaattnttattagtataaaaaaactcataatttataaaataaattaatntatttatatcattagttgact

SEQ ID NO: 291846 - DNA, 486 bp, Glycine max
  unsure (1)..(486): unsure at all n locations
cccagcttatgattcttgcattacggacctataaaactcagctgctattgggtacaatgggacaaattgtcagtttgttgggaaaaaaatgcttgtgcacctttgggacttgggaccgtatgcagaaagcaactttgggttttgtaaattgaccctcttaaccttttggtggtaccatggatgtaattcaaatatggaataaaaaacgaaacctgaaggagctcatctcactcccttttatttgatctgtgtgccaatcctgcttttcaaattaaaaataaaaagaaaggggttgatttaggatccttcccttccactaaactaggtaatttatatagaaatacaatgcaaaatagncaaatgttttattttctctctttcctgatcttcaagccttcttcagtgaagcatatgtttctcagtgcctatcnacctcagaactaagcacctgtctaattgggggagtatgaaacagttctaaagagn

SEQ ID NO: 291847 - DNA, 387 bp, Glycine max
  unsure (1)..(387): unsure at all n locations
ttttgcatgcaagctttattcaagacagagaaattaaagatattcaagatgaatgatcaagacaagtctctagtcttagaaagggtatattaaataggaggggaattccaattgaagtagcaaaaggtttgaccaagaaatttaagttaaaaagtcttttacaataaatttactctctggtaatcgattaccagaggatgtaatcgattaccagtgaccaaaactgatttacaacagctattaaaatttgaattcaaaatttgcactgtgtaatcgattaccagcagtttctgaacattttaattcaaattttaaagcgtgtaatcgattacacacatactgtaatcgattaccagaggagaatttcagagnacagtttcaacagtc

SEQ ID NO: 291848 - DNA, 446 bp, Glycine max
  unsure (1)..(446): unsure at all n locations
tgagatngagataagaacatacatattttanatatttttacattaccgnatatcacaccatatagtctttcaattgatgtattgtgtgaatttggttcattttaaagtaaaaggaatgtattttagagaatataaaatactaataattattattaattcaaaactaatgattaagattatataattaattataaaatttattatatttctatttaaatttctctgaaatcataatcgttaattttttttaccataatcataattaagattaattattagaagtataatttattgtttaaagtgcttgtatacttttgactataaaattctactagtttctgtttgttttcgtcgtatttagcacaaaaacgaagggcctgtattacgtcaaagcccacaagttacagttaatttgtaaagataacccttaacgaagtcatgttttt

SEQ ID NO: 291849 - DNA, 363 bp, Glycine max
agcttccgttttcaatttggagcatctctcgataaattacaacactctgtcgggcatccgagtaaaaagttattgtcgtttgaattttctaagagtttccattttcaattttgagcgtctcgatatattacgcgactcaaccggacatccgtgtataaagttattgtcatttcaatttgctcagagcttctagtctcaattttgagcgtctcgatatattacccgattcaatcggacatccgagtaaaaagttattgttgtttgaatttgctacgagcttcccttttctacttggagcgtctcgatatattacgttactcaatcggacaaccgtgtataaatttattgacgtttgaatatgct

SEQ ID NO: 291850 - DNA, 387 bp, Glycine max
  unsure (1)..(387): unsure at all n locations
tgtagcanattcaaacgaaaataactntntactcggctgtccgattgagttcggtaatatatcgagacacttgaaattgaaaacgaaaactcgtagcaagtgcctaccgcaatcacttttaaatcgtcgcgaaataaattgacatgctccaatttgaaaaagaaagttcatagcaaattcaaacgacaataactttttacacggatgtccgattgagtcccgtaatatatcgggatgctccaaattgaaaacggaagcccctagcanattcaaacgacaataactttttactcagatgtccgacagaggttcgtaatatattgagacactgcannatgaaaacagaagctcgaatcanattcaaacgacaatatcntttttactcga

SEQ ID NO: 291851 - DNA, 376 bp, Glycine max
agctttgatgcaacatttggagaggttaatgaaacaacgagatgatgcgctccatgagaggttggatcaaatggagaatagagatcataatgaagaagaaaggaggagaagagggaatgatggtgttcctagacaaaaccgaattgatggtattaaactcaacattcctccatttaaaggaaagaatgatccggaggcctacgttgagtgggagatgaaaatagagcatgttttctcatgcaacaactatgaggaggaccagaaggtgaagcttgccgccacggagttttccgactatgctcttgtgtggtggaacaagctacaaaaggagagagcaagaaatgaagagccaatggttgatacatggacggagatg

SEQ ID NO: 291852 - DNA, 387 bp, Glycine max
  unsure (1)..(387): unsure at all n locations
ttgagccaaaatcctgactcaccatataccttgacttatggtgagaatgtcaatccttaccctcggaagcaaaaaaagaatagaggggaaatttccaatcaaagaaaaagagaaggaaaatttccaatgaaagcaaaaaaagaaaagaaggaaaattccccaatcaaagagtgggagaaagcaaaaaaagaaaagaaggaaaattccccaatcaaagagtgggagaaagcaaaaagaaaagaaaggaaaattcccaatcaaagaatgagagaaagtaaaaaaggaagaagaagaaggaaagaaagctcctgatcagggatcgaaggaaaacagaagaaatgtgcagagaggtctttggaccggancatatatgaacaatacagaatt

SEQ ID NO: 291853 - DNA, 373 bp, Glycine max
  unsure (1)..(373): unsure at all n locations
agctttgattaactctttaatagtggtctaaacgttttatgctgagaaggtcatgtgctccattagttttggagttgaaaaaccaaatattgaatgacatcaattggtggtaatggctactaaatgcattcttgatggtagaatgcctatatatagcacatgtgtttgatccctgagctcacatctttcattttcgtctaatacaccatctacagagagagagagagcttagaagaaccaaaacaaagtagctcttcatgacaatggttggaggtatatttagattttgtttttcacattnttaatgacatgtgtttcattttgttgtttgtaacatcataggtttgatantttagtcttacatttgatatta

SEQ ID NO: 291854 - DNA, 406 bp, Glycine max
  unsure (1)..(406): unsure at all n locations
ntgagcttcgaaaaaagctctccaatcggatccaattttggttggctttcgccagtcattgtgcacaacgttctataattaaatgggtaaaccttttatctttcataaagtaatacataatacttaaaacatcctgacatagacaataacttaatgtaagaaatgggataaaaaaattgacagataaaggtgcttttgaattaattaagtatatagctaagtaacttaccaagttgctgcacatgaccttgtattcatccagaaataccttgaaagtgattgaattcgacacttgatggtataataagtaccattttgaaaaaagttttgcatcattggctggtntgatatggtcagcaagaagagaccctgacataatgggtaatgtcacttgtgatttcctcga

SEQ ID NO: 291855 - DNA, 371 bp, Glycine max
  unsure (1)..(371): unsure at all n locations
agctttgagccaattcaaacgacaataactttttactcggatatctgattgagtcccgtaatataacgagacgctcgaaattgaatgttgaagctccgagccaattcaaacgacaataactttttactcggatgtctgattgagtcccgtaatatatcgagacgctcgaaattgaatgttgaatctctgaccaaattcaaacgacaatagctttttactgggatgtctgattgagtcccataacatatcgagacgctcgaaattgaatgttgaacctctgagccaattcaaacgacaataacgttttactcggatgtctgattgagtcccgtaatatatcgagacgctcganattgatgttgacctctgag

SEQ ID NO: 291856 - DNA, 392 bp, Glycine max
  unsure (1)..(392): unsure at all n locations
taaacattcactttcgagcctctcatatattacggttactcaatcaaacatccgagaaaaaagttattgtcggttgaatttgctcaaaggttcaacattcaatttcgagtgtctcgatatattacgggactcaatccgatatccgagtaaaacgttattgtcgtttgaatttgctcaaaggttcaacattcaatttcgagcgtctcgatatattacgggactcaatcagacatccgagtaaaaagttattgtcgtttgaattggctcaaaggttcaacattcaatttcgagcgtctcgatatgttacgagactcaatcagacatccgagtaaaaagctattgtcttttgaaattgctcagagattcaacantcaatttcgagggtctcgata

SEQ ID NO: 291857 - DNA, 245 bp, Glycine max
agctttgttttacatacgggaaagaagatgttgcacatgggcaccgaagatcacacaatcagctctgatctatttcacgaagatgaagagccacctgaccggaatgcctgtgatacagctcacgtgatggaggaaagaagacctatcacgaacgtccctgaagtgggaactttattggatcctggataacacgacgatgcgtccagctagtgacattaaatatacgcttactaagacgcaaccca

SEQ ID NO: 291858 - DNA, 379 bp, Glycine max
catgacgcatacgctttaaaagcctctttgtttcagccaccagagggggcgcttgtgatagtggacactcctatagcagttttgtatcatagcgcgaaagcacgcctatcttccaatgaccgagatccgttaacactgctcttaaacgaagggaccatcagtctctccccctcgaacgaatttagcttccaacacattgccacacctagactccttgcacccactcgccactctcccctggagagctctgtttatgctccgaagtcacaaaaagctgagggtactgcgtcccaagagtgcattcgccgtaccacttatgacaccacgtacacacaataatgctctatcaaacacccaaacattcctaattgctaatacc

SEQ ID NO: 291859 - DNA, 389 bp, Glycine max
agctttggtgtttagtgacctttagtgagcccagctgctagggttttaggagtgggtcggttattgttcacgtaaagaggattgtagggtttcattttcagttttcggggttactgttcacgtagcaactccattttcgttttctggttcaaattctagtttcgttttctgcttttaattccagtttcgttttcatttctgtcttctaatttcatttcattttctgcctttgatttccttttcatttctgctattaatggaaggctgaatctctagtgttgttttctcttgaggattaagaatagctctctttgaggttttgttattaatattaaattctgatcattttttccccttcacgaattattctgtatttgctgctgatatta

SEQ ID NO: 291860 - DNA, 387 bp, Glycine max
  unsure (1)..(387): unsure at all n locations
agtcttggggtttanaaactgctaaaggaaatataagcatcacattaaattaatctgttgatattggtcaaccaatgatattggattactttcctaatgtgtgactgaaaaaggatctcgatctcaatgtcttttggaattctctaatcttaacactgcatctttaatttattgattggctttgttgtggtggtgtttgtttatctctaaggttatatagagacttttgagatgtttttagagcattagctgcagtactgttatgtactatcttcatgatgtagctcttgattgctattcctgttagaatgccccagaatacctgttgtactgtttcaacttttaactctcaagggtggcccagtatttcactttttgttntaactt

SEQ ID NO: 291861 - DNA, 433 bp, Glycine max
tacataaacattcgctagtccaacacacactcaacatttagtcatcattattcaatagttccaatcaatcatgctcagtatgatgcatgcacctgacctcaactctcaaatgcaatgtggtaccatccccaaggaaatagcctaagtgtgtccacacgacactctcacttagaaaaattaagcagtaagtgtcgaggtaaccctatcgtgcacaggcaactcccctcccccctacccacggtgatcagcctgagtctcaagggagtttcaaaccgagtgacatgcccccaagtacaagtattcctcctcatgagaaactacaagtacttaatgacaaagtttatattatttctatgtcatatgaagtatgaaacatggacaccatcaatgcactgaccgtagataattaaagattctaagccatccccctcca

SEQ ID NO: 291862 - DNA, 378 bp, Glycine max
agcttgaagttgttttgaagatgttctggcttttacatgtctaactcccttgagtggcatttgtattggttgctatcttggttgttgcatcttggtacgtttgatatatgttttgcatcatgcatcatcatagtgtctgtgaagaaaagattctaagttagaaaattttttttagaggcaaaaactctctgtattaatcgattacagagttgtcgtactcaattacaacacgttgtttgaggcttaaagagttaagtctcatcagtttaatcgattacagcagtattttaatcgattgcactgttgtgtgagacaatgactgatttatttacgactccttattttaatcatataccaggcggattaatagattacttc

SEQ ID NO: 291863 - DNA, 379 bp, Glycine max
  unsure (1)..(379): unsure at all n locations
caatagacctccaatctttaatggagagggttaccactactggaaaacccgtatgcaaatttttatcgaggcaatagatctaaatatctgggaagccattgaaatagggccttatatacccaccacagtagaaagagtttcaatagatggtagttcatcaagtgaaagcataaccatagaaaaacctagagatagatggtctgaagaggatagaanacgagtacaatacaacctataagccaaaaacataataacatctgccctaggaatggatgaatatttcagagtttcaaattgcaagagtgctaaggaaatgtgggacactcttcgattaacacatgaacgaactacagatgttaaaagatctacgataaatgca

SEQ ID NO: 291864 - DNA, 378 bp, Glycine max
agctttaactgcaattaaatactcaaacataatcatggttatgtttttcttatcttgctttcacaaaatgcattaaggaggagatatcacaaaaaaacagaccataatttcagtagctatgagactacatcactacacagatattaaggttcatggtctagaatggggtcagaagactattggctttcaatgcacaacaaaggcaacaaagggggtcaaatataattatatattgatatattgatttctaataatgctgatgtgcttttcaaagtacctatttttggcaatttcaaggtgactatgatagagtttggttcctgtttctatatggattgagaaagttctggactattgttcacttttcacccaacaccc

SEQ ID NO: 291865 - DNA, 440 bp, Glycine max
  unsure (1)..(440): unsure at all n locations
actatacaatactctagcttcatctacacacatgctgggttattccccaattagtttaggaaaatgtttaatgatggggaaaccgattgcagcgtgaggagagtaggaaatgaagaaaaaatacatcttctagagtacaaaaatcttgtagcaatttgaagatagacttaatttacaaggatgaaactatggctcacgaactactatgagatcttacagatgaaattgactgtgcagagacagatgcggtcgggctgttaaggtccctctccccatttatttctttgggttttccgctaagtctttccatagcatcttgacatatgtcgttaaaccattcgtcttcaggcagttctctggcaacagaatatacatatcagactcttacagatttaatgccacaactttgaatagaanaacaattgcaaatgcaaagatat

SEQ ID NO: 291866 - DNA, 468 bp, Glycine max
  unsure (1)..(468): unsure at all n locations
gtggggcattgaaccttgtgatactttgannacnnancnnnnaaaccccacgcagattcttggaaccggccttttggaacccnttaaatcttaacgcngccccaaagtgggggacttggccgaacggtccctccttactaccttaaaaagaccgaaaaacccttaattgtgttataaatgggctcagatgacccaactgttgaaagttgaacaaactcaattcttatatgaaaactatggagggtggtatggaaggttgatcagaagtggattaccggaatgaggtatcccgtgaaagggggaaaaattataccttaattaagccatttttttcttaaatccaacaaaactgatggtctttcttttgtttttgaaaccaaacgactccaaggattgaataatatgacccaattttattaataaaaaaacctgtttaatgacaccacccttgccgaatggtgtgggacn

SEQ ID NO: 291867 - DNA, 335 bp, Glycine max
tcaagctgtttctcggatgctgcgatggttagtgggagtgatgctcttgcgaacattacatcgaaagtttatctgtctcccaagctttggtatttgagggttaatgtgatagaggcacacgacctgatgccaactgataagggtagataccctgaggtatctgtgaaggctatcctggggaatcaggccttgaggactagaatctctcaaagcacgagtattaatccaatgtggaatgaggatctgatgtttgtggtggccgaacagtctgaggagccgctgattttgagtgtggaggatagaagtgcgcctaacaacgatgaaatgttggggag

SEQ ID NO: 291868 - DNA, 386 bp, Glycine max
  unsure (1)..(386): unsure at all n locations
tcaagtttgacaagatgtctatgtatttagatcaaaattatgtggttaatttaccatatgaccgaaggactaagttactaatatcaccattcaggaactcccatgtggctaatgcaattgcaaattggtttcaataatggaaatctaattttccctaatgtatgtccaataactagcattaactctccagactatacatagtatgtgggcactctcttctttatggtgcttaaaagggatagtttcctttaccgtgctgctagagcaatacgctcatacaagtcacgagtcctctttcaacgtgtgcattgcctagttcggtttggtcctaacacgagagtcattcatgactgtggacgcatccgatatcanatagttgggctcat

SEQ ID NO: 291869 - DNA, 421 bp, Glycine max
  unsure (1)..(421): unsure at all n locations
gtgaagaattggtatatgatccaagtattttataagctttgataattnccgcgtaacataatcggatcttatttatctttaaataaatgatcaatttaatccttaaaattatatctcgttgtcacattaatctataagactaaaaagtctcaaataaatcctaaaatctatattattattatcacttcaatccatggcctaaagatcaacatgaaaaaaaatagttaattttagagacttaaaaaaattctagacctaaaagatgttagagattacaatgacaatgaaatataatttcatggattaaattaattatttactcctaattgtttcacaccaattaaaaaactagaccatataatgttatatggagattgatgggagcatggtctgataatgattccacactacttaccatata

SEQ ID NO: 291870 - DNA, 228 bp, Glycine max
ccatgcgaagcctcccacttagaaccaatgtcaacggtgtggcaggccttcaacaggacccgccgagaggttataggtgagaccaagctcccaacacaaacatgccttcacacctcgtaagcagaccttcaaacaaagagcttcaacaccaaatagtgccaggtgattaggcgccagttgaaccactcaaagggaggtaaaaactttacactcctattcccttgaaag

SEQ ID NO: 291871 - DNA, 386 bp, Glycine max
tcaagcttctggaacaaccaggtacaccttacaactttcataaagtgacatcatgtaaagccattttgaggaacctttatgatggacattctgaataaccataagaataatcattctaatgtatgctaagagttaatccatacttgatgaatttagttgatgaagtttagactaatatcccattctaaagtagcacaacttcatcattctaaacacttctttttagctacaagcattctgaagttgattactttagaaagactaagtagaagttcaattgctagtgtgttagcgttttgttcaaggttagactgagtggcattctttaaaattttcattttgatgtgtctcatcagcgactctcatggactacttcaactttcaac

SEQ ID NO: 291872 - DNA, 432 bp, Glycine max
gaccttagaaactcagctgcttcacatgtcgcttctttttagcagcttttattctcacttgttaaaggcccgagatggttttccctttgctggtgtaagatctttgactcttcgatctatagtggtcaatattcttgccttttgctgaaattaagcattacaattttcagtttatagaattaagctctttttaattgttgtcaagtcaactcaattgagaaaattagaaccacaaatcttttggtgtgttcaaaaatttctaagagcaagatccattgaaatgatttttatggttgaagagatattggtatatttggcatgatgtggattatttgttttaactttgcagcttattgatttacaaggtgctttgataaagaggtgtttgggtctaacaactcttaatcaaagaagataatgtctcaccaaaag

SEQ ID NO: 291873 - DNA, 317 bp, Glycine max
tttcatgtatgctttgcagaccaagccctccttgacgaagctacggacttttttgagatcctattgatccccctatgtgaaacattactcgatccattcgtttggggatgaaagggtgatgctacttttcctcgcacatgatagcgctggacgacatttgagagatgatcgtacacaaatgtgtacctgcatcgactaatccagagtctaggctctccacacctagacgatatgtctctctgtaagagcttaatcaccatcgttgcatgacaggcgggctaccaggtgcttccacccactatgagacatagtccact

SEQ ID NO: 291874 - DNA, 231 bp, Glycine max
gaagaaatttcgaggtgccgaaacaaaaatccacaagcgagacacaaaagagagaaaggcaaaagtgacacaacgaccgactcacacaagttggaccgaatgacacaaactagacaaacagaaggcccttccaaagggaccaaagtacgtgttacaaaccccagaaagacaagggagccaccatactcaaagaagcattcaatgcaaagatacccataatagaacccccct

SEQ ID NO: 291875 - DNA, 353 bp, Glycine max
  unsure (1)..(353): unsure at all n locations
ttgcattctagcttatgcattcttatcatcatgtcaacctcatcttcactcaaatctcccctcttaatatttggtattagatagttcagccatctcaatctacgactcttgcggcatctgttcaaccctatacgtataccagacgcatattaatgtttattatttattacaacttatgaggatatatgtcatagctattatatatatatatatatatatatatatatcattgcgagtcacaagcatattccagataacgaaaagagaacatatacaaatataaacacatgcatatattaatattatgggtcttgctaatcataatatctattgtataaatgatngaaaagtat

SEQ ID NO: 291876 - DNA, 111 bp, Glycine max
aacttataccattgggaggagaatcaatgaaggcaatgggacagtagttttcttatacttaaaggcttcaatccttgaggcaacttcaaatgtgtatcagcaatgtcttat

SEQ ID NO: 291877 - DNA, 397 bp, Glycine max
agcttcttttaccctcgggttataaatgtgcttcaaaagaaaagaaaagaaaagagaaaaagaaaatcaaccaatcaaagattggaggaaagcaaaagaaaaatagaaaaagaaagaaaggaaaatacagaaaggttctttggacaagacaatgtctgaacaatgtgcagaattgtcaaaaagaaaaagaaaaaaagaagcaaacaaaagtttgcttgaaacctcaaggatgtgtgaagcagtcacctccctagttaccaaccaaacctttgtgcacacgcttgtcccgcgtcgaaccaaagagaaaagaaaaaaaaaagacgagggaaaggccagaacacccaaaagccaaattccccaccaaaatccaacttcctaaaagtcctatggatccatg

SEQ ID NO: 291878 - DNA, 441 bp, Glycine max
ttatgcaagatacctcctagtagcatggacaagctacataaattagcgaaaaggtacattcagatggaagaaatgtcgaggttccgaaacaaagttcgacaagctagacacaaaagagagaaaggcaaaagtaacacaaggaccgactcacacaagttggacctaatgacacaaactagacaaacatcagccccttccaaagggaccaaagtacgtgttacaaacccttgatagccaattgagccaccattctcaaagaagtattcaatgcagagatacctatatagttacccccctatacctcctcttgtaaggccttgaaattttgataactgaaaataaatgtttgatatatttcttgtgttatttgattaatttcaattatttgaggtgttgtgtttattatcaatgtgtgattgcttggtgtggatgttaggttat

SEQ ID NO: 291879 - DNA, 381 bp, Glycine max
agcttttaagtatgggtacattagtaatttctatatacttcagttttagtatatagatattgatgataattgattaagaagccgtaaaaggaaaacatatttacaaaaaggaagctgttacatgacataaagaagtgtcaatgatgtttatcaaatttttgtattgacttttgtacattgagacttaattcgattatactcttgatattttaaatgaataaaaaaatagtatttgattaataaaaaagtatttgctaacacataagtgatgagtctaatggatttatattgttttgatttgacttttagggtggttattatcaaattcaatagggtaaataatcattcttgtctctaaatgtatagagcgctgataaattt

SEQ ID NO: 291880 - DNA, 422 bp, Glycine max
  unsure (1)..(422): unsure at all n locations
gcttctatggagactggatctttgagcttcaatgatgtcctttaatggtgtttttcagccatggagttgcagcggaagtaaaggagaagaggcactatccactagggaataagccatggaagaagaagcttcaccaccaagagagtgtcttagataagaagcttagagaggaagcttcaatggaggaagaaaatgagagagagagagagagagaaagtggcatgggattgaaggaaagatagggagagaagttgaactttgaaatgtgtctcacaagactttcattcatcaaagttaccacaagtgttacacatgcttctatttatagcctangtagcttccttaagaacctagtgttacacccctccaatagctaagctcaccccatgacaaaatacatgaaggaagaaagcttccttgag

SEQ ID NO: 291881 - DNA, 392 bp, Glycine max
agcttctgtgcctgatgctgagaaagatgttccaacatcttccaccccgaatgtttctgtgcctgatgttgagaaagatgttccaacatcttccggcccaaatgctgaagccctcccttcacccagtgaagaggaatcaacagaagaagaggatcaagcctcaaaggagactcctgcaccacgggcaccagaacctgctccaggtgacctcattgacctggaagaagtagaatctgatgaagaacccattgccaacaggttggcacctggcattgcggaaagacttcaaaacagatagggaaaaacccctcttaagaggtctggaagaatcaagactatggcacagaagaagagtactccaatcactcctgccacagccagaagaagcaagg

SEQ ID NO: 291882 - DNA, 424 bp, Glycine max
tgtagtgaggcttggctacaacaatttattggtttttttaggattcaaatgtttagattttaagagagcacaaatcatagacttatcccaatgatcttgtatcatacaagtagctttctcactatcttttcctcttaagttgcttttgaccttattgtaacaacacaatttattctttttttttaacatacaacttatttgttgtgtgtgctgatgcttaacctttttcttttcattctaattgacttccctcccccaaatttagagtaactttgccttgaaccatatgctctcctaaaatctaaacaaggtattaggagataattatttaagtttagggttcaattcatgacaaaatcatttagcttatacagggagcaaaggatgcaattatcattcaaggtaagctttttggtcaaaaggc

SEQ ID NO: 291883 - DNA, 385 bp, Glycine max
agcttcttgcttgtaccttttgttcacttcaatttttgagttaggctctactccttttctcttgtacattaatctttcattgcacttttgtgccttgcagaatttggagatcttttgtctctcttttttttttctttttttactcgcctttggcagatctttttttctttttttattttcattgttgcctaacttcaagcatgcattatttgcattgctcttctcgttggtttagtggtggttcccactcagggtttgcattttgcttttgttgtttatttgatgctttcggaaaacaaatatgctttggctcggagggggtagcaagggataaattagtgtttgggatgttgaaacatggacatgtgtcacttcaagtcttgac

SEQ ID NO: 291884 - DNA, 436 bp, Glycine max
tactcatgctagcttctacatcatctttgttaacatgaagtggtctttatttttgagctctttgtcatcatctgtggtatcatcaaaactccttgaatcaatcttgattcatcatgaagcttgcttctacaaagacaaactagtaatgtcttcgcccagttcaggggtcataacaatttgctcccccttaacctatacacataaaaagctagactctccatcaatatgagcagtagtgtagaaaatccttaccaaatcatggtagtatacttccttcctctctactaacttcttcaacccatggtactcaagaagttatggaaaaacaaacccttgacacttcaaccacaccaagtctagatacttgggttgagattgctctttctttgcataactaaactcgtaagacacctcgtagtgcttctctacaaaccat

SEQ ID NO: 291885 - DNA, 383 bp, Glycine max
agtcttaagtatgctctgaattcacgacattgtgcttagtgccacccttgcacttagcgcaggtaagtggactcgggcttatcgctagtcgagtgctaagcctggttgaagacacctgctacgcttagcacactaatctcgcacttagcgcacgaccttgatgctgatgctcttccagattctccttcgcgctaaatgcgctgatgctgcgcttagcccactgatgagctaagctcaactgtcacttttggaacttcatgacttagcctctttttttcacctgaaaatgcacatatttcatcattaaatccaatggaaatgttctggagacagctttaatcataaaacaagatttatttacaggattacgtccaaataaccat

SEQ ID NO: 291886 - DNA, 392 bp, Glycine max
  unsure (1)..(392): unsure at all n locations
caccggatagntcattctttataagtgcttaagtggaattagagtatcgtatgtataatgttngaataatactctgtgattatacttccaaatattcagaactctgcttggttatgattatcaggcaagcaaaggatgttgttaaaggcataaagaagcggattggaagtaaaaattcaaaagtccaacttcttgcactaactgtaagcaaaatagtcttgcgatacaaccttttttctctttaaactctgatgtcagtattgctctagattcttttggactcaagcatgtttgctgtaattgcatttttcaaatttcattttggcctcccaaacttcacattgttgactcgntcatttttgaatggttttgttgaatgacgacgatgttta

SEQ ID NO: 291887 - DNA, 264 bp, Glycine max
acgctcatgttatcctcgggatataaacgtgctgcacatgcaaagatcagaatagagaacatgattatcaatctatcatagattggaggagcgcactagacccttacacctcgattgacaggaacatacggaaacgctattcggacaagacaatgcctgaacactgtgcacaattgtcaacatgaaaaagaaaaagagatgctcacaaatcgtctgcttggaacctcaaggatgtgtgaagcatacacctccctagtttccaac

SEQ ID NO: 291888 - DNA, 362 bp, Glycine max
aatgtttttccattgattgggaaagctgttcccgaaattcctgaaaaatgtaaagatccaggtacattcagcataccttgtattatagggaatagtaagttcgagaatgccatgctagatttacgagcttctgttagtgttatgcctctgtctattggtaattctctatctctaggtcccttgcagtcaactgatgtgataattcatttagctaatagaagtgctgcctatcctgttggtttcatagaagatgtcttagctagagttggtgaactgatcttccctcgtgatatttatattgtgaatatggaagatggattttctcaaggatcagatcccatgattctaggcagaccctttat

SEQ ID NO: 291889 - DNA, 334 bp, Glycine max
tctagcttgttctttgattatactaagctgtgtagcaagcttagaacaatatacttggccttctcttaattgtctatgggcttggcgaccacgatcaacatagtactgtcggcacctactatatgatgacttgaccaacgctgcttatggaatgctgggactatctttcaacaaccttattcacacattctgataacgaggctgtcatgtgaccatatcgtcgaccagatgtatcgtaagccatgctccatttttcctttgagattcgacaatccatcatgctatggctggactcacatgactaaagtgttctaaatatgatcaaacacatgct

SEQ ID NO: 291890 - DNA, 380 bp, Glycine max
tttaaaacaacgacagcctatgagtaaggtcataaaaccgcggggactagcggacaaagaacggaacaagagaaaaatgggaacggaacggaagcgggcgaactacgaaccaagaccaaaaagcagcattgccgaaaggaatcgcagacaggcttgaccgcgataacctcatggaaggagataaaaacatcggactcaaacaaggaaccaagacacgggcatagccaacacgttgaacactgactatcacgataagacaaacgcaagaattgcaacgatatgtgaaccaggggagagcacaggtataaacggagccaagcggcgcataccgaacaaacaggagcccccatgaaaactcggcaaacactagagcggaacac

SEQ ID NO: 291891 - DNA, 378 bp, Glycine max
tcaagctttttattgtttcttggatggctatttgaagtataattagatagcagtggaccctaacgaccaagaaaaaattgcttttacatgcccttttggtgtctttgcttacagaacgatgtcatttccttgccaccttttagagatgcatgctagctatttttgttgatatggtagaaaaatgcattgagtgttcgtatataatttttcagtcttcgatccctccttcaactgttgcctaaccaatttggaattggtgctatgacgatgtgtagagactaatctagtgctaaactgggagaaatgtcattttatggttcaagaaggcgatattttgggaaataagatatctcctagagggactgtagtagacttggc

SEQ ID NO: 291892 - DNA, 325 bp, Glycine max
actccttgaatacctcatgctgcatcatgaagcttgcttgtaccatgacaaactagtactgtcttaatgcagttcaggggttataacagcttgcgtgaccttatgctatacacacaaatggctagactatatatctttataagcagaatggaaaaggatccttaccacatcatggtaatatacttccgtcctctatactacctgcttcaaccgatggttctcacgaaggtatgcaaaaacaaagccttgacacgttatacccaccatatctacatacttgggttgtagtcgctctttctttgcatcactaaacttgtaagacacc

SEQ ID NO: 291893 - DNA, 380 bp, Glycine max
ttaagctttgcctttagggcttgaacctcatcactttcttccgaagctataacctcatcgtctctcacagtctttagatttgggagccaatccagtccttgtgttcagactctcagctcacttatgatagccgccgatgatcccattactgcttcccctaagctctctgttctttcttcacgctgcatcccatgccttgcgaactccttggagtaccctcgcgttgcggacactgaaacctcgtgcgatgaaaggcgtgatgctttcgtctaatggcgctcctctcatggggtagccaagctgtcttatggtgagaacgggattataattaatacaaccccttgttcccatcaagggaacattcggacatccttcgcatg

SEQ ID NO: 291894 - DNA, 416 bp, Glycine max
tgtaggattatggggtacccatcacttgtggtactatgtggcggtcgggcgatggtgctcaacaagttttccacatccacaaagcgcgcataaacccaccatcccctgttgcccacctccaactgagctcacgtactcccacgtagcccatatcctcgttcctctcaacaccgagtccccattaatcctcccaagctttcccaacatccaagtaatacaacattcagacagcacaaattatcacagccaagcaaaacagggcaaaggcagaaaactctgcccaaaacaccaaccaaaatcacagcttttctcacttaaagaccccaataataattccttcgttccaattcgttaaccgttggatcgactcgaaaattctactggaagtctctagtacataatcctacattgtgacc

SEQ ID NO: 291895 - DNA, 376 bp, Glycine max
tagcttctacttatgtggcagggcgggtttccttcactttcttgtttccaacgcgagctctgaccactgttcttccttcccgcgatgcttcttttcatgtccgcctgagtgggcttatatcccaaaccatacttcccacgattcccatgggattttatcagactagttatgccgccattgtctttgcctaaacccatcccgggttcataaccgttccccaacataactcggtccatcattaccgccgcctcggacagacaaggttgcccatagagggagtccacggaggaaatgctgaccacctcaaaagactggaaagcggtttctaacgactcttctgcggcttacacataaggcatggaggatgggcagctta

SEQ ID NO: 291896 - DNA, 392 bp, Glycine max
  unsure (1)..(392): unsure at all n locations
ttgaggagctnctanggaagccagaactttgagtttcaatggagtcctttcaattatattcgacaccgtggtgattaagcgctagacagaagcaccgatcagcatgtggcaacatccacgatggaagaccctatggaacaacggatatccctcgctacgagccgtggaataaatcccgagaggacgccttctgtctgcaaccatgtatggactaaaagatacaaggggggagcctaaattgaaggaagaaaaatggacatgaagtggaactgattggtatctttcacatgaccatgaatgatgatggtacacatacgttatcatggcctaatgtatagactaggaaacctncttgagaacttcttttaaaacatttcttgcaaccgccttcn

SEQ ID NO: 291897 - DNA, 374 bp, Glycine max
agctttaggttgctcattgactccagattgctacaaagaaggacaaagatatgtatggtgatctgcagaagaacatagaccacagactcttgcaacaggtgcagatttctgattcatggcaagctgagttactaggttgaccaaggcatcaagttttccctcaagctttttattttcagtagatgaagatgaatctgtagccacctcatggactcctctaaggacaatagcatcatttcttgcactgaattgttgggagatggaagccatcttctcaatcaatttcctagcctcaacaagagtcatatcaccaagggctccaccactgccagcatcaatcataatcctctccatgttgctaagtccctcataga

SEQ ID NO: 291898 - DNA, 146 bp, Glycine max
acctattaatactcagcttctctgtaacttttatccaagcactctcttggtgttgaagctcttctttccatggcttattctctagtggatgacgtctcctctcaccttgtttactttatcttgcgctgcaactccatggctgaaaa

SEQ ID NO: 291899 - DNA, 392 bp, Glycine max
agcttatggaataagcttgcaaagaaagaaaacgataaaggaagcaagtgaataacagagaattaattggcttacataaataactaactcttaactaactttcaactaactccattaactgtagttacatgagattaaccaattaaccaactctagttacaatgttctatgctaagataacatgagtttgttccaaaattcacaaataatgttgtcggaaaagaatgtaaacaacatattagaatgtaattgagactcaaacacaatcaaaatgacacaaacaacaataagttacattgttataagcattaaaaaatataataaaatagttggtttagtttgggtttgaaaaaaatgtaaacctactcaaaccaattaacattgagtattaa

SEQ ID NO: 291900 - DNA, 431 bp, Glycine max
  unsure (1)..(431): unsure at all n locations
ntacgatacgtgcaccctananagcacgaacatatcctctcctttntctatggtaaaaaggggctggggacccaaagaaagcaacacataactacaaaaaggagttaaataatactagcatggagcaccgtacagcatcttcaaaaatcaaggatttgggaccctcaaaagcaactgatagcctttgcctgngggttgaggcagtaatatgccaactatcaaccaatctctctccaaccgtgtattaacttaaccatccaatcgtggtgttttatattcgagagaggaggttagtatatagggacaggattgggatcttacagttgtgtgatgaatgatgatggccagccatccttaaaaaatggaaaagtggaaaaatgtcaaaaatcaattctggaactctcataaaaaaactagttntaccattaccc

SEQ ID NO: 291901 - DNA, 387 bp, Glycine max
  unsure (1)..(387): unsure at all n locations
agtttatctattcctatactgtaaattagaatcctcaatttgaagagtagagtctcattctctcaactaagtattctgaatattctctcctctctccttgatagtacattttattagtaactcaaaaaaatatatttctcaatcatctcaaactaacctccttatatctatcatttatagcaattataatggatatagacctttttggtctccacttttcttcagacaattttattcatcgattgcacgtgataacacatctctttccttcctgtgtcataattgagggtttgcccctctctcaactgtgcactcccattntttatgtacctttctccccttttcttttagttttcttttaaaaatatagatcccttagtctttata

SEQ ID NO: 291902 - DNA, 377 bp, Glycine max
  unsure (1)..(377): unsure at all n locations
acattgaatcttcttttttcacatcatttagaaaaaaaaaattagggtagagtatgagtagactactatattacataaaaattccttgtattagtattcatatttgtatgggtagtaattgtaatattcttatattttttgttggatatttaaatgttcgtcatattgttacctatactttaattaattataaaaaatcgataaataaaaataatagtaataataaattaaaatctcatttaaaatattttataaaatataaacataaaatatcacaaaaattaaaatcttattcaatgattntggttcttgctaatacacctccatgtttgctaagttaacccctcttttttttttatcaaagttgttatcaccaa

SEQ ID NO: 291903 - DNA, 391 bp, Glycine max
  unsure (1)..(391): unsure at all n locations
agcttataataacaaaattgcctcaatcatttccaaatatgcatgtgaattgggacgcatcaacaagaatcaagccaaggctattgtgcaagcaatcaatggggcaaaacacaccaaatgattatgatgatggatggctcaaattctcacaaaggtaaactcatcactttcaaattgagctttcaaaactatcatgacatgttgagaagaatcaaggatttcaagtcacaaaatgtcaagaacttttattttcaaaacaattacccatttcttgaacatatcctataattcaaagaaaaacatgcaaagtcgtacgtgcacacaaaattgaccgaaaatattanactanaaatccgacgaaactaacaacattaacaaattaacacaacta

SEQ ID NO: 291904 - DNA, 433 bp, Glycine max
  unsure (1)..(433): unsure at all n locations
ntgatgatatggtcgtcaccaacgaaaggatcaaagtgggtctaaaaagaggcaaatctgatcatcatgctttgataaatgccaaaaaaaaactagggcaaatgaagagggtgagaatgagggagaagcccatgctgtgactgccatacctatacagccaagtttcccaccaacccaacaatgtcattactcagccaataaaaaaccttctccttacccacctcccagttatcaacaaaggcaatccctaaatcaaccacaaagtctgtctaccgcacttccaatgacgaacaccacctttagcacaaaccaaaaacaccaaccaagaaatgaattttgcagtgagaaagcctgtagaattcaccccaattccagtgtcctatgctcacttgctcccatatctacttgataattcaatggtagccataacctt

SEQ ID NO: 291905 - DNA, 426 bp, Glycine max
  unsure (1)..(426): unsure at all n locations
tctgtgtaagtaatacatatctttcattcaaggctgttangctttgctcaaagtcaaaggaaactgggaattcctctgatgaacatttaactctccactatcagggtagtggtgcatttactttgactaatattcttttcatatcattgcccaatggggatactttccatcttccgggatgcctttgaaattatgaatcactgcatgatgcatgtgaatgtaaaaggtgtctcttgcaagttcgacatcttgacacatcagacaagaatgaacttcataagttacaacaactgaaggatgagcaaagtctgggtgccatttttgctcaaaagctactcatacttagaaatattacctgatgggcagacttagtatggttgatttgtatgcattttatgttatagccctattaatttagtaaatttc

SEQ ID NO: 291906 - DNA, 280 bp, Glycine max
  unsure (1)..(280): unsure at all n locations
agcttcaagatgcccactagagttggatcgcgatgttctgcgtgtgggtcgtcgtcgacgttcgcgccgtgggtcgtcgttgtcgtgctcgttgccgccgttcacgccgtgggtcgtcattgctggttgctgtgtgctgcgggtcacagctaggttccagggtcgcgctttgtgttggagattggagggctcgcagctgcgctctgaaagcttggaggggtcgtgcttttcattaagttaccgggtagggttgggtcgggtcancccatcttctaccgtg

SEQ ID NO: 291907 - DNA, 421 bp, Glycine max
ttgatgatgaattttgaactgtgtacgtcttgtgtgtatgtattctgcctttgtctttgcaacgatccatacaagtggttgtatgaataagccgtcgtgaagtagacaacgtaggaagcaagaccttgttgatgtagaaagactgtggtggtcttgtaaagagtagaatgacatggagtcatctcaagtttgatttcaacctgattaaagatcttgtcacccatctgttggggcttccttttgttttaaggagcttgtcccctgataattgtgagaacttgtgttttgaattgcccctagttgaaggtcctgcctaaccagtgtggggatagtcgcttgacttgttgagttccttctctgatgattataaggagtaagtgtgagctacacctgattgaaggtcttgccatacaattgggtg

SEQ ID NO: 291908 - DNA, 380 bp, Glycine max
agcttgcacttcttcgctttccttagggacttcagcctcttccccacttgaaatctttagttcgggagccaagttatcccttgcatccgagccttcaaccatttatgatatccaccaataacaccgttgatgcttcctctaagctccttatcctttctttgcaccacattccatgcttttcggactcgtcgaagcatttttgcattggggtcattgaagccacgtgctatgaaaggcatgatactctcttccgatggtgcccctctcatatgatagcctagttgtcttatggcaagtttgggattataattaatacaacccctcgttcccatcaaggggacatttaggaacccttcacatgaggacaatactccgaccct

SEQ ID NO: 291909 - DNA, 404 bp, Glycine max
ctgattaagggaaagaaaaaatcattgttaaatgtttctacaagtcgaactggagcttcatacttttaacaagccaagtacaagttttgaatttacttcattttaaataaatgaccaaaacttagcatcttctacttttgcaaaccaagcatcaactttaatttcttggcttgacttgatactttgacaatgcccttaacaatatacattactccaatttgattgaacttaagtgctaatattacatgtaatataatttcacttgcacacaccgaagaaaactcattgaccaaatggcagcacctgatattacttctagaatataaggtttatttgcaaagttaccatttcaatgcatcttatcctaaagactgctttcaacatcacacacacacacacacaca

SEQ ID NO: 291910 - DNA, 385 bp, Glycine max
tcaagcttctcccccaattatctataaatagggggagaagtgaagtacaacagggttcagccccttaggcacttctctctctttcgaatttgcttaggaaaattgtttccgtgaagaaaatccaagctgaggcgcttccgtaacgttttcgtaacgtttctgcgagtgatttcgcgaaggttttcgaccgttcttcgacgttcttcattcgctcttcatcgttcttcagtcttcaatgggtaagtacctcaaaccaagcttttcgattcattctatgtacctgtggtggtccacattttgtttcatgtatttttattcttgtttcatttattatttatatccccttttgacgtgcttaagccattttatttaagtcatttctcgc

SEQ ID NO: 291911 - DNA, 426 bp, Glycine max
aagctctattcaagacaaagaaattaaagattttcaagatgtgtttatcaagacaatctctagtgtcttagaaagggtatattaaataagaagggaattccaattgaagtagcaaaaggtttgggcaagaaatttaaggtaaaaagtttttttcaacaaatgtactctctggtaatcgattaccagaggatgtaattgattaccaatggccaaaactgatttacaacagctattaaaatttgaattcaaaatttgcactgtgtaatcgattacacacatatggtaatcgactaccagcagtttctgaacgttttaattcaaattttaaagcttgtaatcgattacacacatattgtaatcgattaccagagcatattttcagaatatattctccacagtcacatctttttatttggtgcttgaatg

SEQ ID NO: 291912 - DNA, 377 bp, Glycine max
ttaagtttaccctatttataccgcgtttgagagagtggggtaatgattctgcatcaatttgtgtttctatagatttttcaatatagtccttgccacattggactcaaacttgccacattgggttgcttacgtggactgatgtgtgccaaatagacatttgactaacggaataaattagattttaacagcaaggacttatttgcatatctgatgtaaagatagggactattttgaattaaaatttaatgtaaggactaatatgcaaactggttacaatctcagggactaaattgcctattcactcaatagaactagctataaagcaaaagaaccaccacgcgcgtgtagttaaggcagatatcaacatttggctttgc

SEQ ID NO: 291913 - DNA, 216 bp, Glycine max
gtgagctctgactccacacgacgcaggtaaggtctgattacgcgccaaggatcgaggggatgtgtgagctcgtacgcataacgcaagtgcgaacacgatgagtgcacaattttgaagcaccagctgtgccgcgccgcgctcttatgctaaagcgaaggacccaaacggtgcccgtagtgtgatgaaatggcgcgctaatggaagctgctcaactaa

SEQ ID NO: 291914 - DNA, 368 bp, Glycine max
atcttgaaggtaaaatagatgccttggttaacctggtaacccaactggccatgaataaaaaatctgcacctgtcgtcagactctgtggtttatgctcctctgccgaccaccacacagacctttgcccttttgtgcaacaatctgaaccaattgaacagcctgaagcttatgctgcaaacatctacaatagacctcctcaacctcagcagcaaaatcagccacaacagaacaattatgacctctccagcaacaggtacaatcccaagtggaggaatcatcccaaccttagatggttgaatccttcacaacaacagcaacaacaacaacaaccttattttagaatgttgctggcccagcagacatacgtt

SEQ ID NO: 291915 - DNA, 339 bp, Glycine max
gttcaaggataaaagggattccccacattattcatcatgactcaaatgcaaaaaggatgagttggaaattctatgcacaactggtcatgcatgcacctatgcggacgctcatacgttacatctttatggacacgtgatgctagggctcacgatgcattgactctatgatagatcaaccgaatgtttccaaagtatgacattttatcaattagtgcattaatgcaagtccatttcgggcgaccggggaaattacacaggattcacccctcaggtggagacacattttccaaaaattggatatgatccatgaagtgtctacatagaaaagttggaaatcat

SEQ ID NO: 291916 - DNA, 228 bp, Glycine max
agctttaaacatctttgaagagaaggggtggcttaaaatctttaattgtccacagtcagtgcattgatggtgcccatgtttcatacttcatactacatggaaatagtataaactttgttagtaagtacttgtgttttttcatgagggaaaatacttgtacttgggggcatgtcactcagtttggaacttccttgtgactcagacttatcaccatgggggggtgggggg

SEQ ID NO: 291917 - DNA, 281 bp, Glycine max
  unsure (1)..(281): unsure at all n locations
tttcttaaagctttcttgttaatctgggacctagctttggcagaagtctccacagaggacattgcctccctcgcccagtattatgaccaaccattgaggtgcttaacctttggggacttctagatatcacccatggtggaagaatttgaagagatcctangatgccctctatggggaggaaaccatacctcttctcaggattctatccctttttagctagaatttctaagatagtccaaatctcgacgtacgaattagaccacagaaagcaagtcaaaaat

SEQ ID NO: 291918 - DNA, 522 bp, Glycine max
cctacacctctacccccaaactaatacatactaacaagaaagagttaattaacaatcacccccgaagaattgagtgtgctgatgccatgcaaaccaaggcgaatcgaacacggacagcggatacttaaacgcacccgtttacttctaatgtaaatacgcccagggaacaagagaaccacacagggcatcaacataatatcatggctccgtctacaaagtatgcggacaatgcacccatgaccatcaccacacagatctttgacctttggctgaataaaatgcagcagtaggacaatctgaagatcaagcatgtataatccacagatgaccacctcaacgttcaaagcaaagaaaggcaggacagaggagataacaccgctgcactatcaggaaccatacctgaggaaagaatgatctcgaccttaaacgcttgaaaaccacgctgcaaccagaacagacacaacaacctgatccttagaatggtgctggaccacgccaaaatacgtgtctccaccaagcccg

SEQ ID NO: 291919 - DNA, 498 bp, Glycine max
  unsure (1)..(498): unsure at all n locations
cgctgcgttanaatttgattcgtttgtganaacnctgaannacgngatttgaaacctcgaagccagngaactatgaanacacaagactgttattgaatattatgcacaaagccgacgcgatttcttgtcanggctgaaacacaaaatcattggtcataacatattgaactctatcactacacttagtccgatgtcaaagttgacaggaactcataacagaccaccatcttatcaatgactgatgttaatgaacgacgatccaaagctcccttataccggaacgcttacctagcggacgtggcttcagtatctttattttagaacgagacactagtgatacacctgggtacatttgatgcccctgtggtagacaattgtcttgtatcatttaatgagccaaccaataatctaagaatatacctacgagatcaatggtgactaatatgggacgctactcgtacttctataggagactagtagaacagacatgttgcgttn

SEQ ID NO: 291920 - DNA, 385 bp, Glycine max
agcttgcatttggaattgcgaaagcccccctccatcattaggatttgtgcctgccatctcaaacaaacaaatcaaacgtaacaagacaattatagttgttgtttgaatacctcacccactcaagtgtatcacacaattatggcttttctctaatgaaacactcttgccttttaccactctaattccccttgagttcttatgaaattcaagagattatggccacaacaaagaacaattcaccaatatgtgtaaggtaaggctagagagacaaggaaaaggttaaccaagaaaaaggctaacaatgtttttaggcacaaatgaaggaaataaaattcagaatttaggaattcaagtaacaatccttcattcaacaaatatattacct

SEQ ID NO: 291921 - DNA, 426 bp, Glycine max
  unsure (1)..(426): unsure at all n locations
aggaagaagaagaagaaattcaagaggatgttcanagagttttaaaggatgtaaaagattgttatcaatgtcttgaaaatgcaagttaaggacttgcttttatagactcttcatgtctggtcaagaaaaccattagaagagttataaccattagaaaaacttgaaaaccattggaagagttacatcttttgatttctattcaaaacttatcactggtaatcgattaccaaatcattgtaatcgattacacaaagcatttttgtgaaaggatgtgacacttcacatttgaatttgaatttcaacgttcaaacacactggttatcgattaccaaatcattgtaatcgattacaccattttgaaatcaattggaacgttgcaaattaagttgaaagctttntgaaaacaatctttgctactggtaatca

SEQ ID NO: 291922 - DNA, 393 bp, Glycine max
  unsure (1)..(393): unsure at all n locations
agcttatgctcttatttccttacaaacgttctcttgcaccagacatttaaccgaaaaaatgcacccatatacaatcaaggcagcttcgttacctagattatttacacgtacctccaaggtgtatttgttacttacatcacacacatctccttggctaaattcacatacatgcatactcaaagcattttggggcaccaaaaattgcacatgtgcacatcttggcatttctaatacctatacatacgcaaacttcatgatgaatcttgactatctacacaataaggtgctacatttcatgctcctttttcaagtttttgctacctaaagccgcatgcanattcaagcatattttcctttgctgactaaaattgtattcaaattaaaaggtatatt

SEQ ID NO: 291923 - DNA, 417 bp, Glycine max
  unsure (1)..(417): unsure at all n locations
tgccgccacggagtnttccgactatgctcttatgtggtgtaacaagcttcaaaaggagagagcaagaaatgaagagccaatggttgatacatggacggagatgaaaaagatcatgaagaagcggtatgtgccggctagttactcaagggacttgaaattcaagctccaaaaactaacccaaggcaacaagggggttgaggagtatttcaaggaaatggatgtgctcatgattcaagcaaatattgaagaagatgaggaagtaactatggctcgatttcttaatggtttgactaatgatatccgtgatattgttgagctgcaggagtttgttgaaatggatgatttgcttcacaaagcaatccaagtggagcaacaattaaaaaggaagggagtggctaagaggagttttaccaactt

SEQ ID NO: 291924 - DNA, 377 bp, Glycine max
agctttcttcttcaaaagctctgcaatttcagaattcaatttttgatccacttgcaacagcctgtctaatgcaagaaaagcagctgtgacccattttggaacctgttctttctccctgttaccaagactagaatcccattggtagagtagatctgaggcaatttttatgaaaccactctttgaagcagcttctcgcgcaacagcatcctcattaagaatcaatgcaagaacatgaaatagagcagcaagcatggtattatttccgttaccagaaatcaatccacattccttgatccggtcaacaataaaagtgagaacattagatctattttgaccatcattctgagagcatatcatcatgagcaagtcacggacag

SEQ ID NO: 291925 - DNA, 429 bp, Glycine max
  unsure (1)..(429): unsure at all n locations
gcagggaattggtgatttgaaagcacctggtattgttggttatggttcaaaatttttcaaaaatagctggcatatagtaaagaaagattttattgctgcagtgaatgaatttttcgagaaaggatctttattaaaggattttaatactactcttgtgactctcattcctaaatctattactgctaagactgtcaaggattacaggcctattgcagtttgctctactttttataaagtgatctaaaattttttgactaggaggctagggatagtgatacaggatattgttcatactagccaagcaacttttgtacccggtcaagtcattcacaatcatattctccttgcaactgagttgatgaaggggtataccagaaagggtgggacccctacgtgtatgatgcanatagacctccaaaaagcttatga

SEQ ID NO: 291926 - DNA, 391 bp, Glycine max
agtcttgtggttatttatgtactgtctaggattcacaaattgatgtggcaagtgacgtgacattaaaatatgcacgtcaaccctggtacaggaacatggataccactcgcttagcaactgagtcattgggctaataagttgttaatatatttgaactttaatgataatgtcattgtcctcttatcaaattgcaggtacccacttatttcgtagcaatgaattatctatagggttgctacgctactataataagctcaacaatcatagaccttgggctcccatccgactttgtaaataattaggctctaccttcatttttcatttattctcaactcactcacataataaagttccatccaacataaattgtaataaaaagtaataaaataaa

SEQ ID NO: 291927 - DNA, 382 bp, Glycine max
  unsure (1)..(382): unsure at all n locations
accttgaagacctttgctatatatcnttgcattcactgctgcctttgccaggcagaattcgccaaggactaaccgactaattgtttttgtgtcgctattctccctattacagaagaacanaggactaaccacctaaactcttttgtgtctcccttctcccttggcacagaattcaaaacgacacaaactgaaagttctttagattcttcccattcccttatacaaaagtgttcacaggactaaccgcctgagaattcttttgtatccccattcacaaagtatcacaggttcaaccgcctgagatctttgtcttaacacattggagggtacatcctttgtggtacatgcagagggaacatctacttgtgtttgactgacaaca

SEQ ID NO: 291928 - DNA, 389 bp, Glycine max
  unsure (1)..(389): unsure at all n locations
agcttgtgcaaatcatttcactcctacatttcatctctagcatgcattttctttctttacccactcctcacgtttggttttttagggaaaaacaccataactaaacgcgccgcaagggatccctatcgcaccagatccaaatctagaacgatgggtgatcaagaggagacgcaggaacagatgaaagccgacatgtcggctctgaaagaacaaatggcctccatgatggaggccatgttaggtatgaagcagctcatggagaagaacgcggcctctgccgccgctgtcagttcggctgccgaagcagacccgactcccttggcaactacgcaccatcctccctcaaacatagtaggacggngaagggacacactgnggcacgatggcag

SEQ ID NO: 291929 - DNA, 437 bp, Glycine max
  unsure (1)..(437): unsure at all n locations
tgagctctgtgtaatcgattacactaatttgataatcgattacttgtgatagtttctgaacaaaatcaaaagatgtaactcttccaatagttttcaagtttttcttaaagttgtaacatttccaaatggtttttaagtttttctaaaggttataactcttctaatggttctcttgaccacacatgaagagtctataaaagacccactttgatttgcatttaaaattattcattcaacaattcttttgacaacaacttttccactttgatttctaaatctctttgaacttcttcttcttccttttgccaaaagctttccaaagttttctggttttccaaaccttgaaaactgtgttattcatctttttcattcccttctccctttgccaaaaagaattcgccaaggactaaccacctgaattctttntgtgtctctct

SEQ ID NO: 291930 - DNA, 387 bp, Glycine max
tcaagcttgctgagattcattctgataaagcagaatgtactcaagcatagtacataagaaagcataatataacaacctaggaaacacagattcagtatgggatacaaatatgatatgacatgacaagaacaagacaatatggcacattttaaaagttatacagatatgatatgtatctaaattctaacatggctacatgacatgaccactgattccaagtgtatgtacttcttagttaaaaactatgaaagggaaggtgtttatcacagatatgtggcactaagagatatacaaacgtaatgagctatcaatccaaatgagtataacggtcatataatttggctctaccccaaaccaaagctggatagccgagtattttaatgaata

SEQ ID NO: 291931 - DNA, 478 bp, Glycine max
  unsure (1)..(478): unsure at all n locations
caccgctaaaattgataccttgtgataccnttgcataccgcgacctatgaatactcaagctgctggcaccaaggatcctagattgttacaatattcgaagngggaaaggcagtgtcctgagaacaatacaacatcaagtgagagcatttggaatgatctgggaagatgcgtccgttggcgctatacttaaacatagccgtcgaggtaaagcggcttcacgatcctgccatcgagctattcttctttcagcaccccctctcttggacttgcacccgctgatgatgctgctgtgatctactccgccacgcacacccgaaccctgttgaatgcactttcgtcatcaaagacatgtgatgcttacgttgcctacatctgcacatgacaaccattgtacctcaagaacgcatccatgtggcccccataacttgggaatcatggccaattatggagtgatgcgagaactgacacttgagatctg

SEQ ID NO: 291932 - DNA, 217 bp, Glycine max
gagcaatgcatgattagccgtgagctagattcatgccactgggaccaatggaaactggtatgccctatctgctccgaatggctgctcaaaggacatgaatgttgggctcctcaggctttcacaaggcaccgatgaggttgaagagtatcattatgaataggatgagctcttgactctctcgcatcttgcacatgatgaagacgtttcgatgggtatg

SEQ ID NO: 291933 - DNA, 369 bp, Glycine max
tctagttttgaacccttcaacagcagaagatcttcttacttgtccttgttcgtcaaggcaatcacaaactttggcggccacaccggcggagccacgtcaccactgccggacggcgagccaccacccttcttgctttcgtgcgcggtgtctgatgagaccacagacttgatgttattattgtcattaaggtggttgttatgggtccccttcttatagtgcgcacccctgtccggtgaggcaattcccctaacactcccgttgctttggcctcctctcataccacttgaagtctccgaattcctaagtaagatgaatgatataaatatagacaacgaaagcttaacccacatatgactattatcccatatg

SEQ ID NO: 291934 - DNA, 422 bp, Glycine max
  unsure (1)..(422): unsure at all n locations
ggtgtttataggagccaaagnnaaagtagtgataggttagaaactaaaaataggcaaaatgttgtcagaactaaaatgtaaaaatatgtagattgataagaactaaaaataaattgtacgaatcaaatggagaaaaagcatataaaagcacgaacatatttaagtctaatgttaaggaatgatgatccaaggtgcattaagagcggaatgcacacgtagcggacatggctttgtaatttttttttaggaacgagcgcgagttatacacattggtacatttgatgtccctatggtagaatattgtgttgtatcatttaatgagccaaccaataatcgaagaacataacaacaggataaatggagaagatgatgggacaatactcgtacgtgtttaaagactcacttgatttgatatgttgact

SEQ ID NO: 291935 - DNA, 381 bp, Glycine max
  unsure (1)..(381): unsure at all n locations
tcaagtttgtggaacatcgatagggtgtgggtatagggggacacgttgaattgcacccgccagtcatgggaacaaccgtcgctacccatcatgcggcggaggtgcttgctagtgcggagggcctgtgccatgccttgcgccattgactgaatgttatggtcgggtatggtggtgtacgccactgtgtcttggttcccctgtgactttccatgccgcattaatattcttctctttggaagcacaccaaccatatcttctcttctctttacattcattttctttcaccctcacaattctaatcttttttatccacacataaaattntgacaataaaagaatatttatacactttcctttgcgcatgatggttgattcctatat

SEQ ID NO: 291936 - DNA, 427 bp, Glycine max
  unsure (1)..(427): unsure at all n locations
tcgctggcacatcatcttacatgtgtatggatgtaatttctctgcgctaagcaatggtaaatatatcttaggtaacctacatgctgaagctactgatgcgttattcgcttgngctattccttgaactaaagatacaatagagttgagccatctatcattctcctgcaccaatatatacttactactgcgcatgaacatgaagtcctaggttgtctacattatgtatgtgatattggtccctacttaaataacgtgggtgaaccattacatgacatgctaaagaaaactccgactccttgtaccgacattcatacccaagccatgagatatatcatttgcgaccccaactcatactgtgtacgtgtcttcccattccacaagcattcatgattgttgatacggatgcatcggacatgagttatggcgg

SEQ ID NO: 291937 - DNA, 380 bp, Glycine max
agcttatgcgcatatttccctacgaatgttcacttgcacaagacatcctattaactaagaaaaatgcacccatatacaatcaaggtagcttcattacctagattatttacatgtacttccaaggtgtatttgttatttacatcacacacgcctccttggctaaatttacatacatgcatactcaaagcatttcggggtaccaaaaattgcacacgcgctcatcttggtatttctaatacctatacatatacgaacttcatgatgaatcttgactacctacgcaataaggtgctacctttcatgctttttttttcaagtttttgctacctaaagccacatgcaaattcaagcatattctcctttgctgactaaaatcgtat

SEQ ID NO: 291938 - DNA, 426 bp, Glycine max
  unsure (1)..(426): unsure at all n locations
agcctgatgatgatgaatcaagttgattcttgtnattttgatgatgacaaaaaccgaagagtgatttcaagattcagtcaacaagttcaagatcaagataaatttcaagtttcatgagaagaaatcaaaaagattaaagaatcaagagaagtttgatttcaagattcaagagaagaaatcaataagacttcacaagggaagtattgaaaagatttttcaaaaaacaaacatagcacatttttgtttttcaaaagagtttttctcaaaattttctaagtgaccaaagtttttactctctggtaattgattaccagtttcctataatcgattaccagtggcaaagtttgatttcaaaagcttttaattgaatttgcaatgttccaattgatttcaaaatggtgtaatcgattacaagatattggtaat

SEQ ID NO: 291939 - DNA, 192 bp, Glycine max
cctgcacgcattcgagtttatactgatggtggcacaccaggattgcagactcatacaaacattatcttcaacgacggcctaattacatattataagacgaatgcgaactctcagaaaaacggacgtggtcttgtgcatacctcatataatcacaaatgcgatacctggatgcataagttaaactttatacga

SEQ ID NO: 291940 - DNA, 392 bp, Glycine max
ttttatgcatggtttcctagattctgaacgacgcttgttatgcaattatattcttatatacgcgacctaaccacgtatgccataatgctcctgagttcgtataatggctgtacagcttagaccaaggacttccgcattaggcgatgacccgtaacaggctacgctatcaaagtaactattgattatcattagccaagacagtttcagccatatctgactttaaagacaacctaatcacattatttccgaatgagcatagatagtccaatatggccgagtgagaaattgaaaccatacgccggcggaacgaagatacgacaaaaggtctgtcttattagcaaaaagcctgtcatactattgtctaaatgcctatactgtcacgattaccactc

SEQ ID NO: 291941 - DNA, 368 bp, Glycine max
taagcttgaagctcaaggaaaaacttgaagaagttttggcttttacatgtctaactcccttgagtggcatttgtattggttgttatattggttgttgcttcttagtacatctgatatatgtattgcattctgcatcatcatgctttgtgtgaagaaaaatttctaagttagaaaaatttattcaaaggcaaaaactctttgttttaatccattatagagttgctgtaaacgattacaacaagttatcttaagcatgtagagtgtagtctcgtatcagcttaattgattactgatatcttgtaatcgattacactgttgtttgagacaatcactacattattcagaagtctatgctttaattaattacc

SEQ ID NO: 291942 - DNA, 392 bp, Glycine max
  unsure (1)..(392): unsure at all n locations
gttttgttccaatttgatattcccaagcatctagggctacaaaaacttcctagtattcatcaaccaatccattgagagtgttaatgagaaggtctacatcatcaagtggtgagttgatcatggctagttcatcacataatgaattaattccatgtatacttttagtcatggagcgagagcatttggtgaactacgtgaagcgctctctgaggtacatgattctaacccttgcttttttggcatacattttgtaacaaccccaaatgctatttgatgcaatcctaccctccaaggatattggatagaagactccaagaggattgtgctacagcggntaaagaatgtcctagggttctcatgaaccttanggtagatttctgagcccatggacc

SEQ ID NO: 291943 - DNA, 386 bp, Glycine max
  unsure (1)..(386): unsure at all n locations
agcttgttgatattgccatgtttgaatgagttaaacatacccattctgttttagggtttttgtgatgatgttggtgatgtttacatgctgaaattgctgatggaaatctgttagagacgaagggtagaactaacctaaggttagaaagtgagaatgtgatgttatgagtggaaaaagagtgagactttgagagttggaaggctaagtctgaattctgtggtaaatggggggttaaagtgagttaatactagcttgaaatgtcgtttaagacatgtgagaaaggttaggctgagctagagagaaaaacaaatgaccaaagtgaaccaagagccatttctagggcaaaattgngtgttgaagagtcanatcttgatttggtggaattt

SEQ ID NO: 291944 - DNA, 450 bp, Glycine max
  unsure (1)..(450): unsure at all n locations
atacaatacttaagcttgtgtcgcactgtctactgctgaagctaaatatatagctgcaggaagttgttgtgctcaaagtctctggatgaagcaacaacttgaagactttggagtaaaccttgatcacattcctctaaaatgtgacaacacaagtgcgatcaacctaaaaaaaaaccttgtcatgcattctaggactaaacacatagagataaggcattattttcttagaaatcatgtgttaaaaggtgattgttgtattgagttcattgatagtgagcatcaactagcagatattttcactaaacctcttgctagagataggttctttttcattagaaatgaactaggcatattagatgcatctagcatagaatgatattttgtttgcacagtgtgtgtgattgacattgctactcatataatttctttntgtttagtttgtgtcacaag

SEQ ID NO: 291945 - DNA, 389 bp, Glycine max
agctttattttcatatccctcttgtaagactagacctagactaatcaacattactgtgacaacacaattaaaaccaaacctaaatccgcagatcctactctgaagattaagtatcgatactgctacaatcaagttctaaagcaacagtaacattcccaatgctaaagacacctaactatgcacacaaatggatgatcagaccaaaagcatacaaacattaagcattgaaggaacattgaatactaaaaacatagatcaattagatatcagggatctacatcagtgcgtcatttgaaaaccccaactagcgcgttgtgccggccataacaaagaaacccaaacattaataatcttacaaaacctagggtgcaacgcacaagctacacctc

SEQ ID NO: 291946 - DNA, 412 bp, Glycine max
  unsure (1)..(412): unsure at all n locations
agtaatgacccattaacctaatttaaatacttttgccattaacctagggaattaaaaaaaacttaatggctgagtgtaactgaaattgtggcaaccaaaggtcacccccaacagccaacaagtcagccaccatttggtctcccaaaaggctgatgcctaagttgccaattgggcccttattacaacttgaactaaacctactaaagcccttttagttgattaacccaaaacatatttttggtcagccaactttataaggattggaccattatttagacaaactaaacactctaaaattgagacaaagtgctgccatttagtcctcctccatttgggccatgatacaactcacaaccttggacttttctccttgaaacttgngcttgtattcaaatagtatggacaacacttg

SEQ ID NO: 291947 - DNA, 366 bp, Glycine max
tgaacgagtgcttcaccaaatgctcatttgaatagcagtatgtgaatagatttttttccccaaccttgtctatatgttacatggtgactgatgacatattcaaattatacagctatgacttggacagtaccaaagaagaaagagatgctatatgaactcagaataggtaaacatatatataggatccacaaattcatgctcgatccatcatgtgtctccagcaattacaacttaattcgtgtgtacttccctctacagtttgacgagtgagcataatgatgctctgatgcaaaagccttaacagcatagaggagtatgagaaactccgcacacaatgccggcaactactaaagcacaacaatggga

SEQ ID NO: 291948 - DNA, 386 bp, Glycine max
agctaatgcttaactatgtatgacaaaactgcattactgttgttcaagacatacaagtgagcttgtaacaaatcttctacacttggagtgatcacctgcagtcctcttgaacccttaccacccactttgtcataatgccgagactcatgaagcccaacaggtttagccttctctaagtattctgaacaaaattcaatggcttcttctgcaatgtacctctcaacaatagatgcttctagacgatatagattctttgtatacccttttaagatcttcatgtatcgctcaactgggtacatccaccgttgataaacaggaccacaacatttgatttctctgaccagatgcacaatcaagtgaatcatgatgtcaacgaaagcaggggg

SEQ ID NO: 291949 - DNA, 373 bp, Glycine max
  unsure (1)..(373): unsure at all n locations
taaatgtaaaaaaatattgagggtttccctacattaataattatggaaaaccaacaggaacttgagatttatgggtctcacatacactctataaagaataatagataattatcgtgtaccttttctccaataggaatcttgctctgggtgcactctgaagaattgagagaatatagcgatttccactttcctcttggccctttcttttcttgtctctcttacgntcgtgatggctatgtggtgagaaaagagcactttttggtcaagaacgggaccttatctcacattagcgggtattaagccccttttataaccactactctcatcaagtagcagttaatctacaaacttctcctattaagtccaattacaa

SEQ ID NO: 291950 - DNA, 220 bp, Glycine max
gaacaacccgcaacccacgcgacatccacccacccacaaagcgcaaagaaacggaaagaaacgcgtacacgcgcaacaaaacccacaaacgaacacaactgagaagacaccacccgcaaaaaaccacaccacatccgggaaaccccgccaagaagaacaaagccgccacagaccaaccaacacgagagcaaaaccagagcggcgcctcaaaaaaaccccc

SEQ ID NO: 291951 - DNA, 352 bp, Glycine max
  unsure (1)..(352): unsure at all n locations
agctttggaaagngacgattatcaccatctcgctaagccaaactgctggcttaacgagcgtacgctaagcgcaacactactgagctaagtgcgaggaagactctggaagaagatgagcaatacagggtcgctaagcacaccgctgaatcaactaagcgcaccgcttaaagacatctgctaagcgagaaaggcgcgctaagcacaaaaaacactaatgtgcgctaagcggtccataagtgcgcatagcgcacgagcactaacaaggccacctattcaagcctgaaaacagaactttcgaagagagtctggactaagattcagagcttagcatgtctaagggttccagagagag

SEQ ID NO: 291952 - DNA, 480 bp, Glycine max
  unsure (1)..(480): unsure at all n locations
attgaaacctttgtttgagaccntcagcaanntcagcgactttgatacctttgtaaaacccccganaangatcctggaacagggctctaaagtagtcctagcctgcacctaagagttactaagaggtccatgacattaagaagatgcttcggtggccgaatctgaagaaaatacgcaatgagttcgccttgttgcctagggatcacaaagctaagatagagcaccagaagcctcccgggaagttgcaacctttacagataccttgtgtggaagtgggataacatctccatggattttcgaggtgggattacctacgacccccaaaggtttaaattccatttggggtattgtagacaggttgacgaaatctactcacttcatcccgaataacatcagatatcccttaaagaggttgactagcttgtatgccactgagatagctaaactacctggtgctacttctatcatagatattgaaag

SEQ ID NO: 291953 - DNA, 534 bp, Glycine max
  unsure (1)..(534): unsure at all n locations
acccgcaacacacaccacaaaccgccataccgcacagcacggagaaaaataanacanaaacannnacaaggaggaaatggagcgatgaanacccacancaanggcgaanacgcacccggacccgaggagccaccacaggcacgccgccgcatatcagctcaacaaaacnaaaanagccggcaccagagcagctgccaacggcaccccaacccacacgggacaaggcccacaacaggaaacgaagaaaaccccacggagcaccgcacacaccaaacgggcaacaggagcaaaacacgagaacccgaacaagacgagcacgacacagacccgctgccaacgaacaaagggcgccacacgacgcgaaacaacagcacacaaaacccgcagacaagaccgacacggaagacgcaccacaaggcacggccaccaacacccaaacagcgacagaccccaacgcaccgcacgaccaccacacgaaacctaccggagcacaacccanagagagacccacgaacgaacccccacacgcgcgcn

SEQ ID NO: 291954 - DNA, 272 bp, Glycine max
attgaacaacctttattcacacctttcaaagttagtgagaatgctaaaagaaaaatttaggaacttagaataactaactccttaattgaatgcgtaggtgacaaccatagtgaattactaaacaagattggttgttgacttaaagtcattccagataccccccaagcctcggaaaatacttcctaaatggtaactagaagtacctcctaattaatcaatatcattaatgaagatagggaccagaactcagataacacaactgagataggatc

SEQ ID NO: 291955 - DNA, 349 bp, Glycine max
ggcgaaacgacccggacccgcgcacacctacaacgaccgcacgcattcagctacgagaggaggctcacaaccacacgcggggcatgacgaggtacgactctgcccggaccgcaacaaggagaaaggcgcggaacatgcgcaccaccacgaccactctcacacacaacgggacgacgcagctgcgtaccacacatcgcccaagcgaccacaactcggacctcaccccaccaaagtgtcagccggccgacaccataccgacacacgtgagacgacaagcggctcagcagaacactgacgctacataccaacctgcagggatagtgcgaaccagacacccggcggacccgga

SEQ ID NO: 291956 - DNA, 416 bp, Glycine max
atgcaaacaatagaatccacatgttggagaattttcttgaaaacctcgggggtgttcttaaagcgcgatttgcagaagatccacaaattaatcaagtcttagaaactatagatcaggaggtatgaatttataattcaacttattcaacgatttaactatgatatgatactttacaaagaaaaaacattcttttaatttaggtacctacaaatggttctactagtaaaaatcatcaaactacaaacaatctcaactagaggtgagttgaaatttaataattaatatgttgacaataccatttttgttagcatatggtataacttgtagtgtatccgtactatctatgtatgtagtaagtcgacatttaataattaatatgttgaaatttttgctatttgaggaacatgatttagatg

SEQ ID NO: 291957 - DNA, 356 bp, Glycine max
  unsure (1)..(356): unsure at all n locations
tcaagcttgtaattgncnaaggcnaagtgtatttgggtagacattttatgcagatccaaattgatagtatgatgactatagagaatgaatgataatcaacttattggtctgctgtgatgatatgcaacctactgcatacattggtgtggcaacccgccaatgtatagggaaccatagtgaaggcaccatgggtggtgattcagagtttagctgctgaaatacctaattataggctaaagcaagatgcaatgtattgaattattatttgagagtctgccaatgtaaggggaaatagagtgaagccactacagacatgtttcttaagggagtagcactgttgtgaatcttacattgag

SEQ ID NO: 291958 - DNA, 349 bp, Glycine max
catctactatgaagtgagcgatgacgttcttctatggtccattatccacttctgcatgaacataggcctagagaagcaaacgaatacagagttgaatacaaaccgaggcctacttgctgcccttggggcgacatacttatgtttccctgacacttatacaactatatgtgtatagtatgaccttttgagggtgacataagatgcgtgcagaccactcttttgatcgaggaattctggtaagaagacttctttatcctgtaggcgactagtaatccctaactaatgcgtgatgggtctatgtgcacagccgcatgtctatgagatggcatgcacatattcaccgtgggac

SEQ ID NO: 291959 - DNA, 265 bp, Glycine max
ttgcatgcaagcttgtgacactttcttcaggactagatccccctcgctgaacttgtgcgggcgcaccttggcgaaaacattctttactcggcatagatacaatcgttcatggctcatggcagccaacctcttaccttctataagaatcaacttatcacagcgagattgtgatatgaatcctcatggcacaagggctgactcaagatcgtctacgattaaaacttgatggagaacgcggacattgatcaacgaaaggacggaaaat

SEQ ID NO: 291960 - DNA, 399 bp, Glycine max
  unsure (1)..(399): unsure at all n locations
tattatagttctttatttattgaggatcataaaaagtttaagtcatgtatgagagacataacaacttccttcttgaacaaaagttgagagaggaaatgttgataaaactcttttcattaaaaagtcctctcataacattttacttgtgcaagtttatatggatgacatcatttttggttccactaacaaatctctttgtgaagattttgtgcacaagatgtagggggagtttgaaatgttaatgatgtgggagttaaattactttcttggtctccaagtgaagctagtggaccatggaacatttctctatgaagtaaaatactacaaggaacttttcanacagtttgagatggacnatagcaaggaggctacaactcatatagctactaattgctacct

SEQ ID NO: 291961 - DNA, 314 bp, Glycine max
tttgtattctagcttatcatccagccccttctaggacgcgcccactctttctgatgggttcctgacactgttgaagtctcccagctagcaccataggccacctaacttaggcttttcagctgctctgaccgagccccagagagctctcttgttatgaacatcacatggagcatatatgtctactatgtgaaccttctgagcctagtgagtcaatactccttccacaataataacccccctgccagtaaccttattttccactttgaaagtgttcttactccataagcacagcagtccacctgatgatttgatgc

SEQ ID NO: 291962 - DNA, 494 bp, Glycine max
  unsure (1)..(494): unsure at all n locations
agagcgcgaacatttgaaacccttgtggaaacccctggananccanattttgaaaccttagnaanaccngngacactannagaaacnccagcttcttcaannagccttcagccggcacccgacagcggtgttacgaaccnccacactctaatcgcacataaccgaggacaatactcacaaacccccgacaaaccgaaaatgtgtgaagcccagggagctcaaacaccccgagtttggtcctaataaaccgaaatctggcagaagagaggggctttgcgagaagaactgcccaccgaccctgagctggtatgtgacccacagagattggtgcttagaacattttcccttacaaagaagagattgatctccaaatcgctgaattttccctatgaacaataggtttatgtgctcgtgccataacgctttgattatcacagagaatgagaggcttgggaagaggaacaccaagttcttgaaagaacgcttgaagcccg

SEQ ID NO: 291963 - DNA, 391 bp, Glycine max
  unsure (1)..(391): unsure at all n locations
agcttgaggattgtgtaccttccagattggatggttatcgttttcaatgacttagtctctacgcatttcgtccttgggggttgtgtaccctttgggttggatcattcccaatccatagcttagcccttccgattcgtgccttgagtcgaaccttgcctcatcatatctatgtctaatctaattatctctagaggcctaaacgcaccataaaatcgtcatagacacaattaatcacacctcgagaatcttgagatatgggagaatattttgaaatgtcataatgcattgactcatgaatataagagaggatacacatagtaaatgatgataaatagtcatctctttgacctaagaagacaagtngagcaatacaatttgcttgagtactctg

SEQ ID NO: 291964 - DNA, 418 bp, Glycine max
  unsure (1)..(418): unsure at all n locations
ataaaataggggatggaatagcaatgtccgaaatgtcaaaactatatcaactaattagaaccagatctgtgtatgttacttttgggctgtaaagactaattaaggatacagggatgttgcttcctgcacttcccaagttgcttcctgtactccttcaggaatatttttttgaccttctgggttggtcattccataagacaaaaagagaatgcattcaagaaagtaattatacatttcggattgatcgttctgaaaagtgaaaagggagtgcaggaaacaactaggaaatgcaggaagcaaagtcctaattaatggagcactagaagaagaagttcggcctaagaaaaaaaatggtgtatggacccgtaaccatgtgctcantttggttctacaacctctgatcctttcttttacattt

SEQ ID NO: 291965 - DNA, 386 bp, Glycine max
  unsure (1)..(386): unsure at all n locations
agcttatgtcactacaaccaaatcttgccttcaagttcaccaaagctaacaccctcgataatcgtgtgaaggttgtgcatcccatatacaatggcttcttagaatcaatttctaatttttcataataaggtgcatgtgcttgtctaaaaccctcttgcccaagatcgcgtagtatgtcttctgtacggtctcgcacttggacatgaactgcctcagtcggagggactgttgttgtctgtggtaactcaccatgccatatccattntgtataagtaggactgatactgtcacatataagatgtgctctaatgtcattcaatgactgtagtctcatgttcagacatttaacacatggacacagatactctccacccatttctcctgca

SEQ ID NO: 291966 - DNA, 418 bp, Glycine max
  unsure (1)..(418): unsure at all n locations
tgagacttcaaagaaggacaacaagnntgttttaattattgctgaggctntttcttggtatgttaaaatctaaatgggtaggacctttcataataaaaagggtgaagccttatggagaaatggagattgaagatccttccaatcaaagaagttggatagtaaatggtcaaaggctgaaaccatatcttggtggagaatttgcttggggaatccttgatcttccttaactgtcaacctagtgatgttaaataagtgcttatgggaggcaacctaatcttctctcttttctcctttatttttttgttagttaattgcttggtggaagaaggtaagtataagacttgtgataactgtagcaggggttaaaaattgctatggcgaattagttgcaggtcttttgcaataccattcattgcag

SEQ ID NO: 291967 - DNA, 387 bp, Glycine max
  unsure (1)..(387): unsure at all n locations
agcttctatataagctgaaccattttatcaataaacacaagttgagttttattcagaaaattagagtttatctcttttatcttagtgagagtgattctcctaaattcttgagtgattcaagaacaccctggctgtatcaaaggacattcacaacctttgtgtgttgccctcgctggaaagagtgattctttccttcctttcatcttcacccttgttctttcaaaccacaattccagaaaattcacctctgcccagaattatctcgtggccacaactcccattttacgcactcaaattaagtgattcttgagcctaaattgactttcaaaaggagagctntcacctcgttttggaatcacctgatttggagccctgtagcttcagtta

SEQ ID NO: 291968 - DNA, 550 bp, Glycine max
  unsure (1)..(550): unsure at all n locations
agagagatcaaatttgatacgctagtagataccttacgatatacaatactcattgctttacatgcagatntntagtaattgaaccccactaacctagatattataaataactttaattgccattaacncttagggtaattataaaaganaaacttatatgngctcgtagtgtacactctgaaatntggtggcanactcataaatgtcaaccccctcaacaatgccaacaaangtcaggcccaccaattttggctcttcccaataagggcttgatgcactagtgtttgccaaattggcgccctttatttacaaccttgaaactaaaacctcaactaaaagccctttttagttagattaaacccaaaacaaatatttttggtcaagccaactttacaagtgatttgtgccattatttagacaaaactaaacactctaaaattgagacaaagtggtgtcattaagtcctctcatttgggccatgatacaactcacaaccttggacttttctccttgaaacttggcttgtattcaaatattatggacagcactt

SEQ ID NO: 291969 - DNA, 366 bp, Glycine max
agtttctatttgttcctgtagaaaactgatctgatatgtgaatccaatagaagctcacggctgctctgctccgcgactccaatatagcatgctattgactactatgcacatatacttaaccaaaacaagattgtaaatatcatcccctcacgatgcttacgagaaacttggtgtgtatttcataaagactcaaactttataacaacatcacaaacccggcagacaggttgatcaaattcattatacctgtatgtataggcacataaaggcagaaacagtcgaaataataacagatacaacattatgccaataagaagggaataattttacgttaaacacacatcattcatctagataacagataat

SEQ ID NO: 291970 - DNA, 410 bp, Glycine max
agatccataacttcaagcactgacgttgtgcaaggtttgtggaatgcgccctggcaacttgcggcgagacaagttgagaatctgaatcgaacttgcattgcaaattgaggaagagaagccaccagtgatcgagttaaaactaagatcaaggtaagcgagttgttggttccaggagaattggtccaatgattgcgtcaataggttatgagagaggtccaattcagataaccatgagctcgcttcatgcaaccaattgggcactctacctttaagtttgttgttggacaaatggagtgatttcaaaaatgggatttttcctgataattttggaaattcagttaaatccatagaagataagtccaatctccataataggcgggagagattatactcgacattggatttgaatt

SEQ ID NO: 291971 - DNA, 321 bp, Glycine max
gacccccaaggagcctcgtacagaaagcctcggcgaggggattcatgagacaactaaaacataccactggattgccatggcaattatgtggtgcgtctctgcatgtcctaatgcgcttgctgtctagggataaatgcaagcccctatgactatatactggaccagggcattgggagctgacccgctgcgaaacttgttggccaccctcagactcgccctgcttatagtataacacaccacatatgatgacgagccatatagctcgagacgagcccaaacgatgacatatatgccctgcgggcacactagagactgagcatg

SEQ ID NO: 291972 - DNA, 357 bp, Glycine max
caacccaccatcttgtcgtaatagaacacctgtcatgcgtccattatcattgttatcatctccctttccatcattgggggcgctacttgaactgccagatcccttcacctgtgggcgtattctatgctcatgtctctaaacaaatgaatgtctcaccaaccaaactaacataaaatggaaaattccgaatctcttttttactctaaaaattataatggacgtctactgcattaagtacaagggaaaaatcacattggattccagagaaagccttaacaggaacacaattctaacttatgagattcaatacacataacgggcaaaagctctacaactataatacattaacatctcata

SEQ ID NO: 291973 - DNA, 328 bp, Glycine max
  unsure (1)..(328): unsure at all n locations
gaaacacnngggctgccagatccctccacctttgggcgtattctttgaaagacctgtgcccacattctgcacatgttctgatattgcatcctatccgaagccattatactgacactgcctaacgaaggcaaccattaggtccttccaagaatggactcgggaaggttccaagttagtgtaccacgtaatagctaccacagtaagactctcttggaaggaatgtatcagcaattcctcatcttttgcgtatgcccccatcttccgataatacatctttagatggttcttgggcaagtagtccccttgtacttgtcaaagtccagcacct

SEQ ID NO: 291974 - DNA, 377 bp, Glycine max
ttcccatgcgacatatggacataaaatacgacttagcatttggacaagggagccgctgctctcatcctctacaaagctatcctcacccttttcattttggaaaacgagaagaagataacgcgatctggaacatcccatttccctcatagattaagtcaaaaaaagccgatacagggacataaacaagccttacgataagggctccgcaattaaataaacaaagacaactaagtgtattaaaataatagactgataaaaaaaatacagacgatatttcatctattcatctgatagagaataaaccagagctcgcttcataaaaaataaaaaccaaccaataatatgcgcgagcaccctaagataaaaacacgaaagcg

SEQ ID NO: 291975 - DNA, 433 bp, Glycine max
  unsure (1)..(433): unsure at all n locations
acactatgaaactaagcttgtaaagcccctttaatgcatcttttcngcattttttgaggtgttccccacatttgttgctcaatggtttacaattccgtgcacgtctatcaaaacttgttttgtagcacttgcatataaatattgaagagcaatgttatatcttttcactattcttctcaatgttttatgaaaatgatgttaaatgacatagtaaataatgtcatgttttgacatttttaaaagctttcaatactttttgttatcgtctaataagtaaaaaagatttagaattatttttaaaaaaatctctgtccaatgataaagagtataaaggtaaataaaataagcatgtaattgctaataaaaagttaataataaagaaatgcgantaaaataagtttatacacaatanaatttaaaattattataattt

SEQ ID NO: 291976 - DNA, 379 bp, Glycine max
agcttctagattttcgatatgaaaacatgtagtttcatgttctcttcaattaacgcataatacattttactactttctagtgttgcataccaagattactcaaatatcaccttaggactcccacaaaaatttagtttaggacaataaaaaaataaacttaagcatacatgataaattgtaatataactattttgcaacaataagtcgtatgatgatagtaggatgtcatcgacatataatacaaaaataataaatttactctcattgaacttttagtacacacaatcatcaaccaaatttatctcaacaccataagagataatctagatgaatttttaataccatagacgagagacttgtttaaagcataaatgaattt

SEQ ID NO: 291977 - DNA, 424 bp, Glycine max
gctcgcatcatgttgctggacaatcatgtatgtcaagtctatgtaacccttttgtttttgttttggctatgctggtttgcagtaagaaggcgatcaaacgagtccggtgccggctcaggctactcaagaacaagaggcaggcaatagcaaggcaactgagaaatgacttggttgagctaatacaaagtggccatgaagaaactgcatttaaccaggtttgttagttaatgctacatactcatttgttaaccactgtttgcataagtatattccttcatgctctgtttttgcttcttttctacttttcctttccattaagtatgagtatagggagatggctttacataaacaaagttgccgccactacatactgcccccattttatcgcatagactgcccactaaaccttttctatttctatacg

SEQ ID NO: 291978 - DNA, 373 bp, Glycine max
agcttaatttgttaggctcgtatcagtttaatcaattatggtagtactttaattgataacactgttgtttgagataatgactgattttttcacgagtatctattttaatcaattaccacatgtattaattaattacttctctattatttaagttgttctcaggtgaacatgaagactttaatcgattaattaggtcatctaatcgattcaagagttaagtctcgtatcagtttaatcgattatggaagtaatttaattgattactgatgtcccaataattattcctatttcttaaccctttttgcaccattttaagtactgattagtcttaactgtcaaattaattaggcagttttattatttgggcccattc

SEQ ID NO: 291979 - DNA, 415 bp, Glycine max
  unsure (1)..(415): unsure at all n locations
taagattctagagatcaactttatcctatatcttgattttcttggattcttgtattcttgtcttgaataaaacttagaagcacttgatcctttggcatcgtccaaacatcaaaacatcttgcttctacataggagtcattcgacttaatccatcaactaaaaatccttcaactatttctcgtccttgggaaattctttttgcaagaatcaactacttctttcattcttcctcactacgaggttgtgaaaacaagacaatgatggttacctcatagccctacactggggtaatgaaaggcaccatgcatgaacctcaagcgaacctaggggcagattagaagttctcacccaatacgttccctactacaaggtcatgacgaagaacaacgattggtacctcanagccttacactgg
